United States Patent Application Publication US 2023/0026259 A1 - sequence listing, part 20

SEQ ID NO: 92772 - protein, 396 aa, Homo sapiens; identical to SEQ ID NO: 92771
  Payload ID: 18550
  Gene Name: TRK-fused gene
  Uniprot ID: Q92734
  ENSP ID: ENSP00000417952

SEQ ID NO: 92773 - protein, 157 aa, Homo sapiens
  Payload ID: 18550
  Gene Name: TRK-fused gene
  ENSP ID: ENSP00000419504
MNGQLDLSGKLIIKAQLGEDIRRIPIHNEDITYDELVLMMQRVFRGKLLSNDEVTIKYKDEDGDLITIFDSSDLSFAIQCSRILKLTLFVNGQPRPLESSQVKYLRRELIELRNKVNRLLDSLEPPGEPGPSTNIPENDTVDGREEKSASDSSGKQS

SEQ ID NO: 92774 - protein, 128 aa, Homo sapiens
  Payload ID: 18550
  Gene Name: TRK-fused gene
  ENSP ID: ENSP00000419559
MNGQLDLSGKLIIKAQLGEDIRRIPIHNEDITYDELVLMMQRVFRGKLLSNDEVTIKYKDEDGDLITIFDSSDLSFAIQCSRILKLTLFVNGQPRPLESSQVKYLRRELIELRNKVNRLLDSLEPPGE

SEQ ID NO: 92775 - protein, 400 aa, Homo sapiens; identical to SEQ ID NO: 92770
  Payload ID: 18550
  Gene Name: TRK-fused gene
  Uniprot ID: Q92734
  ENSP ID: ENSP00000419960

SEQ ID NO: 92776 - protein, 181 aa, Homo sapiens
  Payload ID: 18550
  Gene Name: TRK-fused gene
  ENSP ID: ENSP00000420797
MNGQLDLSGKLIIKAQLGEDIRRIPIHNEDITYDELVLMMQRVFRGKLLSNDEVTIKYKDEDGDLITIFDSSDLSFAIQCSRILKLTLFVNGQPRPLESSQVKYLRRELIELRNKVNRLLDSLEPPGEPGPSTNIPENDTVDGREEKSASDSSGKQSTQVMAASMSAFDPLKNQDEINKNV

SEQ ID NO: 92777 - protein, 366 aa, Homo sapiens
  Payload ID: 18550
  Gene Name: TRK-fused gene
  ENSP ID: ENSP00000477562
MNGQLDLSGKLIIKAQLGEDIRRIPIHNEDITYDELVLMMQRVFRGKLLSNDEVTIKYKDEDGDLITIFDSSDLSFAIQCSRILKLTLFVNGQPRPLESSQVKYLRRELIELRNKVNRLLDSLEPPGEPGPSTNIPENDTVDGREEKSASDSSGKQSTQVMAASMSAFDPLKNQDEINKNVMSAFGLTDDQVSGPPSAPAEDRSGTPDSIASSSSAAHPPGVQPQQPPYTGAQTQAGQMYQQYSNRPAMVHSSRRLHLSSLNSMVFSIQQAIVSRLDLNNLSSSRDMASNQLPRHQLLPFLVSLNNCLLSRHSSTRRAIILHKLTLPKLLSLLIILWLLPLNLEWLQANLGPINQDQVLLHFLEVP

SEQ ID NO: 92778 - protein, 284 aa, Homo sapiens
  Payload ID: 18550
  Gene Name: TRK-fused gene
  Uniprot ID: Q92734
  ENSP ID: ENSP00000479269
MNGQLDLSGKLIIKAQLGEDIRRIPIHNEDITYDELVLMMQRVFRGKLLSNDEVTIKYKDEDGDLITIFDSSDLSFAIQCSRILKLTLFVNGQPRPLESSQVKYLRRELIELRNKVNRLLDSLEPPGEPGPSTNIPENDTVDGREEKSASDSSGKQSTQVMAASMSAFDPLKNQDEINKNVMSAFGLTDDQVSGPPSAPAEDRSGTPDSIASSSSAAHPPGVQPQQPPYTGAQTQAGQIEGQMYQQYQQQAGYGAQQPQAPPQQPQQYGIQYSGFQSMERFHCK

SEQ ID NO: 92779 - protein, 284 aa, Homo sapiens; identical to SEQ ID NO: 92778
  Payload ID: 18550
  Gene Name: TRK-fused gene
  Uniprot ID: Q92734
  ENSP ID: ENSP00000479981

SEQ ID NO: 92780 - protein, 421 aa, Homo sapiens
  Payload ID: 18551
  Gene Name: tRNA 5-methylaminomethyl-2-thiouridylate methyltransferase
  Uniprot ID: O75648
  ENSP ID: ENSP00000290846
MQALRHVVCALSGGVDSAVAALLLRRRGYQVTGVFMKNWDSLDEHGVCTADKDCEDAYRVCQILDIPFHQVSYVKEYWNDVFSDFLNEYEKGRTPNPDIVCNKHIKFSCFFHYAVDNLGADAIATGHYARTSLEDEEVFEQKHVKKPEGLFRNRFEVRNAVKLLQAADSFKDQTFFLSQVSQDALRRTIFPLGGLTKEFVKKIAAENRLHHVLQKKESMGMCFIGKRNFEHFLLQYLQPRPGHFISIEDNKVLGTHKGWFLYTLGQRANIGGLREPWYVVEKDSVKGDVFVAPRTDHPALYRDLLRTSRVHWIAEEPPAALVRDKMMECHFRFRHQMALVPCVLTLNQDGTVWVTAVQAVRALATGQFAVFYKGDECLGSGKILRLGPSAYTLQKGQRRAGMATESPSDSPEDGPGLSPLL

SEQ ID NO: 92781 - protein, 376 aa, Homo sapiens
  Payload ID: 18551
  Gene Name: tRNA 5-methylaminomethyl-2-thiouridylate methyltransferase
  Uniprot ID: O75648
  ENSP ID: ENSP00000370407
MQALRHVVCALSGGVDSAVAALLLRRRGYQVTGVFMKNWDSLDEHGVCTADKDCEDAYRVCQILDIPFHQVSYVKEYWNDVFSDFLNEYEKGRTPNPDIVCNKHIKFSCFFHYAVDNLGADAIATGHYARTSLEDEEVFEQKHVKKPEGLFRNRFEVRNAVKLLQAADSFKDQTFFLSQVSQDALRRTIFPLGGLTKEFVKKIAAENRLHHVLQKKESMGMCFIGKRNFEHFLLQYLQPRPGHFISIEDNKVLGTHKGWFLYTLGQRANIGGLREPWYVVEKDSVKGDVFVAPRTDHPALYRDLLRTSRVHWIAEEPPAALVRDKMMECHFRFRHQMALVCCVLQGGRVPGQREDPAAGAVCLHAPEGPAQSWDGH

SEQ ID NO: 92782 - protein, 99 aa, Homo sapiens
  Payload ID: 18551
  Gene Name: tRNA 5-methylaminomethyl-2-thiouridylate methyltransferase
  ENSP ID: ENSP00000370409
MQALRHVVCALSGGVDSAVAALLLRRRGYQVTGVFMKNWDSLDEHGVCTADKDCEDAYRVCQILDIPFHQVSYVKEYWNDVFRGRCHCHRSLCKNFPGR

SEQ ID NO: 92783 - protein, 99 aa, Homo sapiens; identical to SEQ ID NO: 92782
  Payload ID: 18551
  Gene Name: tRNA 5-methylaminomethyl-2-thiouridylate methyltransferase
  ENSP ID: ENSP00000393014

SEQ ID NO: 92784 - protein, 99 aa, Homo sapiens; identical to SEQ ID NO: 92782
  Payload ID: 18551
  Gene Name: tRNA 5-methylaminomethyl-2-thiouridylate methyltransferase
  ENSP ID: ENSP00000398488

SEQ ID NO: 92785 - protein, 166 aa, Homo sapiens
  Payload ID: 18551
  Gene Name: tRNA 5-methylaminomethyl-2-thiouridylate methyltransferase
  Uniprot ID: O75648
  ENSP ID: ENSP00000407700
MQALRHVVCALSGGVDSAVAALLLRRRGYQVTGVFMKNWDSLDEHGVCTADKDCEDAYRVCQILDIPFHQVSYVKEYWNDVFSDFLNEYEKGRTPNPDIVCNKHIKFSCFFHYAVDNLGADAIATGHYARTSLEDEEVFEQKHVKKPEGLFRNRFEVRNARFPRMP

SEQ ID NO: 92786 - protein, 99 aa, Homo sapiens; identical to SEQ ID NO: 92782
  Payload ID: 18551
  Gene Name: tRNA 5-methylaminomethyl-2-thiouridylate methyltransferase
  ENSP ID: ENSP00000413880

SEQ ID NO: 92787 - protein, 227 aa, Homo sapiens
  Payload ID: 18552
  Gene Name: tRNA aspartic acid methyltransferase 1
  ENSP ID: ENSP00000324263
  MOD_RES (1)..(1): Any amino acid
XSCIPAQVVAAIDVNTVANEVYKYNFPHTQLLAKTIEGITLEEFDRLSFDMILMSPPCQPFTRDLLIQTIENCGFQYQEFLLSPTSLGIPNSRLRYFLIAKLQSEPLPFQAPGQVLMEFPKIESVHPQKYAMDVENKIQEKNVEPNISFDGSIQCSGKDAILFKLETAEEIHRKNQQDSDLSVKMLKDFLEDDTDVNQYLLPPKSLLRYALLLDIVQPTCRRSVCFT

SEQ ID NO: 92788 - protein, 69 aa, Homo sapiens
  Payload ID: 18552
  Gene Name: tRNA aspartic acid methyltransferase 1
  ENSP ID: ENSP00000346652
MEPLRVLELYSGVGGMHHALRESCIPAQVVAAIDVNTVANEVYKYNFPHTQLLAKTIEKRSNTAQFSAT

SEQ ID NO: 92789 - protein, 391 aa, Homo sapiens
  Payload ID: 18552
  Gene Name: tRNA aspartic acid methyltransferase 1
  Uniprot ID: O14717
  ENSP ID: ENSP00000367030
MEPLRVLELYSGVGGMHHALRESCIPAQVVAAIDVNTVANEVYKYNFPHTQLLAKTIEGITLEEFDRLSFDMILMSPPCQPFTRIGRQGDMTDSRTNSFLHILDILPRLQKLPKYILLENVKGFEVSSTRDLLIQTIENCGFQYQEFLLSPTSLGIPNSRLRYFLIAKLQSEPLPFQAPGQVLMEFPKIESVHPQKYAMDVENKIQEKNVEPNISFDGSIQCSGKDAILFKLETAEEIHRKNQQDSDLSVKMLKDFLEDDTDVNQYLLPPKSLLRYALLLDIVQPTCRRSVCFTKGYGSYIEGTGSVLQTAEDVQVENIYKSLTNLSQEEQITKLLILKLRYFTPKEIANLLGFPPEFGFPEKITVKQRYRLLGNSLNVHVVAKLIKILYE

SEQ ID NO: 92790 - protein, 53 aa, Homo sapiens
  Payload ID: 18552
  Gene Name: tRNA aspartic acid methyltransferase 1
  ENSP ID: ENSP00000389497
ALRESCIPAQVVAAIDVNTVANEVYKYNFPHTQLLAKTIEITKITKVYSFGKC

SEQ ID NO: 92791 - protein, 86 aa, Homo sapiens
  Payload ID: 18552
  Gene Name: tRNA aspartic acid methyltransferase 1
  ENSP ID: ENSP00000390611
  MOD_RES (1)..(1): Any amino acid
XSCIPAQVVAAIDVNTVANEVYKYNFPHTQLLAKTIERPLDTNNRKLWLSVPRVSIISNLSWHSKFKATIFSYCKASVRAITLSSP

SEQ ID NO: 92792 - protein, 63 aa, Homo sapiens
  Payload ID: 18552
  Gene Name: tRNA aspartic acid methyltransferase 1
  Uniprot ID: O14717
  ENSP ID: ENSP00000417594
MEPLRVLELYSGVGGMHHALRESCIPAQVVAAIDVNTVANEVYKYNFPHTQLLAKTIEDWPAG

SEQ ID NO: 92793 - protein, 254 aa, Homo sapiens
  Payload ID: 18552
  Gene Name: tRNA aspartic acid methyltransferase 1
  ENSP ID: ENSP00000419625
MEPLRVLELYSGVGGMHHALRESCIPAQVVAAIDVNTVANEVYKYNFPHTQLLAKTIEVLMEFPKIESVHPQKYAMDVENKIQEKNVEPNISFDGSIQCSGKDAILFKLETAEEIHRKNQQDSDLSVKMLKDFLEDDTDVNQYLLPPKSLLRYALLLDIVQPTCRRSVCFTKGYGSYIEGTGSVLQTAEDVQVENIYKSLTNLSQEEQITKLLILKLRYFTPKEIANLLGFPPEFGMWDTCRIQLSCIKTLKNL

SEQ ID NO: 92794 - protein, 136 aa, Homo sapiens
  Payload ID: 18552
  Gene Name: tRNA aspartic acid methyltransferase 1
  ENSP ID: ENSP00000431476
ALRESCIPAQVVAAIDVNTVANEVYKYNFPHTQLLAKTIEGITLEEFDRLSFDMILMSPPCQPFTRLQKLPKYILLENVKGFEVSSTRDLLIQTIENCGFQYQEFLLSPTSLGIPNSRLRYFLIAKLQSEPLPFQA

SEQ ID NO: 92795 - protein, 467 aa, Homo sapiens
  Payload ID: 18553
  Gene Name: tRNA isopentenyltransferase 1
  Uniprot ID: Q9H3H1
  ENSP ID: ENSP00000321810
MASVAAARAVPVGSGLRGLQRTLPLVVILGATGTGKSTLALQLGQRLGGEIVSADSMQVYEGLDIITNKVSAQEQRICRHHMISFVDPLVTNYTVVDFRNRATALIEDIFARDKIPIVVGGTNYYIESLLWKVLVNTKPQEMGTEKVIDRKVELEKEDGLVLHKRLSQVDPEMAAKLHPHDKRKVARSLQVFEETGISHSEFLHRQHTEEGGGPLGGPLKFSNPCILWLHADQAVLDERLDKRVDDMLAAGLLEELRDFHRRYNQKNVSENSQDYQHGIFQSIGFKEFHEYLITEGKCTLETSNQLLKKGIEALKQVTKRYARKQNRWVKNRFLSRPGPIVPPVYGLEVSDVSKWEESVLEPALEIVQSFIQGHKPTATPIKMPYNEAENKRSYHLCDLCDRIIIGDREWAAHIKSKSHLNQLKKRRRLDSDAVNTIESQSVSPDHNKEPKEKGSPGQNDQELKCSV

SEQ ID NO: 92796 - protein, 441 aa, Homo sapiens
  Payload ID: 18553
  Gene Name: tRNA isopentenyltransferase 1
  Uniprot ID: Q9H3H1
  ENSP ID: ENSP00000361905
MASVAAARAVPVGSGLRGLQRTLPLVVILGATGTGKSTLALQLGQRLGGEIVSADSMQVYEGLDIITNKVSAQEQRICRHHMISFVDPLVTNYTVVDFRNRATALIEDIFARDKIPIVVGGTNYYIESLLWKVLVNTKPQEMGTEKVIDRKVELEKEDGLVLHKRLSQVDPEMAAKLHPHDKRKVARSLQVFEETGISHSEFLHRQHTEEGGGPLGGPLKFSNPCILWLHADQAVLDERLDKRVDDMLAAGLLEELRDFHRRYNQKNVSENSQDYQHGIFQSIGFKEFHEYLITEGKCTLETSNQLLKKGPGPIVPPVYGLEVSDVSKWEESVLEPALEIVQSFIQGHKPTATPIKMPYNEAENKRSYHLCDLCDRIIIGDREWAAHIKSKSHLNQLKKRRRLDSDAVNTIESQSVSPDHNKEPKEKGSPGQNDQELKCSV

SEQ ID NO: 92797 - protein, 385 aa, Homo sapiens
  Payload ID: 18553
  Gene Name: tRNA isopentenyltransferase 1
  Uniprot ID: Q9H3H1
  ENSP ID: ENSP00000388333
MASVAAARAVPVGSGLRGLQRTLPLVVILGATGTGKSTLALQLGQRLGGEIVSADSMQPQEMGTEKVIDRKVELEKEDGLVLHKRLSQVDPEMAAKLHPHDKRKVARSLQVFEETGISHSEFLHRQHTEEGGGPLGGPLKFSNPCILWLHADQADERLDKRVDDMLAAGLLEELRDFHRRYNQKNVSENSQDYQHGIFQSIGFKEFHEYLITEGKCTLETSNQLLKKGIEALKQVTKRYARKQNRWVKNRFLSRPGPIVPPVYGLEVSDVSKWEESVLEPALEIVQSFIQGHKPTATPIKMPYNEAENKRSYHLCDLCDRIIIGDREWAAHIKSKSHLNQLKKRRRLDSDAVNTIESQSVSPDHNKEPKEKGSPGQNDQELKCSV

SEQ ID NO: 92798 - protein, 163 aa, Homo sapiens
  Payload ID: 18553
  Gene Name: tRNA isopentenyltransferase 1
  Uniprot ID: Q9H3H1
  ENSP ID: ENSP00000437700
MFRKIGIEALKQVTKRYARKQNRWVKNRFLSRPGPIVPPVYGLEVSDVSKWEESVLEPALEIVQSFIQGHKPTATPIKMPYNEAENKRSYHLCDLCDRIIIGDREWAAHIKSKSHLNQLKKRRRLDSDAVNTIESQSVSPDHNKEPKEKGSPGQNDQELKCSV

SEQ ID NO: 92799 - protein, 85 aa, Homo sapiens
  Payload ID: 18553
  Gene Name: tRNA isopentenyltransferase 1
  ENSP ID: ENSP00000437896
MPYNEAENKRSYHLCDLCDRIIIGDREWAAHIKSKSHLNQLKKRRRLDSDAVNTIESQSVSPDHNKEPKEKGSPGQNDQELKCSV

SEQ ID NO: 92800 - protein, 140 aa, Homo sapiens
  Payload ID: 18553
  Gene Name: tRNA isopentenyltransferase 1
  ENSP ID: ENSP00000473708
  MOD_RES (1)..(1): Any amino acid
XAAARAVPVGSGLRGLQRTLPLVVILGATGTGKSTLALQLGQRLGGEIVSADSMQVYEGLDIITNKVSAQEQRICRHHMISFVDPLVTNYTVVDFRNRATALIEDIFARDKIPIVVGGTNYYIESLLWKVLVNTKELASF

SEQ ID NO: 92801 - protein, 143 aa, Homo sapiens
  Payload ID: 18553
  Gene Name: tRNA isopentenyltransferase 1
  ENSP ID: ENSP00000473745
MASVAAARAVPVGSGLRGLQRTLPLVVILGATGTGKSTLALQLGQRLGGEIVSADSMQVYEGLDIITNKVSAQEQRICRHHMISFVDPLVTNYTVVDFRNRATALIEDIFARDKIPIVVGGTNYYIESLLWKVLVNTKELASF

SEQ ID NO: 92802 - protein, 349 aa, Homo sapiens
  Payload ID: 18553
  Gene Name: tRNA isopentenyltransferase 1
  ENSP ID: ENSP00000473773
MASVAAARAVPVGSGLRGLQRTLPLVVILGATGTGKSTLALQLGQRLGGEIVSADSMQVYEGLDIITNKVSAQEQRICRHHMISFVDPLVTNYTVVDFRNRATALIEDIFARDKIPIVVGGTNYYIESLLWKVLVNTKPQEMGTEKVIDRKVELEKEDGLVLHKRLSQVDPEMAAKLHPHDKRKVARSLQVFEETGISHSEFLHRQHTEEGGGPLGGPLKFSNPCILWLHADQAVLDERLDKRVDDMLAAGLLEELRDFHRRYNQKNVSENSQDYQHGIFQSIGFKEFHEYLITEGKCTLETSNQLLKKGIEALKQVTKRYARKQNRWVKNRFLSRPQAYSHSNKDAIQ

SEQ ID NO: 92803 - protein, 81 aa, Homo sapiens
  Payload ID: 18553
  Gene Name: tRNA isopentenyltransferase 1
  ENSP ID: ENSP00000474151
  MOD_RES (1)..(1): Any amino acid
XARAVPVGSGLRGLQRTLPLVVILGATGTGKSTLALQLGQRLGGEIVSADSMQFWIPQKLESDQDPVGLLIPLGLCLSMKA

SEQ ID NO: 92804 - protein, 63 aa, Homo sapiens
  Payload ID: 18553
  Gene Name: tRNA isopentenyltransferase 1
  ENSP ID: ENSP00000474264
MASVAAARAVPVGSGLRGLQRTLPLVVILGATGTGKSTLALQLGQRLGGEIVSADSMQELASF

SEQ ID NO: 92805 - protein, 170 aa, Homo sapiens
  Payload ID: 18553
  Gene Name: tRNA isopentenyltransferase 1
  ENSP ID: ENSP00000474768
IITNKVSAQEQRICRHHMISFVDPLVTNYTVVDFRNRATALIEDIFARDKIPIVVGGTNYYIESLLWKVLVNTKPQEMGTEKVIDRKVELEKEDGLVLHKRLSQVDPEMAAKLHPHDKRKVARSLQVFEETGISHSEFLHRQHTEEGGGPLGGPLKFSNPCILWLHADQF

SEQ ID NO: 92806 - protein, 630 aa, Homo sapiens
  Payload ID: 18554
  Gene Name: tRNA methyltransferase 1
  Uniprot ID: Q9NXH9
  ENSP ID: ENSP00000221504
MQGSSLWLSLTFRSARVLSRARFFEWQSPGLPNTAAMENGTGPYGEERPREVQETTVTEGAAKIAFPSANEVFYNPVQEFNRDLTCAVITEFARIQLGAKGIQIKVPGEKDTQKVVVDLSEQEEEKVELKESENLASGDQPRTAAVGEICEEGLHVLEGLAASGLRSIRFALEVPGLRSVVANDASTRAVDLIRRNVQLNDVAHLVQPSQADARMLMYQHQRVSERFDVIDLDPYGSPATFLDAAVQAVSEGGLLCVTCTDMAVLAGNSGETCYSKYGAMALKSRACHEMALRIVLHSLDLRANCYQRFVVPLLSISADFYVRVFVRVFTGQAKVKASARAKFSAACGPPVTPECEHCGQRHQLGGPMWAEPIHDLDFVGRVLEAVSANPGRFHTSERIRGVLSVITEELPDVPLYYTLDQLSSTIHCNTPSLLQLRSALLHADFRVSLSHACKNAVKTDAPASALWDIMRCWEKECPVKRERLSETSPAFRILSVEPRLQANFTIREDANPSSRQRGLKRFQANPEANWGPRPRARPGGKAADEAMEERRRLLQNKRKEPPEDVAQRAARLKTFPCKRFKEGTCQRGDQCCYSHSPPTPRVSADAAPDCPETSNQTPPGPGAAAGPGID

SEQ ID NO: 92807 - protein, 659 aa, Homo sapiens
  Payload ID: 18554
  Gene Name: tRNA methyltransferase 1
  Uniprot ID: Q9NXH9
  ENSP ID: ENSP00000350352
MQGSSLWLSLTFRSARVLSRARFFEWQSPGLPNTAAMENGTGPYGEERPREVQETTVTEGAAKIAFPSANEVFYNPVQEFNRDLTCAVITEFARIQLGAKGIQIKVPGEKDTQKVVVDLSEQEEEKVELKESENLASGDQPRTAAVGEICEEGLHVLEGLAASGLRSIRFALEVPGLRSVVANDASTRAVDLIRRNVQLNDVAHLVQPSQADARMLMYQHQRVSERFDVIDLDPYGSPATFLDAAVQAVSEGGLLCVTCTDMAVLAGNSGETCYSKYGAMALKSRACHEMALRIVLHSLDLRANCYQRFVVPLLSISADFYVRVFVRVFTGQAKVKASASKQALVFQCVGCGAFHLQRLGKASGVPSGRAKFSAACGPPVTPECEHCGQRHQLGGPMWAEPIHDLDFVGRVLEAVSANPGRFHTSERIRGVLSVITEELPDVPLYYTLDQLSSTIHCNTPSLLQLRSALLHADFRVSLSHACKNAVKTDAPASALWDIMRCWEKECPVKRERLSETSPAFRILSVEPRLQANFTIREDANPSSRQRGLKRFQANPEANWGPRPRARPGGKAADEAMEERRRLLQNKRKEPPEDVAQRAARLKTFPCKRFKEGTCQRGDQCCYSHSPPTPRVSADAAPDCPETSNQTPPGPGAAAGPGID

SEQ ID NO: 92808 - protein, 659 aa, Homo sapiens; identical to SEQ ID NO: 92807
  Payload ID: 18554
  Gene Name: tRNA methyltransferase 1
  Uniprot ID: Q9NXH9
  ENSP ID: ENSP00000416149

SEQ ID NO: 92809 - protein, 191 aa, Homo sapiens
  Payload ID: 18554
  Gene Name: tRNA methyltransferase 1
  ENSP ID: ENSP00000465370
MLMYQHQRVSERFDVIDLDPYGSPATFLDAAVQAVSEGGLLCVTCTDMAVLAGNSGETCYSKYGAMALKSRACHEMALRIVLHSLDLRANCYQRFVVPLLSISADFYVRVFVRVFTGQAKVKASASKQALVFQCVGCGAFHLQRLGKASGVPSGRAKFSAACGPPVTPECEHCGQRHQLGGPMWAEPIHDL

SEQ ID NO: 92810 - protein, 101 aa, Homo sapiens
  Payload ID: 18554
  Gene Name: tRNA methyltransferase 1
  ENSP ID: ENSP00000466716
RIQLGAKGIQIKVPGEKDTQKVVVDLSEQEEEKVELKESENLASGDQPRTAAVGEICERCLGSDLWLQTMPPPGLWISYAGMSSSMTWPTWYSRAKQMPGC

SEQ ID NO: 92811 - protein, 105 aa, Homo sapiens
  Payload ID: 18554
  Gene Name: tRNA methyltransferase 1
  ENSP ID: ENSP00000466966
MQGSSLWLSLTFRSARVLSRARFFEWQSPGLPNTAAMENGTGPYGEERPREVQETTVTEGAAKIAFPSANEVFYNPVQEFNRDLTKACMCWKAWQLQAYVPFDLP

SEQ ID NO: 92812 - protein, 659 aa, Homo sapiens; identical to SEQ ID NO: 92807
  Payload ID: 18554
  Gene Name: tRNA methyltransferase 1
  Uniprot ID: Q9NXH9
  ENSP ID: ENSP00000466967

SEQ ID NO: 92813 - protein, 297 aa, Homo sapiens
  Payload ID: 18554
  Gene Name: tRNA methyltransferase 1
  ENSP ID: ENSP00000467938
MQGSSLWLSLTFRSARVLSRARFFEWQSPGLPNTAAMENGTGPYGEERPREVQETTVTEGAAKIAFPSANEVFYNPVQEFNRDLTCAVITEFARIQLGAKGIQIKVPGEKDTQKVVVDLSEQEEEKVELKESENLASGDQPRTAAVGEICEEGLHVLEGLAASGLRSIRFALEVPGLRSVVANDASTRAVDLIRRNVQLNDVAHLVQPSQADARMLMYQHQRVSERFDVIDLDPYGSPATFLDAAVQAALRIVLHSLDLRANCYQRFVVPLLSISADFYVRVFVRVFTGQAKVKASA

SEQ ID NO: 92814 - protein, 145 aa, Homo sapiens
  Payload ID: 18554
  Gene Name: tRNA methyltransferase 1
  ENSP ID: ENSP00000467984
MQGSSLWLSLTFRSARVLSRARFFEWQSPGLPNTAAMENGTGPYGEERPREVQETTVTEGAAKIAFPSANEVFYNPVQEFNRDLTCAVITEFARIQLGAKGIQSEWRSRLLVGGGHTSLSPCLGSSAAQIQRGFSHIAGPGFCSF

SEQ ID NO: 92815 - protein, 85 aa, Homo sapiens
  Payload ID: 18554
  Gene Name: tRNA methyltransferase 1
  ENSP ID: ENSP00000468031
MQGSSLWLSLTFRSARVLSRARFFEWQSPGLPNTAAMENGTGPYGEERPREVQETTVTEGAAKIAFPSANEVFYNPVQEFNRDLT

SEQ ID NO: 92816 - protein, 113 aa, Homo sapiens
  Payload ID: 18554
  Gene Name: tRNA methyltransferase 1
  ENSP ID: ENSP00000468377
MQGSSLWLSLTFRSARVLSRARFFEWQSPGLPNTAAMENGTGPYGEERPREVQETTVTEGAAKIAFPSANEMCCDHRVCSHSAWGQRNPDQGSRREGHAKSGRGLVRARGGKG

SEQ ID NO: 92817 - protein, 339 aa, Homo sapiens
  Payload ID: 18555
  Gene Name: tRNA methyltransferase 10A
  Uniprot ID: Q8TBZ6
  ENSP ID: ENSP00000273962
MSSEMLPAFIETSNVDKKQGINEDQEESQKPRLGEGCEPISKRQMKKLIKQKQWEEQRELRKQKRKEKRKRKKLERQCQMEPNSDGHDRKRVRRDVVHSTLRLIIDCSFDHLMVLKDIKKLHKQIQRCYAENRRALHPVQFYLTSHGGQLKKNMDENDKGWVNWKDIHIKPEHYSELIKKEDLIYLTSDSPNILKELDESKAYVIGGLVDHNHHKGLTYKQASDYGINHAQLPLGNFVKMNSRKVLAVNHVFEIILEYLETRDWQEAFFTILPQRKGAVPTDKACESASHDNQSVRMEEGGSDSDSSEEEYSRNELDSPHEEKQDKENHTESTVNSLPH

SEQ ID NO: 92818 - protein, 339 aa, Homo sapiens; identical to SEQ ID NO: 92817
  Payload ID: 18555
  Gene Name: tRNA methyltransferase 10A
  Uniprot ID: Q8TBZ6
  ENSP ID: ENSP00000378342

SEQ ID NO: 92819 - protein, 339 aa, Homo sapiens; identical to SEQ ID NO: 92817
  Payload ID: 18555
  Gene Name: tRNA methyltransferase 10A
  Uniprot ID: Q8TBZ6
  ENSP ID: ENSP00000378343

SEQ ID NO: 92820 - protein, 205 aa, Homo sapiens
  Payload ID: 18555
  Gene Name: tRNA methyltransferase 10A
  ENSP ID: ENSP00000397551
MSSEMLPAFIETSNVDKKQGINEDQEESQKPRLGEGCEPISKRQMKKLIKQKQWEEQRELRKQKRKEKRKRKKLERQCQMEPNSDGHDRKRVRRDVVHSTLRLIIDCSFDHLMVLKDIKKLHKQIQRCYAENRRALHPVQFYLTSHGGQLKKNMDENDKGWVNWKDIHIKPEHYSELIKKEDLIYLTSDSPNILKELDESKAYVI

SEQ ID NO: 92821 - protein, 199 aa, Homo sapiens
  Payload ID: 18555
  Gene Name: tRNA methyltransferase 10A
  ENSP ID: ENSP00000423628
MSSEMLPAFIETSNVDKKQGINEDQEESQKPRLGEGCEPISKRQMKKLIKQKQWEEQRELRKQKRKEKRKRKKLERQCQMEPNSDGHDRKRVRRDVVHSTLRLIIDCSFDHLMVLKDIKKLHKQIQRCYAENRRALHPVQFYLTSHGGQLKKNMDENDKGWVNWKDIHIKPEHYSELIKKEDLIYLTSDSPNILKELDE

SEQ ID NO: 92822 - protein, 316 aa, Homo sapiens
  Payload ID: 18556
  Gene Name: tRNA methyltransferase 10B
  Uniprot ID: Q6PF06
  ENSP ID: ENSP00000297994
MDWKLEGSTQKVESPVLQGQEGILEETGEDGLPEGFQLLQIDAEGECQEGEILATGSTAWCSKNVQRKQRHWEKIVAAKKSKRKQEKERRKANRAENPGICPQHSKRFLRALTKDKLLEAKHSGPRLCIDLSMTHYMSKKELSRLAGQIRRLYGSNKKADRPFWICLTGFTTDSPLYEECVRMNDGFSSYLLDITEEDCFSLFPLETLVYLTPDSEHALEDVDLNKVYILGGLVDESIQKKVTFQKAREYSVKTARLPIQEYMVRNQNGKNYHSEILAINQVFDILSTYLETHNWPEALKKGVSSGKGYILRNSVE

SEQ ID NO: 92823 - protein, 229 aa, Homo sapiens
  Payload ID: 18556
  Gene Name: tRNA methyltransferase 10B
  Uniprot ID: Q6PF06
  ENSP ID: ENSP00000366982
MDWKLEGSTQKVESPVLQGQEGILEETGEDGLPEGFQLLQIDAEGECQEGEILATGSTAWCSELSRLAGQIRRLYGSNKKADRPFWICLTGFTTDSPLYEECVRMNDGFSSYLLDITEEDCFSLFPLETLVYLTPDSEHALEDVDLNKVYILGGLVDESIQKKVTFQKAREYSVKTARLPIQEYMVRNQNGKNYHSEILAINQETHNWPEALKKGVSSGKGYILRNSVE

SEQ ID NO: 92824 - protein, 221 aa, Homo sapiens
  Payload ID: 18556
  Gene Name: tRNA methyltransferase 10B
  Uniprot ID: Q6PF06
  ENSP ID: ENSP00000366983
MVLGICPQHSKRFLRALTKDKLLEAKHSGPRLCIDLSMTHYMSKKELSRLAGQIRRLYGSNKKADRPFWICLTGFTTDSPLYEECVRMNDGFSSYLLDITEEDCFSLFPLETLVYLTPDSEHALEDVDLNKVYILGGLVDESIQKKVTFQKAREYSVKTARLPIQEYMVRNQNGKNYHSEILAINQVFDILSTYLETHNWPEALKKGVSSGKGYILRNSVE

SEQ ID NO: 92825 - protein, 174 aa, Homo sapiens
  Payload ID: 18556
  Gene Name: tRNA methyltransferase 10B
  Uniprot ID: Q6PF06
  ENSP ID: ENSP00000437395
MDWKLEGSTQKVESPVLQGQEGILEETGEDGLPEGFQLLQIDAEGECQEGEILATGSTAWCSKNVQRKQRHWEKIVAAKKSKRKQEKERRKANRAENPGICPQHSKRFLRALTKDKLLEAKHSGPRLCIDLSMTHYMSKKVEHPLSLEFLLAMREAQKGTAFRRIWSTPASGIP

SEQ ID NO: 92826 - protein, 141 aa, Homo sapiens
  Payload ID: 18556
  Gene Name: tRNA methyltransferase 10B
  ENSP ID: ENSP00000444612
MDWKLEGSTQKVESPVLQGQEGILEETGEDGLPEGFQLLQIDAEGECQEGEILATGSTAWCSKNVQRKQRHWEKIVAAKKSKRKQEKERRKANRAENPGICPQHSKRFLRALTKDKLLEAKHSGPRLCIDLSMTHYMSKKT

SEQ ID NO: 92827 - protein, 256 aa, Homo sapiens
  Payload ID: 18556
  Gene Name: tRNA methyltransferase 10B
  Uniprot ID: Q6PF06
  ENSP ID: ENSP00000444997
MDWKLEGSTQKVESPVLQGQEGILEETGEDGLPEGFQLLQIDAEGECQEGEILATGSTAWCSKNVQRKQRHWEKIVAAKKSKRKQEKERRKANRAENPGICPQHSKRFLRALTKDKLLEAKHSGPRLCIDLSMTHYMSKKLDITEEDCFSLFPLETLVYLTPDSEHALEDVDLNKVYILGGLVDESIQKKVTFQKAREYSVKTARLPIQEYMVRNQNGKNYHSEILAINQETHNWPEALKKGVSSGKGYILRNSVE

SEQ ID NO: 92828 - protein, 72 aa, Homo sapiens
  Payload ID: 18556
  Gene Name: tRNA methyltransferase 10B
  ENSP ID: ENSP00000445362
MDWKLEGSTQKVESPVLQGQEGILEETGEDGLPEGFQLLQIDAEGECQEGEILATGSTAWCSAFAPSTANVS

SEQ ID NO: 92829 - protein, 72 aa, Homo sapiens
  Payload ID: 18556
  Gene Name: tRNA methyltransferase 10B
  ENSP ID: ENSP00000446050
MDWKLEGSTQKVESPVLQGQEGILEETGEDGLPEGFQLLQIDAEGECQEGEILATGSTAWCSFSNNFVFWII

SEQ ID NO: 92830 - protein, 403 aa, Homo sapiens
  Payload ID: 18557
  Gene Name: tRNA methyltransferase 10C, mitochondrial RNase P subunit
  Uniprot ID: Q7L0Y3
  ENSP ID: ENSP00000312356
MAAFLKMSVSVNFFRPFTRFLVPFTLHRKRNNLTILQRYMSSKIPAVTYPKNESTPPSEELELDKWKTTMKSSVQEECVSTISSSKDEDPLAATREFIEMWRLLGREVPEHITEEELKTLMECVSNTAKKKYLKYLYTKEKVKKARQIKKEMKAAAREEAKNIKLLETTEEDKQKNFLFLRLWDRNMDIAMGWKGAQAMQFGQPLVFDMAYENYMKRKELQNTVSQLLESEGWNRRNVDPFHIYFCNLKIDGALHRELVKRYQEKWDKLLLTSTEKSHVDLFPKDSIIYLTADSPNVMTTFRHDKVYVIGSFVDKSMQPGTSLAKAKRLNLATECLPLDKYLQWEIGNKNLTLDQMIRILLCLKNNGNWQEALQFVPKRKHTGFLEISQHSQEFINRLKKAKT

SEQ ID NO: 92831 - protein, 312 aa, Homo sapiens
  Payload ID: 18557
  Gene Name: tRNA methyltransferase 10C, mitochondrial RNase P subunit
  ENSP ID: ENSP00000419389
MAAFLKMSVSVNFFRPFTRFLVPFTLHRKRNNLTILQRYMSSKIPAVTYPKNESTPPSEELELDKWKTTMKSSVQEECVSTISSSKDEDPLAATREFIEMWRLLGREVPEHITEEELKTLMECVSNTAKKKYLKYLYTKEKVKKARQIKKEMKAAAREEAKNIKLLETTEEDKQKNFLFLRLWDRNMDIAMGWKGAQAMQFGQPLVFDMAYENYMKRKELQNTVSQLLESEGWNRRNVDPFHIYFCNLKIDGALHRELVKRYQEKWDKLLLTSTEKSHVDLFPKDSIIYLTADSPNVMTTFRHDKVYVIGSF

SEQ ID NO: 92832 - protein, 463 aa, Homo sapiens
  Payload ID: 18558
  Gene Name: tRNA methyltransferase 11 homolog
  Uniprot ID: Q7Z4G4
  ENSP ID: ENSP00000333934
MALSCTLNRYLLLMAQEHLEFRLPEIKSLLLLFGGQFASSQETYGKSPFWILSIPSEDIARNLMKRTVCAKSIFELWGHGQSPEELYSSLKNYPVEKMVPFLHSDSTYKIKIHTFNKTLTQEEKIKRIDALEFLPFEGKVNLKKPQHVFSVLEDYGLDPNCIPENPHNIYFGRWIADGQRELIESYSVKKRHFIGNTSMDAGLSFIMANHGKVKENDIVFDPFVGTGGLLIACAHFGAYVYGTDIDYNTVHGLGKATRKNQKWRGPDENIRANLRQYGLEKYYLDVLVSDASKPSWRKGTYFDAIITDPPYGIRESTRRTGSQKEIPKGIEKWEKCPESHVPVSLSYHLSDMFLDLLNFAAETLVLGGRLVYWLPVYTPEYTEEMVPWHPCLELVSNCEQKLSSHTSRRLITMEKVKKFENRDQYSHLLSDHFLPYQGHNSFREKYFSGVTKRIAKEEKSTQE

SEQ ID NO: 92833 - protein, 458 aa, Homo sapiens
  Payload ID: 18558
  Gene Name: tRNA methyltransferase 11 homolog
  Uniprot ID: Q7Z4G4
  ENSP ID: ENSP00000357316
MALSCTLNRYLLLMAQEHLEFRLPEIKSLLLLFGGQFASSQETYGKSPFWILSIPSEDIARNLMKRTVCAKSIFELWGHGQSPEELYSSLKNYPVEKMVPFLHSDSTYKIKIHTFNKTLTQEEKIKRIDALEFLPFEGKVNLKKPQHVFSVLEDYGLDPNCIPENPHNIYFGRWIADGQRELIESYSVKKRHFIGNTSMDAGLSFIMANHGKVKENDIVFDPFVGTGGLLIACAHFGAYVYGTDIDYNTVHGLGKATRKNQKWRGPDENIRANLRQYGLEKYYLDVLVSDASKPSWRKGTYFDAIITDPPYGIRESTRRTGSQKEIPKGIEKWEKCPESHVPVSLSYHLSDMFLDLLNFAAETLVLGGRLVYWLPVYTPEYTEEMVPWHPCLELVSNCEQKLSSHTSRRLITMEKNRDQYSHLLSDHFLPYQGHNSFREKYFSGVTKRIAKEEKSTQE

SEQ ID NO: 92834 - protein, 93 aa, Homo sapiens
  Payload ID: 18558
  Gene Name: tRNA methyltransferase 11 homolog
  ENSP ID: ENSP00000406230
MKRTVCAKSIFELWGHGQSPEELYSSLKNYPVEKMVPFLHSDSTYKIKIHTFNKTLTQEEKIKRIDALEFLPFEGKVNLKKPQHVFSVLEDYG

SEQ ID NO: 92835 - protein, 131 aa, Homo sapiens
  Payload ID: 18558
  Gene Name: tRNA methyltransferase 11 homolog
  ENSP ID: ENSP00000410498
  MOD_RES (1)..(1): Any amino acid
XLSFIMANHGKVKENDIVFDPFVGTGGLLIACAHFGAYVYGTDIDYNTVHGLGKATRKNQKWRGPDENIRANLRQYGLEKYYLDVLVSDASKPSWRKGTYFDAIITDPPYGIRESTRRTGSQKEIPKGIEK

SEQ ID NO: 92836 - protein, 134 aa, Homo sapiens
  Payload ID: 18558
  Gene Name: tRNA methyltransferase 11 homolog
  ENSP ID: ENSP00000415724
MKRTVCAKSIFELWGHGQSPEELYSSLKNYPVEKMVPFLHSDSTYKIKIHTFNKTLTQEEKIKRIDALEFLPFEGKVNLKKPQHVFSVLEDYGLDPNCIPENPHNIYFGRWIADGQRELIESYSVKKRHFIGNT

SEQ ID NO: 92837 - protein, 257 aa, Homo sapiens
  Payload ID: 18558
  Gene Name: tRNA methyltransferase 11 homolog
  Uniprot ID: Q7Z4G4
  ENSP ID: ENSP00000433724
MALSCTLNRYLLLMAQEHLEFRLPEIKSLLLLFGGQFASSQETYGKSPFWILSIPSEDIARNLMKRTVCAKSIFELWGHGQSPEELYSSLKNYPVEKMVPFLHSDSTYKIKIHTFNKTLTQEEKIKRIDALEFLPFEGKVNLKKPQHVFSVLEDYGLDPNCIPENPHNIYFGRWIADGQRELIESYSVKKRHFIGNTSMDAGLSFIMANHGKVKENDIVFDPFVGTGGLLIACAHFGAYVYGTDIDYNTVHGLACST

SEQ ID NO: 92838 - protein, 86 aa, Homo sapiens
  Payload ID: 18558
  Gene Name: tRNA methyltransferase 11 homolog
  ENSP ID: ENSP00000465275
MALSCTLNRYLLLMAQEHLEFRLPFASSQETYGKSPFWILSIPSEDIARNLMKRTVCAKSIFELWGHGQSPEELYSSLKNYPVEKM

SEQ ID NO: 92839 - protein, 4 aa, Homo sapiens
  Payload ID: 18558
  Gene Name: tRNA methyltransferase 11 homolog
  ENSP ID: ENSP00000466001
  MOD_RES (1)..(1): Any amino acid
XVYL

SEQ ID NO: 92840 - protein, 230 aa, Homo sapiens
  Payload ID: 18558
  Gene Name: tRNA methyltransferase 11 homolog
  ENSP ID: ENSP00000467035
MALSCTLNRYLLLMAQEHLEFRLPEIKSLLLLFGGQFASSQETYGKSPFWILSIPSEDIARNLMKRTVCAKSIFELWGHGQSPEELYSSLKNYPVEKMVPFLHSDSTYKIKIHTFNKTLTQEEKIKRIDALEFLPFEGKVNLKKPQHVFSVLEDYGLDPNCIPENPHNIYFGRWIADGQRELIESYSVKKRHFIGNTSMDAGLSFIMANHGKVKENDIVFDPFVGTAVYL

SEQ ID NO: 92841 - protein, 82 aa, Homo sapiens
  Payload ID: 18558
  Gene Name: tRNA methyltransferase 11 homolog
  ENSP ID: ENSP00000467603
MALSCTLNRYLLLMAQEHLEFRLPEIKSLLLLFGGQFASSQETYGKSPFWILSIPSEDIARNLMKRTVCAKFHFYIRTLHIK

SEQ ID NO: 92842 - protein, 120 aa, Homo sapiens
  Payload ID: 18559
  Gene Name: tRNA methyltransferase 11-2 homolog (S. cerevisiae)
  Uniprot ID: Q9UI30
  ENSP ID: ENSP00000309433
MKLLTHNLLSSHVRGVGSRGFPLRLQATEVRICPVEFNPNFVARMIPKVEWSAFLEAADNVPKGPVEGYEENEEFLRTMHHLLLEVEVIEGTLQCPESGRMFPISRGIPNMLLSEEETES

SEQ ID NO: 92843 - protein, 125 aa, Homo sapiens
  Payload ID: 18559
  Gene Name: tRNA methyltransferase 11-2 homolog (S. cerevisiae)
  Uniprot ID: Q9UI30
  ENSP ID: ENSP00000438349
MKLLTHNLLSSHVRGVGSRGFPLRLQATEVRICPVEFNPNFVARMIPKVEWSAFLEAADNLRLIQVPKGPVEGYEENEEFLRTMHHLLLEVEVIEGTLQCPESGRMFPISRGIPNMLLSEEETES

SEQ ID NO: 92844 - protein, 106 aa, Homo sapiens
  Payload ID: 18559
  Gene Name: tRNA methyltransferase 11-2 homolog (S. cerevisiae)
  ENSP ID: ENSP00000440437
MKLLTHNLLSSHVRGVGSRGFPLRLQATEVRICPVEFNPNFVARMIPKVEWSAFLEAADNLRLIQVPKGPVEGYEENEEFLRTMHHLLLEVRSGPSLASRATCLPH

SEQ ID NO: 92845 - protein, 81 aa, Homo sapiens
  Payload ID: 18559
  Gene Name: tRNA methyltransferase 11-2 homolog (S. cerevisiae)
  ENSP ID: ENSP00000441279
MIPKVEWSAFLEAADNLRLIQVPKGPVEGYEENEEFLRTMHHLLLEVEVIEGTLQCPESGRMFPISRGIPNMLLSEEETES

SEQ ID NO: 92846 - protein, 63 aa, Homo sapiens
  Payload ID: 18559
  Gene Name: tRNA methyltransferase 11-2 homolog (S. cerevisiae)
  ENSP ID: ENSP00000444082
MCGGWGPVASPCASRYPPAAVFPFRAGWWAGVQCLPKLLRPAGHRGPYLPCGIQPQLRGAYDT

SEQ ID NO: 92847 - protein, 448 aa, Homo sapiens
  Payload ID: 18560
  Gene Name: tRNA methyltransferase 12 homolog (S. cerevisiae)
  Uniprot ID: Q53H54
  ENSP ID: ENSP00000329858
MRENVVVSNMERESGKPVAVVAVVTEPWFTQRYREYLQRQKLFDTQHRVEKMPDGSVALPVLGETLPEQHLQELRNRVAPGSPCMLTQLPDPVPSKRAQGCSPAQKLCLEVSRWVEGRGVKWSAELEADLPRSWQRHGNLLLLSEDCFQAKQWKNLGPELWETVALALGVQRLAKRGRVSPDGTRTPAVTLLLGDHGWVEHVDNGIRYKFDVTQCMFSFGNITEKLRVASLSCAGEVLVDLYAGIGYFTLPFLVHAGAAFVHACEWNPHAVVALRNNLEINGVADRCQIHFGDNRKLKLSNIADRVILGLIPSSEEGWPIACQVLRQDAGGILHIHQNVESFPGKNLQALGVSKVEKEHWLYPQQITTNQWKNGATRDSRGKMLSPATKPEWQRWAESAETRIATLLQQVHGKPWKTQILHIQPVKSYAPHVDHIVLDLECCPCPSVG

SEQ ID NO: 92848 - protein, 150 aa, Homo sapiens
  Payload ID: 18560
  Gene Name: tRNA methyltransferase 12 homolog (S. cerevisiae)
  ENSP ID: ENSP00000429771
MRENVVVSNMERESGKPVAVVAVVTEPWFTQRYREYLQRQKLFDTQHRVEKMPDGSVALPVLGETLPEQHLQELRNRVAPGSPCMLTQLPDPVPSKRAQGCSPAQKLCLEQVHGKPWKTQILHIQPVKSYAPHVDHIVLDLECCPCPSVG

SEQ ID NO: 92849 - protein, 130 aa, Homo sapiens
  Payload ID: 18561
  Gene Name: tRNA methyltransferase 13 homolog (S. cerevisiae)
  ENSP ID: ENSP00000359158
MVVAAGKRFCGEHAGAAEEEDARKRILCPLDPKHTVYEDQLAKHLKKCNSREKPKPDFYIQDINAGLRDETEIPEQLVPISSLSEEQLEKLIKKLRKASEALHDALNDPKNGDSATKHLKQQVCLGYSNY

SEQ ID NO: 92850 - protein, 481 aa, Homo sapiens
  Payload ID: 18561
  Gene Name: tRNA methyltransferase 13 homolog (S. cerevisiae)
  Uniprot ID: Q9NUP7
  ENSP ID: ENSP00000359160
MATSATSPHAPGFPAEGRCGYYVEKKKRFCRMVVAAGKRFCGEHAGAAEEEDARKRILCPLDPKHTVYEDQLAKHLKKCNSREKPKPDFYIQDINAGLRDETEIPEQLVPISSLSEEQLEKLIKKLRKASEGLNSTLKDHIMSHPALHDALNDPKNGDSATKHLKQQASILGNIENLKLLGPRRCFVEFGAGKGKLSHWVDIALKDAEKVHFILVEKVTTRFKVDGKHRKKNSVFERLQIDIQHLCLNKIPVLREEKLPVVGIGKHLCGMATDLALRCLVETYAASFEERNEEPLAKRIKNDKTEKEIYTLAKEGNEKNVPEKWNPVAGIVIALCCHHRCDWRHYVGKEYFRALGLGAVEFHYFQRMSSWATCGMRKTSLETSNSTTKRQDNQNDDSEEHDDGGYRITDDGADCLPGLLSVEEKKKIGHLCKLLIDQGRIQYLQQKGFSPALQYYTDPLVSLENVLLTALPNHSSSPETTA

SEQ ID NO: 92851 - protein, 109 aa, Homo sapiens
  Payload ID: 18561
  Gene Name: tRNA methyltransferase 13 homolog (S. cerevisiae)
  ENSP ID: ENSP00000359162
MATSATSPHAPGFPAEGRCGYYVEKKKRFCRMVVAAGKRFCGEHAGAAEEEDARKRILCPLDPKHTVYEDQLAKHLKKCNSREKPKPDFYIQDINAGLRDETEIPEQLA

SEQ ID NO: 92852 - protein, 175 aa, Homo sapiens
  Payload ID: 18561
  Gene Name: tRNA methyltransferase 13 homolog (S. cerevisiae)
  Uniprot ID: Q9NUP7
  ENSP ID: ENSP00000432616
MATSATSPHAPGFPAEGRCGYYVEKKKRFCRMVVAAGKRFCGEHAGAAEEEDARKRILCPLDPKHTVYEDQLAKHLKKCNSREKPKPDFYIQDINAGLRDETEIPEQLVPISSLSEEQLEKLIKKLRKASEGLNSTLKDHIMSHPALHDALNDPKNGDSATKHLKQQVCLGYSNY

SEQ ID NO: 92853 - protein, 733 aa, Homo sapiens
  Payload ID: 18562
  Gene Name: tRNA methyltransferase 1-like
  Uniprot ID: Q7Z2T5
  ENSP ID: ENSP00000356476
MENMAEEELLPLEKEEVEVAQVQVPTPARDSAGVPAPAPDSALDSAPTPASAPAPAPALAQAPALSPSLASAPEEAKSKRHISIQRQLADLENLAFVTDGNFDSASSLNSDNLDAGNRQACPLCPKEKFRACNSHKLRRHLQNLHWKVSVEFEGYRMCICHLPCRPVKPNIIGEQITSKMGAHYHCIICSATITRRTDMLGHVRRHMNKGETKSSYIAASTAKPPKEILKEADTDVQVCPNYSIPQKTDSYFNPKMKLNRQLIFCTLAALAEERKPLECLDAFGATGIMGLQWAKHLGNAVKVTINDLNENSVTLIQENCHLNKLKVVVDSKEKEKSDDILEEGEKNLGNIKVTKMDANVLMHLRSFDFIHLDPFGTSVNYLDSAFRNIRNLGIVSVTSTDISSLYAKAQHVARRHYGCNIVRTEYYKELAARIVVAAVARAAARCNKGIEVLFAVALEHFVLVVVRVLRGPTSADETAKKIQYLIHCQWCEERIFQKDGNMVEENPYRQLPCNCHGSMPGKTAIELGPLWSSSLFNTGFLKRMLFESLHHGLDDIQTLIKTLIFESECTPQSQFSIHASSNVNKQEENGVFIKTTDDTTTDNYIAQGKRKSNEMITNLGKKQKTDVSTEHPPFYYNIHRHSIKGMNMPKLKKFLCYLSQAGFRVSRTHFDPMGVRTDAPLMQFKSILLKYSTPTYTGGQSESHVQSASEDTVTERVEMSVNDKAEASGCRRW

SEQ ID NO: 92854 - protein, 212 aa, Homo sapiens
  Payload ID: 18562
  Gene Name: tRNA methyltransferase 1-like
  ENSP ID: ENSP00000414339
TSVNYLDSAFRNIRNLGIVSVTSTDISSLYAKAQHVARRHYGCNIVRTEYYKELAARIVVAAVARAAARCNKGIEVLFAVALEHFVLVVVRVLRGPTSADETAKKIQYLIHCQWCEERIFQKDGNMVEENPYRQLPCNCHGSMPGKTAIELGPLWSSSLFNTGFLKRMLFESLHHGLDDIQTLIKTLIFESECTPQSQFSIHASSNVNKQGD

SEQ ID NO: 92855 - protein, 625 aa, Homo sapiens
  Payload ID: 18563
  Gene Name: tRNA methyltransferase 2 homolog A
  Uniprot ID: Q8IZ69
  ENSP ID: ENSP00000252136
MSENLDNEGPKPMESCGQESSSALSCPTVSVPPAAPAALEEVEKEGAGAATGPGPQPGLYSYIRDDLFTSEIFKLELQNVPRHASFSDVRRFLGRFGLQPHKTKLFGQPPCAFVTFRSAAERDKALRVLHGALWKGRPLSVRLARPKADPMARRRRQEGESEPPVTRVADVVTPLWTVPYAEQLERKQLECEQVLQKLAKEIGSTNRALLPWLLEQRHKHNKACCPLEGVRPSPQQTEYRNKCEFLVGVGVDGEDNTVGCRLGKYKGGTCAVAAPFDTVHIPEATKQVVKAFQEFIRSTPYSAYDPETYTGHWKQLTVRTSRRHQAMAIAYFHPQKLSPEELAELKTSLAQHFTAGPGRASGVTCLYFVEEGQRKTPSQEGLPLEHVAGDRCIHEDLLGLTFRISPHAFFQVNTPAAEVLYTVIQDWAQLDAGSMVLDVCCGTGTIGLALARKVKRVIGVELCPEAVEDARVNAQDNELSNVEFHCGRAEDLVPTLVSRLASQHLVAILDPPRAGLHSKVILAIRRAKNLRRLLYVSCNPRAAMGNFVDLCRAPSNRVKGIPFRPVKAVAVDLFPQTPHCEMLILFERVEHPNGTGVLGPHSPPAQPTPGPPDNTLQETGTFPSS

SEQ ID NO: 92856 - protein, 562 aa, Homo sapiens
  Payload ID: 18563
  Gene Name: tRNA methyltransferase 2 homolog A
  Uniprot ID: Q8IZ69
  ENSP ID: ENSP00000384968
MSENLDNEGPKPMESCGQESSSALSCPTVSVPPAAPAALEEVEKEGAGAATGPGPQPGLYSYIRDDLFTSEIFKLELQNVPRHASFSDVRRFLGRFGLQPHKTKLFGQPPCAFVTFRSAAERDKALRVLHGALWKGRPLSVRLARPKADPMARRRRQEGESEPPVTRVADVVTPLWTVPYAEQLERKQLECEQVLQKLAKEIGSTNRALLPWLLEQRHKHNKACCPLEGVRPSPQQTEYRNKCEFLVGVGVDGEDNTVGCRLGKYKGGTCAVAAPFDTVHIPEATKQVVKAFQEFIRSTPYSAYDPETYTGHWKQLTVRTSRRHQAMAIAYFHPQKLSPEELAELKTSLAQHFTAGPGRASGVTCLYFVEEGQRKTPSQEGLPLEHVAGDRCIHEDLLGLTFRISPHAFFQVNTPAAEVLYTVIQDWAQLDAGSMVLDVCCGTGTIGLALARKVKRVIGVELCPEAVEDARVNAQDNELSNVEFHCGRAEDLVPTLVSRLASQHLVAILDPPRAGLHSKVILAIRRAKNLRRLLYVSCNPRAAMGNFVDAPLFPPQPLQSPI

SEQ ID NO: 92857 - protein, 625 aa, Homo sapiens; identical to SEQ ID NO: 92855
  Payload ID: 18563
  Gene Name: tRNA methyltransferase 2 homolog A
  Uniprot ID: Q8IZ69
  ENSP ID: ENSP00000385807

SEQ ID NO: 92858 - protein, 142 aa, Homo sapiens
  Payload ID: 18563
  Gene Name: tRNA methyltransferase 2 homolog A
  ENSP ID: ENSP00000392261
  MOD_RES (1)..(1): Any amino acid
XEHTRSRGALHSHPGLGPIGCGEHGAGRVLWHRHHWPGPGPEGKEGHWGRAMPRGCGGRPGERPGQCLCRAPSNRVKGIPFRPVKAVAVDLFPQTPHCEMLILFERVEHPNGTGVLGPHSPPAQPTPGPPDNTLQETGTFPS

SEQ ID NO: 92859 - protein, 119 aa, Homo sapiens
  Payload ID: 18563
  Gene Name: tRNA methyltransferase 2 homolog A
  ENSP ID: ENSP00000393911
MESCGQESSSALSCPTVSVPPAAPAALEEVEKEGAGAATGPGPQPGLYSYIRDDLFTSEIFKLELQNVPRHASFSDVRRFLGRFGLQPHKTKLFGQPPCAFVTFRSAAERDKALRVLHG

SEQ ID NO: 92860 - protein, 643 aa, Homo sapiens
  Payload ID: 18563
  Gene Name: tRNA methyltransferase 2 homolog A
  ENSP ID: ENSP00000395738
MSENLDNEGPKPMESCGQESSSALSCPTVSVPPAAPAALEEVEKEGAGAATGPGPQPGLYSYIRDDLFTSEIFKLELQNVPRHASFSDVRRFLGRFGLQPHKTKLFGQPPCAFVTFRSAAERDKALRVLHGALWKGRPLSVRLARPKADPMARRRRQEGESEPPVTRVADVVTPLWTVPYAEQLERKQLECEQVLQKLAKEIGSTNRALLPWLLEQRHKHNKACCPLEGVRPSPQQTEYRNKCEFLVGVGVDGEDNTVGCRLGKYKGGTCAVAAPFDTVHIPEATKQVVKAFQEFIRSTPYSAYDPETYTGHWKQLTVRTSRRHQAMAIAYFHPQKLSPEELAELKTSLAQHFTAGPGRASGVTCLYFVEEGQRKTPSQEGLPLEHVAGDRCIHEDLLGLTFRISPHAFFQVNTPAAEVLYTVIQDWAQLDAGSMVLDVCCGTGTIGLALARGPMYSPPWVGRHHAFLFQKVKRVIGVELCPEAVEDARVNAQDNELSNVEFHCGRAEDLVPTLVSRLASQHLVAILDPPRAGLHSKVILAIRRAKNLRRLLYVSCNPRAAMGNFVDLCRAPSNRVKGIPFRPVKAVAVDLFPQTPHCEMLILFERVEHPNGTGVLGPHSPPAQPTPGPPDNTLQETGTFPSS

SEQ ID NO: 92861 - protein, 158 aa, Homo sapiens
  Payload ID: 18563
  Gene Name: tRNA methyltransferase 2 homolog A
  ENSP ID: ENSP00000397744
KVKRVIGVELCPEAVEDARVNAQDNELSNVEFHCGRAEDLVPTLVSRLASQHLVAILDPPRAGLHSKVILAIRRAKNLRRLLLCRAPSNRVKGIPFRPVKAVAVDLFPQTPHCEMLILFERVEHPNGTGVLGPHSPPAQPTPGPPDNTLQETGTFPSS

SEQ ID NO: 92862 - protein, 504 aa, Homo sapiens
  Payload ID: 18564
  Gene Name: tRNA methyltransferase 2 homolog B
  Uniprot ID: Q96GJ1
  ENSP ID: ENSP00000362026
MAGLKRRVPLHSLRYFISMVGLFSKPGLLPWYARNPPGWSQLFLGTVCKGDFTRVIATKCQKGQKSQKKPSHLGPLDGSWQERLADVVTPLWRLSYEEQLKVKFAAQKKILQRLESYIQMLNGVSVTTAVPKSERLSCLLHPIIPSPVINGYRNKSTFSVNRGPDGNPKTVGFYLGTWRDGNVVCVQSNHLKNIPEKHSQVAQYYEVFLRQSPLEPCLVFHEGGYWRELTVRTNSQGHTMAIITFHPQKLSQEELHVQKEIVKEFFIRGPGAACGLTSLYFQESTMTRCSHQQSPYQLLFGEPYIFEELLSLKIRISPDAFFQINTAGAEMLYRTVGELTGVNSDTILLDICCGTGVIGLSLAQHTSRVLGIELLEQAVEDARWTAAFNGITNSEFHTGQAEKILPGLLKSKEDGQSIVAVVNPARAGLHYKVIQAIRNFRAIHTLVFVSCKLHGESTRNVIELCCPPDPAKKLLGEPFVLQQAVPVDLFPHTPHCELVLLFTR

SEQ ID NO: 92863 - protein, 504 aa, Homo sapiens; identical to SEQ ID NO: 92862
  Payload ID: 18564
  Gene Name: tRNA methyltransferase 2 homolog B
  Uniprot ID: Q96GJ1
  ENSP ID: ENSP00000362027

SEQ ID NO: 92864 - protein, 459 aa, Homo sapiens
  Payload ID: 18564
  Gene Name: tRNA methyltransferase 2 homolog B
  Uniprot ID: Q96GJ1
  ENSP ID: ENSP00000362030
MAGLKRRVPLHSLRYFISMVGLFSKPGLLPWYARNPPGWSQLFLGTVCKGDFTRVIATKCQKGQKSQKKPSHLGPLDGSWQERLADVVTPLWRLSYEEQLKPVINGYRNKSTFSVNRGPDGNPKTVGFYLGTWRDGNVVCVQSNHLKNIPEKHSQVAQYYEVFLRQSPLEPCLVFHEGGYWRELTVRTNSQGHTMAIITFHPQKLSQEELHVQKEIVKEFFIRGPGAACGLTSLYFQESTMTRCSHQQSPYQLLFGEPYIFEELLSLKIRISPDAFFQINTAGAEMLYRTVGELTGVNSDTILLDICCGTGVIGLSLAQHTSRVLGIELLEQAVEDARWTAAFNGITNSEFHTGQAEKILPGLLKSKEDGQSIVAVVNPARAGLHYKVIQAIRNFRAIHTLVFVSCKLHGESTRNVIELCCPPDPAKKLLGEPFVLQQAVPVDLFPHTPHCELVLLFTR

SEQ ID NO: 92865 - protein, 504 aa, Homo sapiens; identical to SEQ ID NO: 92862
  Payload ID: 18564
  Gene Name: tRNA methyltransferase 2 homolog B
  Uniprot ID: Q96GJ1
  ENSP ID: ENSP00000438134

SEQ ID NO: 92866 - protein, 757 aa, Homo sapiens
  Payload ID: 18565
  Gene Name: tRNA methyltransferase 44 homolog (S. cerevisiae)
  Uniprot ID: Q8IYL2
  ENSP ID: ENSP00000374387
MAEVGRTGISYPGALLPQGFWAAVEVWLERPQVANKRLCGARLEARWSAALPCAEARGPGTSAGSEQKERGPGPGQGSPGGGPGPRSLSGPEQGTACCELEEAQGQCQQEEAQREAASVPLRDSGHPGHAEGREGDFPAADLDSLWEDFSQSLARGNSELLAFLTSSGAGSQPEAQRELDVVLRTVIPKTSPHCPLTTPRREIVVQDVLNGTITFLPLEEDDEGNLKVKMSNVYQIQLSHSKEEWFISVLIFCPERWHSDGIVYPKPTWLGEELLAKLAKWSVENKKSDFKSTLSLISIMKYSKAYQELKEKYKEMVKVWPEVTDPEKFVYEDVAIAAYLLILWEEERAERRLTARQSFVDLGCGNGLLVHILSSEGHPGRGIDVRRRKIWDMYGPQTQLEEDAITPNDKTLFPDVDWLIGNHSDELTPWIPVIAARSSYNCRFFVLPCCFFDFIGRYSRRQSKKTQYREYLDFIKEVGFTCGFHVDEDCLRIPSTKRVCLVGKSRTYPSSREASVDEKRTQYIKSRRGCPVSPPGWELSPSPRWVAAGSAGHCDGQQALDARVGCVTRAWAAEHGAGPQAEGPWLPGFHPREKAERVRNCAALPRDFIDQVVLQVANLLLGGKQLNTRSSRNGSLKTWNGGESLSLAEVANELDTETLRRLKRECGGLQTLLRNSHQVFQVVNGRVHIRDWREETLWKTKQPEAKQRLLSEACKTRLCWFFMHHPDGCALSTDCCPFAHGPAELRPPRTTPRKKIS

SEQ ID NO: 92867 - protein, 411 aa, Homo sapiens
  Payload ID: 18565
  Gene Name: tRNA methyltransferase 44 homolog (S. cerevisiae)
  Uniprot ID: Q8IYL2
  ENSP ID: ENSP00000424643
MCIKFSSVIAKKNERWHSDGIVYPKPTWLGEELLAKLAKWSVENKKSDFKSTLSLISIMKYSKAYQELKEKYKEMVKVWPEVTDPEKFVYEDVAIAAYLLILWEEERAERRLTARQSFVDLGCGNGLLVHILSSEGHPGRGIDVRRRKIWDMYGPQTQLEEDAITPNDKTLFPDVDWLIGNHSDELTPWIPVIAARSSYNCRFFVLPCCFFDFIGRYSRRQSKKTQYREYLDFIKEVGFTCGFHVDEDCLRIPSTKRVCLVGKSRTYPSSREASVDEKRTQYIKSRRGCPVSPPGWELSPSPRWVAAGSAGHCDGQQALDARVGCVTRAWAAEHGAGPQAEGPWLPGFHPREKAERVRNCAALPRDFIDQVVLQVANLLLGGKQLNTRSSRNGSLKTWNGGGKLSTILGRG

SEQ ID NO: 92868 - protein, 220 aa, Homo sapiens
  Payload ID: 18565
  Gene Name: tRNA methyltransferase 44 homolog (S. cerevisiae)
  ENSP ID: ENSP00000434207
  MOD_RES (1)..(1): Any amino acid
XSAALPCAEARGPGTSAGSEQKERGPGPGQGSPGGGPGPRSLSGPEQGTACCELEEAQGQCQQEEAQREAASVPLRDSGHPGHAEGREGDFPAADLDSLWEDFSQSLARGNSELLAFLTSSGAGSQPEAQRELDVVLRTVIPKTSPHCPLTTPRREIVVQERWHSDGIVYPKPTWLGEELLAKLAKWSVENKKSDFKSTLSLISIMKYSKAYQELKEKYK

SEQ ID NO: 92869 - protein, 509 aa, Homo sapiens
  Payload ID: 18566
  Gene Name: tRNA methyltransferase 5
  Uniprot ID: Q32P41
  ENSP ID: ENSP00000261249
MVLWILWRPFGFSGRFLKLESHSITESKSLIPVAWTSLTQMLLEAPGIFLLGQRKRFSTMPETETHERETELFSPPSDVRGMTKLDRTAFKKTVNIPVLKVRKEIVSKLMRSLKRAALQRPGIRRVIEDPEDKESRLIMLDPYKIFTHDSFEKAELSVLEQLNVSPQISKYNLELTYEHFKSEEILRAVLPEGQDVTSGFSRIGHIAHLNLRDHQLPFKHLIGQVMIDKNPGITSAVNKINNIDNMYRNFQMEVLSGEQNMMTKVRENNYTYEFDFSKVYWNPRLSTEHSRITELLKPGDVLFDVFAGVGPFAIPVAKKNCTVFANDLNPESHKWLLYNCKLNKVDQKVKVFNLDGKDFLQGPVKEELMQLLGLSKERKPSVHVVMNLPAKAIEFLSAFKWLLDGQPCSSEFLPIVHCYSFSKDANPAEDVRQRAGAVLGISLEACSSVHLVRNVAPNKEMLCITFQIPASVLYKNQTRNPENHEDPPLKRQRTAEAFSDEKTQIVSNT

SEQ ID NO: 92870 - protein, 152 aa, Homo sapiens
  Payload ID: 18566
  Gene Name: tRNA methyltransferase 5
  ENSP ID: ENSP00000451666
MVQGRYQPAQGCSLPCAAWAQKHREVTHPPRILWRPFGFSGRFLKLESHSITESKSLIPVAWTSLTQMLLEAPGIFLLGQRKRFSTMPETETHERETELFSPPSDVRGMTKLDRTAFKKTVNIPVLKVRKEIVSKLMRSLKRAALQRPGIRR

SEQ ID NO: 92871 - protein, 169 aa, Homo sapiens
  Payload ID: 18566
  Gene Name: tRNA methyltransferase 5
  ENSP ID: ENSP00000452567
MTRALFAANSDDVIEDPPIHPRPTSDRYRSGRILWRPFGFSGRFLKLESHSITESKSLIPVAWTSLTQMLLEAPGIFLLGQRKRFSTMPETETHERETELFSPPSDVRGMTKLDRTAFKKTVNIPVLKVRKEIVSKLMRSLKRAALQRPGIRRVIEDPEDKESRLIMLD

SEQ ID NO: 92872 - protein, 497 aa, Homo sapiens
  Payload ID: 18567
  Gene Name: tRNA methyltransferase 6
  Uniprot ID: Q9UJA5
  ENSP ID: ENSP00000203001
MEGSGEQPGPQPQHPGDHRIRDGDFVVLKREDVFKAVQVQRRKKVTFEKQWFYLDNVIGHSYGTAFEVTSGGSLQPKKKREEPTAETKEAGTDNRNIVDDGKSQKLTQDDIKALKDKGIKGEEIVQQLIENSTTFRDKTEFAQDKYIKKKKKKYEAIITVVKPSTRILSIMYYAREPGKINHMRYDTLAQMLTLGNIRAGNKMIVMETCAGLVLGAMMERMGGFGSIIQLYPGGGPVRAATACFGFPKSFLSGLYEFPLNKVDSLLHGTFSAKMLSSEPKDSALVEESNGTLEEKQASEQENEDSMAEAPESNHPEDQETMETISQDPEHKGPKERGSKKDYIQEKQRRQEEQRKRHLEAAALLSERNADGLIVASRFHPTPLLLSLLDFVAPSRPFVVYCQYKEPLLECYTKLRERGGVINLRLSETWLRNYQVLPDRSHPKLLMSGGGGYLLSGFTVAMDNLKADTSLKSNASTLESHETEEPAAKKRKCPESDS

SEQ ID NO: 92873 - protein, 327 aa, Homo sapiens
  Payload ID: 18567
  Gene Name: tRNA methyltransferase 6
  Uniprot ID: Q9UJA5
  ENSP ID: ENSP00000392070
MYYAREPGKINHMRYDTLAQMLTLGNIRAGNKMIVMETCAGLVLGAMMERMGGFGSIIQLYPGGGPVRAATACFGFPKSFLSGLYEFPLNKVDSLLHGTFSAKMLSSEPKDSALVEESNGTLEEKQASEQENEDSMAEAPESNHPEDQETMETISQDPEHKGPKERGSKKDYIQEKQRRQEEQRKRHLEAAALLSERNADGLIVASRFHPTPLLLSLLDFVAPSRPFVVYCQYKEPLLECYTKLRERGGVINLRLSETWLRNYQVLPDRSHPKLLMSGGGGYLLSGFTVAMDNLKADTSLKSNASTLESHETEEPAAKKRKCPESDS

SEQ ID NO: 92874 - protein, 191 aa, Homo sapiens
  Payload ID: 18568
  Gene Name: tRNA methyltransferase 61A
  ENSP ID: ENSP00000299202
  MOD_RES (1)..(1): Any amino acid
XHVWSPGSRSVAGTGSGSVSHAIIRTIAPTGHLHTVEFHQQRAEKAREEFQEHRVGRWVTVRTQDVCRSGFGVSHVADAVFLDIPSPWEAVGHAWDALKVEGGRFCSFSPCIEQVQRTCQALAARGFSELSTLEVLPQVYNVRTVSLPPPDLGTGTDGPAGSDTSPFRSGTPMKEAVGHTGYLTFATKTPG

SEQ ID NO: 92875 - protein, 289 aa, Homo sapiens
  Payload ID: 18568
  Gene Name: tRNA methyltransferase 61A
  Uniprot ID: Q96FX7
  ENSP ID: ENSP00000374399
MSFVAYEELIKEGDTAILSLGHGAMVAVRVQRGAQTQTRHGVLRHSVDLIGRPFGSKVTCGRGGWVYVLHPTPELWTLNLPHRTQILYSTDIALITMMLELRPGSVVCESGTGSGSVSHAIIRTIAPTGHLHTVEFHQQRAEKAREEFQEHRVGRWVTVRTQDVCRSGFGVSHVADAVFLDIPSPWEAVGHAWDALKVEGGRFCSFSPCIEQVQRTCQALAARGFSELSTLEVLPQVYNVRTVSLPPPDLGTGTDGPAGSDTSPFRSGTPMKEAVGHTGYLTFATKTPG

SEQ ID NO: 92876 - protein, 477 aa, Homo sapiens [sequence omitted]

SEQ ID NO: 92877 - protein, 366 aa, Homo sapiens
  Payload ID: 18569
  Gene Name: tRNA methyltransferase 61B
  ENSP ID: ENSP00000389617
MLMAWCRGPVLLCLRQGLGTNSFLHGLGQEPFEGARSLCCRSSPRDLRDGEREHEAAQRKAPGAESCPSLPLSISDIGTGCLSSLENLRLPTLREESSPRELEDSSGDQGRCGPTHQGSEDPSMLSQAQSATEVEERHVSPSCSTSRERPFQAGELILAETGEGETKFKKLFRLNNFGLLNSNWGAVPFGKIVGKFPGQILRSSFGKQYMLRRPALEDYVVLMKRGTAITFPKDINMILSMMDINPGDTVLEAGSGSGGMSLFLSKAVGSQGRVISFEVRKDHHDLAKKNYKHWRDSWKLSHVEEWPDNVDFIHKDISGATEDIKSLTFDAVALDMLNPHVTLPVFYPHLKHGGVCAVYVVKRIAF

SEQ ID NO: 92878 - protein, 102 aa, Homo sapiens
  Payload ID: 18569
  Gene Name: tRNA methyltransferase 61B
  ENSP ID: ENSP00000405467
  MOD_RES (1)..(1): Any amino acid
XELLDGIRTCELALSCEKISEVIVRDWLVCLAKQKNGILAQKVESKINTDVQLDSQEKIGVKEESHSDFPYGSFPYVARPVHWQPGHTAFLVKLRKVKPQLN

SEQ ID NO: 92879 - protein, 159 aa, Homo sapiens
  Payload ID: 18570
  Gene Name: tRNA methyltransferase O
  ENSP ID: ENSP00000364258
RGLEESGPRPTATPCGCVKPALETGNLLTEPVGYLESCFSAKNGTPRQPSICSYSRACLRIRKRIFNNPEHSLMGLEQFSHVWILFVFHKNGHLSCKAKVQPPRLNGAKTGVFSTRSPHRPNAIGLTLAKLEKVEALGKWTDIMAAVLMSTVLCGRSLG

SEQ ID NO: 92880 - protein, 295 aa, Homo sapiens [sequence omitted]

SEQ ID NO: 92881 - protein, 441 aa, Homo sapiens
  Payload ID: 18570
  Gene Name: tRNA methyltransferase O
  Uniprot ID: Q9BU70
  ENSP ID: ENSP00000364260
MRGLEESGPRPTATPCGCVKPALETGNLLTEPVGYLESCFSAKNGTPRQPSICSYSRACLRIRKRIFNNPEHSLMGLEQFSHVWILFVFHKNGHLSCKAKVQPPRLNGAKTGVFSTRSPHRPNAIGLTLAKLEKVEGGAIYLSGIDMIHGTPVLDIKPYIAEYDSPQNVMEPLADFNLQNNQHTPNTVSQSDSKTDSCDQRQLSGCDEPQPHHSTKRKPKCPEDRTSEENYLTHSDTARIQQAFPMHREIAVDFGLESRRDQSSSVAEEQIGPYCPEKSFSEKGTDKKLERVEGAAVLQGSRAETQPMAPHCPAGRADGAPRSVVPAWVTEAPVATLEVRFTPHAEMDLGQLSSQDVGQASFKYFQSAEEAKRAIEAVLSADPRSVYRRKLCQDRLFYFTVDIAHVTCWFGDGFAEVLRIKPASEPVHMTGPVGSLVSLGS

SEQ ID NO: 92882 - protein, 172 aa, Homo sapiens
  Payload ID: 18570
  Gene Name: tRNA methyltransferase O
  ENSP ID: ENSP00000408473
GLEESGPRPTATPCGCVKPALETGNLLTEPVGYLESCFSAKNGTPRQPSICSYSRACLRIRKRIFNNPEHSLMGLEQFSHVWILFVFHKNGHLSCKAKVQPPRLNGAKTGVFSTRSPHRPNAIGLTLAKLEKVEGNPFHFYFYLFPHPKKPYKINSIHHWLFIQTSTNDVNS

SEQ ID NO: 92883 - protein, 185 aa, Homo sapiens [sequence omitted]

SEQ ID NO: 92884 - protein, 434 aa, Homo sapiens
  Payload ID: 18571
  Gene Name: tRNA nucleotidyl transferase, CCA-adding, 1
  Uniprot ID: Q96Q11
  ENSP ID: ENSP00000251607
MLRCLYHWHRPVLNRRWSRLCLPKQYLFTMKLQSPEFQSLFTEGLKSLTELFVKENHELRIAGGAVRDLLNGVKPQDIDFATTATPTQMKEMFQSAGIRMINNRGEKHGTITARLHEENFEITTLRIDVTTDGRHAEVEFTTDWQKDAERRDLTINSMFLGFDGTLFDYFNGYEDLKNKKVRFVGHAKQRIQEDYLRILRYFRFYGRIVDKPGDHDPETLEAIAENAKGLAGISGERIWVELKKILVGNHVNHLIHLIYDLDVAPYIGLPANASLEEFDKVSKNVDGFSPKPVTLLASLFKVQDDVTKLDLRLKIAKEEKNLGLFIVKNRKDLIKATDSSDPLKPYQDFIIDSREPDATTRVCELLKYQGEHCLLKEMQQWSIPPFPVSGHDIRKVGISSGKEIGALLQQLREQWKKSGYQMEKDELLSYIKKT

SEQ ID NO: 92885 - protein, 414 aa, Homo sapiens
  Payload ID: 18571
  Gene Name: tRNA nucleotidyl transferase, CCA-adding, 1
  Uniprot ID: Q96Q11
  ENSP ID: ENSP00000280591
MLRCLYHWHRPVLNRRWSRLCLPKQYLFTMKLQSPEFQSLFTEGLKSLTELFVKENHELRIAGGAVRDLLNGVKPQDIDFATTATPTQMKEMFQSAGIRMINNRGEKHGTITARLHEENFEITTLRIDVTTDGRHAEVEFTTDWQKDAERRDLTINSMFLGFDGTLFDYFNGYEDLKNKKVRFVGHAKQRIQEDYLRILRYFRFYGRIVDKPGDHDPETLEAIAENAKGLAGISGERIWVELKKILVGLPANASLEEFDKVSKNVDGFSPKPVTLLASLFKVQDDVTKLDLRLKIAKEEKNLGLFIVKNRKDLIKATDSSDPLKPYQDFIIDSREPDATTRVCELLKYQGEHCLLKEMQQWSIPPFPVSGHDIRKVGISSGKEIGALLQQLREQWKKSGYQMEKDELLSYIKKT

SEQ ID NO: 92886 - protein, 57 aa, Homo sapiens
  Payload ID: 18571
  Gene Name: tRNA nucleotidyl transferase, CCA-adding, 1
  Uniprot ID: Q96Q11
  ENSP ID: ENSP00000342985
MLRCLYHWHRPVLNRRWSRLCLPKQYLFTMKLQSPEFQSLFTEGLKSLTGINAFHEN

SEQ ID NO: 92887 - protein, 65 aa, Homo sapiens
  Payload ID: 18571
  Gene Name: tRNA nucleotidyl transferase, CCA-adding, 1
  ENSP ID: ENSP00000380881
MLRCLYHWHRPVLNRRWSRLCLPKQYLFTMKLQSPEFQSLFTEGLKSLTDKVLLCHPGWSAVARS

SEQ ID NO: 92888 - protein, 57 aa, Homo sapiens; identical to SEQ ID NO: 92886
  Payload ID: 18571
  Gene Name: tRNA nucleotidyl transferase, CCA-adding, 1
  Uniprot ID: Q96Q11
  ENSP ID: ENSP00000385745

SEQ ID NO: 92889 - protein, 62 aa, Homo sapiens
  Payload ID: 18571
  Gene Name: tRNA nucleotidyl transferase, CCA-adding, 1
  ENSP ID: ENSP00000388615
MLRCLYHWHRPVLNRRWSRLCLPKQYLFTMKLQSPEFQSLFTEGLKSLTELFVKENHELRIA

SEQ ID NO: 92890 - protein, 57 aa, Homo sapiens; identical to SEQ ID NO: 92886
  Payload ID: 18571
  Gene Name: tRNA nucleotidyl transferase, CCA-adding, 1
  Uniprot ID: Q96Q11
  ENSP ID: ENSP00000400394

SEQ ID NO: 92891 - protein, 434 aa, Homo sapiens; identical to SEQ ID NO: 92884
  Payload ID: 18571
  Gene Name: tRNA nucleotidyl transferase, CCA-adding, 1
  Uniprot ID: Q96Q11
  ENSP ID: ENSP00000415100

SEQ ID NO: 92892 - protein, 253 aa, Homo sapiens
  Payload ID: 18572
  Gene Name: tRNA phosphotransferase 1
  Uniprot ID: Q86TN4
  ENSP ID: ENSP00000314073
MNFSGGGRQEAAGSRGRRAPRPREQDRDVQLSKALSYALRHGALKLGLPMGADGFVPLGTLLQLPQFRGFSAEDVQRVVDTNRKQRFALQLGDPSTGLLIRANQGHSLQVPKLELMPLETPQALPPMLVHGTFWKHWPSILLKGLSCQGRTHIHLAPGLPGDPGIISGMRSHCEIAVFIDGPLALADGIPFFRSANGVILTPGNTDGFLLPKYFKEALQLRPTRKPLSLAGDEETECQSSPKHSSRERRRIQQ

SEQ ID NO: 92893 - protein, 255 aa, Homo sapiens
  Payload ID: 18572
  Gene Name: tRNA phosphotransferase 1
  Uniprot ID: Q86TN4
  ENSP ID: ENSP00000378050
MNFSGGGRQEAAGSRGRRAPRPREQDRDVQLSKALSYALRHGALKLGLPMGADGFVPLGTLLQLPQFRGFSAEDVQRVVDTNRKQRFALQLGDPSTGLLIRANQGHSLQVGVPKLELMPLETPQALPPMLVHGTFWKHWPSILLKGLSCQGRTHIHLAPGLPGDPGIISGMRSHCEIAVFIDGPLALADGIPFFRSANGVILTPGNTDGFLLPKYFKEALQLRPTRKPLSLAGDEETECQSSPKHSSRERRRIQQ

SEQ ID NO: 92894 - protein, 204 aa, Homo sapiens
  Payload ID: 18572
  Gene Name: tRNA phosphotransferase 1
  Uniprot ID: Q86TN4
  ENSP ID: ENSP00000378051
MGADGFVPLGTLLQLPQFRGFSAEDVQRVVDTNRKQRFALQLGDPSTGLLIRANQGHSLQVPKLELMPLETPQALPPMLVHGTFWKHWPSILLKGLSCQGRTHIHLAPGLPGDPGIISGMRSHCEIAVFIDGPLALADGIPFFRSANGVILTPGNTDGFLLPKYFKEALQLRPTRKPLSLAGDEETECQSSPKHSSRERRRIQQ

SEQ ID NO: 92895 - protein, 167 aa, Homo sapiens
  Payload ID: 18572
  Gene Name: tRNA phosphotransferase 1
  ENSP ID: ENSP00000437741
MGADGFVPLGTLLQLPQFRGFSAEDVQRVVDTNRKQRFALQLGDPSTGLLIRANQGHSLQVPKLELMPLETPQALPPMLVHGTFWKHWPSILLKGLSCQGRTHIHLAPGLPGDPGIISGMRSHCEIAVFIDGPLALAGKPLSLAGDEETECQSSPKHSSRERRRIQQ

SEQ ID NO: 92896 - protein, 216 aa, Homo sapiens
  Payload ID: 18572
  Gene Name: tRNA phosphotransferase 1
  Uniprot ID: Q86TN4
  ENSP ID: ENSP00000438683
MNFSGGGRQEAAGSRGRRAPRPREQDRDVQLSKALSYALRHGALKLGLPMGADGFVPLGTLLQLPQFRGFSAEDVQRVVDTNRKQRFALQLGDPSTGLLIRANQGHSLQVPKLELMPLETPQALPPMLVHGTFWKHWPSILLKGLSCQGRTHIHLAPGLPGDPGIISGMRSHCEIAVFIDGPLALAGKPLSLAGDEETECQSSPKHSSRERRRIQQ

SEQ ID NO: 92897 - protein, 111 aa, Homo sapiens
  Payload ID: 18572
  Gene Name: tRNA phosphotransferase 1
  ENSP ID: ENSP00000439586
MLVHGTFWKHWPSILLKGLSCQGRTHIHLAPGLPGDPGIISGMRSHCEIAVFIDGPLALAGNTDGFLLPKYFKEALQLRPTRKPLSLAGDEETECQSSPKHSSRERRRIQQ

SEQ ID NO: 92898 - protein, 191 aa, Homo sapiens
  Payload ID: 18572
  Gene Name: tRNA phosphotransferase 1
  ENSP ID: ENSP00000442066
MNFSGGGRQEAAGSRGRRAPRPREQDRDVQLSKALSYALRHGALKLGLPMGADGFVPLGTLLQLPQFRGFSAEDVQRVVDTNRKQRFALQLGDPSTGLLIRANQGHSLQVGVPKLELMPLETPQALPPMLVHGTFWKHWPSILLKGLSCQGRTHIHLAPGLPGDPGIISGMRSHCEIAVFIDGPLALADGI

SEQ ID NO: 92899 - protein, 115 aa, Homo sapiens
  Payload ID: 18572
  Gene Name: tRNA phosphotransferase 1
  ENSP ID: ENSP00000445292
  MOD_RES (1)..(1): Any amino acid
XPSILLKGLSCQGRTHIHLAPGLPGDPGIISGMRSHCEIAVFIDGPLALADGIPFFRSANGVILTPGNTDGFLLPKYFKEALQLRPTRENHHPSPYSLFLKAVPFCPHLSPSFQP

SEQ ID NO: 92900 - protein, 287 aa, Homo sapiens
  Payload ID: 18573
  Gene Name: tRNA selenocysteine 1 associated protein 1
  Uniprot ID: Q9NX07
  ENSP ID: ENSP00000362936
MAASLWMGDLEPYMDENFISRAFATMGETVMSVKIIRNRLTGIPAGYCFVEFADLATAEKCLHKINGKPLPGATPAKRFKLNYATYGKQPDNSPEYSLFVGDLTPDVDDGMLYEFFVKVYPSCRGGKVVLDQTGVSKGYGFVKFTDELEQKRALTECQGAVGLGSKPVRLSVAIPKASRVKPVEYSQMYSYSYNQYYQQYQNYYAQWGYDQNTGSYSYSYPQYGYTQSTMQTYEEVGDDALEDPMPQLDVTEANKEFMEQSEELYDALMDCHWQPLDTVSSEIPAMM

SEQ ID NO: 92901 - protein, 298 aa, Homo sapiens
  Payload ID: 18574
  Gene Name: tRNA-histidine guanylyltransferase 1-like
  Uniprot ID: Q9NWX6
  ENSP ID: ENSP00000231198
MWGACKVKVHDSLATISITLRRYLRLGATMAKSKFEYVRDFEADDTCLAHCWVVVRLDGRNFHRFAEKHNFAKPNDSRALQLMTKCAQTVMEELEDIVIAYGQSDEYSFVFKRKTNWFKRRASKFMTHVASQFASSYVFYWRDYFEDQPLLYPPGFDGRVVVYPSNQTLKDYLSWRQADCHINNLYNTVFWALIQQSGLTPVQAQGRLQGTLAADKNEILFSEFNINYNNELPMYRKGTVLIWQKVDEVMTKEIKLPTEMEGKKMAVTRTRTKPVPLHCDIIGDAFWKEHPEILDEDS

SEQ ID NO: 92902 - protein, 124 aa, Homo sapiens
  Payload ID: 18574
  Gene Name: tRNA-histidine guanylyltransferase 1-like
  ENSP ID: ENSP00000428387
MWGACKVKVHDSLATISITLRRYLRLGATMAKSKFEYVRDFEADDTCLAHCWVVVRLDGRNFHRFAEKHNFAKPNDSRALQLMTKCAQTVMEELEDIVIAYGQSDEYSFVFKRKTNWFKRRARL

SEQ ID NO: 92903 - protein, 34 aa, Homo sapiens
  Payload ID: 18574
  Gene Name: tRNA-histidine guanylyltransferase 1-like
  ENSP ID: ENSP00000431090
  MOD_RES (1)..(1): Any amino acid
XEILFSEFNINYNNELPMYRKGTVLIWQKYQGVP

SEQ ID NO: 92904 - protein, 732 aa, Homo sapiens
  Payload ID: 18575
  Gene Name: tRNA-yW synthesizing protein 1 homolog (S. cerevisiae)
  Uniprot ID: Q9NV66
  ENSP ID: ENSP00000352645
MDPSADTWDLFSPLISLWINRFYIYLGFAVSISLWICVQIVIKTQGKNLQEKSVPKAAQDLMTNGYVSLQEKDIFVSGVKIFYGSQTGTAKGFATVLAEAVTSLDLPVAIINLKEYDPDDHLIEEVTSKNVCVFLVATYTDGLPTESAEWFCKWLEEASIDFRFGKTYLKGMRYAVFGLGNSAYASHFNKVGKNVDKWLWMLGAHRVMSRGEGDCDVVKSKHGSIEADFRAWKTKFISQLQALQKGERKKSCGGHCKKGKCESHQHGSEEREEGSHEQDELHHRDTEEEEPFESSSEEEFGGEDHQSLNSIVDVEDLGKIMDHVKKEKREKEQQEEKSGLFRNMGRNEDGERRAMITPALREALTKQGYQLIGSHSGVKLCRWTKSMLRGRGGCYKHTFYGIESHRCMETTPSLACANKCVFCWRHHTNPVGTEWRWKMDQPEMILKEAIENHQNMIKQFKGVPGVKAERFEEGMTVKHCALSLVGEPIMYPEINRFLKLLHQCKISSFLVTNAQFPAEIRNLEPVTQLYVSVDASTKDSLKKIDRPLFKDFWQRFLDSLKALAVKQQRTVYRLTLVKAWNVDELQAYAQLVSLGNPDFIEVKGVTYCGESSASSLTMAHVPWHEEVVQFVHELVDLIPEYEIACEHEHSNCLLIAHRKFKIGGEWWTWIDYNRFQELIQEYEDSGGSKTFSAKDYMARTPHWALFGASERGFDPKDTRHQRKNKSKAISGC

SEQ ID NO: 92905 - protein, 384 aa, Homo sapiens
  Payload ID: 18575
  Gene Name: tRNA-yW synthesizing protein 1 homolog (S. cerevisiae)
  Uniprot ID: Q9NV66
  ENSP ID: ENSP00000354795
MDPSADTWDLFSPLISLWINRFYIYLGFAVSISLWICVQIVIKTQGKNLQEKSVPKAAQDLMTNGYVSLQEKDIFVSGVKIFYGSQTGTAKGFATVLAEAVTSLDLPVAIINLKEYDPDDHLIEEVTSKNVCVFLVATYTDGLPTESAEWFCKWLEEASIDFRFGKTYLKGMRYAVFGLGNSAYASHFNKVGKNVDKWLWMLGAHRVMSRGEGDCDVVKSKHGSIEADFRAWKTKFISQLQALQKGERKKSCGGHCKKGKCESHQHGSEEREEGSHEQDELHHRDTEEEEPFESSSEEEFGGEDHQSLNSIVDVEDLGKIMDHVKKEKREKEQQEEKSGLFRNMGRNEDGERRAMITPALREALTKQVHAPRERRLLQTHILWN

SEQ ID NO: 92906 - protein, 134 aa, Homo sapiens
  Payload ID: 18575
  Gene Name: tRNA-yW synthesizing protein 1 homolog (S. cerevisiae)
  ENSP ID: ENSP00000398897
MDPSADTWDLFSPLISLWINRFYIYLGFAVSISLWICVQIVIKTQGKNLQEKSVPKAAQDLMTNGYVSLQEKDIFVSGVKIFYGSQTGTAKGFATVLAEAVTSLDLPVAIINLKEYDPDDHLIEEVGKNVDKWL

SEQ ID NO: 92907 - protein, 668 aa, Homo sapiens
  Payload ID: 18575
  Gene Name: tRNA-yW synthesizing protein 1 homolog (S. cerevisiae)
  ENSP ID: ENSP00000478959
MDPSADTWDLFSPLISLWINRFYIYLGFAVSISLWICVQIVIKTQGFATVLAEAVTSLDLPVAIINLKEYDPDDHLIEEVTSKNVCVFLVATYTDGLPTESAEWFCKWLEEASIDFRFGKTYLKGMRYAVFGLGNSAYASHFNKVGKNVDKWLWMLGAHRVMSRGEGDCDVVKSKHGSIEADFRAWKTKFISQLQALQKGERKKSCGGHCKKGKCESHQHGSEEREEGSHEQDELHHRDTEEEEPFESSSEEEFGGEDHQSLNSIVDVEDLGKIMDHVKKEKREKEQQEEKSGLFRNMGRNEDGERRAMITPALREALTKQVHAPRERRLLQTHILWNESHRCMETTPSLACANKCVFCWRHHTNPVGTEWRWKMDQPEMILKEAIENHQNMIKQFKGVPGVKAERFEEGMTVKHCALSLVGEPIMYPEINRFLKLLHQCKISSFLVTNAQFPAEIRNLEPVTQLYVSVDASTKDSLKKIDRPLFKDFWQRFLDSLKALAVKQQRTVYRLTLVKAWNVDELQAYAQLVSLGNPDFIEVKGVTYCGESSASSLTMAHVPWHEEVVQFVHELVDLIPEYEIACEHEHSNCLLIAHRKFKIGGEWWTWIDYNRFQELIQEYEDSGGSKTFSAKDYMARTPHWALFGASERGFDPKDTRHQRKNKSKAISGC

SEQ ID NO: 92908 - protein, 471 aa, Homo sapiens
  Payload ID: 18576
  Gene Name: tRNA-yW synthesizing protein 1 homolog B (S. cerevisiae)
  ENSP ID: ENSP00000480534
MDPSADTWDLSSPLISLWINRFYIYLGFAVSISLWICVQIVIEMQGFATVLAEAVTSLDLPVAIINLKEYDPDDHLIEEEEEPFESSSEEEFGGEDHQSLNSIVDVEDLGKIMDHVKKEKREKEQQEEKSGLFRNMGRNEDGERRAMITPALREALTKQVDAPRERSLLQTHILWNESHRCMETTPSLACANKCVFCWWHHNNPVGTEWLWKMDQPEMILKEAIENHQNMIKQFKGVPGVKAERFEEGMTVKHCALSLVGEPIMYPEINRFLKLLHQCKISSFLVTNAQFPAEIRNLEPVTQLYVSVDASTKDSLKKIDRPLFKDFWQQFLDSLKALAVKQQRTVYRLMLVKAWNVDELQAYAQLVSLGNPDFIEVKGVTYCRESSASSLTMAHVPWHEEVVQFVRELVDLIPEYEIACEHEHSNCLLIAHRKTVLGGTPGHGVTEIQWEEWIKKRLISQARWLISVIPAH

SEQ ID NO: 92909 - protein, 668 aa, Homo sapiens
  Payload ID: 18576
  Gene Name: tRNA-yW synthesizing protein 1 homolog B (S. cerevisiae)
  ENSP ID: ENSP00000482502
MDPSADTWDLSSPLISLWINRFYIYLGFAVSISLWICVQIVIEMQGFATVLAEAVTSLDLPVAIINLKEYDPDDHLIEEVTSKNVCVFLVATYTDGLPTESAEWFCKWLEEASIDFRFGKTYLKGMRDAVFGLGNSAYASHFNKVGKNVDKWLWMLGVHRVMSRGEGDCDVVKSKHGSIEANFRAWKTKFISQLQALQKGERKKSCGGHCKKGKCESHQHGSEEREEGSQEQDELHHRDTKEEEPFESSSEEEFGGEDHQSLNSIVDVEDLGKIMDHVKKEKREKEQQEEKSGLFRNMGRNEDGERRAMITPALREALTKQVDAPRERSLLQTHILWNESHRCMETTPSLACANKCVFCWWHHNNPVGTEWLWKMDQPEMILKEAIENHQNMIKQFKGVPGVKAERFEEGMTVKHCALSLVGEPIMYPEINRFLKLLHQCKISSFLVTNAQFPAEIRNLEPVTQLYVSVDASTKDSLKKIDRPLFKDFWQQFLDSLKALAVKQQRTVYRLMLVKAWNVDELQAYAQLVSLGNPDFIEVKGVTYCRESSASSLTMAHVPWHEEVVQFVRELVDLIPEYEIACEHEHSNCLLIAHRKFKIGGEWWTWIDYNRFQELIQEYEDSGGSKTFSAKDYMARTPHWALFGANERSFDPKDTRHQRKNKSKAISGC

SEQ ID NO: 92910 - protein, 325 aa, Homo sapiens
  Payload ID: 18576
  Gene Name: tRNA-yW synthesizing protein 1 homolog B (S. cerevisiae)
  ENSP ID: ENSP00000484480
MDPSADTWDLSSPLISLWINRFYIYLGFAVSISLWICVQIVIEMQGFATVLAEAVTSLDLPVAIINLKEYDPDDHLIEEVGKNVDKWLWMLGVHRVMSRGEGDCDVVKSKHGSIEANFRAWKTKFISQLQALQKGERKKSCGGHCKKGKCESHQHGSEEREEGSQEQDELHHRDTKEEEPFESSSEEEFGGEDHQSLNSIVDVEDLGKIMDHVKKEKREKEQQEEKSGLFRNMGRNEDGERRAMITPALREALTKQVDAPRERSLLQTHILWNESHRCMETTPSLACANKCVFCWWHHNNPVGTEWLWKMDQPEMILKEAIENHQ

SEQ ID NO: 92911 - protein, 259 aa, Homo sapiens
  Payload ID: 18577
  Gene Name: tRNA-yW synthesizing protein 3 homolog (S. cerevisiae)
  Uniprot ID: Q6IPR3
  ENSP ID: ENSP00000359904
MDRSAEFRKWKAQCLSKADLSRKGSVDEDVVELVQFLNMRDQFFTTSSCAGRILLLDRGINGFEVQKQNCCWLLVTHKLCVKDDVIVALKKANGDATLKFEPFVLHVQCRQLQDAQILHSMAIDSGFRNSGITVGKRGKTMLAVRSTHGLEVPLSHKGKLMVTEEYIDFLLNVANQKMEENKKRIERFYNCLQHALERETMTNLHPKIKEKNNSSYIHKKKRNPEKTRAQCITKESDEELENDDDDDLGINVTIFPEDY

SEQ ID NO: 92912 - protein, 226 aa, Homo sapiens
  Payload ID: 18577
  Gene Name: tRNA-yW synthesizing protein 3 homolog (S. cerevisiae)
  Uniprot ID: Q6IPR3
  ENSP ID: ENSP00000407025
MDRSAEFRKWKAQCLSKADLSRKGSVDEDVVELVQFLNMRDQFFTTSSCAGRILLLDRGINGFEVQKQNCCWLLVTHKLCVKDDVHSMAIDSGFRNSGITVGKRGKTMLAVRSTHGLEVPLSHKGKLMVTEEYIDFLLNVANQKMEENKKRIERFYNCLQHALERETMTNLHPKIKEKNNSSYIHKKKRNPEKTRAQCITKESDEELENDDDDDLGINVTIFPEDY

SEQ ID NO: 92913 - protein, 56 aa, Homo sapiens
  Payload ID: 18577
  Gene Name: tRNA-yW synthesizing protein 3 homolog (S. cerevisiae)
  ENSP ID: ENSP00000476365
MAIDSGFRNSGITVGKRGKTMLAVRSTHGLEVPLSHKGKLMVTEEYIDFLLNVANQ

SEQ ID NO: 92914 - protein, 139 aa, Homo sapiens
  Payload ID: 18577
  Gene Name: tRNA-yW synthesizing protein 3 homolog (S. cerevisiae)
  ENSP ID: ENSP00000477469
MAIDSGFRNSGITVGKRGKTMLAVRSTHGLEVPLSHKGKLMVTEEYIDFLLNVANQKMEENKKRIERFYNCLQHALERETMTNLHPKIKEKNNSSYIHKKKRNPEKTRAQCITKESDEELENDDDDDLGINVTIFPEDY

SEQ ID NO: 92915 - protein, 315 aa, Homo sapiens
  Payload ID: 18578
  Gene Name: tRNA-yW synthesizing protein 5
  Uniprot ID: A2RUC4
  ENSP ID: ENSP00000346627
MAGQHLPVPRLEGVSREQFMQHLYPQRKPLVLEGIDLGPCTSKWTVDYLSQVGGKKEVKIHVAAVAQMDFISKNFVYRTLPFDQLVQRAAEEKHKEFFVSEDEKYYLRSLGEDPRKDVADIRKQFPLLKGDIKFPEFFKEEQFFSSVFRISSPGLQLWTHYDVMDNLLIQVTGKKRVVLFSPRDAQYLYLKGTKSEVLNIDNPDLAKYPLFSKARRYECSLEAGDVLFIPALWFHNVISEEFGVGVNIFWKHLPSECYDKTDTYGNKDPTAASRAAQILDRALKTLAELPEEYRDFYARRMVLHIQDKAYSKNSE

SEQ ID NO: 92916 - protein, 121 aa, Homo sapiens
  Payload ID: 18578
  Gene Name: tRNA-yW synthesizing protein 5
  ENSP ID: ENSP00000398447
MAGQHLPVPRLEGVSREQFMQHLYPQRKPLVLEGIDLGPCTSKWTVDYLSQVGGKKEVKIHVAAVAQMDFIKLYLLTSWSRGQLKRNIKNSLFQRMRNTTYGHLEKTLERMLQISESSFLC

SEQ ID NO: 92917 - protein, 121 aa, Homo sapiens; identical to SEQ ID NO: 92916
  Payload ID: 18578
  Gene Name: tRNA-yW synthesizing protein 5
  ENSP ID: ENSP00000420024

SEQ ID NO: 92918 - protein, 1431 aa, Homo sapiens
  Payload ID: 18579
  Gene Name: trophinin
  Uniprot ID: Q12816
  ENSP ID: ENSP00000173898
MDRRNDYGYRVPLFQGPLPPPGSLGLPFPPDIQTETTEEDSVLLMHTLLAATKDSLAMDPPVVNRPKKSKTKKAPIKTITKAAPAAPPVPAANEIATNKPKITWQALNLPVITQISQALPTTEVTNTQASSVTAQPKKANKMKRVTAKAAQGSQSPTGHEGGTIQLKSPLQVLKLPVISQNIHAPIANESASSQALITSIKPKKASKAKKAANKAIASATEVSLAATATHTATTQGQITNETASIHTTAASIRTKKASKARKTIAKVINTDTEHIEALNVTDAATRQIEASVVAIRPKKSKGKKAASRGPNSVSEISEAPLATQIVTNQALAATLRVKRGSRARKAATKARATESQTPNADQGAQAKIASAQTNVSALETQVAAAVQALADDYLAQLSLEPTTRTRGKRNRKSKHLNGDERSGSNYRRIPWGRRPAPPRDVAILQERANKLVKYLLVKDQTKIPIKRSDMLRDVIQEYDEYFPEIIERASYTLEKMFRVNLKEIDKQSSLYILISTQESSAGILGTTKDTPKLGLLMVILSVIFMNGNKASEAVIWEVLRKLGLRPGVRHSLFGEVRKLITDEFVKQKYLEYKRVPNSRPPEYEFFWGLRSYHETSKMKVLKFACRVQKKDPKDWAVQYREAVEMEVQAAAVAVAEAEARAEARAQMGIGEEAVAGPWNWDDMDIDCLTREELGDDAQAWSRFSFEIEARAQENADASTNVNFSRGASTRAGFSDGASISFNGAPSSSGGFSGGPGITFGVAPSTSASFSNTASISFGGTLSTSSSFSSAASISFGCAHSTSTSFSSEASISFGGMPCTSASFSGGVSSSFSGPLSTSATFSGGASSGFGGTLSTTAGFSGVLSTSTSFGSAPTTSTVFSSALSTSTGFGGILSTSVCFGGSPSSSGSFGGTLSTSICFGGSPCTSTGFGGTLSTSVSFGGSSSTSANFGGTLSTSICFDGSPSTGAGFGGALNTSASFGSVLNTSTGFGGAMSTSADFGGTLSTSVCFGGSPGTSVSFGSALNTNAGYGGAVSTNTDFGGTLSTSVCFGGSPSTSAGFGGALNTNASFGCAVSTSASFSGAVSTSACFSGAPITNPGFGGAFSTSAGFGGALSTAADFGGTPSNSIGFGAAPSTSVSFGGAHGTSLCFGGAPSTSLCFGSASNTNLCFGGPPSTSACFSGATSPSFCDGPSTSTGFSFGNGLSTNAGFGGGLNTSAGFGGGLGTSAGFSGGLSTSSGFDGGLGTSAGFGGGPGTSTGFGGGLGTSAGFSGGLGTSAGFGGGLVTSDGFGGGLGTNASFGSTLGTSAGFSGGLSTSDGFGSRPNASFDRGLSTIIGFGSGSNTSTGFTGEPSTSTGFSSGPSSIVGFSGGPSTGVGFCSGPSTSGFSGGPSTGAGFGGGPNTGAGFGGGPSTSAGFGSGAASLGACGFSYG

SEQ ID NO: 92919 - protein, 706 aa, Homo sapiens
  Payload ID: 18579
  Gene Name: trophinin
  Uniprot ID: Q12816
  ENSP ID: ENSP00000318278
MDRRNDYGYRVPLFQGPLPPPGSLGLPFPPDIQTETTEEDSVLLMHTLLAATKDSLAMDPPVVNRPKKSKTKKAPIKTITKAAPAAPPVPAANEIATNKPKITWQALNLPVITQISQALPTTEVTNTQASSVTAQPKKANKMKRVTAKAAQGSQSPTGHEGGTIQLKSPLQVLKLPVISQNIHAPIANESASSQALITSIKPKKASKAKKAANKAIASATEVSLAATATHTATTQGQITNETASIHTTAASIRTKKASKARKTIAKVINTDTEHIEALNVTDAATRQIEASVVAIRPKKSKGKKAASRGPNSVSEISEAPLATQIVTNQALAATLRVKRGSRARKAATKARATESQTPNADQGAQAKIASAQTNVSALETQVAAAVQALADDYLAQLSLEPTTRTRGKRNRKSKHLNGDERSGSNYRRIPWGRRPAPPRDVAILQERANKLVKYLLVKDQTKIPIKRSDMLRDVIQEYDEYFPEIIERASYTLEKMFRVNLKEIDKQSSLYILISTQESSAGILGTTKDTPKLGLLMVILSVIFMNGNKASEAVIWEVLRKLGLRPGVRHSLFGEVRKLITDEFVKQKYLEYKRVPNSRPPEYEFFWGLRSYHETSKMKVLKFACRVQKKDPKDWAVQYREAVEMEVQAAAVAVAEAEARAEIYSPCLQIPLINCSSPSHGAKVHPWNLCPHSSQGSYGQSAEGVM

SEQ ID NO: 92920 - protein, 706 aa, Homo sapiens; identical to SEQ ID NO: 92919
  Payload ID: 18579
  Gene Name: trophinin
  Uniprot ID: Q12816
  ENSP ID: ENSP00000364162

SEQ ID NO: 92921 - protein, 1034 aa, Homo sapiens
  Payload ID: 18579
  Gene Name: trophinin
  Uniprot ID: Q12816
  ENSP ID: ENSP00000364181
MDRRNDYGYRVPLFQSKHLNGDERSGSNYRRIPWGRRPAPPRDVAILQERANKLVKYLLVKDQTKIPIKRSDMLRDVIQEYDEYFPEIIERASYTLEKMFRVNLKEIDKQSSLYILISTQESSAGILGTTKDTPKLGLLMVILSVIFMNGNKASEAVIWEVLRKLGLRPGVRHSLFGEVRKLITDEFVKQKYLEYKRVPNSRPPEYEFFWGLRSYHETSKMKVLKFACRVQKKDPKDWAVQYREAVEMEVQAAAVAVAEAEARAEARAQMGIGEEAVAGPWNWDDMDIDCLTREELGDDAQAWSRFSFEIEARAQENADASTNVNFSRGASTRAGFSDGASISFNGAPSSSGGFSGGPGITFGVAPSTSASFSNTASISFGGTLSTSSSFSSAASISFGCAHSTSTSFSSEASISFGGMPCTSASFSGGVSSSFSGPLSTSATFSGGASSGFGGTLSTTAGFSGVLSTSTSFGSAPTTSTVFSSALSTSTGFGGILSTSVCFGGSPSSSGSFGGTLSTSICFGGSPCTSTGFGGTLSTSVSFGGSSSTSANFGGTLSTSICFDGSPSTGAGFGGALNTSASFGSVLNTSTGFGGAMSTSADFGGTLSTSVCFGGSPGTSVSFGSALNTNAGYGGAVSTNTDFGGTLSTSVCFGGSPSTSAGFGGALNTNASFGCAVSTSASFSGAVSTSACFSGAPITNPGFGGAFSTSAGFGGALSTAADFGGTPSNSIGFGAAPSTSVSFGGAHGTSLCFGGAPSTSLCFGSASNTNLCFGGPPSTSACFSGATSPSFCDGPSTSTGFSFGNGLSTNAGFGGGLNTSAGFGGGLGTSAGFSGGLSTSSGFDGGLGTSAGFGGGPGTSTGFGGGLGTSAGFSGGLGTSAGFGGGLVTSDGFGGGLGTNASFGSTLGTSAGFSGGLSTSDGFGSRPNASFDRGLSTIIGFGSGSNTSTGFTGEPSTSTGFSSGPSSIVGFSGGPSTGVGFCSGPSTSGFSGGPSTGAGFGGGPNTGAGFGGGPSTSAGFGSGAASLGACGFSYG

SEQ ID NO: 92922 - protein, 309 aa, Homo sapiens
  Payload ID: 18579
  Gene Name: trophinin
  Uniprot ID: Q12816
  ENSP ID: ENSP00000382641
MDRRNDYGYRVPLFQSKHLNGDERSGSNYRRIPWGRRPAPPRDVAILQERANKLVKYLLVKDQTKIPIKRSDMLRDVIQEYDEYFPEIIERASYTLEKMFRVNLKEIDKQSSLYILISTQESSAGILGTTKDTPKLGLLMVILSVIFMNGNKASEAVIWEVLRKLGLRPGVRHSLFGEVRKLITDEFVKQKYLEYKRVPNSRPPEYEFFWGLRSYHETSKMKVLKFACRVQKKDPKDWAVQYREAVEMEVQAAAVAVAEAEARAEIYSPCLQIPLINCSSPSHGAKVHPWNLCPHSSQGSYGQSAEGVM

SEQ ID NO: 92923 - protein, 71 aa, Homo sapiens
  Payload ID: 18579
  Gene Name: trophinin
  ENSP ID: ENSP00000387676
MHTLLAATKDSLAMDPPVVNRPKKSKTKKAPIKTITKAAPAAPPVPAANEIATNKPKITWQALNLPVITQI

SEQ ID NO: 92924 - protein, 230 aa, Homo sapiens
  Payload ID: 18579
  Gene Name: trophinin
  ENSP ID: ENSP00000388947
MHTLLAATKDSLAMDPPVVNRPKKSKTKKAPIKTITKAAPAAPPVPAANEIATNKPKITWQALNLPVITQISQALPTTEVTNTQASSVTAQPKKANKMKRVTAKAAQGSQSPTGHEGGTIQLKSPLQVLKLPVISQNIHAPIANESASSQALITSIKPKKASKAKKAANKAIASATEVSLAATATHTATTQGQITNETASIHTTAASIRTKKASKARKTIAKVINTDTEH

SEQ ID NO: 92925 - protein, 123 aa, Homo sapiens
  Payload ID: 18579
  Gene Name: trophinin
  ENSP ID: ENSP00000392841
MHTLLAATKDSLAMDPPVVNRPKKSKTKKAPIKTITKAAPAAPPVPAANEIATNKPKITWQALNLPVITQISQALPTTEVTNTQASSVTAQPKKANKMKRVTAKAAQGSQSPTGHEGGTIQLK

SEQ ID NO: 92926 - protein, 168 aa, Homo sapiens
  Payload ID: 18579
  Gene Name: trophinin
  ENSP ID: ENSP00000404645
MDRRNDYGYRVPLFQGPLPPPGSLGLPFPPDIQTETTEEDSVLLMHTLLAATKDSLAMDPPVVNRPKKSKTKKAPIKTITKAAPAAPPVPAANEIATNKPKITWQALNLPVITQISQALPTTEVTNTQASSVTAQPKKANKMKRVTAKAAQGSQSPTGHEGGTIQLKS

SEQ ID NO: 92927 - protein, 168 aa, Homo sapiens; identical to SEQ ID NO: 92926
  Payload ID: 18579
  Gene Name: trophinin
  ENSP ID: ENSP00000404767

SEQ ID NO: 92928 - protein, 681 aa, Homo sapiens
  Payload ID: 18579
  Gene Name: trophinin
  ENSP ID: ENSP00000404794
MDRRNDYGYRVPLFQGPLPPPGSLGLPFPPDIQTETTEEDSVLLMHTLLAATKDSLAMDPPVVNRPKKSKTKKAPIKTITKAAPAAPPVPAANEIATNKPKITWQALNLPVITQISQALPTTEVTNTQASSVTAQPKKANKMKRVTAKAAQGSQSPTGHEGGTIQLKSPLQVLKLPVISQNIHAPIANESASSQALITSIKPKKASKAKKAANKAIASATEVSLAATATHTATTQGQITNETASIHTTAASIRTKKASKARKTIAKVINTDTEHIEALNVTDAATRQIEASVVAIRPKKSKGKKAASRGPNSVSEISEAPLATQIVTNQALAATLRVKRGSRARKAATKARATESQTPNADQGAQAKIASAQTNVSALETQVAAAVQALADDYLAQLSLEPTTRTRGKRNRKSKHLNGDERSGSNYRRIPWGRRPAPPRDVAILQERANKLVKYLLVKDQTKIPIKRSDMLRDVIQEYDEYFPEIIERASYTLEKMFRVNLKEIDKQSSLYILISTQESSAGILGTTKDTPKLGLLMVILSVIFMNGNKASEAVIWEVLRKLGLRPGVRHSLFGEVRKLITDEFVKQKYLEYKRVPNSRPPEYEFFWGLRSYHETSKMKVLKFACRVQKKDPKDWAVQYREAVEMEVQAAAVAVAEAEARAEWFQHQHWLYWRTQHQHGLQ

SEQ ID NO: 92929 - protein, 3 aa, Homo sapiens
  Payload ID: 18579
  Gene Name: trophinin
  ENSP ID: ENSP00000405043
MHT

SEQ ID NO: 92930 - protein, 962 aa, Homo sapiens
  Payload ID: 18579
  Gene Name: trophinin
  Uniprot ID: Q12816
  ENSP ID: ENSP00000405126
MLRDVIQEYDEYFPEIIERASYTLEKMFRVNLKEIDKQSSLYILISTQESSAGILGTTKDTPKLGLLMVILSVIFMNGNKASEAVIWEVLRKLGLRPGVRHSLFGEVRKLITDEFVKQKYLEYKRVPNSRPPEYEFFWGLRSYHETSKMKVLKFACRVQKKDPKDWAVQYREAVEMEVQAAAVAVAEAEARAEARAQMGIGEEAVAGPWNWDDMDIDCLTREELGDDAQAWSRFSFEIEARAQENADASTNVNFSRGASTRAGFSDGASISFNGAPSSSGGFSGGPGITFGVAPSTSASFSNTASISFGGTLSTSSSFSSAASISFGCAHSTSTSFSSEASISFGGMPCTSASFSGGVSSSFSGPLSTSATFSGGASSGFGGTLSTTAGFSGVLSTSTSFGSAPTTSTVFSSALSTSTGFGGILSTSVCFGGSPSSSGSFGGTLSTSICFGGSPCTSTGFGGTLSTSVSFGGSSSTSANFGGTLSTSICFDGSPSTGAGFGGALNTSASFGSVLNTSTGFGGAMSTSADFGGTLSTSVCFGGSPGTSVSFGSALNTNAGYGGAVSTNTDFGGTLSTSVCFGGSPSTSAGFGGALNTNASFGCAVSTSASFSGAVSTSACFSGAPITNPGFGGAFSTSAGFGGALSTAADFGGTPSNSIGFGAAPSTSVSFGGAHGTSLCFGGAPSTSLCFGSASNTNLCFGGPPSTSACFSGATSPSFCDGPSTSTGFSFGNGLSTNAGFGGGLNTSAGFGGGLGTSAGFSGGLSTSSGFDGGLGTSAGFGGGPGTSTGFGGGLGTSAGFSGGLGTSAGFGGGLVTSDGFGGGLGTNASFGSTLGTSAGFSGGLSTSDGFGSRPNASFDRGLSTIIGFGSGSNTSTGFTGEPSTSTGFSSGPSSIVGFSGGPSTGVGFCSGPSTSGFSGGPSTGAGFGGGPNTGAGFGGGPSTSAGFGSGAASLGACGFSYG

SEQ ID NO: 92931 - protein, 121 aa, Homo sapiens
  Payload ID: 18579
  Gene Name: trophinin
  ENSP ID: ENSP00000405311
MHTLLAATKDSLAMDPPVVNRPKKSKTKKAPIKTITKAAPAAPPVPAANEIATNKPKITWQALNLPVITQISQALPTTEVTNTQASSVTAQPKKANKMKRVTAKAAQGSQSPTGHEGGTIQ

SEQ ID NO: 92932 - protein, 176 aa, Homo sapiens
  Payload ID: 18579
  Gene Name: trophinin
  ENSP ID: ENSP00000406574
MDRRNDYGYRVPLFQGPLPPPGSLGLPFPPDIQTETTEEDSVLLMHTLLAATKDSLAMDPPVVNRPKKSKTKKAPIKTITKAAPAAPPVPAANEIATNKPKITWQALNLPVITQISQALPTTEVTNTQASSVTAQPKKANKMKRVTAKAAQGSQSPTGHEGGTIQLKSPLQVLKLP

SEQ ID NO: 92933 - protein, 102 aa, Homo sapiens
  Payload ID: 18579
  Gene Name: trophinin
  ENSP ID: ENSP00000407996
MDRRNDYGYRVPLFQSKHLNGDERSGSNYRRIPWGRRPAPPRDVAILQERANKLVKYLLVKDQTKIPIKRSDMLRDVIQEYDEYFPEIIERASYTLEKMFRV

SEQ ID NO: 92934 - protein, 192 aa, Homo sapiens
  Payload ID: 18579
  Gene Name: trophinin
  ENSP ID: ENSP00000411717
MHTLLAATKDSLAMDPPVVNRPKKSKTKKAPIKTITKAAPAAPPVPAANEIATNKPKITWQALNLPVITQISQALPTTEVTNTQASSVTAQPKKANKMKRVTAKAAQGSQSPTGHEGGTIQLKSPLQVLKLPVISQNIHAPIANESASSQALITSIKPKKASKAKKAANKAIASATEVSLAATATHTATTQG

SEQ ID NO: 92935 - protein, 64 aa, Homo sapiens
  Payload ID: 18579
  Gene Name: trophinin
  ENSP ID: ENSP00000412588
MHTLLAATKDSLAMDPPVVNRPKKSKTKKAPIKTITKAAPAAPPVPAANEIATNKPKITWQALN

SEQ ID NO: 92936 - protein, 357 aa, Homo sapiens
  Payload ID: 18579
  Gene Name: trophinin
  ENSP ID: ENSP00000483142
MDRRNDYGYRVPLFQSKHLNGDERSGSNYRRIPWGRRPAPPRDVAILQERANKLVKYLLVKDQTKIPIKRSDMLRDVIQEYDEYFPEIIERASYTLEKMFRVNLKEIDKQSSLYILISTQESSAGILGTTKDTPKLGLLMVILSVIFMNGNKASEAVIWEVLRKLGLRPGVRHSLFGEVRKLITDEFVKQKYLEYKRVPNSRPPEYEFFWGLRSYHETSKMKVLKFACRVQKKDPKDWAVQYREAVEMEVQLQLWLWLRLKPGLSGSNTSTGFTGEPSTSTGFSSGPSSIVGFSGGPSTGVGFCSGPSTSGFSGGPSTGAGFGGGPNTGAGFGGGPSTSAGFGSGAASLGACGFSYG

SEQ ID NO: 92937 - protein, 778 aa, Homo sapiens
  Payload ID: 18580
  Gene Name: trophinin associated protein
  Uniprot ID: Q12815
  ENSP ID: ENSP00000257909
MTTRQATKDPLLRGVSPTPSKIPVRSQKRTPFPTVTSCAVDQENQDPRRWVQKPPLNIQRPLVDSAGPRPKARHQAETSQRLVGISQPRNPLEELRPSPRGQNVGPGPPAQTEAPGTIEFVADPAALATILSGEGVKSCHLGRQPSLAKRVLVRGSQGGTTQRVQGVRASAYLAPRTPTHRLDPARASCFSRLEGPGPRGRTLCPQRLQALISPSGPSFHPSTRPSFQELRRETAGSSRTSVSQASGLLLETPVQPAFSLPKGEREVVTHSDEGGVASLGLAQRVPLRENREMSHTRDSHDSHLMPSPAPVAQPLPGHVVPCPSPFGRAQRVPSPGPPTLTSYSVLRRLTVQPKTRFTPMPSTPRVQQAQWLRGVSPQSCSEDPALPWEQVAVRLFDQESCIRSLEGSGKPPVATPSGPHSNRTPSLQEVKIQRIGILQQLLRQEVEGLVGGQCVPLNGGSSLDMVELQPLLTEISRTLNATEHNSGTSHLPGLLKHSGLPKPCLPEECGEPQPCPPAEPGPPEAFCRSEPEIPEPSLQEQLEVPEPYPPAEPRPLESCCRSEPEIPESSRQEQLEVPEPCPPAEPRPLESYCRIEPEIPESSRQEQLEVPEPCPPAEPGPLQPSTQGQSGPPGPCPRVELGASEPCTLEHRSLESSLPPCCSQWAPATTSLIFSSQHPLCASPPICSLQSLRPPAGQAGLSNLAPRTLALRERLKSCLTAIHCFHEARLDDECAFYTSRAPPSGPTRVCTNPVATLLEWQDALCFIPVGSAAPQGSP

SEQ ID NO: 92938 - protein, 144 aa, Homo sapiens
  Payload ID: 18580
  Gene Name: trophinin associated protein
  Uniprot ID: Q12815
  ENSP ID: ENSP00000369684
MTTRQATKDPLLRGVSPTPSKIPVRSQKRTPFPTVTSCAVDQENQDPRRWVQKPPLNIQRPLVDSAGPRPKARHQAETSQRLVGISQPRNPLEELRPSPRGQNVGPGPPAQTVLVPAPGKLFALRRSPFPPAKCHLARCHGLYL

SEQ ID NO: 92939 - protein, 53 aa, Homo sapiens
  Payload ID: 18580
  Gene Name: trophinin associated protein
  ENSP ID: ENSP00000446564
MTTRQATKDPLLRGVSPTPSKIPVRSQKRTPFPTVTSCAVDQENQDPRRLQGP

SEQ ID NO: 92940 - protein, 290 aa, Homo sapiens
  Payload ID: 18580
  Gene Name: trophinin associated protein
  ENSP ID: ENSP00000446646
MTTRQATKDPLLRGVSPTPSKIPVRSQKRTPFPTVTSCAVDQENQDPRRWVQKPPLNIQRPLVDSAGPRPKARHQAETSQRLVGISQPRNPLEELRPSPRGQNVGPGPPAQTEAPGTIEFVADPAALATILSGEGVKSCHLGRQPSLAKRVLVRGSQGGTTQRVQGVRASAYLAPRTPTHRLDPARASCFSRLEGPGPRGRTLCPQRLQALISPSGPSFHPSTRPSFQELRRETAGSSRTSVSQASGLLLETPVQPGEREVVTHSDEGGVASLGLAQRVPLRENREMSHT

SEQ ID NO: 92941 - protein, 114 aa, Homo sapiens
  Payload ID: 18580
  Gene Name: trophinin associated protein
  ENSP ID: ENSP00000447244
MTTRQATKDPLLRGVSPTPSKIPVRSQKRTPFPTVTSCAVDQENQDPRRWVQKPPLNIQRPLVDSAGPRPKARHQAETSQRLVGISQPRNPLEELRPSPRGQNVGPGPPAQTEA

SEQ ID NO: 92942 - protein, 457 aa, Homo sapiens
  Payload ID: 18580
  Gene Name: trophinin associated protein
  ENSP ID: ENSP00000447421
MSHTRDSHDSHLMPSPAPVAQPLPGHVVPCPSPFGRAQRVPSPGPPTLTSYSVLRRLTVQPKTRFTPMPSTPRVQQAQWLRGVSPQSCSEDPALPWEQVAVRLFDQESCIRSLEGSGKPPVATPSGPHSNRTPSLQEVKIQRIGILQQLLRQEVEGLVGGQCVPLNGGSSLDMVELQPLLTEISRTLNATEHNSGTSHLPGLLKHSGLPKPCLPEECGEPQPCPPAEPGPPEAFCRSEPEIPEPSLQEQLEVPEPYPPAEPRPLESCCRSEPEIPESSRQEQLEEQLEVPEPCPPAEPGPLQPSTQGQSGPPGPCPRVELGASEPCTLEHRSLESSLPPCCSQWAPATTSLIFSSQHPLCASPPICSLQSLRPPAGQAGLSNLAPRTLALRERLKSCLTAIHCFHEARLDDECAFYTSRAPPSGPTRVCTNPVATLLEWQDALCFIPVGSAAPQGSP

SEQ ID NO: 92943 - protein, 868 aa, Homo sapiens
  Payload ID: 18580
  Gene Name: trophinin associated protein
  ENSP ID: ENSP00000447509
MTTRQATKDPLLRGVSPTPSKIPVRSQKRTPFPTVTSCAVDQENQDPRRWVQKPPLNIQRPLVDSAGPRPKARHQAETSQRLVGISQPRNPLEELRPSPRGQNVGPGPPAQTEAPGTIEFVADPAALATILSGEGVKSCHLGRQPSLAKRVLVRGSQGGTTQRVQGVRASAYLAPRTPTHRLDPARASCFSRLEGPGPRGRTLCPQRLQALISPSGPSFHPSTRPSFQELRRETAGSSRTSVSQASGLLLETPVQPAFSLPKGEREVVTHSDEGGVASLGLAQRVPLRENREMSHTRDSHDSHLMPSPAPVAQPLPGHVVPCPSPFGRAQRVPSPGPPTLTSYSVLRRLTVQPKTRFTPMPSTPRVQQAQWLRGVSPQSCSEDPALPWEQVAVRLFDQESCIRSLEGSGKPPVATPSGPHSNRTPSLQEVKIQRIGILQQLLRQEVEGLVGGQCVPLNGGSSLDMVELQPLLTEISRTLNATEHNSGTSHLPGLLKHSGLPKPCLPEECGEPQPCPPAEPGPPEAFCRSEPEIPEPSLQEQLEVPEPYPPAEPRPLESCCRSEPEIPESSRQEQLEVPEPCPPAEPRPLESYCRIEPEIPESSRQEQLEVPEPCPPAEPGPLQPSTQGQSGPPGPCPRVELGASEPCTLEHRSLESSLPPCCSQWAPATTSLIFSSQHPLCASPPICSLQSLRPPAGQAGKELAGKECEHKRSSPHCELHTCPAPTPGNLMLPHLPPWPSLALPQEEGRGCTSSPVLLIGLAVGGGGGEDSTWWKYRTPDLPLNFPCPSGLSNLAPRTLALRERLKSCLTAIHCFHEARLDDECAFYTSRAPPSGPTRVCTNPVATLLEWQDALCFIPVGSAAPQGSP

SEQ ID NO: 92944 - protein, 53 aa, Homo sapiens; identical to SEQ ID NO: 92939
  Payload ID: 18580
  Gene Name: trophinin associated protein
  ENSP ID: ENSP00000447876

SEQ ID NO: 92945 - protein, 126 aa, Homo sapiens
  Payload ID: 18580
  Gene Name: trophinin associated protein
  Uniprot ID: Q12815
  ENSP ID: ENSP00000448313
MTTRQATKDPLLRGVSPTPSKIPVRSQKRTPFPTVTSCAVDQENQDPRRWVQKPPLNIQRPLVDSAGPRPKARHQAETSQRLVGISQPRNPLEELRPSPRGQNVGPGPPAQTGAMACTCNHSYSGG

SEQ ID NO: 92946 - protein, 52 aa, Homo sapiens
  Payload ID: 18580
  Gene Name: trophinin associated protein
  ENSP ID: ENSP00000449032
MTTRQATKDPLLRGVSPTPSKIPVRSQKRTPFPTVTSCAVDQENQDPRVRGA

SEQ ID NO: 92947 - protein, 87 aa, Homo sapiens
  Payload ID: 18580
  Gene Name: trophinin associated protein
  ENSP ID: ENSP00000449245
MTTRQATKDPLLRGVSPTPSKIPVRSQKRTPFPTVTSCAVDQENQDPRRWVQKPPLNIQRPLVDSAGPRPKARHQAETSQRLRLQGP

SEQ ID NO: 92948 - protein, 180 aa, Homo sapiens
  Payload ID: 18580
  Gene Name: trophinin associated protein
  ENSP ID: ENSP00000449588
MTTRQATKDPLLRGVSPTPSKIPVRSQKRTPFPTVTSCAVDQENQDPRGVRASAYLAPRTPTHRLDPARASCFSRLEGPGPRGRTLCPQRLQALISPSGPSFHPSTRPSFQELRRETAGSSRTSVSQASGLLLETPVQPAFSLPKGEREVVTHSDEGGVASLGLAQRVPLRENREMSHTR

SEQ ID NO: 92949 - protein, 68 aa, Homo sapiens
  Payload ID: 18580
  Gene Name: trophinin associated protein
  ENSP ID: ENSP00000449866
MTTRQATKDPLLRGVSPTPSKIPVRSQKRTPFPTVTSCAVDQENQDPRQNVISPGAMACTCNHSYSGG

SEQ ID NO: 92950 - protein, 126 aa, Homo sapiens
  Payload ID: 18580
  Gene Name: trophinin associated protein
  ENSP ID: ENSP00000449984
MTTRQATKDPLLRGVSPTPSKIPVRSQKRTPFPTVTSCAVDQENQDPRRWVQKPPLNIQRPLVDSAGPRPKARHQAETSQRLVGISQPRNPLEELRPSPRGQNVGPGPPAQTGTCWSHGNTASMAE

SEQ ID NO: 92951 - protein, 158 aa, Homo sapiens
  Payload ID: 18580
  Gene Name: trophinin associated protein
  ENSP ID: ENSP00000450306
MTTRQATKDPLLRGVSPTPSKIPVRSQKRTPFPTVTSCAVDQENQDPRRWVQKPPLNIQRPLVDSAGPRPKARHQAETSQRLVGISQPRNPLEELRPSPRGQNVGPGPPAQTEAPGTIEFVADPAALATILSGCSGLCIFGPQNPHPPTGPCQGFLLL

SEQ ID NO: 92952 - protein, 420 aa, Homo sapiens
  Payload ID: 18581
  Gene Name: trophoblast glycoprotein
  Uniprot ID: Q13641
  ENSP ID: ENSP00000358765
MPGGCSRGPAAGDGRLRLARLALVLLGWVSSSSPTSSASSFSSSAPFLASAVSAQPPLPDQCPALCECSEAARTVKCVNRNLTEVPTDLPAYVRNLFLTGNQLAVLPAGAFARRPPLAELAALNLSGSRLDEVRAGAFEHLPSLRQLDLSHNPLADLSPFAFSGSNASVSAPSPLVELILNHIVPPEDERQNRSFEGMVVAALLAGRALQGLRRLELASNHFLYLPRDVLAQLPSLRHLDLSNNSLVSLTYVSFRNLTHLESLHLEDNALKVLHNGTLAELQGLPHIRVFLDNNPWVCDCHMADMVTWLKETEVVQGKDRLTCAYPEKMRNRVLLELNSADLDCDPILPPSLQTSYVFLGIVLALIGAIFLLVLYLNRKGIKKWMHNIRDACRDHMEGYHYRYEINADPRLTNLSSNSDV

SEQ ID NO: 92953 - protein, 420 aa, Homo sapiens; identical to SEQ ID NO: 92952
  Payload ID: 18581
  Gene Name: trophoblast glycoprotein
  Uniprot ID: Q13641
  ENSP ID: ENSP00000440049

SEQ ID NO: 92954 - protein, 420 aa, Homo sapiens; identical to SEQ ID NO: 92952
  Payload ID: 18581
  Gene Name: trophoblast glycoprotein
  Uniprot ID: Q13641
  ENSP ID: ENSP00000441219

SEQ ID NO: 92955 - protein, 420 aa, Homo sapiens; identical to SEQ ID NO: 92952
  Payload ID: 18581
  Gene Name: Trophoblast glycoprotein
  ENSP ID: ENSP00000489140

SEQ ID NO: 92956 - protein, 420 aa, Homo sapiens; identical to SEQ ID NO: 92952
  Payload ID: 18581
  Gene Name: Trophoblast glycoprotein
  ENSP ID: ENSP00000489143

SEQ ID NO: 92957 - protein, 420 aa, Homo sapiens; identical to SEQ ID NO: 92952
  Payload ID: 18581
  Gene Name: Trophoblast glycoprotein
  ENSP ID: ENSP00000489447

SEQ ID NO: 92958 - protein, 382 aa, Homo sapiens
  Payload ID: 18582
  Gene Name: trophoblast glycoprotein-like
  Uniprot ID: P0DKB5
  ENSP ID: ENSP00000474988
MAPRAGQPGLQGLLLVAAALSQPAAPCPFQCYCFGGPKLLLRCASGAELRQPPRDVPPDARNLTIVGANLTVLRAAAFAGGDGDGDQAAGVRLPLLSALRLTHNHIEVVEDGAFDGLPSLAALDLSHNPLRALGGGAFRGLPALRSLQLNHALVRGGPALLAALDAALAPLAELRLLGLAGNALSRLPPAALRLARLEQLDVRLNALAGLDPDELRALERDGGLPGPRLLLADNPLRCGCAARPLLAWLRNATERVPDSRRLRCAAPRALLDRPLLDLDGARLRCADSGADARGEEAEAAGPELEASYVFFGLVLALIGLIFLMVLYLNRRGIQRWMRNLREACRDQMEGYHYRYEQDADPRRAPAPAAPAGSRATSPGSGL

SEQ ID NO: 92959 - protein, 359 aa, Homo sapiens
  Payload ID: 18583
  Gene Name: tropomodulin 1
  Uniprot ID: P28289
  ENSP ID: ENSP00000259365
MSYRRELEKYRDLDEDEILGALTEEELRTLENELDELDPDNALLPAGLRQKDQTTKAPTGPFKREELLDHLEKQAKEFKDREDLVPYTGEKRGKVWVPKQKPLDPVLESVTLEPELEEALANASDAELCDIAAILGMHTLMSNQQYYQALSSSSIMNKEGLNSVIKPTQYKPVPDEEPNSTDVEETLERIKNNDPKLEEVNLNNIRNIPIPTLKAYAEALKENSYVKKFSIVGTRSNDPVAYALAEMLKENKVLKTLNVESNFISGAGILRLVEALPYNTSLVEMKIDNQSQPLGNKVEMEIVSMLEKNATLLKFGYHFTQQGPRLRASNAMMNNNDLVRKRRLADLTGPIIPKCRSGV

SEQ ID NO: 92960 - protein, 232 aa, Homo sapiens
  Payload ID: 18583
  Gene Name: tropomodulin 1
  Uniprot ID: P28289
  ENSP ID: ENSP00000364318
MSQVLSILGMHTLMSNQQYYQALSSSSIMNKEGLNSVIKPTQYKPVPDEEPNSTDVEETLERIKNNDPKLEEVNLNNIRNIPIPTLKAYAEALKENSYVKKFSIVGTRSNDPVAYALAEMLKENKVLKTLNVESNFISGAGILRLVEALPYNTSLVEMKIDNQSQPLGNKVEMEIVSMLEKNATLLKFGYHFTQQGPRLRASNAMMNNNDLVRKRRLADLTGPIIPKCRSGV

SEQ ID NO: 92961 - protein, 359 aa, Homo sapiens; identical to SEQ ID NO: 92959
  Payload ID: 18583
  Gene Name: tropomodulin 1
  Uniprot ID: P28289
  ENSP ID: ENSP00000378637

SEQ ID NO: 92962 - protein, 351 aa, Homo sapiens
  Payload ID: 18584
  Gene Name: tropomodulin 2 (neuronal)
  Uniprot ID: Q9NZR1
  ENSP ID: ENSP00000249700
MALPFQKELEKYKNIDEDELLGKLSEEELKQLENVLDDLDPESAMLPAGFRQKDQTQKAATGPFDREHLLMYLEKEALEQKDREDFVPFTGEKKGRVFIPKEKPIETRKEEKVTLDPELEEALASASDTELYDLAAVLGVHNLLNNPKFDEETANNKGGKGPVRNVVKGEKVKPVFEEPPNPTNVEISLQQMKANDPSLQEVNLNNIKNIPIPTLREFAKALETNTHVKKFSLAATRSNDPVAIAFADMLKVNKTLTSLNIESNFITGTGILALVEALKENDTLTEIKIDNQRQQLGTAVEMEIAQMLEENSRILKFGYQFTKQGPRTRVAAAITKNNDLVRKKRVEADRR

SEQ ID NO: 92963 - protein, 315 aa, Homo sapiens
  Payload ID: 18584
  Gene Name: tropomodulin 2 (neuronal)
  Uniprot ID: Q9NZR1
  ENSP ID: ENSP00000404590
MALPFQKELEKYKNIDEDELLGKLSEEELKQLENVLDDLDPESAMLPAGFRQKDQTQKAATGPFDREHLLMYLEKEALEQKDREDFVPFTGEKKGRVFIPKEKPIETRKEEKVTLDPELEEALASASDTELYDLAAVLGVHNLLNNPKFDEETANNKGGKGPVRNVVKGEKVKPVFEEPPNPTNVEISLQQMKANDPSLQEVNLNNIKAFADMLKVNKTLTSLNIESNFITGTGILALVEALKENDTLTEIKIDNQRQQLGTAVEMEIAQMLEENSRILKFGYQFTKQGPRTRVAAAITKNNDLVRKKRVEADRR

SEQ ID NO: 92964 - protein, 307 aa, Homo sapiens
  Payload ID: 18584
  Gene Name: tropomodulin 2 (neuronal)
  ENSP ID: ENSP00000437743
MLPAGFRQKDQTQKAATGPFDREHLLMYLEKEALEQKDREDFVPFTGEKKGRVFIPKEKPIETRKEEKVTLDPELEEALASASDTELYDLAAVLGVHNLLNNPKFDEETANNKGGKGPVRNVVKGEKVKPVFEEPPNPTNVEISLQQMKANDPSLQEVNLNNIKNIPIPTLREFAKALETNTHVKKFSLAATRSNDPVAIAFADMLKVNKTLTSLNIESNFITGTGILALVEALKENDTLTEIKIDNQRQQLGTAVEMEIAQMLEENSRILKFGYQFTKQGPRTRVAAAITKNNDLVRKKRVEADRR

SEQ ID NO: 92965 - protein, 110 aa, Homo sapiens
  Payload ID: 18584
  Gene Name: tropomodulin 2 (neuronal)
  ENSP ID: ENSP00000453524
  MOD_RES (1)..(1): Any amino acid
XAIAFADMLKVNKTLTSLNIESNFITGTGILALVEALKENDTLTEIKIDNQRQQLGTAVEMEIAQMLEENSRILKFGYQFTKQGPRTRVAAAITKNNDLVRKKRVEADRR

SEQ ID NO: 92966 - protein, 352 aa, Homo sapiens
  Payload ID: 18585
  Gene Name: tropomodulin 3 (ubiquitous)
  Uniprot ID: Q9NYL9
  ENSP ID: ENSP00000308753
MALPFRKDLEKYKDLDEDELLGNLSETELKQLETVLDDLDPENALLPAGFRQKNQTSKSTTGPFDREHLLSYLEKEALEHKDREDYVPYTGEKKGKIFIPKQKPVQTFTEEKVSLDPELEEALTSASDTELCDLAAILGMHNLITNTKFCNIMGSSNGVDQEHFSNVVKGEKILPVFDEPPNPTNVEESLKRTKENDAHLVEVNLNNIKNIPIPTLKDFAKALETNTHVKCFSLAATRSNDPVATAFAEMLKVNKTLKSLNVESNFITGVGILALIDALRDNETLAELKIDNQRQQLGTAVELEMAKMLEENTNILKFGYQFTQQGPRTRAANAITKNNDLVRKRRVEGDHQ

SEQ ID NO: 92967 - protein, 352 aa, Homo sapiens; identical to SEQ ID NO: 92966
  Payload ID: 18585
  Gene Name: tropomodulin 3 (ubiquitous)
  Uniprot ID: Q9NYL9
  ENSP ID: ENSP00000438909

SEQ ID NO: 92968 - protein, 187 aa, Homo sapiens
  Payload ID: 18585
  Gene Name: tropomodulin 3 (ubiquitous)
  ENSP ID: ENSP00000452939
  MOD_RES (1)..(1): Any amino acid
XVVKGEKILPVFDEPPNPTNVEESLKRTKENDAHLVEVNLNNIKNIPIPTLKDFAKALETNTHVKCFSLAATRSNDPVATAFAEMLKVNKTLKSLNVESNFITGVGILALIDALRDNETLAELKIDNQRQQLGTAVELEMAKMLEENTNILKFGYQFTQQGPRTRAANAITKNNDLVRKRRVEGDHQ

SEQ ID NO: 92969 - protein, 213 aa, Homo sapiens
  Payload ID: 18585
  Gene Name: tropomodulin 3 (ubiquitous)
  ENSP ID: ENSP00000454040
MHNLITNTKFCNIMGSSNGVDQEHFSNVVKGEKILPVFDEPPNPTNVEESLKRTKENDAHLVEVNLNNIKNIPIPTLKDFAKALETNTHVKCFSLAATRSNDPVATAFAEMLKVNKTLKSLNVESNFITGVGILALIDALRDNETLAELKIDNQRQQLGTAVELEMAKMLEENTNILKFGYQFTQQGPRTRAANAITKNNDLVRKRRVEGDHQ

SEQ ID NO: 92970 - protein, 33 aa, Homo sapiens
  Payload ID: 18585
  Gene Name: tropomodulin 3 (ubiquitous)
  ENSP ID: ENSP00000454161
MALPFRKDLEKYKDLDEDELLGNLSETELKQLE

SEQ ID NO: 92971 - protein, 345 aa, Homo sapiens
  Payload ID: 18586
  Gene Name: tropomodulin 4 (muscle)
  Uniprot ID: Q9NZQ9
  ENSP ID: ENSP00000295314
MSSYQKELEKYRDIDEDEILRTLSPEELEQLDCELQEMDPENMLLPAGLRQRDQTKKSPTGPLDREALLQYLEQQALEVKERDDLVPFTGEKKGKPYIQPKREIPAEEQITLEPELEEALAHATDAEMCDIAAILDMYTLMSNKQYYDALCSGEICNTEGISSVVQPDKYKPVPDEPPNPTNIEEILKRVRSNDKELEEVNLNNIQDIPIPMLSELCEAMKANTYVRSFSLVATRSGDPIANAVADMLRENRSLQSLNIESNFISSTGLMAVLKAVRENATLTELRVDNQRQWPGDAVEMEMATVLEQCPSIVRFGYHFTQQGPRARAAQAMTRNNELRRQQKKR

SEQ ID NO: 92972 - protein, 142 aa, Homo sapiens
  Payload ID: 18586
  Gene Name: tropomodulin 4 (muscle)
  ENSP ID: ENSP00000406333
MSSYQKELEKYRDIDEDEILRTLSPEELEQLDCELQEMDPENMLLPAGLRQRDQTKKSPTGPLDREALLQYLEQQALEVKERDDLVPFTGEKKGKPYIQPKREIPAEEQITLEPELEEALAHATDAEMCDIAAILDMYTLMS

SEQ ID NO: 92973 - protein, 123 aa, Homo sapiens
  Payload ID: 18586
  Gene Name: tropomodulin 4 (muscle)
  ENSP ID: ENSP00000468006
  MOD_RES (1)..(1): Any amino acid
XDALCSGEICNTEGISSVVQPDKYKPVPDEPPNPTNIEEILKRVRSNDKELEEVNLNNIQAVADMLRENRSLQSLNIESNFISSTGLMAVLKAVRENATLTELRVDNQVASKRRDNTAFPFTN

SEQ ID NO: 92974 - protein, 43 aa, Homo sapiens
  Payload ID: 18586
  Gene Name: tropomodulin 4 (muscle)
  ENSP ID: ENSP00000468489
MSSYQKELEKYRDIDEDEILRTLSPEELEQLDCELQEMDPELD

SEQ ID NO: 92975 - protein, 284 aa, Homo sapiens
  Payload ID: 18587
  Gene Name: tropomyosin 1 (alpha)
  Uniprot ID: P09493
  ENSP ID: ENSP00000267996
MDAIKKKMQMLKLDKENALDRAEQAEADKKAAEDRSKQLEEDIAAKEKLLRVSEDERDRVLEELHKAEDSLLAAEEAAAKAEADVASLNRRIQLVEEELDRAQERLATALQKLEEAEKAADESERGMKVIESRAQKDEEKMEIQEIQLKEAKHIAEDADRKYEEVARKLVIIESDLERAEERAELSEGKCAELEEELKTVTNNLKSLEAQAEKYSQKEDRYEEEIKVLSDKLKEAETRAEFAERSVTKLEKSIDDLEEKVAHAKEENLSMHQMLDQTLLELNNM

SEQ ID NO: 92976 - protein, 284 aa, Homo sapiens
  Payload ID: 18587
  Gene Name: tropomyosin 1 (alpha)
  Uniprot ID: P09493
  ENSP ID: ENSP00000288398
MDAIKKKMQMLKLDKENALDRAEQAEADKKAAEDRSKQLEDELVSLQKKLKGTEDELDKYSEALKDAQEKLELAEKKATDAEADVASLNRRIQLVEEELDRAQERLATALQKLEEAEKAADESERGMKVIESRAQKDEEKMEIQEIQLKEAKHIAEDADRKYEEVARKLVIIESDLERAEERAELSEGQVRQLEEQLRIMDQTLKALMAAEDKYSQKEDRYEEEIKVLSDKLKEAETRAEFAERSVTKLEKSIDDLEDELYAQKLKYKAISEELDHALNDMTSM

SEQ ID NO: 92977 - protein, 245 aa, Homo sapiens
  Payload ID: 18587
  Gene Name: tropomyosin 1 (alpha)
  ENSP ID: ENSP00000322577
MAGSSSLEAVRRKIRSLQEQADAAEERAGTLQRELDHERKLRETAEADVASLNRRIQLVEEELDRAQERLATALQKLEEAEKAADESERGMKVIESRAQKDEEKMEIQEIQLKEAKHIAEDADRKYEEVARKLVIIESDLERAEERAELSEGQVRQLEEQLRIMDQTLKALMAAEDKYSQKEDRYEEEIKVLSDKLKEAETRAEFAERSVTKLEKSIDDLEDQLYQQLEQNRRLTNELKLALNED

SEQ ID NO: 92978 - protein, 245 aa, Homo sapiens
  Payload ID: 18587
  Gene Name: tropomyosin 1 (alpha)
  Uniprot ID: P09493
  ENSP ID: ENSP00000334624
MAGSSSLEAVRRKIRSLQEQADAAEERAGTLQRELDHERKLRETAEADVASLNRRIQLVEEELDRAQERLATALQKLEEAEKAADESERGMKVIESRAQKDEEKMEIQEIQLKEAKHIAEDADRKYEEVARKLVIIESDLERAEERAELSEGKCAELEEELKTVTNNLKSLEAQAEKYSQKEDRYEEEIKVLSDKLKEAETRAEFAERSVTKLEKSIDDLEDQLYQQLEQNRRLTNELKLALNED

SEQ ID NO: 92979 - protein, 326 aa, Homo sapiens
  Payload ID: 18587
  Gene Name: tropomyosin 1 (alpha)
  ENSP ID: ENSP00000350667
MDAIKKKMQMLKLDKENALDRAEQAEADKKAAEDRSKQLEEDIAAKEKLLRVSEDERDRVLEELHKAEDSLLAAEEAAAKLEDELVSLQKKLKGTEDELDKYSEALKDAQEKLELAEKKATDAEADVASLNRRIQLVEEELDRAQERLATALQKLEEAEKAADESERGMKVIESRAQKDEEKMEIQEIQLKEAKHIAEDADRKYEEVARKLVIIESDLERAEERAELSEGKCAELEEELKTVTNNLKSLEAQAEKYSQKEDRYEEEIKVLSDKLKEAETRAEFAERSVTKLEKSIDDLEEKVAHAKEENLSMHQMLDQTLLELNNM

SEQ ID NO: 92980 - protein, 284 aa, Homo sapiens
  Payload ID: 18587
  Gene Name: tropomyosin 1 (alpha)
  Uniprot ID: P09493
  ENSP ID: ENSP00000351022
MDAIKKKMQMLKLDKENALDRAEQAEADKKAAEDRSKQLEDELVSLQKKLKGTEDELDKYSEALKDAQEKLELAEKKATDAEADVASLNRRIQLVEEELDRAQERLATALQKLEEAEKAADESERGMKVIESRAQKDEEKMEIQEIQLKEAKHIAEDADRKYEEVARKLVIIESDLERAEERAELSEGQVRQLEEQLRIMDQTLKALMAAEDKYSQKEDRYEEEIKVLSDKLKEAETRAEFAERSVTKLEKSIDDLEEKVAHAKEENLSMHQMLDQTLLELNNM

SEQ ID NO: 92981 - protein, 248 aa, Homo sapiens
  Payload ID: 18587
  Gene Name: tropomyosin 1 (alpha)
  ENSP ID: ENSP00000384315
MAGSSSLEAVRRKIRSLQEQADAAEERAGTLQRELDHERKLRETAEADVASLNRRIQLVEEELDRAQERLATALQKLEEAEKAADESERGMKVIESRAQKDEEKMEIQEIQLKEAKHIAEDADRKYEEVARKLVIIESDLERAEERAELSEGQVRQLEEQLRIMDQTLKALMAAEDKYSQKEDRYEEEIKVLSDKLKEAETRAEFAERSVTKLEKSIDDLEEKVAHAKEENLSMHQMLDQTLLELNNM

SEQ ID NO: 92982 - protein, 284 aa, Homo sapiens
  Payload ID: 18587
  Gene Name: tropomyosin 1 (alpha)
  Uniprot ID: P09493
  ENSP ID: ENSP00000385107
MDAIKKKMQMLKLDKENALDRAEQAEADKKAAEDRSKQLEDELVSLQKKLKGTEDELDKYSEALKDAQEKLELAEKKATDAEADVASLNRRIQLVEEELDRAQERLATALQKLEEAEKAADESERGMKVIESRAQKDEEKMEIQEIQLKEAKHIAEDADRKYEEVARKLVIIESDLERAEERAELSEGKCAELEEELKTVTNNLKSLEAQAEKYSQKEDRYEEEIKVLSDKLKEAETRAEFAERSVTKLEKSIDDLEDELYAQKLKYKAISEELDHALNDMTSI

SEQ ID NO: 92983 - protein, 92 aa, Homo sapiens
  Payload ID: 18587
  Gene Name: tropomyosin 1 (alpha)
  ENSP ID: ENSP00000452624
MKVIESRAQKDEEKMEIQEIQLKEAKHIAEDADRKYEEVARKLVIIESDLERAEERAELSEGQVRQLEEQLRIMDQTLKALMAAEDKQMCRA

SEQ ID NO: 92984 - protein, 248 aa, Homo sapiens
  Payload ID: 18587
  Gene Name: tropomyosin 1 (alpha)
  ENSP ID: ENSP00000452658
MAGSSSLEAVRRKIRSLQEQADAAEERAGTLQRELDHERKLRETAEADVASLNRRIQLVEEELDRAQERLATALQKLEEAEKAADESERGMKVIESRAQKDEEKMEIQEIQLKEAKHIAEDADRKYEEVARKLVIIESDLERAEERAELSEGKCAELEEELKTVTNNLKSLEAQAEKYSQKEDRYEEEIKVLSDKLKEAETRAEFAERSVTKLEKSIDDLEDELYAQKLKYKAISEELDHALNDMTSI

SEQ ID NO: 92985 - protein, 33 aa, Homo sapiens
  Payload ID: 18587
  Gene Name: tropomyosin 1 (alpha)
  ENSP ID: ENSP00000452830
  MOD_RES (1)..(1): Any amino acid
XIDDLEDELYAQKLKYKAISEELDHALNDMTSM

SEQ ID NO: 92986 - protein, 284 aa, Homo sapiens
  Payload ID: 18587
  Gene Name: tropomyosin 1 (alpha)
  Uniprot ID: P09493
  ENSP ID: ENSP00000452879
MDAIKKKMQMLKLDKENALDRAEQAEADKKAAEDRSKQLEEDIAAKEKLLRVSEDERDRVLEELHKAEDSLLAAEEAAAKAEADVASLNRRIQLVEEELDRAQERLATALQKLEEAEKAADESERGMKVIESRAQKDEEKMEIQEIQLKEAKHIAEDADRKYEEVARKLVIIESDLERAEERAELSEGQVRQLEEQLRIMDQTLKALMAAEDKYSQKEDRYEEEIKVLSDKLKEAETRAEFAERSVTKLEKSIDDLEEKVAHAKEENLSMHQMLDQTLLELNNM

SEQ ID NO: 92987 - protein, 157 aa, Homo sapiens
  Payload ID: 18587
  Gene Name: tropomyosin 1 (alpha)
  ENSP ID: ENSP00000452887
MDAIKKKMQMLKLDKENALDRAEQAEADKKAAEDRSKQLEDELVSLQKKLKGTEDELDKYSEALKDAQEKLELAEKKATDAEADVASLNRRIQLVEEELDRAQERLATALQKLEEAEKAADESERWPVSWSSLRATWNVQRSGLSSQKAKSDSWKNN

SEQ ID NO: 92988 - protein, 142 aa, Homo sapiens
  Payload ID: 18587
  Gene Name: tropomyosin 1 (alpha)
  ENSP ID: ENSP00000452977
KATDAEADVASLNRRIQLVEEELDRAQERLATALQKLEEAEKAADESERGMKVIESRAQKDEEKMEIQEIQLKEAKHIAEDADRKYEEVARKLVIIESDLERAEERAELSEGQVRQLEEQLRIMDQTLKALMAAEDKQMCRA

SEQ ID NO: 92989 - protein, 70 aa, Homo sapiens
  Payload ID: 18587
  Gene Name: tropomyosin 1 (alpha)
  ENSP ID: ENSP00000452999
MDAIKKKMQMLKLDKENALDRAEQAEADKKAAEDRSKQLEDELVSLQKKLKGTEDELDKYSELCICLFSS

SEQ ID NO: 92990 - protein, 108 aa, Homo sapiens
  Payload ID: 18587
  Gene Name: tropomyosin 1 (alpha)
  ENSP ID: ENSP00000453050
MKVIESRAQKDEEKMEIQEIQLKEAKHIAEDADRKYEEVARKLVIIESDLERAEERAELSEGQVRQLEEQLRIMDQTLKALMAAEDKYSQKEDRYEEEIKVLSDKLKE

SEQ ID NO: 92991 - protein, 265 aa, Homo sapiens
  Payload ID: 18587
  Gene Name: tropomyosin 1 (alpha)
  ENSP ID: ENSP00000453062
  MOD_RES (1)..(1): Any amino acid
XRAEQAEADKKAAEDRSKQLEDELVSLQKKLKGTEDELDKYSEALKDAQEKLELAEKKATDAEADVASLNRRIQLVEEELDRAQERLATALQKLEEAEKAADESERGMKVIESRAQKDEEKMEIQEIQLKEAKHIAEDADRKYEEVARKLVIIESDLERAEERAELSEGKCAELEEELKTVTNNLKSLEAQAEKYSQKEDRYEEEIKVLSDKLKEAETRAEFAERSVTKLEKSIDDLEDELYAQKLKYKAISEELDHALNDMTSM

SEQ ID NO: 92992 - protein, 68 aa, Homo sapiens
  Payload ID: 18587
  Gene Name: tropomyosin 1 (alpha)
  ENSP ID: ENSP00000453092
LNRRIQLVEEELDRAQERLATALQKLEEAEKAADESERGMKVIESRAQKDEEKMEIQEIQLKEQMCRA

SEQ ID NO: 92993 - protein, 8 aa, Homo sapiens
  Payload ID: 18587
  Gene Name: tropomyosin 1 (alpha)
  ENSP ID: ENSP00000453136
MKVIESRA

SEQ ID NO: 92994 - protein, 40 aa, Homo sapiens
  Payload ID: 18587
  Gene Name: tropomyosin 1 (alpha)
  ENSP ID: ENSP00000453324
MDAIKKKMQMLKLDKENALDRAEQAEADKKAAEDRSKQWT

SEQ ID NO: 92995 - protein, 275 aa, Homo sapiens
  Payload ID: 18587
  Gene Name: tropomyosin 1 (alpha)
  ENSP ID: ENSP00000453724
MAGSSSLEAVRRKIRSLQEQADAAEERAGTLQRELDHERKLRETAEADVASLNRRIQLVEEELDRAQERLATALQKLEEAEKAADESERGMKVIESRAQKDEEKMEIQEIQLKEAKHIAEDADRKYEEVARKLVIIESDLERAEERAELSEGQVRQLEEQLRIMDQTLKALMAAEDKYSQKEDRYEEEIKVLSDKLKEAETRAEFAERSVTKLEKSIDDLEGKILSSVFSLILMVEYQPGKTIFQFKGIHIDTLLCTCTFFLCVLWGFSLWLLNS

SEQ ID NO: 92996 - protein, 49 aa, Homo sapiens
  Payload ID: 18587
  Gene Name: tropomyosin 1 (alpha)
  ENSP ID: ENSP00000453817
MAGSSSLEAVRRKIRSLQEQADAAEERAGTLQRELDHERKLRETRHESH

SEQ ID NO: 92997 - protein, 284 aa, Homo sapiens
  Payload ID: 18587
  Gene Name: tropomyosin 1 (alpha)
  Uniprot ID: P09493
  ENSP ID: ENSP00000453941
MDAIKKKMQMLKLDKENALDRAEQAEADKKAAEDRSKQLEDELVSLQKKLKGTEDELDKYSEALKDAQEKLELAEKKATDAEADVASLNRRIQLVEEELDRAQERLATALQKLEEAEKAADESERGMKVIESRAQKDEEKMEIQEIQLKEAKHIAEDADRKYEEVARKLVIIESDLERAEERAELSEGKCAELEEELKTVTNNLKSLEAQAEKYSQKEDRYEEEIKVLSDKLKEAETRAEFAERSVTKLEKSIDDLEEKVAHAKEENLSMHQMLDQTLLELNNM

SEQ ID NO: 92998 - protein, 223 aa, Homo sapiens
  Payload ID: 18587
  Gene Name: tropomyosin 1 (alpha)
  ENSP ID: ENSP00000453955
  MOD_RES (1)..(1): Any amino acid
XELHKAEDSLLAAEEAAAKAEADVASLNRRIQLVEEELDRAQERLATALQKLEEAEKAADESERGMKVIESRAQKDEEKMEIQEIQLKEAKHIAEDADRKYEEVARKLVIIESDLERAEERAELSEGKCAELEEELKTVTNNLKSLEAQAEKYSQKEDRYEEEIKVLSDKLKEAETRAEFAERSVTKLEKSIDDLEDELYAQKLKYKAISEELDHALNDMTSM

SEQ ID NO: 92999 - protein, 106 aa, Homo sapiens
  Payload ID: 18587
  Gene Name: tropomyosin 1 (alpha)
  ENSP ID: ENSP00000477929
MDAIKKKMQMLKLDKENALDRAEQAEADKKAAEDRSKQLEDELVSLQKKLKGTEDELDKYSEALKDAQEKLELAEKKATDVSARSHCFPHLLPAWPLRGHHRAGEQ

SEQ ID NO: 93000 - protein, 284 aa, Homo sapiens
  Payload ID: 18588
  Gene Name: tropomyosin 2 (beta)
  Uniprot ID: P07951
  ENSP ID: ENSP00000354219
MDAIKKKMQMLKLDKENAIDRAEQAEADKKQAEDRCKQLEEEQQALQKKLKGTEDEVEKYSESVKEAQEKLEQAEKKATDAEADVASLNRRIQLVEEELDRAQERLATALQKLEEAEKAADESERGMKVIENRAMKDEEKMELQEMQLKEAKHIAEDSDRKYEEVARKLVILEGELERSEERAEVAESKCGDLEEELKIVTNNLKSLEAQADKYSTKEDKYEEEIKLLEEKLKEAETRAEFAERSVAKLEKTIDDLEDEVYAQKMKYKAISEELDNALNDITSL

SEQ ID NO: 93001 - protein, 284 aa, Homo sapiens
  Payload ID: 18588
  Gene Name: tropomyosin 2 (beta)
  ENSP ID: ENSP00000367541
MDAIKKKMQMLKLDKENAIDRAEQAEADKKQAEDRCKQLEEEQQALQKKLKGTEDEVEKYSESVKEAQEKLEQAEKKATDAEADVASLNRRIQLVEEELDRAQERLATALQKLEEAEKAADESERGMKVIENRAMKDEEKMELQEMQLKEAKHIAEDSDRKYEEVARKLVILEGELERSEERAEVAESKCGDLEEELKIVTNNLKSLEAQADKYSTKEDKYEEEIKLLEEKLKEAETRAEFAERSVAKLEKTIDDLEETLASAKEENVEIHQTLDQTLLELNNL

SEQ ID NO: 93002 - protein, 284 aa, Homo sapiens
  Payload ID: 18588
  Gene Name: tropomyosin 2 (beta)
  Uniprot ID: P07951
  ENSP ID: ENSP00000367542
MDAIKKKMQMLKLDKENAIDRAEQAEADKKQAEDRCKQLEEEQQALQKKLKGTEDEVEKYSESVKEAQEKLEQAEKKATDAEADVASLNRRIQLVEEELDRAQERLATALQKLEEAEKAADESERGMKVIENRAMKDEEKMELQEMQLKEAKHIAEDSDRKYEEVARKLVILEGELERSEERAEVAESRARQLEEELRTMDQALKSLMASEEEYSTKEDKYEEEIKLLEEKLKEAETRAEFAERSVAKLEKTIDDLEETLASAKEENVEIHQTLDQTLLELNNL

SEQ ID NO: 93003 - protein, 322 aa, Homo sapiens
  Payload ID: 18588
  Gene Name: tropomyosin 2 (beta)
  ENSP ID: ENSP00000367550
MDAIKKKMQMLKLDKENAIDRAEQAEADKKQAEDRCKQLEEEQQALQKKLKGTEDEVEKYSESVKEAQEKLEQAEKKATDAEADVASLNRRIQLVEEELDRAQERLATALQKLEEAEKAADESERGMKVIENRAMKDEEKMELQEMQLKEAKHIAEDSDRKYEEVARKLVILEGELERSEERAEVAESKCGDLEEELKIVTNNLKSLEAQADKYSTKEDKYEEEIKLLEEKLKEAETRAEFAERSVAKLEKTIDDLEESTSIATTEHWFTPDTLALTDTPSPCTEPTHKTPWPTLKPLCTGTPWLSLSDSPLHVGTCGPIKP

SEQ ID NO: 93004 - protein, 111 aa, Homo sapiens
  Payload ID: 18588
  Gene Name: tropomyosin 2 (beta)
  ENSP ID: ENSP00000475952
IAEDSDRKYEEVARKLVILEGELERSEERAEVAESKCGDLEEELKIVTNNLKSLEAQADKYSTKEDKYEEEIKLLEEKLKEAETRAEFAERSVAKLEKTIDDLEGKRSLYK

SEQ ID NO: 93005 - protein, 285 aa, Homo sapiens
  Payload ID: 18589
  Gene Name: tropomyosin 3
  ENSP ID: ENSP00000271850
MMEAIKKKMQMLKLDKENALDRAEQAEAEQKQAEERSKQLEDELAAMQKKLKGTEDELDKYSEALKDAQEKLELAEKKAADAEAEVASLNRRIQLVEEELDRAQERLATALQKLEEAEKAADESERGMKVIENRALKDEEKMELQEIQLKEAKHIAEEADRKYEEVARKLVIIEGDLERTEERAELAESRCREMDEQIRLMDQNLKCLSAAEEKYSQKEDKYEEEIKILTDKLKEAETRAEFAERSVAKLEKTIDDLEDKLKCTKEEHLCTQRMLDQTLLDLNEM

SEQ ID NO: 93006 - protein, 158 aa, Homo sapiens
  Payload ID: 18589
  Gene Name: tropomyosin 3
  Uniprot ID: P06753
  ENSP ID: ENSP00000307712
MKVIENRALKDEEKMELQEIQLKEAKHIAEEADRKYEEVARKLVIIEGDLERTEERAELAESKCSELEEELKNVTNNLKSLEAQAEKYSQKEDKYEEEIKILTDKLKEAETRAEFAERSVAKLEKTIDDLEDKLKCTKEEHLCTQRMLDQTLLDLNEM

SEQ ID NO: 93007 - protein, 248 aa, Homo sapiens
  Payload ID: 18589
  Gene Name: tropomyosin 3
  Uniprot ID: P06753
  ENSP ID: ENSP00000339035
MAGITTIEAVKRKIQVLQQQADDAEERAERLQREVEGERRAREQAEAEVASLNRRIQLVEEELDRAQERLATALQKLEEAEKAADESERGMKVIENRALKDEEKMELQEIQLKEAKHIAEEADRKYEEVARKLVIIEGDLERTEERAELAESKCSELEEELKNVTNNLKSLEAQAEKYSQKEDKYEEEIKILTDKLKEAETRAEFAERSVAKLEKTIDDLEDKLKCTKEEHLCTQRMLDQTLLDLNEM

SEQ ID NO: 93008 - protein, 223 aa, Homo sapiens
  Payload ID: 18589
  Gene Name: tropomyosin 3
  ENSP ID: ENSP00000339378
MAGITTIEAVKRKIQVLQQQADDAEERAERLQREVEGESRAQERLATALQKLEEAEKAADESERGMKVIENRALKDEEKMELQEIQLKEAKHIAEEADRKYEEVARKLVIIEGDLERTEERAELAESRCREMDEQIRLMDQNLKCLSAAEEKYSQKEDKYEEEIKILTDKLKEAETRAEFAERSVAKLEKTIDDLEDKLKCTKEEHLCTQRMLDQTLLDLNEM

SEQ ID NO: 93009 - protein, 232 aa, Homo sapiens
  Payload ID: 18589
  Gene Name: tropomyosin 3
  ENSP ID: ENSP00000341653
MAGITTIEAVKRKIQVLQQQADDAEERAERLQREVEGERRAREQAEAEVASLNRRIQLVEEELDRAQERLATALQKLEEAEKAADEEKMELQEIQLKEAKHIAEEADRKYEEVARKLVIIEGDLERTEERAELAESRCREMDEQIRLMDQNLKCLSAAEEKYSQKEDKYEEEIKILTDKLKEAETRAEFAERSVAKLEKTIDDLEDKLKCTKEEHLCTQRMLDQTLLDLNEM

SEQ ID NO: 93010 - protein, 285 aa, Homo sapiens
  Payload ID: 18589
  Gene Name: tropomyosin 3
  Uniprot ID: P06753
  ENSP ID: ENSP00000357516
MMEAIKKKMQMLKLDKENALDRAEQAEAEQKQAEERSKQLEDELAAMQKKLKGTEDELDKYSEALKDAQEKLELAEKKAADAEAEVASLNRRIQLVEEELDRAQERLATALQKLEEAEKAADESERGMKVIENRALKDEEKMELQEIQLKEAKHIAEEADRKYEEVARKLVIIEGDLERTEERAELAESKCSELEEELKNVTNNLKSLEAQAEKYSQKEDKYEEEIKILTDKLKEAETRAEFAERSVAKLEKTIDDLEDELYAQKLKYKAISEELDHALNDMTSI

SEQ ID NO: 93011 - protein, 247 aa, Homo sapiens
  Payload ID: 18589
  Gene Name: tropomyosin 3
  Uniprot ID: P06753
  ENSP ID: ENSP00000357517
MAGITTIEAVKRKIQVLQQQADDAEERAERLQREVEGERRAREQAEAEVASLNRRIQLVEEELDRAQERLATALQKLEEAEKAADESERGMKVIENRALKDEEKMELQEIQLKEAKHIAEEADRKYEEVARKLVIIEGDLERTEERAELAESRCREMDEQIRLMDQNLKCLSAAEEKYSQKEDKYEEEIKILTDKLKEAETRAEFAERSVAKLEKTIDDLEERLYSQLERNRLLSNELKLTLHDLCD

SEQ ID NO: 93012 - protein, 247 aa, Homo sapiens
  Payload ID: 18589
  Gene Name: tropomyosin 3
  Uniprot ID: P06753
  ENSP ID: ENSP00000357518
MAGITTIEAVKRKIQVLQQQADDAEERAERLQREVEGERRAREQAEAEVASLNRRIQLVEEELDRAQERLATALQKLEEAEKAADESERGMKVIENRALKDEEKMELQEIQLKEAKHIAEEADRKYEEVARKLVIIEGDLERTEERAELAESKCSELEEELKNVTNNLKSLEAQAEKYSQKEDKYEEEIKILTDKLKEAETRAEFAERSVAKLEKTIDDLEERLYSQLERNRLLSNELKLTLHDLCD

SEQ ID NO: 93013 - protein, 248 aa, Homo sapiens
  Payload ID: 18589
  Gene Name: tropomyosin 3
  Uniprot ID: P06753
  ENSP ID: ENSP00000357520
MAGITTIEAVKRKIQVLQQQADDAEERAERLQREVEGERRAREQAEAEVASLNRRIQLVEEELDRAQERLATALQKLEEAEKAADESERGMKVIENRALKDEEKMELQEIQLKEAKHIAEEADRKYEEVARKLVIIEGDLERTEERAELAESRCREMDEQIRLMDQNLKCLSAAEEKYSQKEDKYEEEIKILTDKLKEAETRAEFAERSVAKLEKTIDDLEDELYAQKLKYKAISEELDHALNDMTSI

SEQ ID NO: 93014 - protein, 248 aa, Homo sapiens
  Payload ID: 18589
  Gene Name: tropomyosin 3
  Uniprot ID: P06753
  ENSP ID: ENSP00000357521
MAGITTIEAVKRKIQVLQQQADDAEERAERLQREVEGERRAREQAEAEVASLNRRIQLVEEELDRAQERLATALQKLEEAEKAADESERGMKVIENRALKDEEKMELQEIQLKEAKHIAEEADRKYEEVARKLVIIEGDLERTEERAELAESRCREMDEQIRLMDQNLKCLSAAEEKYSQKEDKYEEEIKILTDKLKEAETRAEFAERSVAKLEKTIDDLEDKLKCTKEEHLCTQRMLDQTLLDLNEM

SEQ ID NO: 93015 - protein, 95 aa, Homo sapiens
  Payload ID: 18589
  Gene Name: tropomyosin 3
  ENSP ID: ENSP00000422207
MAGITTIEAVKRKIQVLQQQADDAEERAERLQREVEGERRAREQAEAEVASLNRRIQLVEEELDRAQERLATALQKLEEAEKAADESERWMSRLD

SEQ ID NO: 93016 - protein, 75 aa, Homo sapiens
  Payload ID: 18589
  Gene Name: tropomyosin 3
  ENSP ID: ENSP00000426306
MMEAIKKKMQMLKLDKENALDRAEQAEAEQKQAEERSKQLEDELAAMQKKLKGTEDELDKYSEALKDAQEKLELA

SEQ ID NO: 93017 - protein, 49 aa, Homo sapiens
  Payload ID: 18589
  Gene Name: tropomyosin 3
  ENSP ID: ENSP00000426521
MAGITTIEAVKRKIQVLQQQADDAEERAERLQREVEGERRAREQRYEGY

SEQ ID NO: 93018 - protein, 227 aa, Homo sapiens
  Payload ID: 18589
  Gene Name: tropomyosin 3
  ENSP ID: ENSP00000480520
MAGITTIEAVKRKIQVLQQQADDAEERAERLQREVEGERRAREQAEAEVASLNRRIQLVEEELDRAQERLATALQKLEEAEKAADESERGMKVIENRALKDEEKMELQEIQLKEAKHIAEEADRKYEEVARKLVIIEGDLERTEERAELAESRCREMDEQIRLMDQNLKCLSAAEEKAETRAEFAERSVAKLEKTIDDLEDKLKCTKEEHLCTQRMLDQTLLDLNEM

SEQ ID NO: 93019 - protein, 248 aa, Homo sapiens
  Payload ID: 18590
  Gene Name: tropomyosin 4
  Uniprot ID: P67936
  ENSP ID: ENSP00000300933
MAGLNSLEAVKRKIQALQQQADEAEDRAQGLQRELDGERERREKAEGDVAALNRRIQLVEEELDRAQERLATALQKLEEAEKAADESERGMKVIENRAMKDEEKMEIQEMQLKEAKHIAEEADRKYEEVARKLVILEGELERAEERAEVSELKCGDLEEELKNVTNNLKSLEAASEKYSEKEDKYEEEIKLLSDKLKEAETRAEFAERTVAKLEKTIDDLEEKLAQAKEENVGLHQTLDQTLNELNCI

SEQ ID NO: 93020 - protein, 284 aa, Homo sapiens
  Payload ID: 18590
  Gene Name: tropomyosin 4
  Uniprot ID: P67936
  ENSP ID: ENSP00000345230
MEAIKKKMQMLKLDKENAIDRAEQAEADKKAAEDKCKQVEEELTHLQKKLKGTEDELDKYSEDLKDAQEKLELTEKKASDAEGDVAALNRRIQLVEEELDRAQERLATALQKLEEAEKAADESERGMKVIENRAMKDEEKMEIQEMQLKEAKHIAEEADRKYEEVARKLVILEGELERAEERAEVSELKCGDLEEELKNVTNNLKSLEAASEKYSEKEDKYEEEIKLLSDKLKEAETRAEFAERTVAKLEKTIDDLEEKLAQAKEENVGLHQTLDQTLNELNCI

SEQ ID NO: 93021 - protein, 16 aa, Homo sapiens
  Payload ID: 18590
  Gene Name: tropomyosin 4
  ENSP ID: ENSP00000466106
MKVIENRAMKDEEKME

SEQ ID NO: 93022 - protein, 69 aa, Homo sapiens
  Payload ID: 18590
  Gene Name: tropomyosin 4
  ENSP ID: ENSP00000466158
MEAIKKKMQMLKLDKENAIDRAEQAEADKKAAEDKCKQVEEELTHLQKKLKGTEDELDKYSEDLKDAQE

SEQ ID NO: 93023 - protein, 102 aa, Homo sapiens
  Payload ID: 18590
  Gene Name: tropomyosin 4
  ENSP ID: ENSP00000466654
MKVIENRAMKDEEKMEIQEMQLKEAKHIAEEADRKYEEVARKLVILEGELERAEERAEVSELKCGDLEEELKNVTNNLKSLEAASEKYSEKEDKYEEEIKLL

SEQ ID NO: 93024 - protein, 179 aa, Homo sapiens
  Payload ID: 18590
  Gene Name: tropomyosin 4
  ENSP ID: ENSP00000467087
MVEEELTHLQKKLKGTEDELDKYSEDLKDAQEKLELTEKKASDAEGDVAALNRRIQLVEEELDRAQERLATALQKLEEAEKAADESERGMKVIENRAMKDEEKMEIQEMQLKEAKHIAEEADRKYEEVARKLVILEGELERAEERAEVSELKCGDLEEELKNVTNNLKSLEAASEKYSE

SEQ ID NO: 93025 - protein, 138 aa, Homo sapiens
  Payload ID: 18590
  Gene Name: tropomyosin 4
  ENSP ID: ENSP00000467250
MSSMPATKFSFPFHIFLSCHLSARRIEGWNSNEAPPPRPTLAEGDVAALNRRIQLVEEELDRAQERLATALQKLEEAEKAADESERGMKVIENRAMKDEEKMEIQEMQLKEAKHIAEEADRKYEEVARKLVILEGELE

SEQ ID NO: 93026 - protein, 110 aa, Homo sapiens
  Payload ID: 18590
  Gene Name: tropomyosin 4
  ENSP ID: ENSP00000467319
  MOD_RES (1)..(1): Any amino acid
XLERAEERAEVSELKCGDLEEELKNVTNNLKSLEAASEKYSEKEDKYEEEIKLLSDKLKEAETRAEFAERTVAKLEKTIDDLEEKLAQAKEENVGLHQTLDQTLNELNCI

SEQ ID NO: 93027 - protein, 96 aa, Homo sapiens
  Payload ID: 18590
  Gene Name: tropomyosin 4
  ENSP ID: ENSP00000467558
MKVIENRAMKDEEKMEIQEMQLKEAKHIAEEADRKYEEVARKLVILEGELERAEERAEVSELKCGDLEEELKNVTNNLKSLEAASEKYSEKEDKYE

SEQ ID NO: 93028 - protein, 59 aa, Homo sapiens
  Payload ID: 18590
  Gene Name: tropomyosin 4
  ENSP ID: ENSP00000468010
KLLSDKLKEAETRAEFAERTVAKLEKTIDDLEDELYAQKLKYKAISEELDHALNDMTSL

SEQ ID NO: 93029 - protein, 170 aa, Homo sapiens
  Payload ID: 18590
  Gene Name: tropomyosin 4
  ENSP ID: ENSP00000468246
MGSWAGRGVTIGPTPSRASANKVEEELTHLQKKLKGTEDELDKYSEDLKDAQEKLELTEKKASDAEGDVAALNRRIQLVEEELDRAQERLATALQKLEEAEKAADESERGMKVIENRAMKDEEKMEIQEMQLKEAKHIAEEADRKYEEVARKLVILEGELERAEERAEVS

SEQ ID NO: 93030 - protein, 161 aa, Homo sapiens
  Payload ID: 18591
  Gene Name: troponin C type 1 (slow)
  Uniprot ID: P63316
  ENSP ID: ENSP00000232975
MDDIYKAAVEQLTEEQKNEFKAAFDIFVLGAEDGCISTKELGKVMRMLGQNPTPEELQEMIDEVDEDGSGTVDFDEFLVMMVRCMKDDSKGKSEEELSDLFRMFDKNADGYIDLDELKIMLQATGETITEDDIEELMKDGDKNNDGRIDYDEFLEFMKGVE

SEQ ID NO: 93031 - protein, 99 aa, Homo sapiens
  Payload ID: 18591
  Gene Name: troponin C type 1 (slow)
  ENSP ID: ENSP00000420596
MRMLGQNPTPEELQEMIDEVDEDGSGTVDFDEFLVMMVRCMKDDSKGKSEEELSDLFRMFDKNADGYIDLDELKIMLQATGETITEDDIEELMKDGDKN

SEQ ID NO: 93032 - protein, 160 aa, Homo sapiens
  Payload ID: 18592
  Gene Name: troponin C type 2 (fast)
  Uniprot ID: P02585
  ENSP ID: ENSP00000361636
MTDQQAEARSYLSEEMIAEFKAAFDMFDADGGGDISVKELGTVMRMLGQTPTKEELDAIIEEVDEDGSGTIDFEEFLVMMVRQMKEDAKGKSEEELAECFRIFDRNADGYIDPEELAEIFRASGEHVTDEEIESLMKDGDKNNDGRIDFDEFLKMMEGVQ

SEQ ID NO: 93033 - protein, 145 aa, Homo sapiens
  Payload ID: 18592
  Gene Name: troponin C type 2 (fast)
  ENSP ID: ENSP00000361638
MIAEFKAAFDMFDADGGGDISVKELGTVMRMLGQTPTKEELDAIIEEVDEDGSGTIDFEEFLVMMVRQMKEDAKGKSEEELAECFRIFDRNADGYIDPEELAEIFRASGEHVTDEEIESLMKDGDKNNDGRIDFDEFLKMMEGVQ

SEQ ID NO: 93034 - protein, 187 aa, Homo sapiens
  Payload ID: 18593
  Gene Name: troponin I type 1 (skeletal, slow)
  Uniprot ID: P19237
  ENSP ID: ENSP00000337022
MPEVERKPKITASRKLLLKSLMLAKAKECWEQEHEEREAEKVRYLAERIPTLQTRGLSLSALQDLCRELHAKVEVVDEERYDIEAKCLHNTREIKDLKLKVMDLRGKFKRPPLRRVRVSADAMLRALLGSKHKVSMDLRANLKSVKKEDTEKERPVEVGDWRKNVEAMSGMEGRKKMFDAAKSPTSQ

SEQ ID NO: 93035 - protein, 187 aa, Homo sapiens; identical to SEQ ID NO: 93034
  Payload ID: 18593
  Gene Name: troponin I type 1 (skeletal, slow)
  Uniprot ID: P19237
  ENSP ID: ENSP00000354488

SEQ ID NO: 93036 - protein, 187 aa, Homo sapiens; identical to SEQ ID NO: 93034
  Payload ID: 18593
  Gene Name: troponin I type 1 (skeletal, slow)
  Uniprot ID: P19237
  ENSP ID: ENSP00000356281

SEQ ID NO: 93037 - protein, 105 aa, Homo sapiens
  Payload ID: 18593
  Gene Name: troponin I type 1 (skeletal, slow)
  ENSP ID: ENSP00000451307
MPEVERKPKITASRKLLLKSLMLAKAKECWEQEHEEREAEKVRYLAERIPTLQTRGLSLSALQDLCRELHAKVEVVDEERYDIEAMSGMEGRKKMFDAAKSPTSQ

SEQ ID NO: 93038 - protein, 131 aa, Homo sapiens
  Payload ID: 18593
  Gene Name: troponin I type 1 (skeletal, slow)
  ENSP ID: ENSP00000451660
MLAKAKECWEQEHEEREAEKVRYLAERIPTLQTRGLSLSALQDLCRELHAKVEVVDEERYDIEAKCLHNTREIKDLKLKVMDLRGKFKRPPLRRVRVSADAMLRALLGSKHKVSMDLRANLKSVKKEDTEK

SEQ ID NO: 93039 - protein, 137 aa, Homo sapiens
  Payload ID: 18593
  Gene Name: troponin I type 1 (skeletal, slow)
  ENSP ID: ENSP00000451776
MPEVERKPKITASRKLLLKSLMLAKAKECWEQEHEEREAEKVRYLAERIPTLQTRGLSLSALQDLCRELHAKVEVVDEERYDIEAKCLHNTREIKDLKLKVMDLRGKFKRPPLRRVRVSADAMLRALLGSKHKVSMD

SEQ ID NO: 93040 - protein, 187 aa, Homo sapiens [sequence omitted]

SEQ ID NO: 93041 - protein, 182 aa, Homo sapiens
  Payload ID: 18594
  Gene Name: troponin I type 2 (skeletal, fast)
  Uniprot ID: P48788
  ENSP ID: ENSP00000252898
MGDEEKRNRAITARRQHLKSVMLQIAATELEKEESRREAEKQNYLAEHCPPLHIPGSMSEVQELCKQLHAKIDAAEEEKYDMEVRVQKTSKELEDMNQKLFDLRGKFKRPPLRRVRMSADAMLKALLGSKHKVCMDLRANLKQVKKEDTEKERDLRDVGDWRKNIEEKSGMEGRKKMFESES

SEQ ID NO: 93042 - protein, 182 aa, Homo sapiens
  Payload ID: 18594
  Gene Name: troponin I type 2 (skeletal, fast)
  Uniprot ID: P48788
  ENSP ID: ENSP00000371330
MSQCKKRNRAITARRQHLKSVMLQIAATELEKEESRREAEKQNYLAEHCPPLHIPGSMSEVQELCKQLHAKIDAAEEEKYDMEVRVQKTSKELEDMNQKLFDLRGKFKRPPLRRVRMSADAMLKALLGSKHKVCMDLRANLKQVKKEDTEKERDLRDVGDWRKNIEEKSGMEGRKKMFESES

SEQ ID NO: 93043 - protein, 182 aa, Homo sapiens; identical to SEQ ID NO: 93041
  Payload ID: 18594
  Gene Name: troponin I type 2 (skeletal, fast)
  Uniprot ID: P48788
  ENSP ID: ENSP00000371331

SEQ ID NO: 93044 - protein, 182 aa, Homo sapiens; identical to SEQ ID NO: 93041
  Payload ID: 18594
  Gene Name: troponin I type 2 (skeletal, fast)
  Uniprot ID: P48788
  ENSP ID: ENSP00000371336

SEQ ID NO: 93045 - protein, 182 aa, Homo sapiens
  Payload ID: 18594
  Gene Name: troponin I type 2 (skeletal, fast)
  ENSP ID: ENSP00000481242
MGDLQKRNRAITARRQHLKSVMLQIAATELEKEESRREAEKQNYLAEHCPPLHIPGSMSEVQELCKQLHAKIDAAEEEKYDMEVRVQKTSKELEDMNQKLFDLRGKFKRPPLRRVRMSADAMLKALLGSKHKVCMDLRANLKQVKKEDTEKERDLRDVGDWRKNIEEKSGMEGRKKMFESES

SEQ ID NO: 93046 - protein, 210 aa, Homo sapiens
  Payload ID: 18595
  Gene Name: troponin I type 3 (cardiac)
  Uniprot ID: P19429
  ENSP ID: ENSP00000341838
MADGSSDAAREPRPAPAPIRRRSSNYRAYATEPHAKKKSKISASRKLQLKTLLLQIAKQELEREAEERRGEKGRALSTRCQPLELAGLGFAELQDLCRQLHARVDKVDEERYDIEAKVTKNITEIADLTQKIFDLRGKFKRPTLRRVRISADAMMQALLGARAKESLDLRAHLKQVKKEDTEKENREVGDWRKNIDALSGMEGRKKKFES

SEQ ID NO: 93047 - protein, 57 aa, Homo sapiens
  Payload ID: 18595
  Gene Name: troponin I type 3 (cardiac)
  ENSP ID: ENSP00000465258
MILPCSISPWQKKSKISASRKLQLKPRVGCASLPPLCRLCCCRLQSKSWSERRRSGA

SEQ ID NO: 93048 - protein, 185 aa, Homo sapiens
  Payload ID: 18595
  Gene Name: troponin I type 3 (cardiac)
  ENSP ID: ENSP00000466729
MILPCSISPWQKKSKISASRKLQLKTLLLQIAKQELEREAEERRGEKGRALSTRCQPLELAGLGFAELQDLCRQLHARVDKVDEERYDIEAKVTKNITEIADLTQKIFDLRGKFKRPTLRRVRISADAMMQALLGARAKESLDLRAHLKQVKKEDTEKENREVGDWRKNIDALSGMEGRKKKFES

SEQ ID NO: 93049 - protein, 262 aa, Homo sapiens
  Payload ID: 18596
  Gene Name: troponin T type 1 (skeletal, slow)
  Uniprot ID: P13805
  ENSP ID: ENSP00000291901
MSDTEEQEYEEEQPEEEAAEEEEEAPEEPEPVAEPEEERPKPSRPVVPPLIPPKIPEGERVDFDDIHRKRMEKDLLELQTLIDVHFEQRKKEEEELVALKERIERRRSERAEQQRFRTEKERERQAKLAEEKMRKEEEEAKKRAEDDAKKKKVLSNMGAHFGGYLVKAEQKRGKRQTGREMKVRILSERKKPLDIDYMGEEQLREKAQELSDWIHQLESEKFDLMAKLKQQKYEINVLYNRISHAQKFRKGAGKGRVGGRWK

SEQ ID NO: 93050 - protein, 251 aa, Homo sapiens
  Payload ID: 18596
  Gene Name: troponin T type 1 (skeletal, slow)
  Uniprot ID: P13805
  ENSP ID: ENSP00000349233
MSDTEEQEYEEEQPEEEAAEEEEEEEERPKPSRPVVPPLIPPKIPEGERVDFDDIHRKRMEKDLLELQTLIDVHFEQRKKEEEELVALKERIERRRSERAEQQRFRTEKERERQAKLAEEKMRKEEEEAKKRAEDDAKKKKVLSNMGAHFGGYLVKAEQKRGKRQTGREMKVRILSERKKPLDIDYMGEEQLREKAQELSDWIHQLESEKFDLMAKLKQQKYEINVLYNRISHAQKFRKGAGKGRVGGRWK

SEQ ID NO: 93051 - protein, 192 aa, Homo sapiens
  Payload ID: 18596
  Gene Name: troponin T type 1 (skeletal, slow)
  ENSP ID: ENSP00000439640
MEKDLLELQTLIDVHFEQRKKEEEELVALKERIERRRSERAEQQRFRTEKERERQAKLAEEKMRKEEEEAKKRAEDDAKKKKVLSNMGAHFGGYLVKAEQKRGKRQTGREMKVRILSERKKPLDIDYMGEEQLREKAQELSDWIHQLESEKFDLMAKLKQQKYEINVLYNRISHAQKFRKGAGKGRVGGRWK

SEQ ID NO: 93052 - protein, 192 aa, Homo sapiens; identical to SEQ ID NO: 93051
  Payload ID: 18596
  Gene Name: troponin T type 1 (skeletal, slow)
  ENSP ID: ENSP00000464843

SEQ ID NO: 93053 - protein, 67 aa, Homo sapiens
  Payload ID: 18596
  Gene Name: troponin T type 1 (skeletal, slow)
  ENSP ID: ENSP00000465544
  MOD_RES (1)..(1): Any amino acid
XEPVAEPEEERPKPSPPQLGPSTFRSLPGLAATSLDGTSRRWEVAQGGRATHGLCVSVHSAAPWCLL

SEQ ID NO: 93054 - protein, 147 aa, Homo sapiens
  Payload ID: 18596
  Gene Name: troponin T type 1 (skeletal, slow)
  ENSP ID: ENSP00000465686
  MOD_RES (1)..(1): Any amino acid
XRTEKERERQAKLAEEKMRKEEEEAKKRAEDDAKKKKVLSNMGAHFGGYLVKAEQKRGKRQTGREMKVRILSERKKPLDIDYMGEEQLREKAQELSDWIHQLESEKFDLMAKLKQQKYEINVLYNRISHAQKFRKGAGKGRVGGRWK

SEQ ID NO: 93055 - protein, 159 aa, Homo sapiens
  Payload ID: 18596
  Gene Name: troponin T type 1 (skeletal, slow)
  ENSP ID: ENSP00000465991
MRRSSRKRRLRRRRRKKERERQAKLAEEKMRKEEEEAKKRAEDDAKKKKVLSNMGAHFGGYLVKAEQKRGKRQTGREMKVRILSERKKPLDIDYMGEEQLREKAQELSDWIHQLESEKFDLMAKLKQQKYEINVLYNRISHAQKFRKGAGKGRVGGRWK

SEQ ID NO: 93056 - protein, 278 aa, Homo sapiens
  Payload ID: 18596
  Gene Name: troponin T type 1 (skeletal, slow)
  Uniprot ID: P13805
  ENSP ID: ENSP00000467176
MSDTEEQEYEEEQPEEEAAEEEEEAPEEPEPVAEPEEERPKPSRPVVPPLIPPKIPEGERVDFDDIHRKRMEKDLLELQTLIDVHFEQRKKEEEELVALKERIERRRSERAEQQRFRTEKERERQAKLAEEKMRKEEEEAKKRAEDDAKKKKVLSNMGAHFGGYLVKAEQKRGKRQTGREMKVRILSERKKPLDIDYMGEEQLRARSAWLPPSQPSCPAREKAQELSDWIHQLESEKFDLMAKLKQQKYEINVLYNRISHAQKFRKGAGKGRVGGRWK

SEQ ID NO: 93057 - protein, 144 aa, Homo sapiens
  Payload ID: 18596
  Gene Name: troponin T type 1 (skeletal, slow)
  ENSP ID: ENSP00000467299
MSDTEEQEYEEEQPEEEAAEEEEEGEVPDSAEEERPKPSRPVVPPLIPPKIPEGERVDFDDIHRKRMEKDLLELQTLIDVHFEQRKKEEEELVALKERIERRRSERAEQQRFRTEKERERQAKLAEEKMRKEEEEAKKRAEDDA

SEQ ID NO: 93058 - protein, 251 aa, Homo sapiens; identical to SEQ ID NO: 93050
  Payload ID: 18596
  Gene Name: troponin T type 1 (skeletal, slow)
  Uniprot ID: P13805
  ENSP ID: ENSP00000467789

SEQ ID NO: 93059 - protein, 210 aa, Homo sapiens
  Payload ID: 18596
  Gene Name: troponin T type 1 (skeletal, slow)
  ENSP ID: ENSP00000467881
  MOD_RES (1)..(1): Any amino acid
XKIPEGERVDFDDIHRKRMEKDLLELQTLIDVHFEQRKKEEEELVALKERIERRRSERAEQQRFRTEKERERQAKLAEEKMRKEEEEAKKRAEDDAKKKKVLSNMGAHFGGYLVKAEQKRGKRQTGREMKVRILSERKKPLDIDYMGEEQLREKAQELSDWIHQLESEKFDLMAKLKQQKYEINVLYNRISHAQKFRKGAGKGRVGGRWK

SEQ ID NO: 93060 - protein, 192 aa, Homo sapiens; identical to SEQ ID NO: 93051
  Payload ID: 18596
  Gene Name: troponin T type 1 (skeletal, slow)
  ENSP ID: ENSP00000467980

SEQ ID NO: 93061 - protein, 104 aa, Homo sapiens
  Payload ID: 18596
  Gene Name: troponin T type 1 (skeletal, slow)
  ENSP ID: ENSP00000469564
  MOD_RES (1)..(1): Any amino acid
XEMKVRILSERKKPLDIDYMGEEQLREKAQELSDWIHQLESEKFDLMAKLKQQKYEINVLYNRISHAQKLLRLALSPRLECSGVISAHCNFHLPGSSDSPASAP

SEQ ID NO: 93062 - protein, 203 aa, Homo sapiens
  Payload ID: 18596
  Gene Name: troponin T type 1 (skeletal, slow)
  ENSP ID: ENSP00000470777
MSDTEEQEYEEEQPEEEAAEEEEEAPEEPEPVAEPEEERPKPSRPVVPPLIPPKIPEGERVDFDDIHRKRMEKDLLELQTLIDVHFEQRKKEEEELVALKERIERRRSERAEQQRFRTEKERERQAKLAEEKMRKEEEEAKKRAEDDAKKKKVLSNMGAHFGGYLVKAEQKRGKRQTGREMKVRILSERKKPLDIDYMGEEQL

SEQ ID NO: 93063 - protein, 151 aa, Homo sapiens
  Payload ID: 18596
  Gene Name: troponin T type 1 (skeletal, slow)
  ENSP ID: ENSP00000470854
MSDTEEQEYEEEQPEEEAAEEEEEEEERPKPSRPVVPPLIPPKIPEGERVDFDDIHRKRMEKDLLELQTLIDVHFEQRKKEEEELVALKERIERRRSERAEQQRFRTEKERERQAKLAEEKMRKEEEEAKKRAEDDAKKKKVLSNMGAHFG

SEQ ID NO: 93064 - protein, 298 aa, Homo sapiens
  Payload ID: 18597
  Gene Name: troponin T type 2 (cardiac)
  Uniprot ID: P45379
  ENSP ID: ENSP00000236918
MSDIEEVVEEYEEEEQEEAAVEEEEDWREDEDEQEEAAEEDAEAEAETEETRAEEDEEEEEAKEAEDGPMEESKPKPRSFMPNLVPPKIPDGERVDFDDIHRKRMEKDLNELQALIEAHFENRKKEEEELVSLKDRIERRRAERAEQQRIRNEREKERQNRLAEERARREEEENRRKAEDEARKKKALSNMMHFGGYIQKQAQTERKSGKRQTEREKKKKILAERRKVLAIDHLNEDQLREKAKELWQSIYNLEAEKFDLQEKFKQQKYEINVLRNRINDNQKVSKTRGKAKVTGRWK

SEQ ID NO: 93065 - protein, 255 aa, Homo sapiens
  Payload ID: 18597
  Gene Name: troponin T type 2 (cardiac)
  Uniprot ID: P45379
  ENSP ID: ENSP00000353535
MSDIEEVVEEYEEEEQEEAAVEEEEDWREDEDEQEEAAEEDAEAEAETEETRAEDEEEEEAKEAEDGPMEESKPKPRSFMPNLVPPKIPDGERVDFDERRRAERAEQQRIRNEREKERQNRLAEERARREEEENRRKAEDEARKKKALSNMMHFGGYIQKTERKSGKRQTEREKKKKILAERRKVLAIDHLNEDQLREKAKELWQSIYNLEAEKFDLQEKFKQQKYEINVLRNRINDNQKVSKTRGKAKVTGRWK

SEQ ID NO: 93066 - protein, 291 aa, Homo sapiens [sequence omitted]

SEQ ID NO: 93067 - protein, 282 aa, Homo sapiens
  Payload ID: 18597
  Gene Name: troponin T type 2 (cardiac)
  ENSP ID: ENSP00000356286
MSDIEEVVEEYEEEEQEEQEEAAEEDAEAEAETEETRAEEDEEEEEAKEAEDGPMEESKPKPRSFMPNLVPPKIPDGERVDFDDIHRKRMEKDLNELQALIEAHFENRKKEEEELVSLKDRIERRRAERAEQQRIRNEREKERQNRLAEERARREEEENRRKAEDEARKKKALSNMMHFGGYIQKAQTERKSGKRQTEREKKKKILAERRKVLAIDHLNEDQLREKAKELWQSIYNLEAEKFDLQEKFKQQKYEINVLRNRINDNQKVSKTRGKAKVTGRWK

SEQ ID NO: 93068 - protein, 288 aa, Homo sapiens
  Payload ID: 18597
  Gene Name: troponin T type 2 (cardiac)
  Uniprot ID: P45379
  ENSP ID: ENSP00000356287
MSDIEEVVEEYEEEEQEEAAVEEQEEAAEEDAEAEAETEETRAEEDEEEEEAKEAEDGPMEESKPKPRSFMPNLVPPKIPDGERVDFDDIHRKRMEKDLNELQALIEAHFENRKKEEEELVSLKDRIERRRAERAEQQRIRNEREKERQNRLAEERARREEEENRRKAEDEARKKKALSNMMHFGGYIQKQAQTERKSGKRQTEREKKKKILAERRKVLAIDHLNEDQLREKAKELWQSIYNLEAEKFDLQEKFKQQKYEINVLRNRINDNQKVSKTRGKAKVTGRWK

SEQ ID NO: 93069 - protein, 255 aa, Homo sapiens; identical to SEQ ID NO: 93065
  Payload ID: 18597
  Gene Name: troponin T type 2 (cardiac)
  Uniprot ID: P45379
  ENSP ID: ENSP00000356289

SEQ ID NO: 93070 - protein, 285 aa, Homo sapiens
  Payload ID: 18597
  Gene Name: troponin T type 2 (cardiac)
  Uniprot ID: P45379
  ENSP ID: ENSP00000356291
MSDIEEVVEEYEEEEQEEAAVEEQEEAAEEDAEAEAETEETRAEEDEEEEEAKEAEDGPMEESKPKPRSFMPNLVPPKIPDGERVDFDDIHRKRMEKDLNELQALIEAHFENRKKEEEELVSLKDRIERRRAERAEQQRIRNEREKERQNRLAEERARREEEENRRKAEDEARKKKALSNMMHFGGYIQKTERKSGKRQTEREKKKKILAERRKVLAIDHLNEDQLREKAKELWQSIYNLEAEKFDLQEKFKQQKYEINVLRNRINDNQKVSKTRGKAKVTGRWK

SEQ ID NO: 93071 - protein, 226 aa, Homo sapiens
  Payload ID: 18597
  Gene Name: troponin T type 2 (cardiac)
  ENSP ID: ENSP00000387874
MEESKPKPRSFMPNLVPPKIPDGERVDFDDIHRKRMEKDLNELQALIEAHFENRKKEEEELVSLKDRIERRRAERAEQQRIRNEREKERQNRLAEERARREEEENRRKAEDEARKKKALSNMMHFGGYIQKTERKSGKRQTEREKKKKILAERRKVLAIDHLNEDQLREKAKELWQSIYNLEAEKFDLQEKFKQQKYEINVLRNRINDNQKVSKTRGKAKVTGRWK

SEQ ID NO: 93072 - protein, 114 aa, Homo sapiens
  Payload ID: 18597
  Gene Name: troponin T type 2 (cardiac)
  ENSP ID: ENSP00000395163
MSDIEEVVEEYEEEEQEEEEDWREDEDEQEEAAEEDAEAEAETEETRAEEDEEEEEAKEAEDGPMEESKPKPRSFMPNLVPPKIPDGERVDFDDIHRKRMEKDLNELQALIEAH

SEQ ID NO: 93073 - protein, 180 aa, Homo sapiens
  Payload ID: 18597
  Gene Name: troponin T type 2 (cardiac)
  ENSP ID: ENSP00000402238
MSDIEEVVEEYEEEEQEEAAVEEEEDWREDEDEQEEAAEEDAEAEAETEETRAEEDEEEEEAKEAEDGPMEESKPKPRSFMPNLVPPKIPDGERVDFDDIHRKRMEKDLNELQALIEAHFENRKKEEEELVSLKDRIERRRAERAEQQRIRNEREKERQNRLAEERARREEEENRRKAED

SEQ ID NO: 93074 - protein, 226 aa, Homo sapiens; identical to SEQ ID NO: 93071
  Payload ID: 18597
  Gene Name: troponin T type 2 (cardiac)
  ENSP ID: ENSP00000404134

SEQ ID NO: 93075 - protein, 97 aa, Homo sapiens
  Payload ID: 18597
  Gene Name: troponin T type 2 (cardiac)
  ENSP ID: ENSP00000408731
MSDIEEVVEEYEEEEQEEAAVEEQEEAAEEDAEAEAETEETRAEDEEEEEAKEAEDGPMEESKPKPRSFMPNLVPPKIPDGERVDFDDIHRKRMEKD

SEQ ID NO: 93076 - protein, 271 aa, Homo sapiens
  Payload ID: 18597
  Gene Name: troponin T type 2 (cardiac)
  ENSP ID: ENSP00000414036
MSDIEEVVEEYEEEEQEEQEEAAEEDAEAEAETEETRAEEDEEEEEAKEAEDGPMEESKPKPRSFMPNLVPPKIPDGERVDFDDIHRKRMEKDLNELQALIEAHFENRKKEEEELVSLKDRIERRRAERAEQQRIRNEREKERQNRLAEERARREEEENRRKAEDEARKKKALSNMMHFGGYIQKAQTERKSGKRQTEREKKKKILAERRKVLAIDHLNEDQLREKAKELWQSIYNLEAEKFDLQEKFKQQKYEINVLRNRINDNQKVSKT

SEQ ID NO: 93077 - protein, 288 aa, Homo sapiens; identical to SEQ ID NO: 93068
  Payload ID: 18597
  Gene Name: troponin T type 2 (cardiac)
  Uniprot ID: P45379
  ENSP ID: ENSP00000422031

SEQ ID NO: 93078 - protein, 258 aa, Homo sapiens
  Payload ID: 18598
  Gene Name: troponin T type 3 (skeletal, fast)
  Uniprot ID: P45378
  ENSP ID: ENSP00000278317
MSDEEVEQVEEQYEEEEEAQEEEEVQEDTAEEDAEEEKPRPKLTAPKIPEGEKVDFDDIQKKRQNKDLMELQALIDSHFEARKKEEEELVALKERIEKRRAERAEQQRIRAEKERERQNRLAEEKARREEEDAKRRAEDDLKKKKALSSMGANYSSYLAKADQKRGKKQTAREMKKKILAERRKPLNIDHLGEDKLRDKAKELWETLHQLEIDKFEFGEKLKRQKYDITTLRSRIDQAQKHSKKAGTPAKGKVGGRWK

SEQ ID NO: 93079 - protein, 245 aa, Homo sapiens
  Payload ID: 18598
  Gene Name: troponin T type 3 (skeletal, fast)
  Uniprot ID: P45378
  ENSP ID: ENSP00000344870
MSDEEVEQVEEQYEEEEEAQEEEEKPRPKLTAPKIPEGEKVDFDDIQKKRQNKDLMELQALIDSHFEARKKEEEELVALKERIEKRRAERAEQQRIRAEKERERQNRLAEEKARREEEDAKRRAEDDLKKKKALSSMGANYSSYLAKADQKRGKKQTAREMKKKILAERRKPLNIDHLGEDKLRDKAKELWETLHQLEIDKFEFGEKLKRQKYDITTLRSRIDQAQKHSKKAGTPAKGKVGGRWK

SEQ ID NO: 93080 - protein, 244 aa, Homo sapiens
  Payload ID: 18598
  Gene Name: troponin T type 3 (skeletal, fast)
  ENSP ID: ENSP00000370969
MSDEEVEQVEEEAQEEEEVQEEEKPRPKLTAPKIPEGEKVDFDDIQKKRQNKDLMELQALIDSHFEARKKEEEELVALKERIEKRRAERAEQQRIRAEKERERQNRLAEEKARREEEDAKRRAEDDLKKKKALSSMGANYSSYLAKADQKRGKKQTAREMKKKILAERRKPLNIDHLGEDKLRDKAKELWETLHQLEIDKFEFGEKLKRQKYDITTLRSRIDQAQKHSKKAGTPAKGKVGGRWK

SEQ ID NO: 93081 - protein, 250 aa, Homo sapiens
  Payload ID: 18598
  Gene Name: troponin T type 3 (skeletal, fast)
  Uniprot ID: P45378
  ENSP ID: ENSP00000370970
MSDEEVEQVEEQYEEEEEAQEEEEVQEEEKPRPKLTAPKIPEGEKVDFDDIQKKRQNKDLMELQALIDSHFEARKKEEEELVALKERIEKRRAERAEQQRIRAEKERERQNRLAEEKARREEEDAKRRAEDDLKKKKALSSMGANYSSYLAKADQKRGKKQTAREMKKKILAERRKPLNIDHLGEDKLRDKAKELWETLHQLEIDKFEFGEKLKRQKYDITTLRSRIDQAQKHSKKAGTPAKGKVGGRWK

SEQ ID NO: 93082 - protein, 261 aa, Homo sapiens
  Payload ID: 18598
  Gene Name: troponin T type 3 (skeletal, fast)
  Uniprot ID: P45378
  ENSP ID: ENSP00000370975
MSDEEVEQVEEQYEEEEEAQEEAAEVHEEVHEPEEVQEEEKPRPKLTAPKIPEGEKVDFDDIQKKRQNKDLMELQALIDSHFEARKKEEEELVALKERIEKRRAERAEQQRIRAEKERERQNRLAEEKARREEEDAKRRAEDDLKKKKALSSMGANYSSYLAKADQKRGKKQTAREMKKKILAERRKPLNIDHLGEDKLRDKAKELWETLHQLEIDKFEFGEKLKRQKYDITTLRSRIDQAQKHSKKAGTPAKGKVGGRWK

SEQ ID NO: 93083 - protein, 250 aa, Homo sapiens
  Payload ID: 18598
  Gene Name: troponin T type 3 (skeletal, fast)
  Uniprot ID: P45378
  ENSP ID: ENSP00000370991
MSDEEVEQVEEQYEEEEEAQEEEEVQEEEKPRPKLTAPKIPEGEKVDFDDIQKKRQNKDLMELQALIDSHFEARKKEEEELVALKERIEKRRAERAEQQRIRAEKERERQNRLAEEKARREEEDAKRRAEDDLKKKKALSSMGANYSSYLAKADQKRGKKQTAREMKKKILAERRKPLNIDHLGEDKLRDKAKELWETLHQLEIDKFEFGEKLKRQKYDIMNVRARVQMLAKFSKKAGTPAKGKVGGRWK

SEQ ID NO: 93084 - protein, 256 aa, Homo sapiens
  Payload ID: 18598
  Gene Name: troponin T type 3 (skeletal, fast)
  Uniprot ID: P45378
  ENSP ID: ENSP00000371001
MSDEEVEQVEEQYEEEEEAQEEAAEVHEEVHEPEEKPRPKLTAPKIPEGEKVDFDDIQKKRQNKDLMELQALIDSHFEARKKEEEELVALKERIEKRRAERAEQQRIRAEKERERQNRLAEEKARREEEDAKRRAEDDLKKKKALSSMGANYSSYLAKADQKRGKKQTAREMKKKILAERRKPLNIDHLGEDKLRDKAKELWETLHQLEIDKFEFGEKLKRQKYDITTLRSRIDQAQKHSKKAGTPAKGKVGGRWK

SEQ ID NO: 93085 - protein, 269 aa, Homo sapiens
  Payload ID: 18598
  Gene Name: troponin T type 3 (skeletal, fast)
  Uniprot ID: P45378
  ENSP ID: ENSP00000380468
MSDEEVEQVEEQYEEEEEAQEEAAEVHEEVHEPEEVQEDTAEEDAEEEKPRPKLTAPKIPEGEKVDFDDIQKKRQNKDLMELQALIDSHFEARKKEEEELVALKERIEKRRAERAEQQRIRAEKERERQNRLAEEKARREEEDAKRRAEDDLKKKKALSSMGANYSSYLAKADQKRGKKQTAREMKKKILAERRKPLNIDHLGEDKLRDKAKELWETLHQLEIDKFEFGEKLKRQKYDITTLRSRIDQAQKHSKKAGTPAKGKVGGRWK

SEQ ID NO: 93086 - protein, 239 aa, Homo sapiens
  Payload ID: 18598
  Gene Name: troponin T type 3 (skeletal, fast)
  ENSP ID: ENSP00000380471
MSDEEVEQVEEEAQEEEEKPRPKLTAPKIPEGEKVDFDDIQKKRQNKDLMELQALIDSHFEARKKEEEELVALKERIEKRRAERAEQQRIRAEKERERQNRLAEEKARREEEDAKRRAEDDLKKKKALSSMGANYSSYLAKADQKRGKKQTAREMKKKILAERRKPLNIDHLGEDKLRDKAKELWETLHQLEIDKFEFGEKLKRQKYDITTLRSRIDQAQKHSKKAGTPAKGKVGGRWK

SEQ ID NO: 93087 - protein, 239 aa, Homo sapiens
  Payload ID: 18598
  Gene Name: troponin T type 3 (skeletal, fast)
  ENSP ID: ENSP00000413203
MSDEEVEQVEEEAQEEEEKPRPKLTAPKIPEGEKVDFDDIQKKRQNKDLMELQALIDSHFEARKKEEEELVALKERIEKRRAERAEQQRIRAEKERERQNRLAEEKARREEEDAKRRAEDDLKKKKALSSMGANYSSYLAKADQKRGKKQTAREMKKKILAERRKPLNIDHLGEDKLRDKAKELWETLHQLEIDKFEFGEKLKRQKYDIMNVRARVQMLAKFSKKAGTPAKGKVGGRWK

SEQ ID NO: 93088 - protein, 208 aa, Homo sapiens
  Payload ID: 18598
  Gene Name: troponin T type 3 (skeletal, fast)
  ENSP ID: ENSP00000415614
MSDEEVEQVEEQYEEEEEKPRPKLTAPKIPEGEKVDFDDIQKKRQNKDLMELQALIDSHFEARKKEEEELVALKERIEKRRAERAEQQRIRAEKERERQNRLAEEKARREEEDAKRRAEDDLKKKKALSSMGANYSSYLAKADQKRGKKQTAREMKKKILAERRKPLNIDHLGEDKLRDKAKELWETLHQLEIDKFEFGEKLKRQKYD

SEQ ID NO: 93089 - protein, 538 aa, Homo sapiens
  Payload ID: 18599
  Gene Name: TROVE domain family, member 2
  Uniprot ID: P10155
  ENSP ID: ENSP00000356411
MEESVNQMQPLNEKQIANSQDGYVWQVTDMNRLHRFLCFGSEGGTYYIKEQKLGLENAEALIRLIEDGRGCEVIQEIKSFSQEGRTTKQEPMLFALAICSQCSDISTKQAAFKAVSEVCRIPTHLFTFIQFKKDLKESMKCGMWGRALRKAIADWYNEKGGMALALAVTKYKQRNGWSHKDLLRLSHLKPSSEGLAIVTKYITKGWKEVHELYKEKALSVETEKLLKYLEAVEKVKRTRDELEVIHLIEEHRLVREHLLTNHLKSKEVWKALLQEMPLTALLRNLGKMTANSVLEPGNSEVSLVCEKLCNEKLLKKARIHPFHILIALETYKTGHGLRGKLKWRPDEEILKALDAAFYKTFKTVEPTGKRFLLAVDVSASMNQRVLGSILNASTVAAAMCMVVTRTEKDSYVVAFSDEMVPCPVTTDMTLQQVLMAMSQIPAGGTDCSLPMIWAQKTNTPADVFIVFTDNETFAGGVHPAIALREYRKKMDIPAKLIVCGMTSNGFTIADPDDRGMLDMCGFDTGALDVIRNFTLDMI

SEQ ID NO: 93090 - protein, 518 aa, Homo sapiens
  Payload ID: 18599
  Gene Name: TROVE domain family, member 2
  Uniprot ID: P10155
  ENSP ID: ENSP00000356413
MEESVNQMQPLNEKQIANSQDGYVWQVTDMNRLHRFLCFGSEGGTYYIKEQKLGLENAEALIRLIEDGRGCEVIQEIKSFSQEGRTTKQEPMLFALAICSQCSDISTKQAAFKAVSEVCRIPTHLFTFIQFKKDLKESMKCGMWGRALRKAIADWYNEKGGMALALAVTKYKQRNGWSHKDLLRLSHLKPSSEGLAIVTKYITKGWKEVHELYKEKALSVETEKLLKYLEAVEKVKRTRDELEVIHLIEEHRLVREHLLTNHLKSKEVWKALLQEMPLTALLRNLGKMTANSVLEPGNSEVSLVCEKLCNEKLLKKARIHPFHILIALETYKTGHGLRGKLKWRPDEEILKALDAAFYKTFKTVEPTGKRFLLAVDVSASMNQRVLGSILNASTVAAAMCMVVTRTEKDSYVVAFSDEMVPCPVTTDMTLQQVLMAMSQIPAGGTDCSLPMIWAQKTNTPADVFIVFTDNETFAGGVHPAIALREYRKKMDIPAKLIVCGMTSNGFTIADPDDRDTVK

SEQ ID NO: 93091 - protein, 525 aa, Homo sapiens
  Payload ID: 18599
  Gene Name: TROVE domain family, member 2
  Uniprot ID: P10155
  ENSP ID: ENSP00000356414
MEESVNQMQPLNEKQIANSQDGYVWQVTDMNRLHRFLCFGSEGGTYYIKEQKLGLENAEALIRLIEDGRGCEVIQEIKSFSQEGRTTKQEPMLFALAICSQCSDISTKQAAFKAVSEVCRIPTHLFTFIQFKKDLKESMKCGMWGRALRKAIADWYNEKGGMALALAVTKYKQRNGWSHKDLLRLSHLKPSSEGLAIVTKYITKGWKEVHELYKEKALSVETEKLLKYLEAVEKVKRTRDELEVIHLIEEHRLVREHLLTNHLKSKEVWKALLQEMPLTALLRNLGKMTANSVLEPGNSEVSLVCEKLCNEKLLKKARIHPFHILIALETYKTGHGLRGKLKWRPDEEILKALDAAFYKTFKTVEPTGKRFLLAVDVSASMNQRVLGSILNASTVAAAMCMVVTRTEKDSYVVAFSDEMVPCPVTTDMTLQQVLMAMSQIPAGGTDCSLPMIWAQKTNTPADVFIVFTDNETFAGGVHPAIALREYRKKMDIPAKLIVCGMTSNGFTIADPDDRALQNTLLNKSF

SEQ ID NO: 93092 - protein, 534 aa, Homo sapiens
  Payload ID: 18599
  Gene Name: TROVE domain family, member 2
  Uniprot ID: P10155
  ENSP ID: ENSP00000356415
MEESVNQMQPLNEKQIANSQDGYVWQVTDMNRLHRFLCFGSEGGTYYIKEQKLGLENAEALIRLIEDGRGCEVIQEIKSFSQEGRTTKQEPMLFALAICSQCSDISTKQAAFKAVSEVCRIPTHLFTFIQFKKDLKESMKCGMWGRALRKAIADWYNEKGGMALALAVTKYKQRNGWSHKDLLRLSHLKPSSEGLAIVTKYITKGWKEVHELYKEKALSVETEKLLKYLEAVEKVKRTRDELEVIHLIEEHRLVREHLLTNHLKSKEVWKALLQEMPLTALLRNLGKMTANSVLEPGNSEVSLVCEKLCNEKLLKKARIHPFHILIALETYKTGHGLRGKLKWRPDEEILKALDAAFYKTFKTVEPTGKRFLLAVDVSASMNQRVLGSILNASTVAAAMCMVVTRTEKDSYVVAFSDEMVPCPVTTDMTLQQVLMAMSQIPAGGTDCSLPMIWAQKTNTPADVFIVFTDNETFAGGVHPAIALREYRKKMDIPAKLIVCGMTSNGFTIADPDDRGMLDMCGFDTGALDPCKIPY

SEQ ID NO: 93093 - protein, 538 aa, Homo sapiens; identical to SEQ ID NO: 93089
  Payload ID: 18599
  Gene Name: TROVE domain family, member 2
  Uniprot ID: P10155
  ENSP ID: ENSP00000356416

SEQ ID NO: 93094 - protein, 538 aa, Homo sapiens; identical to SEQ ID NO: 93089
  Payload ID: 18599
  Gene Name: TROVE domain family, member 2
  Uniprot ID: P10155
  ENSP ID: ENSP00000383752

SEQ ID NO: 93095 - protein, 66 aa, Homo sapiens
  Payload ID: 18599
  Gene Name: TROVE domain family, member 2
  ENSP ID: ENSP00000401176
MEESVNQMQPLNEKQIANSQDGYVWQVTDMNRLHRFLCFGSEGLAIVTKYITKGWKEVHELYKEKA

SEQ ID NO: 93096 - protein, 193 aa, Homo sapiens
  Payload ID: 18599
  Gene Name: TROVE domain family, member 2
  ENSP ID: ENSP00000424612
ALIRLIEDGRGCEVIQEIKSFSQEGRTTKQEPMLFALAICSQCSDISTKQAAFKAVSEVCRIPTHLFTFIQFKKDLKESMKCGMWGRALRKAIADWYNEKGGMALALAVTKYKQRNGWSHKDLLRLSHLKPSSEVKLEKTATQKGGFTFQFCGLKPRLAIVTKYITKGWKEVHELYKEKALSVETEKLLKYLE

SEQ ID NO: 93097 - protein, 41 aa, Homo sapiens
  Payload ID: 18599
  Gene Name: TROVE domain family, member 2
  ENSP ID: ENSP00000425296
MEESVNQMQPLNEKQIANSQDGYVWQVTDMNRLHRFLCFGS

SEQ ID NO: 93098 - protein, 263 aa, Homo sapiens
  Payload ID: 18599
  Gene Name: TROVE domain family, member 2
  ENSP ID: ENSP00000472298
MPLTALLRNLGKMTANSVLEPGNSEVSLVCEKLCNEKLLKKARIHPFHILIALETYKTGHGLRGKLKWRPDEEILKALDAAFYKTFKTVEPTGKRFLLAVDVSASMNQRVLGSILNASTVAAAMCMVVTRTEKDSYVVAFSDEMVPCPVTTDMTLQQVLMAMSQIPAGGTDCSLPMIWAQKTNTPADVFIVFTDNETFAGGVHPAIALREYRKKMDIPAKLIVCGMTSNGFTIADPDDRGMLDMCGFDTGALDVIRNFTLDMI

SEQ ID NO: 93099 - protein, 919 aa, Homo sapiens
  Payload ID: 18600
  Gene Name: TRPM8 channel-associated factor 1
  Uniprot ID: Q9Y4C2
  ENSP ID: ENSP00000348220
MATPSAAFEALMNGVTSWDVPEDAVPCELLLIGEASFPVMVNDMGQVLIAASSYGRGRLVVVSHEDYLVEAQLTPFLLNAVGWLCSSPGAPIGVHPSLAPLAKILEGSGVDAKVEPEVKDSLGVYCIDAYNETMTEKLVKFMKCGGGLLIGGQAWDWANQGEDERVLFTFPGNLVTSVAGIYFTDNKGDTSFFKVSKKMPKIPVLVSCEDDLSDDREELLHGISELDISNSDCFPSQLLVHGALAFPLGLDSYHGCVIAAARYGRGRVVVTGHKVLFTVGKLGPFLLNAVRWLDGGRRGKVVVQTELRTLSGLLAVGGIDTSIEPNLTSDASVYCFEPVSEVGVKELQEFVAEGGGLFVGAQAWWWAFKNPGVSPLARFPGNLLLNPFGISITSQSLNPGPFRTPKAGIRTYHFRSTLAEFQVIMGRKRGNVEKGWLAKLGPDGAAFLQIPAEEIPAYMSVHRLLRKLLSRYRLPVATRENPVINDCCRGAMLSLATGLAHSGSDLSLLVPEIEDMYSSPYLRPSESPITVEVNCTNPGTRYCWMSTGLYIPGRQIIEVSLPEAAASADLKIQIGCHTDDLTRASKLFRGPLVINRCCLDKPTKSITCLWGGLLYIIVPQNSKLGSVPVTVKGAVHAPYYKLGETTLEEWKRRIQENPGPWGELATDNIILTVPTANLRTLENPEPLLRLWDEVMQAVARLGAEPFPLRLPQRIVADVQISVGWMHAGYPIMCHLESVQELINEKLIRTKGLWGPVHELGRNQQRQEWEFPPHTTEATCNLWCVYVHETVLGIPRSRANIALWPPVREKRVRIYLSKGPNVKNWNAWTALETYLQLQEAFGWEPFIRLFTEYRNQTNLPTENVDKMNLWVKMFSHQVQKNLAPFFEAWAWPIQKEVATSLAYLPEWKENIMKLYLLTQM

SEQ ID NO: 93100 - protein, 150 aa, Homo sapiens
  Payload ID: 18600
  Gene Name: TRPM8 channel-associated factor 1
  ENSP ID: ENSP00000417600
MATPSAAFEALMNGVTSWDVPEDAVPCELLLIGEASFPVMVNDMGQVLIAASSYGRGRLVVVSHEDYLVEAQLTPFLLNAVGWLCSSPGAPIGVHPSLAPLAKILEGSGVDAKVEPEVKDSLGVYCIDAYNETMTEKLVKFMKCGGGLLI

SEQ ID NO: 93101 - protein, 75 aa, Homo sapiens
  Payload ID: 18600
  Gene Name: TRPM8 channel-associated factor 1
  ENSP ID: ENSP00000418432
MATPSAAFEALMNGVTSWDVPEDAVPCELLLIGEASFPVMVNDMGQVLIAASSYGRGRLVVVSHEDYLVEAQLTP

SEQ ID NO: 93102 - protein, 921 aa, Homo sapiens
  Payload ID: 18600
  Gene Name: TRPM8 channel-associated factor 1
  Uniprot ID: Q9Y4C2
  ENSP ID: ENSP00000419235
MATPSAAFEALMNGVTSWDVPEDAVPCELLLIGEASFPVMVNDMGQVLIAASSYGRGRLVVVSHEDYLVEAQLTPFLLNAVGWLCSSPGAPIGVHPSLAPLAKILEGSGVDAKVEPEVKDSLGVYCIDAYNETMTEKLVKFMKCGGGLLIGGQAWDWANQGEDERVLFTFPGNLVTSVAGIYFTDNKGDTSFFKVSKKMPKIPVLVSCEDDLSDDREELLHGISELDISNSDCFPSQLLVHGALAFPLGLDSYHGCVIAAARYGRGRVVVTGHKVLFTVGKLGPFLLNAVRWLDGGRRGKVVVQTELRTLSGLLAVGGIDTSIEPNLTSDASVYCFEPVSEVGVKELQEFVAEGGGLFVGAQAWWWAFKNPGVSPLARFPGNLLLNPFGISITSQSLNPGPFRTPKAGIRTYHFRSTLAEFQVIMGRKRGNVEKGWLAKLGPDGAAFLQIPAEEIPAYMSVHRLLRKLLSRYRLPVATRENPVINDCCRGAMLSLATGLAHSGSDLSLLVPEIEDMYSSPYLRPSESPITVEVNCTNPGTRYCWMSTGLYIPGRQIIEVSLPEAAASADLKIQIGCHTDDLTRASKLFRGPLVINRCCLDKPTKSITCLWGGLLYIIVPQNSKLGSVPVTVKGAVHAPYYKLGETTLEEWKRRIQENPGPWGELATDNIILTVPTANLRTLENPEPLLRLWDEVMQAVARLGAEPFPLRLPQRIVADVQISVGWMHAGYPIMCHLESVQELINEKLIRTKGLWGPVHELGRNQQRQEWEFPPHTTEATCNLWCVYVHETVLGIPRSRANIALWPPVREKRVRIYLSKGPNVKNWNAWTALETYLQLQEAFGWEPFIRLFTEYRNQTNLPTENVDKMNLWVKMFSHQVQKNLAPFFEAWAWPIQKEVATSLAYLPEWKENIMKLYLLTQMPH

SEQ ID NO: 93103 - protein, 145 aa, Homo sapiens
  Payload ID: 18600
  Gene Name: TRPM8 channel-associated factor 1
  ENSP ID: ENSP00000419622
MATPSAAFEALMNGVTSWDVPEDAVPCELLLIGEASFPVMVNDMGQVLIAASSYGRGRLVVVSHEDYLVEAQLTPFLLNAVGWLCSSPGAPIGVHPSLAPLAKILEGSGVDAKVEPEVKDSLGVYCIDAYNETMTEKLVKFMKCG

SEQ ID NO: 93104 - protein, 167 aa, Homo sapiens
  Payload ID: 18600
  Gene Name: TRPM8 channel-associated factor 1
  ENSP ID: ENSP00000420607
MATPSAAFEALMNGVTSWDVPEDAVPCELLLIGEASFPVMVNDMGQVLIAASSYGRGRLVVVSHEDYLVEAQLTPFLLNAVGWLCSSPGAPIGVHPSLAPLAKILEGSGVDAKVEPEVKDSLGVYCIDAYNETMTEKLVKFMKCGGGLLIGGQAWDWANQGEDERVL

SEQ ID NO: 93105 - protein, 845 aa, Homo sapiens
  Payload ID: 18601
  Gene Name: TRPM8 channel-associated factor 2
  Uniprot ID: A6NFQ2
  ENSP ID: ENSP00000349902
MATIAAAAFEALMDGVTCWDVPRGPIPSELLLIGEAAFPVMVNDKGQVLIAASSYGRGRLVVVSHEGYLSHTGLAPFLLNAVSWLCPCPGAPVGVHPSLAPLVNILQDAGLEAQVKPEPGEPLGVYCINAYNDTLTATLIQFVKHGGGLLIGGQAWYWASQHGPDKVLSRFPGNKVTSVAGVYFTDTYGDRDRFKVSKKVPKIPLHVRYGEDVRQDQQQLLEGISELDIRTGGVPSQLLVHGALAFPLGLDASLNCFLAAAHYGRGRVVLAAHECLLCAPKMGPFLLNAVRWLARGQTGKVGVNTNLKDLCPLLSEHGLQCSLEPHLNSDLCVYCCKAYSDKEAKQLQEFVAEGGGLLIGGQAWWWASQNPGHCPLAGFPGNIILNCFGLSILPQTLKAGCFPVPTPEMRSYHFRKALSQFQAILNHENGNLEKSCLAKLRVDGAAFLQIPAEGVPAYISLHRLLRKMLRGSGLPAVSRENPVASDSYEAAVLSLATGLAHSGTDCSQLAQGLGTWTCSSSLYPSKHPITVEINGINPGNNDCWVSTGLYLLEGQNAEVSLSEAAASAGLRVQIGCHTDDLTKARKLSRAPVVTHQCWMDRTERSVSCLWGGLLYVIVPKGSQLGPVPVTIRGAVPAPYYKLGKTSLEEWKRQMQENLAPWGELATDNIILTVPTTNLQALKDPEPVLRLWDEMMQAVARLAAEPFPFRRPERIVADVQISAGWMHSGYPIMCHLESVKEIINEMDMRSRGVWGPIHELGHNQQRHGWEFPPHTTEATCNLWSVYVHETVLGIPRAQAHEALSPPERERRIKAHLGKGAPLCDWNVWTALETYLQVLSRNSGRRG

SEQ ID NO: 93106 - protein, 815 aa, Homo sapiens
  Payload ID: 18601
  Gene Name: TRPM8 channel-associated factor 2
  Uniprot ID: A6NFQ2
  ENSP ID: ENSP00000389100
MKIFQKEFKFILKKCTPIQKYREENGNSSSSPHHQLQSHASGPRYGEDVRQDQQQLLEGISELDIRTGGVPSQLLVHGALAFPLGLDASLNCFLAAAHYGRGRVVLAAHECLLCAPKMGPFLLNAVRWLARGQTGKVGVNTNLKDLCPLLSEHGLQCSLEPHLNSDLCVYCCKAYSDKEAKQLQEFVAEGGGLLIGGQAWWWASQNPGHCPLAGFPGNIILNCFGLSILPQTLKAGCFPVPTPEMRSYHFRKALSQFQAILNHENGNLEKSCLAKLRVDGAAFLQIPAEGVPAYISLHRLLRKMLRGSGLPAVSRENPVASDSYEAAVLSLATGLAHSGTDCSQLAQGLGTWTCSSSLYPSKHPITVEINGINPESHSVIQVGMQWRDLSSCNLHLLGLSNSSLSASCVAGTTGTRHHAWLIFVFLVEREFHRKGNNDCWVSTGLYLLEGQNAEVSLSEAAASAGLRVQIGCHTDDLTKARKLSRAPVVTHQCWMDRTERSVSCLWGGLLYVIVPKGSQLGPVPVTIRGAVPAPYYKLGKTSLEEWKRQMQENLAPWGELATDNIILTVPTTNLQALKDPEPVLRLWDEMMQAVARLAAEPFPFRRPERIVADVQISAGWMHSGYPIMCHLESVKEIINEMDMRSRGVWGPIHELGHNQQRHGWEFPPHTTEATCNLWSVYVHETVLGIPRAQAHEALSPPERERRIKAHLGKGAPLCDWNVWTALETYLQLQEAFGWEPFTQLFAEYQTLSHLPKDNTGRMNLWVKKFSEKVKKNLVPFFEAWGWPIQKEVADSLASLPEWQENPMQVYLRARK

SEQ ID NO: 93107 - protein, 919 aa, Homo sapiens
  Payload ID: 18601
  Gene Name: TRPM8 channel-associated factor 2
  Uniprot ID: A6NFQ2
  ENSP ID: ENSP00000404265
MATIAAAAFEALMDGVTCWDVPRGPIPSELLLIGEAAFPVMVNDKGQVLIAASSYGRGRLVVVSHEGYLSHTGLAPFLLNAVSWLCPCPGAPVGVHPSLAPLVNILQDAGLEAQVKPEPGEPLGVYCINAYNDTLTATLIQFVKHGGGLLIGGQAWYWASQHGPDKVLSRFPGNKVTSVAGVYFTDTYGDRDRFKVSKKVPKIPLHVRYGEDVRQDQQQLLEGISELDIRTGGVPSQLLVHGALAFPLGLDASLNCFLAAAHYGRGRVVLAAHECLLCAPKMGPFLLNAVRWLARGQTGKVGVNTNLKDLCPLLSEHGLQCSLEPHLNSDLCVYCCKAYSDKEAKQLQEFVAEGGGLLIGGQAWWWASQNPGHCPLAGFPGNIILNCFGLSILPQTLKAGCFPVPTPEMRSYHFRKALSQFQAILNHENGNLEKSCLAKLRVDGAAFLQIPAEGVPAYISLHRLLRKMLRGSGLPAVSRENPVASDSYEAAVLSLATGLAHSGTDCSQLAQGLGTWTCSSSLYPSKHPITVEINGINPGNNDCWVSTGLYLLEGQNAEVSLSEAAASAGLRVQIGCHTDDLTKARKLSRAPVVTHQCWMDRTERSVSCLWGGLLYVIVPKGSQLGPVPVTIRGAVPAPYYKLGKTSLEEWKRQMQENLAPWGELATDNIILTVPTTNLQALKDPEPVLRLWDEMMQAVARLAAEPFPFRRPERIVADVQISAGWMHSGYPIMCHLESVKEIINEMDMRSRGVWGPIHELGHNQQRHGWEFPPHTTEATCNLWSVYVHETVLGIPRAQAHEALSPPERERRIKAHLGKGAPLCDWNVWTALETYLQLQEAFGWEPFTQLFAEYQTLSHLPKDNTGRMNLWVKKFSEKVKKNLVPFFEAWGWPIQKEVADSLASLPEWQENPMQVYLRARK

SEQ ID NO: 93108 - protein, 845 aa, Homo sapiens; identical to SEQ ID NO: 93105
  Payload ID: 18601
  Gene Name: TRPM8 channel-associated factor 2
  Uniprot ID: A6NFQ2
  ENSP ID: ENSP00000412724

SEQ ID NO: 93109 - protein, 660 aa, Homo sapiens
  Payload ID: 18601
  Gene Name: TRPM8 channel-associated factor 2
  ENSP ID: ENSP00000431079
  MOD_RES (1)..(1): Any amino acid
XTRPPRATAEPVRQSLGIRTAQGYGEDVRQDQQQLLEGISELDIRTGGVPSQLLVHGALAFPLGLDASLNCFLAAAHYGRGRVVLAAHECLLCAPKMGPFLLNAVRWLARGQTGKVGVNTNLKDLCPLLSEHGLQCSLEPHLNSDLCVYCCKAYSDKEAKQLQEFVAEGGGLLIGGQAWWWASQNPGHCPLAGFPGNIILNCFGLSILPQTLKAGCFPVPTPEMRSYHFRKALSQFQAILNHENGNLEKSCLAKLRVDGAAFLQIPAEGVPAYISLHRLLRKMLRGSGLPAVSRENPVASDSYEAAVLSLATGLAHSGTDCSQLAQGLGTWTCSSSLYPSKHPITVEINGINPGNNDCWVSTGLYLLEGQNAEVSLSEAAASAGLRVQIGCHTDDLTKARKLSRAPVVTHQCWMDRTERSVSCLWGGLLYVIVPKGSQLGPVPVTIRGAVPAPYYKLGKTSLEEWKRQMQENLAPWGELATDNIILTVPTTNLQALKDPEPVLRLWDEMMQAVARLAAEPFPFRRPERIVADVQISAGWMHSGYPIMCHLESVKEIINEMDMRSRGVWGPIHELGHNQQRHGWEFPPHTTEATCNLWSVYVHETVLGIPRAQAHEALSPPERERRIKAHLGKGAPLCDWNVWTALETYLQVLSRNSGRRG

SEQ ID NO: 93110 - protein, 815 aa, Homo sapiens; identical to SEQ ID NO: 93106
  Payload ID: 18601
  Gene Name: TRPM8 channel-associated factor 2
  Uniprot ID: A6NFQ2
  ENSP ID: ENSP00000441099

SEQ ID NO: 93111 - protein, 349 aa, Homo sapiens
  Payload ID: 18602
  Gene Name: TruB pseudouridine (psi) synthase family member 1
  Uniprot ID: Q8WWH5
  ENSP ID: ENSP00000298746
MAASEAAVVSSPSLKTDTSPVLETAGTVAAMAATPSARAAAAVVAAAARTGSEARVSKAALATKLLSLSGVFAVHKPKGPTSAELLNRLKEKLLAEAGMPSPEWTKRKKQTLKIGHGGTLDSAARGVLVVGIGSGTKMLTSMLSGSKRYTAIGELGKATDTLDSTGRVTEEKPYDKITQEDIEGILQKFTGNIMQVPPLYSALKKDGQRLSTLMKRGEVVEAKPARPVTVYSISLQKFQPPFFTLDVECGGGFYIRSLVSDIGKELSSCANVLELTRTKQGPFTLEEHALPEDKWTIDDIAQSLEHCSSLFPAELALKKSKPESNEQVLSCEYITLNEPKREDDVIKTC

SEQ ID NO: 93112 - protein, 331 aa, Homo sapiens
  Payload ID: 18603
  Gene Name: TruB pseudouridine (psi) synthase family member 2
  Uniprot ID: O95900
  ENSP ID: ENSP00000361982
MGSAGLSRLHGLFAVYKPPGLKWKHLRDTVELQLLKGLNARKPPAPKQRVRFLLGPMEGSEEKELTLTATSVPSFINHPLVCGPAFAHLKVGVGHRLDAQASGVLVLGVGHGCRLLTDMYNAHLTKDYTVRGLLGKATDDFREDGRLVEKTTYDHVTREKLDRILAVIQGSHQKALVMYSNLDLKTQEAYEMAVRGLIRPMNKSPMLITGIRCLYFAPPEFLLEVQCMHETQKELRKLVHEIGLELKTTAVCTQVRRTRDGFFTLDSALLRTQWDLTNIQDAIRAATPQVAAELEKSLSPGLDTKQLPSPGWSWDSQGPSSTLGLERGAGQ

SEQ ID NO: 93113 - protein, 566 aa, Homo sapiens
  Payload ID: 18604
  Gene Name: trypsin domain containing 1
  Uniprot ID: Q2T9J0
  ENSP ID: ENSP00000287078
MRRQWGSAMRAAEQAGCMVSASRAGQPEAGPWSCSGVILSRSPGLVLCHGGIFVPFLRAGSEVLTAAGAVFLPGDSCRDDLRLHVQWAPTAAGPGGGAERGRPGLCTPQCASLEPGPPAPSRGRPLQPRLPAELLLLLSCPAFWAHFARLFGDEAAEQWRFSSAARDDEVSEDEEADQLRALGWFALLGVRLGQEEVEEERGPAMAVSPLGAVPKGAPLLVCGSPFGAFCPDIFLNTLSCGVLSNVAGPLLLTDARCLPGTEGGGVFTARPAGALVALVVAPLCWKAGEWVGFTLLCAAAPLFRAARDALHRLPHSTAALAALLPPEVGVPWGLPLRDSGPLWAAAAVLVECGTVWGSGVAVAPRLVVTCRHVSPREAARVLVRSTTPKSVAIWGRVVFATQETCPYDIAVVSLEEDLDDVPIPVPAEHFHEGEAVSVVGFGVFGQSCGPSVTSGILSAVVQVNGTPVMLQTTCAVHSGSSGGPLFSNHSGNLLGIITSNTRDNNTGATYPHLNFSIPITVLQPALQQYSQTQDLGGLRELDRAAEPVRVVWRLQRPLAEAPRSKL

SEQ ID NO: 93114 - protein, 398 aa, Homo sapiens
  Payload ID: 18604
  Gene Name: trypsin domain containing 1
  Uniprot ID: Q2T9J0
  ENSP ID: ENSP00000335673
MRRQWGSAMRAAEQAGCMVSASRAGQPEAGPWSCSGVILSRSPGLVLCHGGIFVPFLRAGSEVLTAAGAVFLPGDSCRDDLRLHVQWAPTAAGPGGGAERGRPGLCTPQCASLEPGPPAPSRGRPLQPRLPAELLLLLSCPAFWAHFARLFGDEAAEQWRFSSAARDDEVSEDEEADQLRALGWFALLGVRLGQEEVEEERGPAMAVSPLGAVPKGAPLLVCGSPFGAFCPDIFLNTLSCGVLSNVAGPLLLTDARCLPGTEGGGVFTARPAGALVALVVAPLCWKAGEWVGFTLLCAAAPLFRAARDALHRLPHSTAALAALLPPEVGVPWGLPLRDSGPLWAAAAVLVECGTVWGSGVAVAPRLVVTCRHVSPREAARVLVRSTTPKHNHQQHPGQ

SEQ ID NO: 93115 - protein, 275 aa, Homo sapiens
  Payload ID: 18605
  Gene Name: tryptase alpha/beta 1
  Uniprot ID: Q15661
  ENSP ID: ENSP00000343577
MLNLLLLALPVLASRAYAAPAPGQALQRVGIVGGQEAPRSKWPWQVSLRVHGPYWMHFCGGSLIHPQWVLTAAHCVGPDVKDLAALRVQLREQHLYYQDQLLPVSRIIVHPQFYTAQIGADIALLELEEPVNVSSHVHTVTLPPASETFPPGMPCWVTGWGDVDNDERLPPPFPLKQVKVPIMENHICDAKYHLGAYTGDDVRIVRDDMLCAGNTRRDSCQGDSGGPLVCKVNGTWLQAGVVSWGEGCAQPNRPGIYTRVTYYLDWIHHYVPKKP

SEQ ID NO: 93116 - protein, 282 aa, Homo sapiens
  Payload ID: 18605
  Gene Name: tryptase alpha/beta 1
  ENSP ID: ENSP00000418247
MLLLAPQMLNLLLLALPVLASRAYAAPAPGQALQRVGIVGGQEAPRSKWPWQVSLRVHGPYWMHFCGGSLIHPQWVLTAAHCVGPDVKDLAALRVQLREQHLYYQDQLLPVSRIIVHPQFYTAQIGADIALLELEEPVNVSSHVHTVTLPPASETFPPGMPCWVTGWGDVDNDERLPPPFPLKQVKVPIMENHICDAKYHLGAYTGDDVRIVRDDMLCAGNTRRDSCQGDSGGPLVCKVNGTWLQAGVVSWGEGCAQPNRPGIYTRVTYYLDWIHHYVPKKP

SEQ ID NO: 93117 - protein, 213 aa, Homo sapiens
  Payload ID: 18605
  Gene Name: tryptase alpha/beta 1
  ENSP ID: ENSP00000456821
YWMHFCGGSLIHPQWVLTAAHCVGPVQLREQHLYYQDQLLPVSRIIVHPQFYTAQIGADIALLELEEPVNVSSHVHTVTLPPASETFPPGMPCWVTGWGDVDNDERLPPPFPLKQVKVPIMENHICDAKYHLGAYTGDDVRIVRDDMLCAGNTRRDSCQGDSGGPLVCKVNGTWLQAGVVSWGEGCAQPNRPGIYTRVTYYLDWIHHYVPKKP

SEQ ID NO: 93118 - protein, 282 aa, Homo sapiens
  Payload ID: 18606
  Gene Name: tryptase beta 2 (gene/pseudogene)
  ENSP ID: ENSP00000478695
MLLLAPQMLNLLLLALPVLASRAYAAPAPGQALQRVGIVGGQEAPRSKWPWQVSLRVRDRYWMHFCGGSLIHPQWVLTAAHCVGPDVKDLAALRVQLREQHLYYQDQLLPVSRIIVHPQFYTAQIGADIALLELEEPVNVSSHVHTVTLPPASETFPPGMPCWVTGWGDVDNDERLPPPFPLKQVKVPIMENHICDAKYHLGAYTGDDVRIVRDDMLCAGNTRRDSCQGDSGGPLVCKVNGTWLQAGVVSWGEGCAQPNRPGIYTRVTYYLDWIHHYVPKKP

SEQ ID NO: 93119 - protein, 275 aa, Homo sapiens
  Payload ID: 18606
  Gene Name: tryptase beta 2 (gene/pseudogene)
  Uniprot ID: P20231
  ENSP ID: ENSP00000482743
MLNLLLLALPVLASRAYAAPAPGQALQRVGIVGGQEAPRSKWPWQVSLRVRDRYWMHFCGGSLIHPQWVLTAAHCVGPDVKDLAALRVQLREQHLYYQDQLLPVSRIIVHPQFYTAQIGADIALLELEEPVNVSSHVHTVTLPPASETFPPGMPCWVTGWGDVDNDERLPPPFPLKQVKVPIMENHICDAKYHLGAYTGDDVRIVRDDMLCAGNTRRDSCQGDSGGPLVCKVNGTWLQAGVVSWGEGCAQPNRPGIYTRVTYYLDWIHHYVPKKP

SEQ ID NO: 93120 - protein, 292 aa, Homo sapiens
  Payload ID: 18606
  Gene Name: tryptase beta 2 (gene/pseudogene)
  ENSP ID: ENSP00000484461
MLNLLLLALPVLASRAYAAPAPGQALQRVGIVGGQEAPRSKWPWQVSLRVRDRYWMHFCGGSLIHPQWVLTAAHCVGPDVKDLAALRVQLREQHLYYQDQLLPVSRIIVHPQFYTAQIGADIALLELEEPVNVSSHVHTVTLPPASETFPPGMPCWVTGWGDVDNDERLPPPFPLKQVKVPIMENHICDAKYHLGAYTGDDVRIVRDDMLCAGNTRRDSCQGDSGGPLVCKVNGTWLQAGVVSWGEGCAQPNRPGIYTRVTYYLDWIHHYVPKKPDGVSPCWPVWSRTPDLK

SEQ ID NO: 93121 - protein, 242 aa, Homo sapiens
  Payload ID: 18607
  Gene Name: tryptase delta 1
  Uniprot ID: Q9BZJ3
  ENSP ID: ENSP00000211076
MLLLAPQMLSLLLLALPVLASPAYVAPAPGQALQQTGIVGGQEAPRSKWPWQVSLRVRGPYWMHFCGGSLIHPQWVLTAAHCVEPDIKDLAALRVQLREQHLYYQDQLLPVSRIIVHPQFYIIQTGADIALLELEEPVNISSHIHTVTLPPASETFPPGMPCWVTGWGDVDNNVHLPPPYPLKEVEVPVVENHLCNAEYHTGLHTGHSFQIVRDDMLCAGSENHDSCQGDSGGPLVCKVNGT

SEQ ID NO: 93122 - protein, 235 aa, Homo sapiens
  Payload ID: 18607
  Gene Name: tryptase delta 1
  ENSP ID: ENSP00000380668
MLSLLLLALPVLASPAYVAPAPGQALQQTGIVGGQEAPRSKWPWQVSLRVRGPYWMHFCGGSLIHPQWVLTAAHCVEPDIKDLAALRVQLREQHLYYQDQLLPVSRIIVHPQFYIIQTGADIALLELEEPVNISSHIHTVTLPPASETFPPGMPCWVTGWGDVDNNVHLPPPYPLKEVEVPVVENHLCNAEYHTGLHTGHSFQIVRDDMLCAGSENHDSCQGDSGGPLVCKVNGT

SEQ ID NO: 93123 - protein, 321 aa, Homo sapiens
  Payload ID: 18608
  Gene Name: tryptase gamma 1
  Uniprot ID: Q9NRR2
  ENSP ID: ENSP00000234798
MALGACGLLLLLAVPGVSLRTLQPGCGRPQVSDAGGRIVGGHAAPAGAWPWQASLRLRRVHVCGGSLLSPQWVLTAAHCFSGSLNSSDYQVHLGELEITLSPHFSTVRQIILHSSPSGQPGTSGDIALVELSVPVTLSSRILPVCLPEASDDFCPGIRCWVTGWGYTREGEPLPPPYSLREVKVSVVDTETCRRDYPGPGGSILQPDMLCARGPGDACQDDSGGPLVCQVNGAWVQAGTVSWGEGCGRPNRPGVYTRVPAYVNWIRRHITASGGSESGYPRLPLLAGFFLPGLFLLLVSCVLLAKCLLHPSADGTPFPAPD

SEQ ID NO: 93124 - protein, 65 aa, Homo sapiens
  Payload ID: 18609
  Gene Name: tryptophan 2,3-dioxygenase
  ENSP ID: ENSP00000423394
MLKVVSRMHRVSVILKLLVQQFSILETMTALDFNDFREYLSPASGFQSLQFRLLENKIGVLQNMR

SEQ ID NO: 93125 - protein, 49 aa, Homo sapiens
  Payload ID: 18609
  Gene Name: tryptophan 2,3-dioxygenase
  ENSP ID: ENSP00000424384
MLKVVSRMHRVSVILKLLVQQFSILETMTALDFNDFREYLSPASGFQSL

SEQ ID NO: 93126 - protein, 406 aa, Homo sapiens
  Payload ID: 18609
  Gene Name: tryptophan 2,3-dioxygenase
  Uniprot ID: P48775
  ENSP ID: ENSP00000444788
MSGCPFLGNNFGYTFKKLPVEGSEEDKSQTGVNRASKGGLIYGNYLHLEKVLNAQELQSETKGNKIHDEHLFIITHQAYELWFKQILWELDSVREIFQNGHVRDERNMLKVVSRMHRVSVILKLLVQQFSILETMTALDFNDFREYLSPASGFQSLQFRLLENKIGVLQNMRVPYNRRHYRDNFKGEENELLLKSEQEKTLLELVEAWLERTPGLEPHGFNFWGKLEKNITRGLEEEFIRIQAKEESEEKEEQVAEFQKQKEVLLSLFDEKRHEHLLSKGERRLSYRALQGALMIYFYREEPRFQVPFQLLTSLMDIDSLMTKWRYNHVCMVHRMLGSKAGTGGSSGYHYLRSTVSDRYKVFVDLFNLSTYLIPRHWIPKMNPTIHKFLYTAEYCDSSYFSSDESD

SEQ ID NO: 93127 - protein, 406 aa, Homo sapiens; identical to SEQ ID NO: 93126
  Payload ID: 18609
  Gene Name: tryptophan 2,3-dioxygenase
  Uniprot ID: P48775
  ENSP ID: ENSP00000460086

SEQ ID NO: 93128 - protein, 49 aa, Homo sapiens; identical to SEQ ID NO: 93125
  Payload ID: 18609
  Gene Name: tryptophan 2,3-dioxygenase
  ENSP ID: ENSP00000461272

SEQ ID NO: 93129 - protein, 65 aa, Homo sapiens; identical to SEQ ID NO: 93124
  Payload ID: 18609
  Gene Name: tryptophan 2,3-dioxygenase
  ENSP ID: ENSP00000461534

SEQ ID NO: 93130 - protein, 444 aa, Homo sapiens
  Payload ID: 18610
  Gene Name: tryptophan hydroxylase 1
  Uniprot ID: P17752
  ENSP ID: ENSP00000250018
MIEDNKENKDHSLERGRASLIFSLKNEVGGLIKALKIFQEKHVNLLHIESRKSKRRNSEFEIFVDCDINREQLNDIFHLLKSHTNVLSVNLPDNFTLKEDGMETVPWFPKKISDLDHCANRVLMYGSELDADHPGFKDNVYRKRRKYFADLAMNYKHGDPIPKVEFTEEEIKTWGTVFQELNKLYPTHACREYLKNLPLLSKYCGYREDNIPQLEDVSNFLKERTGFSIRPVAGYLSPRDFLSGLAFRVFHCTQYVRHSSDPFYTPEPDTCHELLGHVPLLAEPSFAQFSQEIGLASLGASEEAVQKLATCYFFTVEFGLCKQDGQLRVFGAGLLSSISELKHALSGHAKVKPFDPKITCKQECLITTFQDVYFVSESFEDAKEKMREFTKTIKRPFGVKYNPYTRSIQILKDTKSITSAMNELQHDLDVVSDALAKVSRKPSI

SEQ ID NO: 93131 - protein, 206 aa, Homo sapiens
  Payload ID: 18610
  Gene Name: tryptophan hydroxylase 1
  ENSP ID: ENSP00000403831
MIEDNKENKDHSLERGRASLIFSLKNEVGGLIKALKIFQEKHVNLLHIESRKSKRRNSEFEIFVDCDINREQLNDIFHLLKSHTNVLSVNLPDNFTLKEDGMETVPWFPKKISDLDHCANRVLMYGSELDADHPGFKDNVYRKRRKYFADLAMNYKQAYRFFHPSCGWLLITKRFLIRFSLSSFSLHSICETQFRSLLYPRARYLP

SEQ ID NO: 93132 - protein, 165 aa, Homo sapiens
  Payload ID: 18610
  Gene Name: tryptophan hydroxylase 1
  ENSP ID: ENSP00000436081
MVLENYSKFIMIEDNKENKDHSLERGRASLIFSLKNEVGGLIKALKIFQEKHVNLLHIESRKSKRRNSEFEIFVDCDINREQLNDIFHLLKSHTNVLSVNLPDNFTLKEDGMETVPWFPKKISDLDHCANRVLMYGSELDADHPGFKDNVYRKRRKYFADLAMNY

SEQ ID NO: 93133 - protein, 490 aa, Homo sapiens
  Payload ID: 18611
  Gene Name: tryptophan hydroxylase 2
  Uniprot ID: Q8IWU9
  ENSP ID: ENSP00000329093
MQPAMMMFSSKYWARRGFSLDSAVPEEHQLLGSSTLNKPNSGKNDDKGNKGSSKREAATESGKTAVVFSLKNEVGGLVKALRLFQEKRVNMVHIESRKSRRRSSEVEIFVDCECGKTEFNELIQLLKFQTTIVTLNPPENIWTEEEELEDVPWFPRKISELDKCSHRVLMYGSELDADHPGFKDNVYRQRRKYFVDVAMGYKYGQPIPRVEYTEEETKTWGVVFRELSKLYPTHACREYLKNFPLLTKYCGYREDNVPQLEDVSMFLKERSGFTVRPVAGYLSPRDFLAGLAYRVFHCTQYIRHGSDPLYTPEPDTCHELLGHVPLLADPKFAQFSQEIGLASLGASDEDVQKLATCYFFTIEFGLCKQEGQLRAYGAGLLSSIGELKHALSDKACVKAFDPKTTCLQECLITTFQEAYFVSESFEEAKEKMRDFAKSITRPFSVYFNPYTQSIEILKDTRSIENVVQDLRSDLNTVCDALNKMNQYLGI

SEQ ID NO: 93134 - protein, 174 aa, Homo sapiens
  Payload ID: 18612
  Gene Name: tryptophan rich basic protein
  Uniprot ID: O00258
  ENSP ID: ENSP00000327716
MSSAAADHWAWLLVLSFVFGCNVLRILLPSFSSFMSRVLQKDAEQESQMRAEIQDMKQELSTVNMMDEFARYARLERKINKMTDKLKTHVKARTAQLAKIKWVISVAFYVLQAALMISLIWKYYSVPVAVVPSKWITPLDRLVAFPTRVAGGVGITCWILVCNKVVAIVLHPFS

SEQ ID NO: 93135 - protein, 140 aa, Homo sapiens
  Payload ID: 18612
  Gene Name: tryptophan rich basic protein
  Uniprot ID: O00258
  ENSP ID: ENSP00000370084
MSRVLQKDAEQESQMRAEIQDMKQELSTVNMMDEFARYARLERKINKMTDKLKTHVKARTAQLAKIKWVISVAFYVLQAALMISLIWKYYSVPVAVVPSKWITPLDRLVAFPTRVAGGVGITCWILVCNKVVAIVLHPFS

SEQ ID NO: 93136 - protein, 116 aa, Homo sapiens
  Payload ID: 18612
  Gene Name: tryptophan rich basic protein
  ENSP ID: ENSP00000370089
MSRVLQKDAEQESQMRAEIQDMKQELSTVNMMDEFARYARLERKINKMTDKLKTHVKARTAQLAKIKWVISVAFYVLQAALMISLIWKYYSVPVAVVPSKWITPLDRLVAFPTRVA

SEQ ID NO: 93137 - protein, 140 aa, Homo sapiens; identical to SEQ ID NO: 93135
  Payload ID: 18612
  Gene Name: tryptophan rich basic protein
  Uniprot ID: O00258
  ENSP ID: ENSP00000381737

SEQ ID NO: 93138 - protein, 35 aa, Homo sapiens
  Payload ID: 18612
  Gene Name: tryptophan rich basic protein
  ENSP ID: ENSP00000409030
MSRVLQKDAEQESQMRAEIQDMKQELSTVNMMDEF

SEQ ID NO: 93139 - protein, 81 aa, Homo sapiens
  Payload ID: 18612
  Gene Name: tryptophan rich basic protein
  ENSP ID: ENSP00000410228
  MOD_RES (1)..(1): Any amino acid
XTAQLAKIKWVISVAFYVLQAALMISLIWKYYSVPVAVVPSKWITPLDRLVAFPTRVAGDDGLIEFTTVTLESPKAWLVEA

SEQ ID NO: 93140 - protein, 15 aa, Homo sapiens
  Payload ID: 18612
  Gene Name: tryptophan rich basic protein
  ENSP ID: ENSP00000485087
  MOD_RES (1)..(1): Any amino acid
XRQGNLRLLHLEVNM

SEQ ID NO: 93141 - protein, 69 aa, Homo sapiens
  Payload ID: 18612
  Gene Name: tryptophan rich basic protein
  ENSP ID: ENSP00000485215
MSRVLQKDAEQESQMRAEIQDMKQELSTVNMMDEFARYARLERKINKMTDKLKTHGTVSLAAWRLHESG

SEQ ID NO: 93142 - protein, 172 aa, Homo sapiens
  Payload ID: 18612
  Gene Name: tryptophan rich basic protein
  ENSP ID: ENSP00000485555
MSSAAADHWAWLLVLSFVFGCNVLRILLPSFSSFMSRVLQKDAEQESQMRAEIQDMKQELSTVNMMDEFARYARLERKINKMTDKLKTHVKARTAQLAKIKWVISVAFYVLQAALMISLIWKYYSVPVAVVPSKWITPLDRLVAFPTRVAVFSSSIWTSKCFSSPDKSILEK

SEQ ID NO: 93143 - protein, 360 aa, Homo sapiens
  Payload ID: 18613
  Gene Name: tryptophanyl tRNA synthetase 2, mitochondrial
  Uniprot ID: Q9UGM6
  ENSP ID: ENSP00000235521
MALHSMRKARERWSFIRALHKGSAAAPALQKDSKKRVFSGIQPTGILHLGNYLGAIESWVRLQDEYDSVLYSIVDLHSITVPQDPAVLRQSILDMTAVLLACGINPEKSILFQQSQVSEHTQLSWILSCMVRLPRLQHLHQWKAKTTKQKHDGTVGLLTYPVLQAADILLYKSTHVPVGEDQVQHMELVQDLAQGFNKKYGEFFPVPESILTSMKKVKSLRDPSAKMSKSDPDKLATVRITDSPEEIVQKFRKAVTDFTSEVTYDPAGRAGVSNIVAVHAAVTGLSVEEVVRRSAGMNTARYKLAVADAVIEKFAPIKREIEKLKLDKDHLEKVLQIGSAKAKELAYTVCQEVKKLVGFL

SEQ ID NO: 93144 - protein, 220 aa, Homo sapiens
  Payload ID: 18613
  Gene Name: tryptophanyl tRNA synthetase 2, mitochondrial
  Uniprot ID: Q9UGM6
  ENSP ID: ENSP00000358434
MALHSMRKARERWSFIRALHKGSAAAPALQKDSKKRVFSGIQPTGILHLGNYLGAIESWVRLQDEYDSVLYSIVDLHSITVPQDPAVLRQSILDMTAVLLACGINPEKSILFQQSQVSEHTQLSWILSCMVRLPRLQHLHQWKAKTTKQKHDGTVGLLTYPVLQAADILLYKSTHVPVGEDQVQHMELVQDLAQGFNKKYGEFFPVPESILSMCVLVFLT

SEQ ID NO: 93145 - protein, 430 aa, Homo sapiens
  Payload ID: 18614
  Gene Name: tryptophanyl-tRNA synthetase
  Uniprot ID: P23381
  ENSP ID: ENSP00000339485
MLVSLKMSYKAAAGEDYKADCPPGNPAPTSNHGPDATEAEEDFVDPWTVQTSSAKGIDYDKLIVRFGSSKIDKELINRIERATGQRPHHFLRRGIFFSHRDMNQVLDAYENKKPFYLYTGRGPSSEAMHVGHLIPFIFTKWLQDVFNVPLVIQMTDDEKYLWKDLTLDQAYSYAVENAKDIIACGFDINKTFIFSDLDYMGMSSGFYKNVVKIQKHVTFNQVKGIFGFTDSDCIGKISFPAIQAAPSFSNSFPQIFRDRTDIQCLIPCAIDQDPYFRMTRDVAPRIGYPKPALLHSTFFPALQGAQTKMSASDPNSSIFLTDTAKQIKTKVNKHAFSGGRDTIEEHRQFGGNCDVDVSFMYLTFFLEDDDKLEQIRKDYTSGAMLTGELKKALIEVLQPLIAEHQARRKEVTDEIVKEFMTPRKLSFDFQ

SEQ ID NO: 93146 - protein, 471 aa, Homo sapiens
  Payload ID: 18614
  Gene Name: tryptophanyl-tRNA synthetase
  Uniprot ID: P23381
  ENSP ID: ENSP00000347495
MPNSEPASLLELFNSIATQGELVRSLKAGNASKDEIDSAVKMLVSLKMSYKAAAGEDYKADCPPGNPAPTSNHGPDATEAEEDFVDPWTVQTSSAKGIDYDKLIVRFGSSKIDKELINRIERATGQRPHHFLRRGIFFSHRDMNQVLDAYENKKPFYLYTGRGPSSEAMHVGHLIPFIFTKWLQDVFNVPLVIQMTDDEKYLWKDLTLDQAYSYAVENAKDIIACGFDINKTFIFSDLDYMGMSSGFYKNVVKIQKHVTFNQVKGIFGFTDSDCIGKISFPAIQAAPSFSNSFPQIFRDRTDIQCLIPCAIDQDPYFRMTRDVAPRIGYPKPALLHSTFFPALQGAQTKMSASDPNSSIFLTDTAKQIKTKVNKHAFSGGRDTIEEHRQFGGNCDVDVSFMYLTFFLEDDDKLEQIRKDYTSGAMLTGELKKALIEVLQPLIAEHQARRKEVTDEIVKEFMTPRKLSFDFQ

SEQ ID NO: 93147 - protein, 430 aa, Homo sapiens; identical to SEQ ID NO: 93145
  Payload ID: 18614
  Gene Name: tryptophanyl-tRNA synthetase
  Uniprot ID: P23381
  ENSP ID: ENSP00000351481

SEQ ID NO: 93148 - protein, 471 aa, Homo sapiens; identical to SEQ ID NO: 93146
  Payload ID: 18614
  Gene Name: tryptophanyl-tRNA synthetase
  Uniprot ID: P23381
  ENSP ID: ENSP00000376620

SEQ ID NO: 93149 - protein, 152 aa, Homo sapiens
  Payload ID: 18614
  Gene Name: tryptophanyl-tRNA synthetase
  ENSP ID: ENSP00000450427
MPNSEPASLLELFNSIATQGELVRSLKAGNASKDEIDSAVKMLVSLKMSYKAAAGEDYKADCPPGNPAPTSNHGPDATEAEEDFVDPWTVQTSSAKGIDYDKLIVRFGSSKIDKELINRIERATGQRPHHFLRRGIFFSHRDMNQVLDAYEN

SEQ ID NO: 93150 - protein, 212 aa, Homo sapiens
  Payload ID: 18614
  Gene Name: tryptophanyl-tRNA synthetase
  ENSP ID: ENSP00000450500
MPNSEPASLLELFNSIATQGELVRSLKAGNASKDEIDSAVKMLVSLKMSYKAAAGEDYKADCPPGNPAPTSNHGPDATEAEEDFVDPWTVQTSSAKGIDYDKLIVRFGSSKIDKELINRIERATGQRPHHFLRRGIFFSHRDMNQVLDAYENKKPFYLYTGRGPSSEAMHVGHLIPFIFTKWLQDVFNVPLVIQMTDDEKYLWKDLTLDQAY

SEQ ID NO: 93151 - protein, 86 aa, Homo sapiens
  Payload ID: 18614
  Gene Name: tryptophanyl-tRNA synthetase
  ENSP ID: ENSP00000450563
MPNSEPASLLELFNSIATQGELVRSLKAGNASKDEIDSAVKMLVSLKMSYKAAAGEDYKADCPPGNPAPTSNHGPDATEAEEDFVD

SEQ ID NO: 93152 - protein, 55 aa, Homo sapiens
  Payload ID: 18614
  Gene Name: tryptophanyl-tRNA synthetase
  ENSP ID: ENSP00000450623
MPNSEPASLLELFNSIATQGELVRSLKAGNASKDEIDSAVKMLVSLKMSYKAAAG

SEQ ID NO: 93153 - protein, 177 aa, Homo sapiens
  Payload ID: 18614
  Gene Name: tryptophanyl-tRNA synthetase
  ENSP ID: ENSP00000450934
MPNSEPASLLELFNSIATQGELVRSLKAGNASKAESHSVAQAGVHWHSLGSLQPLPPEFERFSCPGLDEIDSAVKMLVSLKMSYKAAAGEDYKADCPPGNPAPTSNHGPDATEAEEDFVDPWTVQTSSAKGIDYDKLIVRFGSSKIDKELINRIERATGQRPHHFLRRGIFFSHRDM

SEQ ID NO: 93154 - protein, 68 aa, Homo sapiens
  Payload ID: 18614
  Gene Name: tryptophanyl-tRNA synthetase
  ENSP ID: ENSP00000450978
MPNSEPASLLELFNSIATQGELVRSLKAGNASKDEIDSAVKMLVSLKMSYKAAAGEDYKADCPPGNPA

SEQ ID NO: 93155 - protein, 70 aa, Homo sapiens
  Payload ID: 18614
  Gene Name: tryptophanyl-tRNA synthetase
  ENSP ID: ENSP00000451027
MPNSEPASLLELFNSIATQGELVRSLKAGNASKDEIDSAVKMLVSLKMSYKAAAGEDYKADCPPGNPAPT

SEQ ID NO: 93156 - protein, 223 aa, Homo sapiens
  Payload ID: 18614
  Gene Name: tryptophanyl-tRNA synthetase
  ENSP ID: ENSP00000451251
MLVSLKMSYKAAAGEDYKADCPPGNPAPTSNHGPDATEAEEDFVDPWTVQTSSAKGIDYDKLIVRFGSSKIDKELINRIERATGQRPHHFLRRGIFFSHRDMNQVLDAYENKKPFYLYTGRGPSSEAMHVGHLIPFIFTKWLQDVFNVPLVIQMTDDEKYLWKDLTLDQAYSYAVENAKDIIACGFDINKTFIFSDLDYMGMSSGFYKNVVKIQKHVTFNQVK

SEQ ID NO: 93157 - protein, 150 aa, Homo sapiens
  Payload ID: 18614
  Gene Name: tryptophanyl-tRNA synthetase
  ENSP ID: ENSP00000451349
MPNSEPASLLELFNSIATQGELVRSLKAGNASKDEIDSAVKMLVSLKMSYKAAAGEDYKADCPPGNPAPTSNHGPDATEAEEDFVDPWTVQTSSAKGIDYDKLIVRFGSSKIDKELINRIERATGQRPHHFLRRGIFFSHRDMNQVLDAY

SEQ ID NO: 93158 - protein, 58 aa, Homo sapiens
  Payload ID: 18614
  Gene Name: tryptophanyl-tRNA synthetase
  ENSP ID: ENSP00000451377
MPNSEPASLLELFNSIATQGELVRSLKAGNASKDEIDSAVKMLVSLKMSYKAAAGEDY

SEQ ID NO: 93159 - protein, 114 aa, Homo sapiens
  Payload ID: 18614
  Gene Name: tryptophanyl-tRNA synthetase
  ENSP ID: ENSP00000451402
MPNSEPASLLELFNSIATQGELVRSLKAGNASKDEIDSAVKMLVSLKMSYKAAAGEDYKADCPPGNPAPTSNHGPDATEAEEDFVDPWTVQTSSAKGIDYDKLIVRFGSSKIDK

SEQ ID NO: 93160 - protein, 471 aa, Homo sapiens; identical to SEQ ID NO: 93146
  Payload ID: 18614
  Gene Name: tryptophanyl-tRNA synthetase
  Uniprot ID: P23381
  ENSP ID: ENSP00000451460

SEQ ID NO: 93161 - protein, 124 aa, Homo sapiens
  Payload ID: 18614
  Gene Name: tryptophanyl-tRNA synthetase
  ENSP ID: ENSP00000451469
MPNSEPASLLELFNSIATQGELVRSLKAGNASKDEIDSAVKMLVSLKMSYKAAAGEDYKADCPPGNPAPTSNHGPDATEAEEDFVDPWTVQTSSAKGIDYDKLIVRFGSSKIDKELINRIERAT

SEQ ID NO: 93162 - protein, 226 aa, Homo sapiens
  Payload ID: 18614
  Gene Name: tryptophanyl-tRNA synthetase
  ENSP ID: ENSP00000451490
MLVSLKMSYKAAAGEDYKADCPPGNPAPTSNHGPDATEAEEDFVDPWTVQTSSAKGIDYDKLIVRFGSSKIDKELINRIERATGQRPHHFLRRGIFFSHRDMNQVLDAYENKKPFYLYTGRGPSSEAMHVGHLIPFIFTKWLQDVFNVPLVIQMTDDEKYLWKDLTLDQAYSYAVENAKDIIACGFDINKTFIFSDLDYMGMSSGFYKNVVKIQKHVTFNQVKGIF

SEQ ID NO: 93163 - protein, 140 aa, Homo sapiens
  Payload ID: 18614
  Gene Name: tryptophanyl-tRNA synthetase
  ENSP ID: ENSP00000451544
MLVSLKMSYKAAAGEDYKADCPPGNPAPTSNHGPDATEAEEDFVDPWTVQTSSAKGIDYDKLIVRFGSSKIDKELINRIERATGQRPHHFLRRGIFFSHRDMNQVLDAYENKKPFYLYTGRGPSSEAMHVGHLIPFIFTK

SEQ ID NO: 93164 - protein, 154 aa, Homo sapiens
  Payload ID: 18614
  Gene Name: tryptophanyl-tRNA synthetase
  ENSP ID: ENSP00000451599
MLVSLKMSYKAAAGEDYKADCPPGNPAPTSNHGPDATEAEEDFVDPWTVQTSSAKGIDYDKLIVRFGSSKIDKELINRIERATGQRPHHFLRRGIFFSHRDMNQVLDAYENKKPFYLYTGRGPSSEAMHVGHLIPFIFTKWLQDVFNVPLVIQM

SEQ ID NO: 93165 - protein, 36 aa, Homo sapiens
  Payload ID: 18614
  Gene Name: tryptophanyl-tRNA synthetase
  ENSP ID: ENSP00000451679
MPNSEPASLLELFNSIATQGELVRSLKAGNASKGKL

SEQ ID NO: 93166 - protein, 97 aa, Homo sapiens
  Payload ID: 18614
  Gene Name: tryptophanyl-tRNA synthetase
  ENSP ID: ENSP00000451716
MPNSEPASLLELFNSIATQGELVRSLKAGNASKDEIDSAVKMLVSLKMSYKAAAGEDYKADCPPGNPAPTSNHGPDATEAEEDFVDPWTVQTSSAKG

SEQ ID NO: 93167 - protein, 58 aa, Homo sapiens; identical to SEQ ID NO: 93158
  Payload ID: 18614
  Gene Name: tryptophanyl-tRNA synthetase
  ENSP ID: ENSP00000451777

SEQ ID NO: 93168 - protein, 430 aa, Homo sapiens; identical to SEQ ID NO: 93145
  Payload ID: 18614
  Gene Name: tryptophanyl-tRNA synthetase
  Uniprot ID: P23381
  ENSP ID: ENSP00000451887

SEQ ID NO: 93169 - protein, 185 aa, Homo sapiens
  Payload ID: 18614
  Gene Name: tryptophanyl-tRNA synthetase
  ENSP ID: ENSP00000451891
  MOD_RES (1)..(1): Any amino acid
XKNVVKIQKHVTFNQVKGIFGFTDSDCIGKISFPAIQAAPSFSNSFPQIFRDRTDIQCLIPCAIDQDPYFRMTRDVAPRIGYPKPALLHSTFFPALQGAQTKMSASDPNSSIFLTDTAKQIKTKVSSGPGRGQPAGSETCPGGHTHTHTTAQCFGPQPPSHRSNAELQDCQLCSLQNSRQPVLPT

SEQ ID NO: 93170 - protein, 105 aa, Homo sapiens
  Payload ID: 18614
  Gene Name: tryptophanyl-tRNA synthetase
  ENSP ID: ENSP00000451894
MPNSEPASLLELFNSIATQGELVRSLKAGNASKAESHSVAQAGVHWHSLGSLQPLPPEFERFSCPGLDEIDSAVKMLVSLKMSYKAAAGEDYKADCPPGNPAPTS

SEQ ID NO: 93171 - protein, 104 aa, Homo sapiens
  Payload ID: 18614
  Gene Name: tryptophanyl-tRNA synthetase
  ENSP ID: ENSP00000451906
MPNSEPASLLELFNSIATQGELVRSLKAGNASKDEIDSAVKMLVSLKMSYKAAAGEDYKADCPPGNPAPTSNHGPDATEAEEDFVDPWTVQTSSAKGIDYDKLI

SEQ ID NO: 93172 - protein, 40 aa, Homo sapiens
  Payload ID: 18614
  Gene Name: tryptophanyl-tRNA synthetase
  ENSP ID: ENSP00000451922
MPNSEPASLLELFNSIATQGELVRSLKAGNASKLGSFRWK

SEQ ID NO: 93173 - protein, 63 aa, Homo sapiens
  Payload ID: 18614
  Gene Name: tryptophanyl-tRNA synthetase
  ENSP ID: ENSP00000451953
MPNSEPASLLELFNSIATQGELVRSLKAGNASKDEIDSAVKMLVSLKMSYKAAAGEDYKADCP

SEQ ID NO: 93174 - protein, 25 aa, Homo sapiens
  Payload ID: 18614
  Gene Name: tryptophanyl-tRNA synthetase
  ENSP ID: ENSP00000452358
MPNSEPASLLELFNSIATQGELVRS

SEQ ID NO: 93175 - protein, 33 aa, Homo sapiens
  Payload ID: 18614
  Gene Name: tryptophanyl-tRNA synthetase
  ENSP ID: ENSP00000452379
MPNSEPASLLELFNSIATQGELVRSLKAGNASK

SEQ ID NO: 93176 - protein, 153 aa, Homo sapiens
  Payload ID: 18614
  Gene Name: tryptophanyl-tRNA synthetase
  ENSP ID: ENSP00000452519
MLVSLKMSYKAAAGEDYKADCPPGNPAPTSNHGPDATEAEEDFVDPWTVQTSSAKGIDYDKLIVRFGSSKIDKELINRIERATGQRPHHFLRRGIFFSHRDMNQVLDAYENKKPFYLYTGRGPSSEAMHVGHLIPFIFTKWLQDVFNVPLVIQ

SEQ ID NO: 93177 - protein, 107 aa, Homo sapiens
  Payload ID: 18614
  Gene Name: tryptophanyl-tRNA synthetase
  ENSP ID: ENSP00000452550
MPNSEPASLLELFNSIATQGELVRSLKAGNASKDEIDSAVKMLVSLKMSYKAAAGEDYKADCPPGNPAPTSNHGPDATEAEEDFVDPWTVQTSSAKGIDYDKLIVRF

SEQ ID NO: 93178 - protein, 40 aa, Homo sapiens; identical to SEQ ID NO: 93172
  Payload ID: 18614
  Gene Name: tryptophanyl-tRNA synthetase
  ENSP ID: ENSP00000487316

SEQ ID NO: 93179 - protein, 346 aa, Homo sapiens
  Payload ID: 18615
  Gene Name: Ts translation elongation factor, mitochondrial
  Uniprot ID: P43897
  ENSP ID: ENSP00000313877
MSLLRSLRVFLVARTGSYPAGSLLRQSPQPRHTFYAGPRLSASASSKELLMKLRRKTGYSFVNCKKALETCGGDLKQAEIWLHKEAQKEGWSKAAKLQGRKTKEGLIGLLQEGNTTVLVEVNCETDFVSRNLKFQLLVQQVALGTMMHCQTLKDQPSAYSKVQWLTPVNLALWEAEAGGSLEGFLNSSELSGLPAGPDREGSLKDQLALAIGKLGENMILKRAAWVKVPSGFYVGSYVHGAMQSPSLHKLVLGKYGALVICETSEQKTNLEDVGRRLGQHVVGMAPLSVGSLDDEPGGEAETKMLSQPYLLDPSITLGQYVQPQGVSVVDFVRFECGEGEEAAETE

SEQ ID NO: 93180 - protein, 325 aa, Homo sapiens
  Payload ID: 18615
  Gene Name: Ts translation elongation factor, mitochondrial
  Uniprot ID: P43897
  ENSP ID: ENSP00000388330
MSLLRSLRVFLVARTGSYPAGSLLRQSPQPRHTFYAGPRLSASASSKELLMKLRRKTGYSFVNCKKALETCGGDLKQAEIWLHKEAQKEGWSKAAKLQGRKTKEGLIGLLQEGNTTVLVEVNCETDFVSRNLKFQLLVQQVALGTMMHCQTLKDQPSAYSKGFLNSSELSGLPAGPDREGSLKDQLALAIGKLGENMILKRAAWVKVPSGFYVGSYVHGAMQSPSLHKLVLGKYGALVICETSEQKTNLEDVGRRLGQHVVGMAPLSVGSLDDEPGGEAETKMLSQPYLLDPSITLGQYVQPQGVSVVDFVRFECGEGEEAAETE

SEQ ID NO: 93181 - protein, 168 aa, Homo sapiens
  Payload ID: 18615
  Gene Name: Ts translation elongation factor, mitochondrial
  ENSP ID: ENSP00000389162
MKLRRKTGYSFVNCKKALETCGGDLKQAEIWLHKEAQKEGWSKAAKLQGRKTKEGLIGLLQEGNTTVLVEVNCETDFVSRNLKFQLLVQQVALGTMMHCQTLKDQPSAYSKGFLNSSELSGLPAGPDREGSLKDQLALAIGKLGENMILKRAAWVKVPSGFYVGSYVH

SEQ ID NO: 93182 - protein, 140 aa, Homo sapiens
  Payload ID: 18615
  Gene Name: Ts translation elongation factor, mitochondrial
  ENSP ID: ENSP00000390679
MKLRRKTGYSFVNCKKALETCGGDLKQAEIWLHKEAQKEGWSKAAKLQGRKTKEGLIGLLQEGNTTVLVEVNCETDFVSRNLKFQLLVQQVALGTMMHCQTLKDQPSAYSKGFLNSSELSGLPAGPDREGSLKDQLALAI

SEQ ID NO: 93183 - protein, 89 aa, Homo sapiens
  Payload ID: 18615
  Gene Name: Ts translation elongation factor, mitochondrial
  ENSP ID: ENSP00000406339
MSLLRSLRVFLVARTGSYPAGSLLRQSPQPRHTFYAGPRLSASASSKELLMKLRRKTGYSFVNCKKALETCGGDLKQTESCSVAQAGVQ

SEQ ID NO: 93184 - protein, 215 aa, Homo sapiens
  Payload ID: 18615
  Gene Name: Ts translation elongation factor, mitochondrial
  Uniprot ID: P43897
  ENSP ID: ENSP00000439342
MSLLRSLRVFLVARTGSYPAGSLLRQSPQPRHTFYAGPRLSASASSKELLMKLRRKTGYSFVNCKKALETCGGDLKQAEIWLHKEAQKEGWSKAAKLQGRKTKEGLIGLLQEGNTTVLVEVNCETDFVSRNLKFQLLVQQVALGTMMHCQTLKDQPSAYSKGFLNSSELSGLPAGPDREGSLKDQLALAIGLPFQIGAVSELQLPESNFLQNTSS

SEQ ID NO: 93185 - protein, 167 aa, Homo sapiens
  Payload ID: 18615
  Gene Name: Ts translation elongation factor, mitochondrial
  Uniprot ID: P43897
  ENSP ID: ENSP00000440987
MSLLRSLRVFLVARTGSYPAGSLLRQSPQPRHTFYAGPRLSASASSKELLMKLRRKTGYSFVNCKKALETCGGDLKQAEIWLHKEAQKEGWSKAAKLQGRKTKEGLIGLLQEGNTTVLVEVNCETDFVSRNLKFQLLVQQVALGTMMHCQTLKDQPSAYSKENWEKT

SEQ ID NO: 93186 - protein, 230 aa, Homo sapiens
  Payload ID: 18615
  Gene Name: Ts translation elongation factor, mitochondrial
  ENSP ID: ENSP00000448575
MSLLRSLRVFLVARTGSYPAGSLLRQSPQPRHTFYAGPRLSASASSKELLMKLRRKTGYSFVNCKKALETCGGDLKQAEIWLHKEAQKEGWSKAAKLQGRKTKEGLIGLLQEGNTTVLVEVNCETDFVSRNLKFQLLVQQVALGTMMHCQTLKDQPSAYSKGFLNSSELSGLPAGPDREGSLKDQLALAIGSQARNQPVKMGGSNPCLMIRIGVSGSRPLGSAFPNWSCL

SEQ ID NO: 93187 - protein, 200 aa, Homo sapiens
  Payload ID: 18615
  Gene Name: Ts translation elongation factor, mitochondrial
  ENSP ID: ENSP00000450041
MSLLRSLRVFLVARTGSYPAGSLLRQSPQPRHTFYAGPRLSASASSKELLMKLRRKTGYSFVNCKKALETCGGDLKQAEIWLHKEAQKEGWSKAAKLQGRKTKEGLIGLLQEGNTTVLVEVNCETDFVSRNLKFQLLVQQVALGTMMHCQTLKDQPSAYSKGFLNSSELSGLPAGPDREGSLKDQLALAIVLRTHHICMI

SEQ ID NO: 93188 - protein, 144 aa, Homo sapiens
  Payload ID: 18616
  Gene Name: TSC22 domain family, member 1
  Uniprot ID: Q15714
  ENSP ID: ENSP00000261489
MKSQWCRPVAMDLGVYQLRHFSISFLSSLLGTENASVRLDNSSSGASVVAIDNKIEQAMDLVKSHLMYAVREEVEVLKEQIKELIEKNSQLEQENNLLKTLASPEQLAQFQAQLQTGSPPATTQPQGTTQPPAQPASQGSGPTA

SEQ ID NO: 93189 - protein, 1073 aa, Homo sapiens
  Payload ID: 18616
  Gene Name: TSC22 domain family, member 1
  Uniprot ID: Q15714
  ENSP ID: ENSP00000397435
MHQPPESTAAAAAAADISARKMAHPAMFPRRGSGSGSASALNAAGTGVGSNATSSEDFPPPSLLQPPPPAASSTSGPQPPPPQSLNLLSQAQLQAQPLAPGGTQMKKKSGFQITSVTPAQISASISSNNSIAEDTESYDDLDESHTEDLSSSEILDVSLSRATDLGEPERSSSEETLNNFQEAETPGAVSPNQPHLPQPHLPHLPQQNVVINGNAHPHHLHHHHQIHHGHHLQHGHHHPSHVAVASASITGGPPSSPVSRKLSTTGSSDSITPVAPTSAVSSSGSPASVMTNMRAPSTTGGIGINSVTGTSTVNNVNITAVGSFNPNVTSSMLGNVNISTSNIPSAAGVSVGPGVTSGVNVNILSGMGNGTISSSAAVSSVPNAAAGMTGGSVSSQQQQPTVNTSRFRVVKLDSSSEPFKKGRWTCTEFYEKENAVPATEGVLINKVVETVKQNPIEVTSERESTSGSSVSSSVSTLSHYTESVGSGEMGAPTVVVQQQQQQQQQQQQQPALQGVTLQQMDFGSTGPQSIPAVSIPQSISQSQISQVQLQSQELSYQQKQGLQPVPLQATMSAATGIQPSPVNVVGVTSALGQQPSISSLAQPQLPYSQAAPPVQTPLPGAPPPQQLQYGQQQPMVSTQMAPGHVKSVTQNPASEYVQQQPILQTAMSSGQPSSAGVGAGTTVIPVAQPQGIQLPVQPTAVPAQPAGASVQPVGQAPAAVSAVPTGSQIANIGQQANIPTAVQQPSTQVPPSVIQQGAPPSSQVVPPAQTGIIHQGVQTSAPSLPQQLVIASQSSLLTVPPQPQGVEPVAQGIVSQQLPAVSSLPSASSISVTSQVSSTGPSGMPSAPTNLVPPQNIAQTPATQNGNLVQSVSQPPLIATNTNLPLAQQIPLSSTQFSAQSLAQAIGSQIEDARRAAEPSLVGLPQTISGDSGGMSAVSDGSSSSLAASASLFPLKVLPLTTPLVDGEDESSSGASVVAIDNKIEQAMDLVKSHLMYAVREEVEVLKEQIKELIEKNSQLEQENNLLKTLASPEQLAQFQAQLQTGSPPATTQPQGTTQPPAQPASQGSGPTA

SEQ ID NO: 93190 - protein, 149 aa, Homo sapiens
  Payload ID: 18616
  Gene Name: TSC22 domain family, member 1
  ENSP ID: ENSP00000417476
  MOD_RES (1)..(1): Any amino acid
XVPPQNIAQTPATQNGNLVQSVSQPPLIATNTNLPLAQQIPLSSTQFSAQSLAQAIGSQIEDARRAAEPSLVGLPQTISGDSGGMSAVSDGSSSSLAASASLFPLKVLPLTTPLVDGEDESSLFQCFSPTRGARSDPRTTDTAKTTESF

SEQ ID NO: 93191 - protein, 142 aa, Homo sapiens
  Payload ID: 18616
  Gene Name: TSC22 domain family, member 1
  ENSP ID: ENSP00000418739
MHQPPESTAAAAAAADISARKMAHPAMFPRRGSGSGSASALNAAGTGVGSNATSSEDFPPPSLLQPPPPAASSTSGPQPPPPQSLNLLSQAQLQAQPLAPGGTQMKKKSGFQITSVTPAQISASISSNNSIAEDTESYDDLD

SEQ ID NO: 93192 - protein, 41 aa, Homo sapiens
  Payload ID: 18616
  Gene Name: TSC22 domain family, member 1
  ENSP ID: ENSP00000419864
MKSQWCRPVAMDLGVYQLRHFSISFLSSLLGTENASVRLDN

SEQ ID NO: 93193 - protein, 570 aa, Homo sapiens
  Payload ID: 18616
  Gene Name: TSC22 domain family, member 1
  Uniprot ID: Q15714
  ENSP ID: ENSP00000437414
MHQPPESTAAAAAAADISARKMAHPAMFPRRGSGSGSASALNAAGTGVGSNATSSEDFPPPSLLQPPPPAASSTSGPQPPPPQSLNLLSQAQLQAQPLAPGGTQMKKKSGFQITSVTPAQISASISSNNSIAEDTESYDDLDESHTEDLSSSEILDVSLSRATDLGEPERSSSEETLNNFQEAETPGAVSPNQPHLPQPHLPHLPQQNVVINGNAHPHHLHHHHQIHHGHHLQHGHHHPSHVAVASASITGGPPSSPVSRKLSTTGSSDSITPVAPTSAVSSSGSPASVMTNMRAPSTTGGIGINSVTGTSTVNNVNITAVGSFNPNVTSSMLGNVNISTSNIPSAAGVSVGPGVTSGVNVNILSGMGNGTISSSAAVSSVPNAAAGMTGGSVSSQQQQPTVNTSRFRVVKLDSSSEPFKKGRWTCTEFYEKENAVPATEGVLINKVVETVKQNPIEVTSERESTSGSSVSSSVSTLSHYTESVGSGEMGAPTVVVQQQQQQQQQQQQQPALQGVTLQQMDFGSTGPQSIPAVSIPQSISQSQISQVQLQSQELSYLTMKVVLLIVYLCM

SEQ ID NO: 93194 - protein, 86 aa, Homo sapiens
  Payload ID: 18616
  Gene Name: TSC22 domain family, member 1
  ENSP ID: ENSP00000481585
MDLVKSHLMYAVREEVEVLKEQIKELIEKNSQLEQENNLLKTLASPEQLAQFQAQLQTGSPPATTQPQGTTQPPAQPASQGSGPTA

SEQ ID NO: 93195 - protein, 86 aa, Homo sapiens; identical to SEQ ID NO: 93194
  Payload ID: 18616
  Gene Name: TSC22 domain family, member 1
  ENSP ID: ENSP00000483407

SEQ ID NO: 93196 - protein, 780 aa, Homo sapiens
  Payload ID: 18617
  Gene Name: TSC22 domain family, member 2
  Uniprot ID: O75157
  ENSP ID: ENSP00000354543
MSKMPAKKKSCFQITSVTTAQVATSITEDTESLDDPDESRTEDVSSEIFDVSRATDYGPEEVCERSSSEETLNNVGDAETPGTVSPNLLLDGQLAAAAAAPANGGGVVSARSVSGALASTLAAAATSAPAPGAPGGPQLAGSSAGPVTAAPSQPPTTCSSRFRVIKLDHGSGEPYRRGRWTCMEYYERDSDSSVLTRSGDCIRHSSTFDQTAERDSGLGATGGSVVVVVASMQGAHGPESGTDSSLTAVSQLPPSEKMSQPTPAQPQSFSVGQPQPPPPPVGGAVAQSSAPLPPFPGAATGPQPMMAAAQPSQPQGAGPGGQTLPPTNVTLAQPAMSLPPQPGPAVGAPAAQQPQQFAYPQPQIPPGHLLPVQPSGQSEYLQQHVAGLQPPSPAQPSSTGAAASPATAATLPVGTGQNASSVGAQLMGASSQPSEAMAPRTGPAQGGQVAPCQPTGVPPATVGGVVQPCLGPAGAGQPQSVPPPQMGGSGPLSAVPGGPHAVVPGVPNVPAAVPAPSVPSVSTTSVTMPNVPAPLAQSQQLSSHTPVSRSSSIIQHVGLPLAPGTHSAPTSLPQSDLSQFQTQTQPLVGQVDDTRRKSEPLPQPPLSLIAENKPVVKPPVADSLANPLQLTPMNSLATSVFSIAIPVDGDEDRNPSTAFYQAFHLNTLKESKSLWDSASGGGVVAIDNKIEQAMDLVKSHLMYAVREEVEVLKEQIKELVERNSLLERENALLKSLSSNDQLSQLPTQQANPGSTSQQQAVIAQPPQPTQPPQQPNVSSA

SEQ ID NO: 93197 - protein, 204 aa, Homo sapiens
  Payload ID: 18617
  Gene Name: TSC22 domain family, member 2
  ENSP ID: ENSP00000417747
  MOD_RES (1)..(1): Any amino acid
XIQHVGLPLAPGTHSAPTSLPQSDLSQFQTQTQPLVGQVDDTRRKSEPLPQPPLSLIAENKPVVKPPVADSLANPLQLTPMNSLATSVFSIAIPVDGDEDSASGGGVVAIDNKIEQAMDLVKSHLMYAVREEVEVLKEQIKELVERNSLLERENALLKSLSSNDQLSQLPTQQANPGSTSQQQAVIAQPPQPTQPPQQPNVSSA

SEQ ID NO: 93198 - protein, 116 aa, Homo sapiens
  Payload ID: 18617
  Gene Name: TSC22 domain family, member 2
  ENSP ID: ENSP00000418149
  MOD_RES (1)..(1): Any amino acid
XLSSHTPVSRSSSIIQHVGLPLAPGTHSAPTSLPQSDLSQFQTQTQPLVGQVDDTRRKSEPLPQPPLSLIAENKPVVKPPVADSLANPLQLTPMNSLATSVFSIAIPVDGDEDRIW

SEQ ID NO: 93199 - protein, 81 aa, Homo sapiens
  Payload ID: 18617
  Gene Name: TSC22 domain family, member 2
  ENSP ID: ENSP00000420689
  MOD_RES (1)..(1): Any amino acid
XENKPVVKPPVADSLANPLQLTPMNSLATSVFSIAIPVDGDEDRNPSTAFYQAFHLNTLKESKSLWDRIFFRIQHRRRNVT

SEQ ID NO: 93200 - protein, 200 aa, Homo sapiens
  Payload ID: 18618
  Gene Name: TSC22 domain family, member 3
  Uniprot ID: Q99576
  ENSP ID: ENSP00000314655
MAQSKLDCRSPVGLDCCNCCLDLAHRSGLQRGSSGENNNPGSPTVSNFRQLQEKLVFENLNTDKLNSIMRQDSLEPVLRDPCYLINEGICNRNIDQTMLSILLFFHSASGASVVAIDNKIEQAMDLVKNHLMYAVREEVEILKEQIRELVEKNSQLERENTLLKTLASPEQLEKFQSCLSPEEPAPESPQVPEAPGGSAV

SEQ ID NO: 93201 - protein, 110 aa, Homo sapiens
  Payload ID: 18618
  Gene Name: TSC22 domain family, member 3
  ENSP ID: ENSP00000361457
MAFQPPYSSSLFRKRDNASGASVVAIDNKIEQAMDLVKNHLMYAVREEVEILKEQIRELVEKNSQLERENTLLKTLASPEQLEKFQSCLSPEEPAPESPQVPEAPGGSAV

SEQ ID NO: 93202 - protein, 200 aa, Homo sapiens; identical to SEQ ID NO: 93200
  Payload ID: 18618
  Gene Name: TSC22 domain family, member 3
  Uniprot ID: Q99576
  ENSP ID: ENSP00000361458

SEQ ID NO: 93203 - protein, 200 aa, Homo sapiens; identical to SEQ ID NO: 93200
  Payload ID: 18618
  Gene Name: TSC22 domain family, member 3
  Uniprot ID: Q99576
  ENSP ID: ENSP00000361459

SEQ ID NO: 93204 - protein, 77 aa, Homo sapiens
  Payload ID: 18618
  Gene Name: TSC22 domain family, member 3
  ENSP ID: ENSP00000361466
MDLVKNHLMYAVREEVEILKEQIRELVEKNSQLERENTLLKTLASPEQLEKFQSCLSPEEPAPESPQVPEAPGGSAV

SEQ ID NO: 93205 - protein, 134 aa, Homo sapiens
  Payload ID: 18618
  Gene Name: TSC22 domain family, member 3
  Uniprot ID: Q99576
  ENSP ID: ENSP00000361474
MNTEMYQTPMEVAVYQLHNFSISFFSSLLGGDVVSVKLDNSASGASVVAIDNKIEQAMDLVKNHLMYAVREEVEILKEQIRELVEKNSQLERENTLLKTLASPEQLEKFQSCLSPEEPAPESPQVPEAPGGSAV

SEQ ID NO: 93206 - protein, 132 aa, Homo sapiens
  Payload ID: 18618
  Gene Name: TSC22 domain family, member 3
  ENSP ID: ENSP00000421016
MRQDSLEPVLRDPCYLINEGICNRNIDQTMLSILLFFHSASGASVVAIDNKIEQAMDLVKNHLMYAVREEVEILKEQIRELVEKNSQLERENTLLKTLASPEQLEKFQSCLSPEEPAPESPQVPEAPGGSAV

SEQ ID NO: 93207 - protein, 100 aa, Homo sapiens
  Payload ID: 18618
  Gene Name: TSC22 domain family, member 3
  ENSP ID: ENSP00000422060
MNTEMYQTPMEVAVYQLHNFSISFFSSLLGGDVVSVKLDNSASGASVVAIDNKIEQAMVSGITASFSSPDLAAAYVTLGRIEGMGEKALSQNPEEADSLP

SEQ ID NO: 93208 - protein, 58 aa, Homo sapiens
  Payload ID: 18618
  Gene Name: TSC22 domain family, member 3
  ENSP ID: ENSP00000422228
MAQSKLDCRSPVGLDCCNCCLDLAHRSGLQRGSSGENNNPGSPTVSNFRQLQEKLVFE

SEQ ID NO: 93209 - protein, 119 aa, Homo sapiens
  Payload ID: 18618
  Gene Name: TSC22 domain family, member 3
  ENSP ID: ENSP00000422636
MAQSKLDCRSPVGLDCCNCCLDLAHRSGLQRGSSGENNNPGSPTVSNFRQLQEKLVFENLNTDKLNSIMRQDSLEPVLRDPCYLINEGICNRNIDQTMLSILLFFHSASGASVVAIDNK

SEQ ID NO: 93210 - protein, 116 aa, Homo sapiens
  Payload ID: 18618
  Gene Name: TSC22 domain family, member 3
  ENSP ID: ENSP00000424653
MAQSKLDCRSPVGLDCCNCCLDLAHRSGLQRGSSGENNNPGSPTVSNFRQLQEKLVFENLNTDKLNSIMRQDSLEPVLRDPCYLINEGICNRNIDQTMLSILLFFHSASGASVVAI

SEQ ID NO: 93211 - protein, 122 aa, Homo sapiens
  Payload ID: 18618
  Gene Name: TSC22 domain family, member 3
  ENSP ID: ENSP00000425155
MAQSKLDCRSPVGLDCCNCCLDLAHRSGLQRGSSGENNNPGSPTVSNFRQLQEKLVFENLNTDKLNSIMRQDSLEPVLRDPCYLINEGICNRNIDQTMLSILLFFHSASGASVVAIDNKIEQ

SEQ ID NO: 93212 - protein, 84 aa, Homo sapiens
  Payload ID: 18618
  Gene Name: TSC22 domain family, member 3
  ENSP ID: ENSP00000425158
MAQSKLDCRSPVGLDCCNCCLDLAHRSGLQRGSSGENNNPGSPTVSNFRQLQEKLVFENLNTDKLNSIMRQDSLEPVLRDPCYL

SEQ ID NO: 93213 - protein, 25 aa, Homo sapiens
  Payload ID: 18618
  Gene Name: TSC22 domain family, member 3
  ENSP ID: ENSP00000425414
MDLVKNHLMYAVREEVEILKEQIRE

SEQ ID NO: 93214 - protein, 100 aa, Homo sapiens
  Payload ID: 18618
  Gene Name: TSC22 domain family, member 3
  ENSP ID: ENSP00000427075
MAQSKLDCRSPVGLDCCNCCLDLAHRSGLQRGSSGENNNPGSPTVSNFRQLQEKLVFENLNTDKLNSIMRQDSLEPVLRDPCYLINEGICNRNIDQTMLS

SEQ ID NO: 93215 - protein, 124 aa, Homo sapiens
  Payload ID: 18618
  Gene Name: TSC22 domain family, member 3
  ENSP ID: ENSP00000427199
MAQSKLDCRSPVGLDCCNCCLDLAHRSGLQRGSSGENNNPGSPTVSNFRQLQEKLVFENLNTDKLNSIMRQDSLEPVLRDPCYLINEGICNRNIDQTMLSILLFFHSASGASVVAIDNKIEQAM

SEQ ID NO: 93216 - protein, 200 aa, Homo sapiens; identical to SEQ ID NO: 93200
  Payload ID: 18618
  Gene Name: TSC22 domain family, member 3
  Uniprot ID: Q99576
  ENSP ID: ENSP00000427427

SEQ ID NO: 93217 - protein, 395 aa, Homo sapiens
  Payload ID: 18619
  Gene Name: TSC22 domain family, member 4
  Uniprot ID: Q9Y3Q8
  ENSP ID: ENSP00000300181
MSGGKKKSSFQITSVTTDYEGPGSPGASDPPTPQPPTGPPPRLPNGEPSPDPGGKGTPRNGSPPPGAPSSRFRVVKLPHGLGEPYRRGRWTCVDVYERDLEPHSFGGLLEGIRGASGGAGGRSLDSRLELASLGLGAPTPPSGLSQGPTSWLRPPPTSPGPQARSFTGGLGQLVVPSKAKAEKPPLSASSPQQRPPEPETGESAGTSRAATPLPSLRVEAEAGGSGARTPPLSRRKAVDMRLRMELGAPEEMGQVPPLDSRPSSPALYFTHDASLVHKSPDPFGAVAAQKFSLAHSMLAISGHLDSDDDSGSGSLVGIDNKIEQAMDLVKSHLMFAVREEVEVLKEQIRELAERNAALEQENGLLRALASPEQLAQLPSSGVPRLGPPAPNGPSV

SEQ ID NO: 93218 - protein, 156 aa, Homo sapiens
  Payload ID: 18619
  Gene Name: TSC22 domain family, member 4
  Uniprot ID: Q9Y3Q8
  ENSP ID: ENSP00000377560
MRLRMELGAPEEMGQVPPLDSRPSSPALYFTHDASLVHKSPDPFGAVAAQKFSLAHSMLAISGHLDSDDDSGSGSLVGIDNKIEQAMDLVKSHLMFAVREEVEVLKEQIRELAERNAALEQENGLLRALASPEQLAQLPSSGVPRLGPPAPNGPSV

SEQ ID NO: 93219 - protein, 211 aa, Homo sapiens
  Payload ID: 18619
  Gene Name: TSC22 domain family, member 4
  ENSP ID: ENSP00000388168
  MOD_RES (1)..(1): Any amino acid
XLLSACLAPARPCSARGALSPPGIPFTASLSIGGVSKDPFPLGMAQPGVSVKSLVSSYETRVVGMAPGLPRKRGCASSPCSPRGASPIRGTSGPPPHRGLGGPGQRPSTRRGMDKTLLSLILYCHSGSGSLVGIDNKIEQAMDLVKSHLMFAVREEVEVLKEQIRELAERNAALEQENGLLRALASPEQLAQLPSSGVPRLGPPAPNGPSV

SEQ ID NO: 93220 - protein, 168 aa, Homo sapiens
  Payload ID: 18619
  Gene Name: TSC22 domain family, member 4
  ENSP ID: ENSP00000395795
  MOD_RES (1)..(1): Any amino acid
XHCLLSACLAPARPCSARGALSPPGIPFTASLSIGGVSKDPFPLGMAQPGVSVKSLVSSYETRVVGMAPGLPRKRGCASSPCSPRGASPIRGTSGPPPHRGLGGPGQRPSTRRGMDKTLLSLILYCHSGSGSLVGIDNKIEQAMPSRHWAGDEAPTPLTLCLSRGPQD

SEQ ID NO: 93221 - protein, 171 aa, Homo sapiens
  Payload ID: 18620
  Gene Name: TSEN15 tRNA splicing endonuclease subunit
  Uniprot ID: Q8WW01
  ENSP ID: ENSP00000355299
MEERGDSEPTPGCSGLGPGGVRGFGDGGGAPSWAPEDAWMGTHPKYLEMMELDIGDATQVYVAFLVYLDLMESKSWHEVNCVGLPELQLICLVGTEIEGEGLQTVVPTPITASLSHNRIREILKASRKLQGDPDLPMSFTLAIVESDSTIVYYKLTDGFMLPDPQNISLRR

SEQ ID NO: 93222 - protein, 129 aa, Homo sapiens
  Payload ID: 18620
  Gene Name: TSEN15 tRNA splicing endonuclease subunit
  Uniprot ID: Q8WW01
  ENSP ID: ENSP00000402002
MEERGDSEPTPGCSGLGPGGVRGFGDGGGAPSWAPEDAWMGTHPKYLEMMELDIGDATQVYVAFLVYLDLMESKSWHEVNCVGLPELQLICLVGTEIEGEGLQTVVPTPITASLSHNRIFLLEDDIHVS

SEQ ID NO: 93223 - protein, 136 aa, Homo sapiens
  Payload ID: 18620
  Gene Name: TSEN15 tRNA splicing endonuclease subunit
  ENSP ID: ENSP00000432397
  MOD_RES (1)..(1): Any amino acid
XERGDSEPTPGCSGLGPGGVRGFGDGGGAPSWAPEDAWMGTHPKYLEMMELDIGDATQVYVAFLVYLDLMESKSWHEVNCVGLPELQLICLVGTEIEGEGLQTVVPTPITASLSHNRYWRATFEEGKYLATLKDLH

SEQ ID NO: 93224 - protein, 119 aa, Homo sapiens
  Payload ID: 18620
  Gene Name: TSEN15 tRNA splicing endonuclease subunit
  ENSP ID: ENSP00000435144
MEERGDSEPTPGCSGLGPGGVRGFGDGGGAPSWAPEDAWMGTHPKYLEMMELDIGDATQVYVAFLVYLDLMESKSWHEVNCVGLPELQLICLVGTEIEGEGLQTVVPTPITASLSHNRW

SEQ ID NO: 93225 - protein, 134 aa, Homo sapiens
  Payload ID: 18620
  Gene Name: TSEN15 tRNA splicing endonuclease subunit
  ENSP ID: ENSP00000436996
MEERGDSEPTPGCSGLGPGGVRGFGDGGGAPSWAPEDAWMGTHPKYLEMMELDIGDATQVYVAFLVYLDLMESKSWHEVNCVGLPELQLICLVGTEIEGEGLQTVVPTPITASLSHNRIREILKASRKLQEYFS

SEQ ID NO: 93226 - protein, 465 aa, Homo sapiens
  Payload ID: 18621
  Gene Name: TSEN2 tRNA splicing endonuclease subunit
  Uniprot ID: Q8NCE0
  ENSP ID: ENSP00000284995
MAEAVFHAPKRKRRVYETYESPLPIPFGQDHGPLKEFKIFRAEMINNNVIVRNAEDIEQLYGKGYFGKGILSRSRPSFTISDPKLVAKWKDMKTNMPIITSKRYQHSVEWAAELMRRQGQDESTVRRILKDYTKPLEHPPVKRNEEAQVHDKLNSGMVSNMEGTAGGERPSVVNGDSGKSGGVGDPREPLGCLQEGSGCHPTTESFEKSVREDASPLPHVCCCKQDALILQRGLHHEDGSQHIGLLHPGDRGPDHEYVLVEEAECAMSEREAAPNEELVQRNRLICRRNPYRIFEYLQLSLEEAFFLVYALGCLSIYYEKEPLTIVKLWKAFTVVQPTFRTTYMAYHYFRSKGWVPKVGLKYGTDLLLYRKGPPFYHASYSVIIELVDDHFEGSLRRPLSWKSLAALSRVSVNVSKELMLCYLIKPSTMTDKEMESPECMKRIKVQEVILSRWVSSRERSDQDDL

SEQ ID NO: 93227 - protein, 465 aa, Homo sapiens; identical to SEQ ID NO: 93226
  Payload ID: 18621
  Gene Name: TSEN2 tRNA splicing endonuclease subunit
  Uniprot ID: Q8NCE0
  ENSP ID: ENSP00000385976

SEQ ID NO: 93228 - protein, 406 aa, Homo sapiens
  Payload ID: 18621
  Gene Name: TSEN2 tRNA splicing endonuclease subunit
  Uniprot ID: Q8NCE0
  ENSP ID: ENSP00000392029
MAEAVFHAPKRKRRVYETYESPLPIPFGQDHGPLKEFKIFRAEMINNNVIVRNAEDIEQLYGKGYFGKGILSRSRPSFTISDPKLVAKWKDMKTNMPIITSKRYQHSVEWAAELMRRQGQDESTVRRILKDYTKPLEHPPVKRNEEAQVHDKLNSGMVSNMEGTAGGERPSVRGLHHEDGSQHIGLLHPGDRGPDHEYVLVEEAECAMSEREAAPNEELVQRNRLICRRNPYRIFEYLQLSLEEAFFLVYALGCLSIYYEKEPLTIVKLWKAFTVVQPTFRTTYMAYHYFRSKGWVPKVGLKYGTDLLLYRKGPPFYHASYSVIIELVDDHFEGSLRRPLSWKSLAALSRVSVNVSKELMLCYLIKPSTMTDKEMESPECMKRIKVQEVILSRWVSSRERSDQDDL

SEQ ID NO: 93229 - protein, 378 aa, Homo sapiens
  Payload ID: 18621
  Gene Name: TSEN2 tRNA splicing endonuclease subunit
  ENSP ID: ENSP00000406238
MAEAVFHAPKRKRRVYETYESPLPIPFGQDHGPLKEFKIFRAEMINNNVIVRNAEDIEQLYGKGYFGKGILSRSRPSFTISDPKLVAKWKDMKTNMPIITSKRYQHSVEWAAELMRRQGQDESTVRRILKDYTKPLEHPPVKRNEEAQVHDKLNSGMVSNMEGTAGGERPSVVNGDSGKSGGVGDPREPLGCLQEGSGCHPTTESFEKSVREDASPLPHVCCCKQDALILQRGLHHEDGSQHIGLLHPGDRGPDHEYVLVEEAECAMSEREAAPNEELVQRNRLICRRNPYRIFEYLQLSLEEAFFLVYALGCLSIYYEKEPLTIVKLWKAFTVVQPTFRTTYMAYHYFRSKGWVPKVGLKYGTDLLLYRKGPPFYHA

SEQ ID NO: 93230 - protein, 402 aa, Homo sapiens
  Payload ID: 18621
  Gene Name: TSEN2 tRNA splicing endonuclease subunit
  Uniprot ID: Q8NCE0
  ENSP ID: ENSP00000407974
MAEAVFHAPKRKRRVYETYESPLPIPFGQDHGPLKEFKIFRAEMINNNVIVRNAEDIEQLYGKGYFGKGILSRSRPSFTISDPKLVAKWKDMKTNMPIITSKRYQHSVEWAAELMRRQGQDESTVRRILKDYTKPLEHPPVKRNEEAQVHDKLNSGMVSNMEGTAGGERPSVVNGDSGKSGGVGDPREPLGCLQEGSGCHPTTESFEKSVREDASPLPHVCCCKQDALILQRGLHHEDGSQHIGLLHPGDRGPDHEYVLVEEAECAMSEREAAPNEEAFFLVYALGCLSIYYEKEPLTIVKLWKAFTVVQPTFRTTYMAYHYFRSKGWVPKVGLKYGTDLLLYRKGPPFYHASYSVIIELVDDHFEGSLRRPLSWKSLAALSRVSVNVSKVTQHQLCHWSVT

SEQ ID NO: 93231 - protein, 101 aa, Homo sapiens
  Payload ID: 18621
  Gene Name: TSEN2 tRNA splicing endonuclease subunit
  ENSP ID: ENSP00000408528
KELMLCYLIKPSTMTDKEMESPECMKRIKVQSRSVVQAGVQCCDLGSLQPLPAGFKRFSCLSLLSSWDYRHAPPHTANFCIFSRDGVSLCWPGWSGTPDLK

SEQ ID NO: 93232 - protein, 81 aa, Homo sapiens
  Payload ID: 18621
  Gene Name: TSEN2 tRNA splicing endonuclease subunit
  ENSP ID: ENSP00000408744
  MOD_RES (1)..(1): Any amino acid
XLVDDHFEGSLRRPLSWKSLAALSRVSVNVSKELMLCYLIKPSTMTDKEMESPECMKRIKVQEVILSRWVSSRERSDQDDL

SEQ ID NO: 93233 - protein, 439 aa, Homo sapiens
  Payload ID: 18621
  Gene Name: TSEN2 tRNA splicing endonuclease subunit
  Uniprot ID: Q8NCE0
  ENSP ID: ENSP00000416510
MAEAVFHAPKRKRRVYETYESPLPIPFGQDHGPLKEFKIFRAEMINNNVIVRNAEDIEQLYGKGYFGKGILSRSRPSFTISDPKLVAKWKDMKTNMPIITSKRYQHSVEWAAELMRRQGQDESTVRRILKDYTKPLEHPPVKRNEEAQVHDKLNSGMVSNMEGTAGGERPSVVNGDSGKSGGVGDPREPLGCLQEGSGCHPTTESFEKSVREDASPLPHVCCCKQDALILQRGLHHEDGSQHIGLLHPGDRGPDHEYVLVEEAECAMSEREAAPNEEAFFLVYALGCLSIYYEKEPLTIVKLWKAFTVVQPTFRTTYMAYHYFRSKGWVPKVGLKYGTDLLLYRKGPPFYHASYSVIIELVDDHFEGSLRRPLSWKSLAALSRVSVNVSKELMLCYLIKPSTMTDKEMESPECMKRIKVQEVILSRWVSSRERSDQDDL

SEQ ID NO: 93234 - protein, 310 aa, Homo sapiens
  Payload ID: 18622
  Gene Name: TSEN34 tRNA splicing endonuclease subunit
  Uniprot ID: Q9BSV6
  ENSP ID: ENSP00000305524
MLVVEVANGRSLVWGAEAVQALRERLGVGGRTVGALPRGPRQNSRLGLPLLLMPEEARLLAEIGAVTLVSAPRPDSRHHSLALTSFKRQQEESFQEQSALAAEARETRRQELLEKITEGQAAKKQKLEQASGASSSQEAGSSQAAKEDETSDGQASGEQEEAGPSSSQAGPSNGVAPLPRSALLVQLATARPRPVKARPLDWRVQSKDWPHAGRPAHELRYSIYRDLWERGFFLSAAGKFGGDFLVYPGDPLRFHAHYIAQCWAPEDTIPLQDLVAAGRLGTSVRKTLLLCSPQPDGKVVYTSLQWASLQ

SEQ ID NO: 93235 - protein, 310 aa, Homo sapiens; identical to SEQ ID NO: 93234
  Payload ID: 18622
  Gene Name: TSEN34 tRNA splicing endonuclease subunit
  Uniprot ID: Q9BSV6
  ENSP ID: ENSP00000379667

SEQ ID NO: 93236 - protein, 310 aa, Homo sapiens; identical to SEQ ID NO: 93234
  Payload ID: 18622
  Gene Name: TSEN34 tRNA splicing endonuclease subunit
  Uniprot ID: Q9BSV6
  ENSP ID: ENSP00000379671

SEQ ID NO: 93237 - protein, 315 aa, Homo sapiens
  Payload ID: 18622
  Gene Name: TSEN34 tRNA splicing endonuclease subunit
  ENSP ID: ENSP00000397402
MRRMLVVEVANGRSLVWGAEAVQALRERLGVGGRTVGALPRGPRQNSRLGLPLLLMPEEARLLAEIGAVTLVSAPRPDSRHHSLALTSFKRQQEESFQEQSALAAEARETRRQELLEKITEGQAAKKQKLEQASGASSSQEAGSSQAAKEDETSDGQASGEQEEAGPSSSQAGPSNGVAPLPRSALLVQLATARPRPVKARPLDWRVQSKDWPHAGRPAHELRYSIYRDLWERGFFLSAAGKFGGDFLVYPGDPLRFHAHYIAQCWAPEDTIPLQDLVAAGRLGTSVRKTLLLCSPQPDGFKSQEVSINLVYKCS

SEQ ID NO: 93238 - protein, 242 aa, Homo sapiens
  Payload ID: 18622
  Gene Name: TSEN34 tRNA splicing endonuclease subunit
  ENSP ID: ENSP00000400743
MLVVEVANGRSLVWGAEAVQALRERLGVGGRTVGALPRGPRQNSRLGLPLLLMPEEARLLAEIGAVTLVSAPRPDSRHHSLALTSFKRQQEESFQEQSALAAEARETRRQELLEKITEGQAAKKQKLEQASGASSSQEAGSSQAAKEDETSDGQASGEQEEAGPSSSQAGPSNGVAPLPRSALLVQLATARPRPVKARPLDWRVQSKDWPHAGRPAHELRYSIYRDLWERGFFLSAAGKFGG

SEQ ID NO: 93239 - protein, 251 aa, Homo sapiens
  Payload ID: 18622
  Gene Name: TSEN34 tRNA splicing endonuclease subunit
  ENSP ID: ENSP00000408689
MRRMLVVEVANGRSLVWGAEAVQALRERLGVGGRTVGALPRGPRQNSRLGLPLLLMPEEARLLAEIGAVTLVSAPRPDSRHHSLALTSFKRQQEESFQEQSALAAEARETRRQELLEKITEGQAAKKQKLEQASGASSSQEAGSSQAAKEDETSDGQASGEQEEAGPSSSQAGPSNGVAPLPRSALLVQLATARPRPVKARPLDWRVQSKDWPHAGRPAHELRYSIYRDLWERGFFLSAAGKFGGDFLVYP

SEQ ID NO: 93240 - protein, 310 aa, Homo sapiens; identical to SEQ ID NO: 93234
  Payload ID: 18622
  Gene Name: TSEN34 tRNA splicing endonuclease subunit
  ENSP ID: ENSP00000477766

SEQ ID NO: 93241 - protein, 242 aa, Homo sapiens; identical to SEQ ID NO: 93238
  Payload ID: 18622
  Gene Name: TSEN34 tRNA splicing endonuclease subunit
  ENSP ID: ENSP00000477913

SEQ ID NO: 93242 - protein, 310 aa, Homo sapiens; identical to SEQ ID NO: 93234
  Payload ID: 18622
  Gene Name: TSEN34 tRNA splicing endonuclease subunit
  Uniprot ID: Q9BSV6
  ENSP ID: ENSP00000478156

SEQ ID NO: 93243 - protein, 315 aa, Homo sapiens; identical to SEQ ID NO: 93237
  Payload ID: 18622
  Gene Name: TSEN34 tRNA splicing endonuclease subunit
  ENSP ID: ENSP00000478203

SEQ ID NO: 93244 - protein, 315 aa, Homo sapiens; identical to SEQ ID NO: 93237
  Payload ID: 18622
  Gene Name: TSEN34 tRNA splicing endonuclease subunit
  ENSP ID: ENSP00000478451

SEQ ID NO: 93245 - protein, 310 aa, Homo sapiens; identical to SEQ ID NO: 93234
  Payload ID: 18622
  Gene Name: TSEN34 tRNA splicing endonuclease subunit
  Uniprot ID: Q9BSV6
  ENSP ID: ENSP00000478622

SEQ ID NO: 93246 - protein, 242 aa, Homo sapiens; identical to SEQ ID NO: 93238
  Payload ID: 18622
  Gene Name: TSEN34 tRNA splicing endonuclease subunit
  ENSP ID: ENSP00000478751

SEQ ID NO: 93247 - protein, 315 aa, Homo sapiens; identical to SEQ ID NO: 93237
  Payload ID: 18622
  Gene Name: TSEN34 tRNA splicing endonuclease subunit
  ENSP ID: ENSP00000479105

SEQ ID NO: 93248 - protein, 315 aa, Homo sapiens; identical to SEQ ID NO: 93237
  Payload ID: 18622
  Gene Name: TSEN34 tRNA splicing endonuclease subunit
  ENSP ID: ENSP00000479563

SEQ ID NO: 93249 - protein, 310 aa, Homo sapiens; identical to SEQ ID NO: 93234
  Payload ID: 18622
  Gene Name: TSEN34 tRNA splicing endonuclease subunit
  Uniprot ID: Q9BSV6
  ENSP ID: ENSP00000479576

SEQ ID NO: 93250 - protein, 310 aa, Homo sapiens; identical to SEQ ID NO: 93234
  Payload ID: 18622
  Gene Name: TSEN34 tRNA splicing endonuclease subunit
  Uniprot ID: Q9BSV6
  ENSP ID: ENSP00000479654

SEQ ID NO: 93251 - protein, 310 aa, Homo sapiens; identical to SEQ ID NO: 93234
  Payload ID: 18622
  Gene Name: TSEN34 tRNA splicing endonuclease subunit
  ENSP ID: ENSP00000480422

SEQ ID NO: 93252 - protein, 310 aa, Homo sapiens; identical to SEQ ID NO: 93234
  Payload ID: 18622
  Gene Name: TSEN34 tRNA splicing endonuclease subunit
  Uniprot ID: Q9BSV6
  ENSP ID: ENSP00000480503

SEQ ID NO: 93253 - protein, 310 aa, Homo sapiens; identical to SEQ ID NO: 93234
  Payload ID: 18622
  Gene Name: TSEN34 tRNA splicing endonuclease subunit
  Uniprot ID: Q9BSV6
  ENSP ID: ENSP00000480899

SEQ ID NO: 93254 - protein, 310 aa, Homo sapiens; identical to SEQ ID NO: 93234
  Payload ID: 18622
  Gene Name: TSEN34 tRNA splicing endonuclease subunit
  Uniprot ID: Q9BSV6
  ENSP ID: ENSP00000480964

SEQ ID NO: 93255 - protein, 310 aa, Homo sapiens; identical to SEQ ID NO: 93234
  Payload ID: 18622
  Gene Name: TSEN34 tRNA splicing endonuclease subunit
  ENSP ID: ENSP00000481068

SEQ ID NO: 93256 - protein, 310 aa, Homo sapiens; identical to SEQ ID NO: 93234
  Payload ID: 18622
  Gene Name: TSEN34 tRNA splicing endonuclease subunit
  ENSP ID: ENSP00000481374

SEQ ID NO: 93257 - protein, 252 aa, Homo sapiens
  Payload ID: 18622
  Gene Name: TSEN34 tRNA splicing endonuclease subunit
  ENSP ID: ENSP00000481573
MRRMLVVEVANGRSLVWGAEAVQALRERLGVGGRTVGALPRGPRQNSRLGLPLLLMPEEARLLAEIGAVTLVSAPRPDSRHHSLALTSFKRQQEESFQEQSALAAEARETRRQELLEKITEGQAAKKQKLEQASGASSSQEAGSSQAAKEDETSDGQASGEQEEAGPSSSQAGPSNGVAPLPRSALLVQLATARPRPVKARPLDWRVQSKDWPHAGRPAHELRYSIYRDLWERGFFLSAAGKFGGDFLVYPG

SEQ ID NO: 93258 - protein, 251 aa, Homo sapiens; identical to SEQ ID NO: 93239
  Payload ID: 18622
  Gene Name: TSEN34 tRNA splicing endonuclease subunit
  ENSP ID: ENSP00000481608

SEQ ID NO: 93259 - protein, 310 aa, Homo sapiens; identical to SEQ ID NO: 93234
  Payload ID: 18622
  Gene Name: TSEN34 tRNA splicing endonuclease subunit
  ENSP ID: ENSP00000481639

SEQ ID NO: 93260 - protein, 310 aa, Homo sapiens; identical to SEQ ID NO: 93234
  Payload ID: 18622
  Gene Name: TSEN34 tRNA splicing endonuclease subunit
  ENSP ID: ENSP00000482084

SEQ ID NO: 93261 - protein, 242 aa, Homo sapiens; identical to SEQ ID NO: 93238
  Payload ID: 18622
  Gene Name: TSEN34 tRNA splicing endonuclease subunit
  ENSP ID: ENSP00000482513

SEQ ID NO: 93262 - protein, 310 aa, Homo sapiens; identical to SEQ ID NO: 93234
  Payload ID: 18622
  Gene Name: TSEN34 tRNA splicing endonuclease subunit
  ENSP ID: ENSP00000482527

SEQ ID NO: 93263 - protein, 315 aa, Homo sapiens; identical to SEQ ID NO: 93237
  Payload ID: 18622
  Gene Name: TSEN34 tRNA splicing endonuclease subunit
  ENSP ID: ENSP00000482737

SEQ ID NO: 93264 - protein, 315 aa, Homo sapiens; identical to SEQ ID NO: 93237
  Payload ID: 18622
  Gene Name: TSEN34 tRNA splicing endonuclease subunit
  ENSP ID: ENSP00000483157

SEQ ID NO: 93265 - protein, 315 aa, Homo sapiens; identical to SEQ ID NO: 93237
  Payload ID: 18622
  Gene Name: TSEN34 tRNA splicing endonuclease subunit
  ENSP ID: ENSP00000483220

SEQ ID NO: 93266 - protein, 310 aa, Homo sapiens; identical to SEQ ID NO: 93234
  Payload ID: 18622
  Gene Name: TSEN34 tRNA splicing endonuclease subunit
  ENSP ID: ENSP00000483266

SEQ ID NO: 93267 - protein, 310 aa, Homo sapiens; identical to SEQ ID NO: 93234
  Payload ID: 18622
  Gene Name: TSEN34 tRNA splicing endonuclease subunit
  ENSP ID: ENSP00000483436

SEQ ID NO: 93268 - protein, 310 aa, Homo sapiens; identical to SEQ ID NO: 93234
  Payload ID: 18622
  Gene Name: TSEN34 tRNA splicing endonuclease subunit
  Uniprot ID: Q9BSV6
  ENSP ID: ENSP00000484225

SEQ ID NO: 93269 - protein, 315 aa, Homo sapiens; identical to SEQ ID NO: 93237
  Payload ID: 18622
  Gene Name: TSEN34 tRNA splicing endonuclease subunit
  ENSP ID: ENSP00000484239

SEQ ID NO: 93270 - protein, 310 aa, Homo sapiens; identical to SEQ ID NO: 93234
  Payload ID: 18622
  Gene Name: TSEN34 tRNA splicing endonuclease subunit
  ENSP ID: ENSP00000484465

SEQ ID NO: 93271 - protein, 315 aa, Homo sapiens; identical to SEQ ID NO: 93237
  Payload ID: 18622
  Gene Name: TSEN34 tRNA splicing endonuclease subunit
  ENSP ID: ENSP00000484555

SEQ ID NO: 93272 - protein, 310 aa, Homo sapiens; identical to SEQ ID NO: 93234
  Payload ID: 18622
  Gene Name: TSEN34 tRNA splicing endonuclease subunit
  Uniprot ID: Q9BSV6
  ENSP ID: ENSP00000484694

SEQ ID NO: 93273 - protein, 310 aa, Homo sapiens; identical to SEQ ID NO: 93234
  Payload ID: 18622
  Gene Name: TSEN34 tRNA splicing endonuclease subunit
  ENSP ID: ENSP00000484865

SEQ ID NO: 93274 - protein, 310 aa, Homo sapiens; identical to SEQ ID NO: 93234
  Payload ID: 18622
  Gene Name: TSEN34 tRNA splicing endonuclease subunit
  ENSP ID: ENSP00000484964

SEQ ID NO: 93275 - protein, 526 aa, Homo sapiens
  Payload ID: 18623
  Gene Name: TSEN54 tRNA splicing endonuclease subunit
  Uniprot ID: Q7Z6J9
  ENSP ID: ENSP00000327487
MEPEPEPAAVEVPAGRVLSARELFAARSRSQKLPQRSHGPKDFLPDGSAAQAERLRRCREELWQLLAEQRVERLGSLVAAEWRPEEGFVELKSPAGKFWQTMGFSEQGRQRLHPEEALYLLECGSIHLFHQDLPLSIQEAYQLLLTDHTVTFLQYQVFSHLKRLGYVVRRFQPSSVLSPYERQLNLDASVQHLEDGDGKRKRSSSSPRSINKKAKALDNSLQPKSLAASSPPPCSQPSQCPEEKPQESSPMKGPGGPFQLLGSLGPSPGPAREGVGCSWESGRAENGVTGAGKRRWNFEQISFPNMASDSRHTLLRAPAPELLPANVAGRETDAESWCQKLNQRKEKLSRREREHHAEAAQFQEDVNADPEVQRCSSWREYKELLQRRQVQRSQRRAPHLWGQPVTPLLSPGQASSPAVVLQHISVLQTTHLPDGGARLLEKSGGLEIIFDVYQADAVATFRKNNPGKPYARMCISGFDEPVPDLCSLKRLSYQSGDVPLIFALVDHGDISFYSFRDFTLPQDVGH

SEQ ID NO: 93276 - protein, 72 aa, Homo sapiens
  Payload ID: 18623
  Gene Name: TSEN54 tRNA splicing endonuclease subunit
  ENSP ID: ENSP00000406559
MGFSEQGRQRLHPEEALYLLECGSIHLFHQDLPLSIQEAYQLLLTDHTVTFLQYQVFSHLKRLGYVVRRFQP

SEQ ID NO: 93277 - protein, 259 aa, Homo sapiens
  Payload ID: 18623
  Gene Name: TSEN54 tRNA splicing endonuclease subunit
  ENSP ID: ENSP00000438169
  MOD_RES (1)..(1): Any amino acid
XNMASDSRHTLLRAPAPELLPANVAGRETDAESWCQKLNQRKEKLSRREREHHAEAAQFQEDVNADPEVQRCSSWREYKELLQRRQVQRSQRRAPHLWGQPVTPLLSPGQASSPGTPSACHIFEGHWQLRNHRTLERAWMNWDGLRLKEDVGGGSGPTSTVSSPAAAAGPVWEGLEMPWSFSISLCCRQHTFLMEVPGCWRSLGAWKSSLMFTRPTLWPHSERITLANPMPGCALVDLMSLSQTSAASSGCLTRVGMSL

SEQ ID NO: 93278 - protein, 142 aa, Homo sapiens
  Payload ID: 18623
  Gene Name: TSEN54 tRNA splicing endonuclease subunit
  ENSP ID: ENSP00000461928
RSHGPKDFLPDGSAAQAERLRRCREELWQLLAEQRVERLGSLVAAEWRPEEGFVELKSPAGKFWQTMGFSEQGRQRLHPEEALYLLECGSIHLFHQDLPLSIQEAYQLLLTDHTVTFLQYQVFSHLKRLGYVVRRFQPRSPG

SEQ ID NO: 93279 - protein, 178 aa, Homo sapiens
  Payload ID: 18623
  Gene Name: TSEN54 tRNA splicing endonuclease subunit
  ENSP ID: ENSP00000463619
MEPEPEPAAVEVPAGRVLRGSLVAAEWRPEEGFVELKSPAGKFWQTMGFSEQGRQRLHPEEALYLLECGSIHLFHQDLPLSIQEAYQLLLTDHTVTFLQYQVFSHLKRLGYVVRRFQPSSVLSPYERQLNLDASVQHLEDGDGKRKRSSSSPRQPPHPSARPSPRAAPGQRGWAGDRR

SEQ ID NO: 93280 - protein, 167 aa, Homo sapiens
  Payload ID: 18623
  Gene Name: TSEN54 tRNA splicing endonuclease subunit
  ENSP ID: ENSP00000464335
  MOD_RES (1)..(1): Any amino acid
XDFLPDGSAAQAERLRRCREELWQLLAEQRVERLLVAAEWRPEEGFVELKSPAVSGGLGDRGPPSLPSLPSLPCDTCSGPHTGQILADHGLLRAGPAAPSPGRGLVSSGVWLHPPLPPRPATVYPGSLPAAADRPHCDLPAVPGLQPPEEVGLCGSTIPTKLCPVPV

SEQ ID NO: 93281 - protein, 514 aa, Homo sapiens
  Payload ID: 18624
  Gene Name: t-SNARE domain containing 1
  ENSP ID: ENSP00000303437
MSYGSIARGGGLGSRGPFGGPSRQGCQPLECARCWTEYGIRHFPCPSPESKLQNRCVGKDGEGDLGPAGTPIVPRARKRGPGVAPEGSRMPEPTSSPTIGPRKDSAAGPHGRMAGPSTTRAKKRKPNFCPQETEVLVSKVSKHHQLLFGTGLLKAEPTRRYRVWSRILQAVNALGYCRRDVVDLKHKWRDLRAVVRRKLGDLRKAAHGPSPGSGKPQALALTPVEQVVAKTFSCQALPSEGFSLEPPRATQVDPCNLQELFQEMSANVFRINSSVTSLERSLQSLGTPSDTQELRDSLHTAQQETNKTIAASASSVKQMAELLRSSCPQERLQQERPQLDRLKTQLSDAIQCYGVVQKKIAEKSRALLPMAQRGSKQQSPQAPFAELADDEKVFNGSDNMWQGQEQALLPDITEEDLEAIRLREEAILQMESNLLDVNQIIKDLASMVSEQGEAVDSIEASLEAASSHAEAARQLLAGASRHQLQRHKIKCCFLSAGVTALLVIIIIIATSVRK

SEQ ID NO: 93282 - protein, 514 aa, Homo sapiens; identical to SEQ ID NO: 93281
  Payload ID: 18624
  Gene Name: t-SNARE domain containing 1
  ENSP ID: ENSP00000427770

SEQ ID NO: 93283 - protein, 513 aa, Homo sapiens
  Payload ID: 18624
  Gene Name: t-SNARE domain containing 1
  Uniprot ID: Q96NA8
  ENSP ID: ENSP00000428763
MSYGSIARGGGLGSRGPFGGPSRQGCQPLECARCWTEYGIRHFPCPSPESKLQNRCVGKDGEGDLGPAGTPIVPRARKRGPGVAPEGSRMPEPTSSPTIGPRKDSAAGPHGRMAGPSTTRAKKRKPNFCPQETEVLVSKVSKHHQLLFGTGLLKAEPTRRYRVWSRILQAVNALGYCRRDVVDLKHKWRDLRAVVRRKLGDLRKAAHGPSPGSGKPQALALTPVEQVVAKTFSCQALPSEGFSLEPPRATQVDPCNLQELFQEMSANVFRINSSVTSLERSLQSLGTPSDTQELRDSLHTAQQETNKTIAASASSVKQMAELLRSSCPQERLQQERPQLDRLKTQLSDAIQCYGVVQKKIAEKSRALLPMAQRGSKQSPQAPFAELADDEKVFNGSDNMWQGQEQALLPDITEEDLEAIRLREEAILQMESNLLDVNQIIKDLASMVSEQGEAVDSIEASLEAASSHAEAARQLLAGASRHQLQRHKIKCCFLSAGVTALLVIIIIIATSVRK

SEQ ID NO: 93284 - protein, 150 aa, Homo sapiens
  Payload ID: 18624
  Gene Name: t-SNARE domain containing 1
  ENSP ID: ENSP00000429626
MSYGSIARGGGLGSRGPFGGPSRQGCQPLECARCWTEYGIRHFPCPSPESKLQNRCVGKDGEGDLGPAGTPIVPRARKRGPGVAPEGSRMPEPTSSPTIGPRKDSAAGPHGRMAGPSTTRAKKRKPNFCPQETEVLVSKVSKHHQLLFGT

SEQ ID NO: 93285 - protein, 277 aa, Homo sapiens
  Payload ID: 18624
  Gene Name: t-SNARE domain containing 1
  ENSP ID: ENSP00000429679
MSYGSIARGGGLGSRGPFGGPSRQGCQPLATQVDPCNLQELFQEMSANVFRINSSVTSLERSLQSLGTPSDTQELRDSLHTAQQETNKTIAASASSVKQMAELLRSSCPERLQQERPQLDRLKTQLSDAIQCYGVVQKKIAEKSRALLPMAQRGSKQQSPQAPFAELADDEKVFNGSDNMWQGQEQALLPDITEEDLEAIRLREEAILQMESNLLDVNQIIKDLASMVSEQGEAVDSIEASLEAASSHAEAARQLLAGASRHQLMRRTRPPAACGCP

SEQ ID NO: 93286 - protein, 135 aa, Homo sapiens
  Payload ID: 18624
  Gene Name: t-SNARE domain containing 1
  ENSP ID: ENSP00000430789
MNMLSVEAAGPAICKKMSYGSIARGGGLGSRGPFGGPSRQGCQPLECARCWTEYGIRHFPCPSPESKLQNRCVGKDGEGDLGPAGTPIVPRARKRGPGVAPEGSRMPEPTSSPTIGPRKDSAAGPHGRMAGPSTT

SEQ ID NO: 93287 - protein, 138 aa, Homo sapiens
  Payload ID: 18625
  Gene Name: TSNAX-DISC1 readthrough (NMD candidate)
  ENSP ID: ENSP00000473307
MSNKEGSGGFRKRKHDNFPHNQRREGKDVNSSSPVMLAFKSFQQELDARHDKYERLVKLSRDITVESKRTIFLLHRITSAPDMEDILTESEIKLDGVRQKIFQVAQELSGEDMHQFHRAITTEVYRQDPTHRGSWDQG

SEQ ID NO: 93288 - protein, 186 aa, Homo sapiens
  Payload ID: 18625
  Gene Name: TSNAX-DISC1 readthrough (NMD candidate)
  ENSP ID: ENSP00000473367
MSNKEGSGGFRKRKHDNFPHNQRREGKDVNSSSPVMLAFKSFQQELDARHDKYERLVKLSRDITVESKRTIFLLHRITSAPDMEDILTESEIKLDGVRQKIFQVAQELSGEDMHQFHRAITTGLQEYVEAVSFQHFIKTRSLISMDEINKQLIFTTEDNGKENKTKFTGKILLTEALGIKADRSSI

SEQ ID NO: 93289 - protein, 186 aa, Homo sapiens; identical to SEQ ID NO: 93288
  Payload ID: 18625
  Gene Name: TSNAX-DISC1 readthrough (NMD candidate)
  ENSP ID: ENSP00000473456

SEQ ID NO: 93290 - protein, 40 aa, Homo sapiens
  Payload ID: 18625
  Gene Name: TSNAX-DISC1 readthrough (NMD candidate)
  ENSP ID: ENSP00000473476
MSNKEGSGGFRKRKHDNFPHNQRREGKDVNSSSPVMLAFK

SEQ ID NO: 93291 - protein, 188 aa, Homo sapiens
  Payload ID: 18625
  Gene Name: TSNAX-DISC1 readthrough (NMD candidate)
  ENSP ID: ENSP00000473532
MSNKEGSGGFRKRKHDNFPHNQRREGKDVNSSSPVMLAFKSFQQELDARHDKYERLVKLSRDITVESKRTIFLLHRITSAPDMEDILTESEIKLDGVRQKIFQVAQELSGEDMHQFHRAITTGLQEYVEAVSFQHFIKTRSLISMDEINKQLIFTTEDNGKENKTAAGIAYHLQRAFGGGGWHGGRAT

SEQ ID NO: 93292 - protein, 437 aa, Homo sapiens
  Payload ID: 18626
  Gene Name: TSPY-like 1
  Uniprot ID: Q9H0U9
  ENSP ID: ENSP00000357597
MSGLDGVKRTTPLQTHSIIISDQVPSDQDAHQYLRLRDQSEATQVMAEPGEGGSETVALPPPPPSEEGGVPQDAAGRGGTPQIRVVGGRGHVAIKAGQEEGQPPAEGLAAASVVMAADRSLKKGVQGGEKALEICGAQRSASELTAGAEAEAEEVKTGKCATVSAAVAERESAEVVKEGLAEKEVMEEQMEVEEQPPEGEEIEVAEEDRLEEEAREEEGPWPLHEALRMDPLEAIQLELDTVNAQADRAFQQLEHKFGRMRRHYLERRNYIIQNIPGFWMTAFRNHPQLSAMIRGQDAEMLRYITNLEVKELRHPRTGCKFKFFFRRNPYFRNKLIVKEYEVRSSGRVVSLSTPIIWRRGHEPQSFIRRNQDLICSFFTWFSDHSLPESDKIAEIIKEDLWPNPLQYYLLREGVRRARRRPLREPVEIPRPFGFQSG

SEQ ID NO: 93293 - protein, 693 aa, Homo sapiens
  Payload ID: 18627
  Gene Name: TSPY-like 2
  Uniprot ID: Q9H2G4
  ENSP ID: ENSP00000364591
MDRPDEGPPAKTRRLSSSESPQRDPPPPPPPPPLLRLPLPPPQQRPRLQEETEAAQVLADMRGVGLGPALPPPPPYVILEEGGIRAYFTLGAECPGWDSTIESGYGEAPPPTESLEALPTPEASGGSLEIDFQVVQSSSFGGEGALETCSAVGWAPQRLVDPKSKEEAIIIVEDEDEDERESMRSSRRRRRRRRRKQRKVKRESRERNAERMESILQALEDIQLDLEAVNIKAGKAFLRLKRKFIQMRRPFLERRDLIIQHIPGFWVKAFLNHPRISILINRRDEDIFRYLTNLQVQDLRHISMGYKMKLYFQTNPYFTNMVIVKEFQRNRSGRLVSHSTPIRWHRGQEPQARRHGNQDASHSFFSWFSNHSLPEADRIAEIIKNDLWVNPLRYYLRERGSRIKRKKQEMKKRKTRGRCEVVIMEDAPDYYAVEDIFSEISDIDETIHDIKISDFMETTDYFETTDNEITDINENICDSENPDHNEVPNNETTDNNESADDHETTDNNESADDNNENPEDNNKNTDDNEENPNNNENTYGNNFFKGGFWGSHGNNQDSSDSDNEADEASDDEDNDGNEGDNEGSDDDGNEGDNEGSDDDDRDIEYYEKVIEDFDKDQADYEDVIEIISDESVEEEGIEEGIQQDEDIYEEGNYEEEGSEDVWEEGEDSDDSDLEDVLQVPNGWANPGKRGKTG

SEQ ID NO: 93294 - protein, 250 aa, Homo sapiens
  Payload ID: 18627
  Gene Name: TSPY-like 2
  ENSP ID: ENSP00000462287
MDRPDEGPPAKTRRLSSSESPQRDPPPPPPPPPLLRLPLPPPQQRPRLQEETEAAQIIKNDLWVNPLRYYLRERGSRIKRKKQEMKKRKTRGRCEVVIMEDAPDYYAVEDIFSEISDIDETIHDIKISDFMETTDYFETTDNEITDINENICDSENPDHNEVPNNETTDNNESADDHETTDNNESADDNNENPEDNNKNTDDNEENPNNNENTYGNNFFKGGFWGSHGNNQDSSDSDNEADEASDDEDND

SEQ ID NO: 93295 - protein, 123 aa, Homo sapiens
  Payload ID: 18627
  Gene Name: TSPY-like 2
  ENSP ID: ENSP00000462635
  MOD_RES (1)..(1): Any amino acid
XEEAIIIVEDEDEDERESMRSSRRRRRRRRRKQRKVKRESRERNAERMESILQALEDIQLDLEAVNIKAGKAFLRLKRKFIQMRRPFLERRDLIIQHIPGFWVKALHSSVPQPPQNFNFDQPT

SEQ ID NO: 93296 - protein, 414 aa, Homo sapiens
  Payload ID: 18628
  Gene Name: TSPY-like 4
  Uniprot ID: Q9UJ04
  ENSP ID: ENSP00000410943
MSGLDGGNKLPLAQTGGLAAPDHASGDPDRDQCQGLREETEATQVMANTGGGSLETVAEGGASQDPVDCGPALRVPVAGSRGGAATKAGQEDAPPSTKGLEAASAAEAADSSQKNGCQLGEPRGPAGQKALEACGAGGLGSQMIPGKKAKEVTTKKRAISAAVEKEGEAGAAMEEKKVVQKEKKVAGGVKEETRPRAPKINNCMDSLEAIDQELSNVNAQADRAFLQLERKFGRMRRLHMQRRSFIIQNIPGFWVTAFRNHPQLSPMISGQDEDMLRYMINLEVEELKHPRAGCKFKFIFQGNPYFRNEGLVKEYERRSSGRVVSLSTPIRWHRGQDPQAHIHRNREGNTIPSFFNWFSDHSLLEFDRIAEIIKGELWPNPLQYYLMGEGPRRGIRGPPRQPVESARSFRFQSG

SEQ ID NO: 93297 - protein, 417 aa, Homo sapiens
  Payload ID: 18629
  Gene Name: TSPY-like 5
  Uniprot ID: Q86VY4
  ENSP ID: ENSP00000322802
MSGRSRGRKSSRAKNRGKGRAKARVRPAPDDAPRDPDPSQYQSLGEDTQAAQVQAGAGWGGLEAAASAQLLRLGEEAACRLPLDCGLALRARAAGDHGQAAARPGPGKAASLSERLAADTVFVGTAGTVGRPKNAPRVGNRRGPAGKKAPETCSTAGRGPQVIAGGRQKKGAAGENTSVSAGEEKKEERDAGSGPPATEGSMDTLENVQLKLENMNAQADRAYLRLSRKFGQLRLQHLERRNHLIQNIPGFWGQAFQNHPQLASFLNSQEKEVLSYLNSLEVEELGLARLGYKIKFYFDRNPYFQNKVLIKEYGCGPSGQVVSRSTPIQWLPGHDLQSLSQGNPENNRSFFGWFSNHSSIESDKIVEIINEELWPNPLQFYLLSEGARVEKGKEKEGRQGPGKQPMETTQPGVSQSN

SEQ ID NO: 93298 - protein, 410 aa, Homo sapiens
  Payload ID: 18630
  Gene Name: TSPY-like 6
  Uniprot ID: Q8N831
  ENSP ID: ENSP00000417919
MSLPESPHSPATLDYALEDPHQGQRSREKSKATEVMADMFDGRLEPIVFPPPRLPEEGVAPQDPADGGHTFHILVDAGRSHGAIKAGQEVTPPPAEGLEAASASLTTDGSLKNGFPGEETHGLGGEKALETCGAGRSESEVIAEGKAEDVKPEECAMFSAPVDEKPGGEEMDVAEENRAIDEVNREAGPGPGPGPLNVGLHLNPLESIQLELDSVNAEADRALLQVERRFGQIHEYYLEQRNDIIRNIPGFWVTAFRHHPQLSAMIRGQDAEMLSYLTNLEVKELRHPRTGCKFKFFFQRNPYFRNKLIVKVYEVRSFGQVVSFSTLIMWRRGHGPQSFIHRNRHVICSFFTWFSDHSLPESDRIAQIIKEDLWSNPLQYYLLGEDAHRARRRLVREPVEIPRPFGFQCG

SEQ ID NO: 93299 - protein, 804 aa, Homo sapiens
  Payload ID: 18631
  Gene Name: TSR1, 20S rRNA accumulation, homolog (S. cerevisiae)
  Uniprot ID: Q2NL82
  ENSP ID: ENSP00000301364
MAAHRPGPLKQQNKAHKGGRHRGRGSAQRDGKGRLALKTLSKKVRKELSRVDQRHRASQLRKQKKEAVLAEKRQLGGKDGPPHQVLVVPLHSRISLPEAMQLLQDRDTGTVHLNELGNTQNFMLLCPRLKHRWFFTSARPGDLHVVLDMAKVADTILFLLDPLEGWDSTGDYCLSCLFAQGLPTYTLAVQGISGLPLKKQIDTRKKLSKAVEKRFPHDKLLLLDTQQEAGMLLRQLANQKQQHLAFRDRRAYLFAHAVDFVPSEENNLVGTLKISGYVRGQTLNVNRLLHIVGYGDFQMKQIDAPGDPFPLNPRGIKPQKDPDMAMEICATDAVDDMEEGLKVLMKADPGRQESLQAEVIPDPMEGEQTWPTEEELSEAKDFLKESSKVVKKVPKGTSSYQAEWILDGGSQSGGEGDEYEYDDMEHEDFMEEESQDESSEEEEEYETMTIGESVHDDLYDKKVDEEAEAKMLEKYKQERLEEMFPDEVDTPRDVAARIRFQKYRGLKSFRTSPWDPKENLPQDYARIFQFQNFTNTRKSIFKEVEEKEVEGAEVGWYVTLHVSEVPVSVVECFRQGTPLIAFSLLPHEQKMSVLNMVVRRDPGNTEPVKAKEELIFHCGFRRFRASPLFSQHTAADKHKLQRFLTADMALVATVYAPITFPPASVLLFKQKSNGMHSLIATGHLMSVDPDRMVIKRVVLSGHPFKIFTKMAVVRYMFFNREDVLWFKPVELRTKWGRRGHIKEPLGTHGHMKCSFDGKLKSQDTVLMNLYKRVFPKWTYDPYVPEPVPWLKSEISSTVPQGGME

SEQ ID NO: 93300 - protein, 368 aa, Homo sapiens
  Payload ID: 18631
  Gene Name: TSR1, 20S rRNA accumulation, homolog (S. cerevisiae)
  ENSP ID: ENSP00000459012
MAAHRPGPLKQQNKAHKGGRHRGRGSAQRDGKGRLALKTLSKKVRKELSRVDQRHRASQLRKQKKEAVLAEKRQLGGKDGPPHQVLVVPLHSRISLPEAMQLLQDRDTGTVHLNELGNTQNFMLLCPRLKHRWFFTSARPGDLHVVLDMAKVADTILFLLDPLEGWDSTALAVQGISGLPLKKQIDTRKKLSKAVEKRFPHDKLLLLDTQQEAGMLLRQLANQKQQHLAFRDRRAYLFAHAVDFVPSEENNLVGTLKISGYVRGQTLNVNRLLHIVGYGDFQMKQIDAPGDPFPLNPRGIKPQKDPDMAMEICATDAVDDMEEGLKVLMKADPGRQESLQAEVIPDPMEGEQTWPTEEELSEAKGQYW

SEQ ID NO: 93301 - protein, 53 aa, Homo sapiens
  Payload ID: 18631
  Gene Name: TSR1, 20S rRNA accumulation, homolog (S. cerevisiae)
  ENSP ID: ENSP00000461192
  MOD_RES (1)..(1): Any amino acid
XEVEGAEVGWYVTLHVSEVPVSVVECFRQGTPLIAFSLLPHEQKRTNINCRDS

SEQ ID NO: 93302 - protein, 70 aa, Homo sapiens
  Payload ID: 18631
  Gene Name: TSR1, 20S rRNA accumulation, homolog (S. cerevisiae)
  ENSP ID: ENSP00000461498
MAAHRPGPLKQQNKAHKGGRHRGRGSAQRDGKGSGREETAGWQGWPSSSGTGGAPAQQNFPARGHAAASR

SEQ ID NO: 93303 - protein, 191 aa, Homo sapiens
  Payload ID: 18632
  Gene Name: TSR2, 20S rRNA accumulation, homolog (S. cerevisiae)
  Uniprot ID: Q969E8
  ENSP ID: ENSP00000364293
MAGAAEDARALFRAGVCAALEAWPALQIAVENGFGGVHSQEKAKWLGGAVEDYFMRNADLELDEVEDFLGELLTNEFDTVVEDGSLPQVSQQLQTMFHHFQRGDGAALREMASCITQRKCKVTATALKTARETDEDEDDVDSVEEMEVTATNDGAATDGVCPQPEPSDPDAQTIKEEDIVEDGWTIVRRKK

SEQ ID NO: 93304 - protein, 312 aa, Homo sapiens
  Payload ID: 18633
  Gene Name: TSR3, 20S rRNA accumulation, homolog (S. cerevisiae)
  Uniprot ID: Q9UJK0
  ENSP ID: ENSP00000007390
MGRRRAARGPGAEGGRPRHLPTRSLEAFAEEVGAALQASVEPGAADGEGGPGPAALPCTLAMWELGHCDPRRCTGRKLARLGLVRCLRLGHRFGGLVLSPVGKQYASPADRQLVAQSGVAVIDCSWARLDETPFGKMRGSHLRLLPYLVAANPVNYGRPYRLSCVEAFAATFCIVGFPDLAVILLRKFKWGKGFLDLNRQLLDKYAACGSPEEVLQAEQEFLANAKESPQEEEIDPFDVDSGREFGNPNRPVASTRLPSDTDDSDASEDPGPGAERGGASSSCCEEEQTQGRGAEARAPAEVWKGIKKRQRD

SEQ ID NO: 93305 - protein, 109 aa, Homo sapiens
  Payload ID: 18633
  Gene Name: TSR3, 20S rRNA accumulation, homolog (S. cerevisiae)
  ENSP ID: ENSP00000455722
  MOD_RES (1)..(1): Any amino acid
XPGAGALPAPGPQIRRSGAEPRGQAVRVPRRQTAGGAVWGRRHRLLLGQAGRDTVWEDAREPLAPVALPGGRQPRELWPALQTFLRGSVCCHLLHRRLSRPCCHFAAEV

SEQ ID NO: 93306 - protein, 125 aa, Homo sapiens
  Payload ID: 18634
  Gene Name: TSSK6 activating co-chaperone
  Uniprot ID: Q96A04
  ENSP ID: ENSP00000357234
MERHTSHPNRKVPAKEEANAVPLCRAKPSPSYINLQASSPPATFLNIQTTKLPSVDHKPKECLGLLECMYANLQLQTQLAQQQMAVLEHLQASVTQLAPGRGSNNSSLPALSPNPLLNHLPQFSK

SEQ ID NO: 93307 - protein, 125 aa, Homo sapiens; identical to SEQ ID NO: 93306
  Payload ID: 18634
  Gene Name: TSSK6 activating co-chaperone
  Uniprot ID: Q96A04
  ENSP ID: ENSP00000357235

SEQ ID NO: 93308 - protein, 125 aa, Homo sapiens; identical to SEQ ID NO: 93306
  Payload ID: 18634
  Gene Name: TSSK6 activating co-chaperone
  Uniprot ID: Q96A04
  ENSP ID: ENSP00000357236

SEQ ID NO: 93309 - protein, 125 aa, Homo sapiens; identical to SEQ ID NO: 93306
  Payload ID: 18634
  Gene Name: TSSK6 activating co-chaperone
  Uniprot ID: Q96A04
  ENSP ID: ENSP00000357237

SEQ ID NO: 93310 - protein, 125 aa, Homo sapiens; identical to SEQ ID NO: 93306
  Payload ID: 18634
  Gene Name: TSSK6 activating co-chaperone
  Uniprot ID: Q96A04
  ENSP ID: ENSP00000357238

SEQ ID NO: 93311 - protein, 100 aa, Homo sapiens
  Payload ID: 18634
  Gene Name: TSSK6 activating co-chaperone
  ENSP ID: ENSP00000476780
MERHTSHPNRKVPAKEEANAVPLCRAKPSPSYINLQASSPPATFLNIQTTKLPSAQGMPRTPGMYVCKPPASDPARPTTDGCFGTFTGICDTTGSWEGKQ

SEQ ID NO: 93312 - protein, 100 aa, Homo sapiens; identical to SEQ ID NO: 93311
  Payload ID: 18634
  Gene Name: TSSK6 activating co-chaperone
  ENSP ID: ENSP00000477010

SEQ ID NO: 93313 - protein, 100 aa, Homo sapiens; identical to SEQ ID NO: 93311
  Payload ID: 18634
  Gene Name: TSSK6 activating co-chaperone
  ENSP ID: ENSP00000477074

SEQ ID NO: 93314 - protein, 353 aa, Homo sapiens
  Payload ID: 18635
  Gene Name: tsukushi, small leucine rich proteoglycan
  Uniprot ID: Q8WUA8
  ENSP ID: ENSP00000332668
MPWPLLLLLAVSGAQTTRPCFPGCQCEVETFGLFDSFSLTRVDCSGLGPHIMPVPIPLDTAHLDLSSNRLEMVNESVLAGPGYTTLAGLDLSHNLLTSISPTAFSRLRYLESLDLSHNGLTALPAESFTSSPLSDVNLSHNQLREVSVSAFTTHSQGRALHVDLSHNLIHRLVPHPTRAGLPAPTIQSLNLAWNRLHAVPNLRDLPLRYLSLDGNPLAVIGPGAFAGLGGLTHLSLASLQRLPELAPSGFRELPGLQVLDLSGNPKLNWAGAEVFSGLSSLQELDLSGTNLVPLPEALLLHLPALQSVSVGQDVRCRRLVREGTYPRRPGSSPKVALHCVDTRDSAARGPTIL

SEQ ID NO: 93315 - protein, 353 aa, Homo sapiens; identical to SEQ ID NO: 93314
  Payload ID: 18635
  Gene Name: tsukushi, small leucine rich proteoglycan
  Uniprot ID: Q8WUA8
  ENSP ID: ENSP00000434847

SEQ ID NO: 93316 - protein, 105 aa, Homo sapiens
  Payload ID: 18635
  Gene Name: tsukushi, small leucine rich proteoglycan
  ENSP ID: ENSP00000434873
MPWPLLLLLAVSGAQTTRPCFPGCQCEVETFGLFDSFSLTRVDCSGLGPHIMPVPIPLDTAHLDLSSNRLEMVNESVLAGPGYTTLAGLDLSHNLLTSISPTAFS

SEQ ID NO: 93317 - protein, 150 aa, Homo sapiens
  Payload ID: 18635
  Gene Name: tsukushi, small leucine rich proteoglycan
  ENSP ID: ENSP00000435133
MPWPLLLLLAVSGAQTTRPCFPGCQCEVETFGLFDSFSLTRVDCSGLGPHIMPVPIPLDTAHLDLSSNRLEMVNESVLAGPGYTTLAGLDLSHNLLTSISPTAFSRLRYLESLDLSHNGLTALPAESFTSSPLSDVNLSHNQLREVSVSA

SEQ ID NO: 93318 - protein, 353 aa, Homo sapiens; identical to SEQ ID NO: 93314
  Payload ID: 18635
  Gene Name: tsukushi, small leucine rich proteoglycan
  Uniprot ID: Q8WUA8
  ENSP ID: ENSP00000482145

SEQ ID NO: 93319 - protein, 856 aa, Homo sapiens
  Payload ID: 18636
  Gene Name: TTK protein kinase
  Uniprot ID: P33981
  ENSP ID: ENSP00000230510
MESEDLSGRELTIDSIMNKVRDIKNKFKNEDLTDELSLNKISADTTDNSGTVNQIMMMANNPEDWLSLLLKLEKNSVPLSDALLNKLIGRYSQAIEALPPDKYGQNESFARIQVRFAELKAIQEPDDARDYFQMARANCKKFAFVHISFAQFELSQGNVKKSKQLLQKAVERGAVPLEMLEIALRNLNLQKKQLLSEEEKKNLSASTVLTAQESFSGSLGHLQNRNNSCDSRGQTTKARFLYGENMPPQDAEIGYRNSLRQTNKTKQSCPFGRVPVNLLNSPDCDVKTDDSVVPCFMKRQTSRSECRDLVVPGSKPSGNDSCELRNLKSVQNSHFKEPLVSDEKSSELIITDSITLKNKTESSLLAKLEETKEYQEPEVPESNQKQWQSKRKSECINQNPAASSNHWQIPELARKVNTEKHTTFEQPVFSVSKQSPPISTSKWFDPKSICKTPSSNTLDDYMSCFRTPVVKNDFPPACQLSTPYGQPACFQQQQHQILATPLQNLQVLASSSANECISVKGRIYSILKQIGSGGSSKVFQVLNEKKQIYAIKYVNLEEADNQTLDSYRNEIAYLNKLQQHSDKIIRLYDYEITDQYIYMVMECGNIDLNSWLKKKKSIDPWERKSYWKNMLEAVHTIHQHGIVHSDLKPANFLIVDGMLKLIDFGIANQMQPDTTSVVKDSQVGTVNYMPPEAIKDMSSSRENGKSKSKISPKSDVWSLGCILYYMTYGKTPFQQIINQISKLHAIIDPNHEIEFPDIPEKDLQDVLKCCLKRDPKQRISIPELLAHPYVQIQTHPVNQMAKGTTEEMKYVLGQLVGLNSPNSILKAAKTLYEHYSGGESHNSSSSKTFEKKRGKK

SEQ ID NO: 93320 - protein, 857 aa, Homo sapiens
  Payload ID: 18636
  Gene Name: TTK protein kinase
  Uniprot ID: P33981
  ENSP ID: ENSP00000358813
MESEDLSGRELTIDSIMNKVRDIKNKFKNEDLTDELSLNKISADTTDNSGTVNQIMMMANNPEDWLSLLLKLEKNSVPLSDALLNKLIGRYSQAIEALPPDKYGQNESFARIQVRFAELKAIQEPDDARDYFQMARANCKKFAFVHISFAQFELSQGNVKKSKQLLQKAVERGAVPLEMLEIALRNLNLQKKQLLSEEEKKNLSASTVLTAQESFSGSLGHLQNRNNSCDSRGQTTKARFLYGENMPPQDAEIGYRNSLRQTNKTKQSCPFGRVPVNLLNSPDCDVKTDDSVVPCFMKRQTSRSECRDLVVPGSKPSGNDSCELRNLKSVQNSHFKEPLVSDEKSSELIITDSITLKNKTESSLLAKLEETKEYQEPEVPESNQKQWQSKRKSECINQNPAASSNHWQIPELARKVNTEQKHTTFEQPVFSVSKQSPPISTSKWFDPKSICKTPSSNTLDDYMSCFRTPVVKNDFPPACQLSTPYGQPACFQQQQHQILATPLQNLQVLASSSANECISVKGRIYSILKQIGSGGSSKVFQVLNEKKQIYAIKYVNLEEADNQTLDSYRNEIAYLNKLQQHSDKIIRLYDYEITDQYIYMVMECGNIDLNSWLKKKKSIDPWERKSYWKNMLEAVHTIHQHGIVHSDLKPANFLIVDGMLKLIDFGIANQMQPDTTSVVKDSQVGTVNYMPPEAIKDMSSSRENGKSKSKISPKSDVWSLGCILYYMTYGKTPFQQIINQISKLHAIIDPNHEIEFPDIPEKDLQDVLKCCLKRDPKQRISIPELLAHPYVQIQTHPVNQMAKGTTEEMKYVLGQLVGLNSPNSILKAAKTLYEHYSGGESHNSSSSKTFEKKRGKK

SEQ ID NO: 93321 - protein, 79 aa, Homo sapiens
  Payload ID: 18636
  Gene Name: TTK protein kinase
  ENSP ID: ENSP00000421406
MESEDLSGRELTIDSIMNKVRDIKNKFKNEDLTDELSLNKISADTTECRLHDGRVFVCYIHRTLNGVWHMITRELLTKL

SEQ ID NO: 93322 - protein, 150 aa, Homo sapiens
  Payload ID: 18636
  Gene Name: TTK protein kinase
  ENSP ID: ENSP00000421636
MESEDLSGRELTIDSIMNKVRDIKNKFKNEDLTDELSLNKISADTTDNSGTVNQIMMMANNPEDWLSLLLKLEKNSVPLSDALLNKLIGRYSQAIEALPPDKYGQNESFARIQVRFAELKAIQEPDDARDYFQMARANCKKFAFVHISFA

SEQ ID NO: 93323 - protein, 856 aa, Homo sapiens; identical to SEQ ID NO: 93319
  Payload ID: 18636
  Gene Name: TTK protein kinase
  Uniprot ID: P33981
  ENSP ID: ENSP00000422936

SEQ ID NO: 93324 - protein, 139 aa, Homo sapiens
  Payload ID: 18636
  Gene Name: TTK protein kinase
  ENSP ID: ENSP00000424851
MESEDLSGRELTIDSIMNKVRDIKNKFKNEDLTDELSLNKISADTTDNSGTVNQIMMMANNPEDWLSLLLKLEKNSVPLSDALLNKLIGRYSQAIEALPPDKYGQNESFARIQVRFAELKAIQEPDDARDYFQMARANC

SEQ ID NO: 93325 - protein, 175 aa, Homo sapiens
  Payload ID: 18636
  Gene Name: TTK protein kinase
  ENSP ID: ENSP00000427483
MESEDLSGRELTIDSIMNKVRDIKNKFKNEDLTDELSLNKISADTTDNSGTVNQIMMMANNPEDWLSLLLKLEKNSVPLSDALLNKLIGRYSQAIEALPPDKYGQNESFARIQVRFAELKAIQEPDDARDYFQMARANCKKFAFVHISFAQFELSQGNVKKSKQLLQKAVERGAV

SEQ ID NO: 93326 - protein, 79 aa, Homo sapiens; identical to SEQ ID NO: 93321
  Payload ID: 18636
  Gene Name: TTK protein kinase
  ENSP ID: ENSP00000487202

SEQ ID NO: 93327 - protein, 455 aa, Homo sapiens
  Payload ID: 18637
  Gene Name: Tu translation elongation factor, mitochondrial
  Uniprot ID: P49411
  ENSP ID: ENSP00000322439
MTTMAAATLLRATPHFSGLAAGRTFLLQGLLRLLKAPALPLLCRGLAVEAKKTYVRDKPHVNVGTIGHVDHGKTTLTAAITKILAEGGGAKFKKYEEIDNAPEERARGITINAAHVEYSTAARHYAHTDCPGHADYVKNMITGTAPLDGCILVVAANDGPMPQTREHLLLARQIGVEHVVVYVNKADAVQDSEMVELVELEIRELLTEFGYKGEETPVIVGSALCALEGRDPELGLKSVQKLLDAVDTYIPVPARDLEKPFLLPVEAVYSVPGRGTVVTGTLERGILKKGDECELLGHSKNIRTVVTGIEMFHKSLERAEAGDNLGALVRGLKREDLRRGLVMVKPGSIKPHQKVEAQVYILSKEEGGRHKPFVSHFMPVMFSLTWDMACRIILPPEKELAMPGEDLKFNLILRQPMILEKGQRFTLRDGNRTIGTGLVTNTLAMTEEEKNIKWG

SEQ ID NO: 93328 - protein, 101 aa, Homo sapiens
  Payload ID: 18637
  Gene Name: Tu translation elongation factor, mitochondrial
  ENSP ID: ENSP00000455007
MTTMAAATLLRATPHFSGLAAGRTFLLQGLLRLLKAPALPLLCRGLAVEAKKTYVRDKPHVNVGTIGHVDHGKTTLTAAITKKYDHRHCTPRRLHPGGSSQ

SEQ ID NO: 93329 - protein, 506 aa, Homo sapiens
  Payload ID: 18638
  Gene Name: tubby bipartite transcription factor
  Uniprot ID: P50607
  ENSP ID: ENSP00000299506
MTSKPHSDWIPYSVLDDEGRNLRQQKLDRQRALLEQKQKKKRQEPLMVQANADGRPRSRRARQSEEQAPLVESYLSSSGSTSYQVQEADSLASVQLGATRPTAPASAKRTKAAATAGGQGGAARKEKKGKHKGTSGPAALAEDKSEAQGPVQILTVGQSDHAQDAGETAAGGGERPSGQDLRATMQRKGISSSMSFDEDEEDEEENSSSSSQLNSNTRPSSATSRKSVREAASAPSPTAPEQPVDVEVQDLEEFALRPAPQGITIKCRITRDKKGMDRGMYPTYFLHLDREDGKKVFLLAGRKRKKSKTSNYLISVDPTDLSRGGDSYIGKLRSNLMGTKFTVYDNGVNPQKASSSTLESGTLRQELAAVCYETNVLGFKGPRKMSVIVPGMNMVHERVSIRPRNEHETLLARWQNKNTESIIELQNKTPVWNDDTQSYVLNFHGRVTQASVKNFQIIHGNDPDYIVMQFGRVAEDVFTMDYNYPLCALQAFAIALSSFDSKLACE

SEQ ID NO: 93330 - protein, 561 aa, Homo sapiens
  Payload ID: 18638
  Gene Name: tubby bipartite transcription factor
  Uniprot ID: P50607
  ENSP ID: ENSP00000305426
MGARTPLPSFWVSFFAETGILFPGGTPWPMGSQHSKQHRKPGPLKRGHRRDRRTTRRKYWKEGREIARVLDDEGRNLRQQKLDRQRALLEQKQKKKRQEPLMVQANADGRPRSRRARQSEEQAPLVESYLSSSGSTSYQVQEADSLASVQLGATRPTAPASAKRTKAAATAGGQGGAARKEKKGKHKGTSGPAALAEDKSEAQGPVQILTVGQSDHAQDAGETAAGGGERPSGQDLRATMQRKGISSSMSFDEDEEDEEENSSSSSQLNSNTRPSSATSRKSVREAASAPSPTAPEQPVDVEVQDLEEFALRPAPQGITIKCRITRDKKGMDRGMYPTYFLHLDREDGKKVFLLAGRKRKKSKTSNYLISVDPTDLSRGGDSYIGKLRSNLMGTKFTVYDNGVNPQKASSSTLESGTLRQELAAVCYETNVLGFKGPRKMSVIVPGMNMVHERVSIRPRNEHETLLARWQNKNTESIIELQNKTPVWNDDTQSYVLNFHGRVTQASVKNFQIIHGNDPDYIVMQFGRVAEDVFTMDYNYPLCALQAFAIALSSFDSKLACE

SEQ ID NO: 93331 - protein, 512 aa, Homo sapiens
  Payload ID: 18638
  Gene Name: tubby bipartite transcription factor
  ENSP ID: ENSP00000434400
MEGVSSHRTLSYSRWSYDSVLDDEGRNLRQQKLDRQRALLEQKQKKKRQEPLMVQANADGRPRSRRARQSEEQAPLVESYLSSSGSTSYQVQEADSLASVQLGATRPTAPASAKRTKAAATAGGQGGAARKEKKGKHKGTSGPAALAEDKSEAQGPVQILTVGQSDHAQDAGETAAGGGERPSGQDLRATMQRKGISSSMSFDEDEEDEEENSSSSSQLNSNTRPSSATSRKSVREAASAPSPTAPEQPVDVEVQDLEEFALRPAPQGITIKCRITRDKKGMDRGMYPTYFLHLDREDGKKVFLLAGRKRKKSKTSNYLISVDPTDLSRGGDSYIGKLRSNLMGTKFTVYDNGVNPQKASSSTLESGTLRQELAAVCYETNVLGFKGPRKMSVIVPGMNMVHERVSIRPRNEHETLLARWQNKNTESIIELQNKTPVWNDDTQSYVLNFHGRVTQASVKNFQIIHGNDPDYIVMQFGRVAEDVFTMDYNYPLCALQAFAIALSSFDSKLACE

SEQ ID NO: 93332 - protein, 542 aa, Homo sapiens
  Payload ID: 18639
  Gene Name: tubby like protein 1
  Uniprot ID: O00294
  ENSP ID: ENSP00000229771
MPLRDETLREVWASDSGHEEESLSPEAPRRPKQRPAPAQRLRKKRTEAPESPCPTGSKPRKPGAGRTGRPREEPSPDPAQARAPQTVYARFLRDPEAKKRDPRETFLVARAPDAEDEEEEEEEDEEDEEEEAEEKKEKILLPPKKPLREKSSADLKERRAKAQGPRGDLGSPDPPPKPLRVRNKEAPAGEGTKMRKTKKKGSGEADKDPSGSPASARKSPAAMFLVGEGSPDKKALKKKGTPKGARKEEEEEEEAATVIKKSNQKGKAKGKGKKKAKEERAPSPPVEVDEPREFVLRPAPQGRTVRCRLTRDKKGMDRGMYPSYFLHLDTEKKVFLLAGRKRKRSKTANYLISIDPTNLSRGGENFIGKLRSNLLGNRFTVFDNGQNPQRGYSTNVASLRQELAAVIYETNVLGFRGPRRMTVIIPGMSAENERVPIRPRNASDGLLVRWQNKTLESLIELHNKPPVWNDDSGSYTLNFQGRVTQASVKNFQIVHADDPDYIVLQFGRVAEDAFTLDYRYPLCALQAFAIALSSFDGKLACE

SEQ ID NO: 93333 - protein, 489 aa, Homo sapiens
  Payload ID: 18639
  Gene Name: tubby like protein 1
  Uniprot ID: O00294
  ENSP ID: ENSP00000319414
MPLRDETLREVWASDSGHEEESLSPEAPRRPKQRPAPAQRLRKKRTEAPESPCPTGSKPRKPGEEEEEEEDEEDEEEEAEEKKEKILLPPKKPLREKSSADLKERRAKAQGPRGDLGSPDPPPKPLRVRNKEAPAGEGTKMRKTKKKGSGEADKDPSGSPASARKSPAAMFLVGEGSPDKKALKKKGTPKGARKEEEEEEEAATVIKKSNQKGKAKGKGKKKAKEERAPSPPVEVDEPREFVLRPAPQGRTVRCRLTRDKKGMDRGMYPSYFLHLDTEKKVFLLAGRKRKRSKTANYLISIDPTNLSRGGENFIGKLRSNLLGNRFTVFDNGQNPQRGYSTNVASLRQELAAVIYETNVLGFRGPRRMTVIIPGMSAENERVPIRPRNASDGLLVRWQNKTLESLIELHNKPPVWNDDSGSYTLNFQGRVTQASVKNFQIVHADDPDYIVLQFGRVAEDAFTLDYRYPLCALQAFAIALSSFDGKLACE

SEQ ID NO: 93334 - protein, 161 aa, Homo sapiens
  Payload ID: 18639
  Gene Name: tubby like protein 1
  ENSP ID: ENSP00000406765
MPLRDETLREVWASDSGHEEESLSPEAPRRPKQRPAPAQRLRKKRTEAPESPCPTGSKPRKPGEFLPAEEEEEEEDEEDEEEEAEEKKEKILLPPKKPLREKSSADLKERRAKAQGPRGDLGSPDPPPKPLRVRNKEAPAGEGTKMRKTKKKGSGEADKDP

SEQ ID NO: 93335 - protein, 540 aa, Homo sapiens
  Payload ID: 18639
  Gene Name: tubby like protein 1
  ENSP ID: ENSP00000477534
MPLRDETLREVWASDSGHEEESLSPEAPRRPKQRPAPAQRLRKKRTEAPESPCPTGSKPRKPGAGRTGRPREEPSPDPAQARAPQTVYARFLRDPEAKKRDPRETFLVARAPDAEDEEEEEEEDEEDEEEEAEEKKEKILLPPKKPLREKSSADLKERRAKAQGPRGDLGSPDPPPKPLRVRNKEAPAGEGTKMRKTKKKGSGEADKDPSGSPASARKSPAAMFLVGEGSPDKKALKKKGTPKGARKEEEEEEEAATVIKKSNQKGKAKGKGKKKEERAPSPPVEVDEPREFVLRPAPQGRTVRCRLTRDKKGMDRGMYPSYFLHLDTEKKVFLLAGRKRKRSKTANYLISIDPTNLSRGGENFIGKLRSNLLGNRFTVFDNGQNPQRGYSTNVASLRQELAAVIYETNVLGFRGPRRMTVIIPGMSAENERVPIRPRNASDGLLVRWQNKTLESLIELHNKPPVWNDDSGSYTLNFQGRVTQASVKNFQIVHADDPDYIVLQFGRVAEDAFTLDYRYPLCALQAFAIALSSFDGKLACE

SEQ ID NO: 93336 - protein, 520 aa, Homo sapiens
  Payload ID: 18640
  Gene Name: tubby like protein 2
  Uniprot ID: O00295
  ENSP ID: ENSP00000221399
MSQDNDTLMRDILGHELAAMRLQKLEQQRRLFEKKQRQKRQELLMVQANPDASPWLWRSCLREERLLGDRGLGNPFLRKKVSEAHLPSGIHSALGTVSCGGDGRGERGLPTPRTEAVFRNLGLQSPFLSWLPDNSDAELEEVSVENGSVSPPPFKQSPRIRRKGWQAHQRPGTRAEGESDSQDMGDAHKSPNMGPNPGMDGDCVYENLAFQKEEDLEKKREASESTGTNSSAAHNEELSKALKGEGGTDSDHMRHEASLAIRSPCPGLEEDMEAYVLRPALPGTMMQCYLTRDKHGVDKGLFPLYYLYLETSDSLQRFLLAGRKRRRSKTSNYLISLDPTHLSRDGDNFVGKVRSNVFSTKFTIFDNGVNPDREHLTRNTARIRQELGAVCYEPNVLGYLGPRKMTVILPGTNSQNQRINVQPLNEQESLLSRYQRGDKQGLLLLHNKTPSWDKENGVYTLNFHGRVTRASVKNFQIVDPKHQEHLVLQFGRVGPDTFTMDFCFPFSPLQAFSICLSSFN

SEQ ID NO: 93337 - protein, 230 aa, Homo sapiens
  Payload ID: 18640
  Gene Name: tubby like protein 2
  ENSP ID: ENSP00000428420
MSQDNDTLMRDILGHELAAMRLQKLEQQRRLFEKKQRQKRQELLMVQANPDASPWLWRSCLREERLLGDRVFRNLGLQSPFLSWLPDNSDAELEEVSVENGSVSPPPFKQSPRIRRKGWQAHQRPGTRAEGESDSQDMGDAHKSPNMGPNPGMDGDCVYENLAFQKEEDLEKKREASESTGTNSSAAHNEELSKALKGEGGTDSDHMRHEASLAIRSPCPGLEEDMEAYV

SEQ ID NO: 93338 - protein, 187 aa, Homo sapiens
  Payload ID: 18640
  Gene Name: tubby like protein 2
  ENSP ID: ENSP00000428535
MRLQKLEQQRRLFEKKQRQKRQELLMVQANPDASPWLWRSCLREERLLGDRGLGNPFLRKKVSEAHLPSGIHSALGTVSCGGDGRGERGLPTPRTEAVFRNLGLQSPFLSWLPDNSDAELEEVSVENGSVSPPPFKQSPRIRRKGWQAHQRPGTRAEGESDSQDMGDAHKSPNMGPNPGMDGDCVYE

SEQ ID NO: 93339 - protein, 80 aa, Homo sapiens
  Payload ID: 18640
  Gene Name: tubby like protein 2
  ENSP ID: ENSP00000429131
WDKENGVYTLNFHGRVTRASVKNFQIVDPKHRELLETSLAGPEEHLVLQFGRVGPDTFTMDFCFPFSPLQAFSICLSSFN

SEQ ID NO: 93340 - protein, 210 aa, Homo sapiens
  Payload ID: 18640
  Gene Name: tubby like protein 2
  ENSP ID: ENSP00000430040
MSQDNDTLMRDILGHELAAMRLQKLEQQRRLFEKKQRQKRQELLMVQANPDASPWLWRSCLREERLLGLGNPFLRKKVSEAHLPSGIHSALGTVSCGGDGRGERGLPTPRTEAVFRNLGLQSPFLSWLPDNSDAELEEVSVENGSVSPPPFKQSPRIRRKGWQAHQRPGTRAEGESDSQDMGDAHKSPNMGPNPGMDGDCVYENLAFQKE

SEQ ID NO: 93341 - protein, 501 aa, Homo sapiens
  Payload ID: 18641
  Gene Name: tubby like protein 3
  Uniprot ID: O75386
  ENSP ID: ENSP00000380321
MEASRCRLSPSGDSVFHEEMMKMRQAKLDYQRLLLEKRQRKKRLEPFMVQPNPEARLRRAKPRASDEQTPLVNCHTPHSNVILHGIDGPAAVLKPDEVHAPSVSSSVVEEDAENTVDTASKPGLQERLQKHDISESVNFDEETDGISQSACLERPNSASSQNSTDTGTSGSATAAQPADNLLGDIDDLEDFVYSPAPQGVTVRCRIIRDKRGMDRGLFPTYYMYLEKEENQKIFLLAARKRKKSKTANYLISIDPVDLSREGESYVGKLRSNLMGTKFTVYDRGICPMKGRGLVGAAHTRQELAAISYETNVLGFKGPRKMSVIIPGMTLNHKQIPYQPQNNHDSLLSRWQNRTMENLVELHNKAPVWNSDTQSYVLNFRGRVTQASVKNFQIVHKNDPDYIVMQFGRVADDVFTLDYNYPLCAVQAFGIGLSSFDKCIQTLRMQELCELHRQHHSAASLVHRTVCQRWVGHPWRLLPQTSLLWTDLSPPPVVPAPHQISM

SEQ ID NO: 93342 - protein, 442 aa, Homo sapiens
  Payload ID: 18641
  Gene Name: tubby like protein 3
  Uniprot ID: O75386
  ENSP ID: ENSP00000410051
MEASRCRLSPSGDSVFHEEMMKMRQAKLDYQRLLLEKRQRKKRLEPFMVQPNPEARLRRAKPRASDEQTPLVNCHTPHSNVILHGIDGPAAVLKPDEVHAPSVSSSVVEEDAENTVDTASKPGLQERLQKHDISESVNFDEETDGISQSACLERPNSASSQNSTDTGTSGSATAAQPADNLLGDIDDLEDFVYSPAPQGVTVRCRIIRDKRGMDRGLFPTYYMYLEKEENQKIFLLAARKRKKSKTANYLISIDPVDLSREGESYVGKLRSNLMGTKFTVYDRGICPMKGRGLVGAAHTRQELAAISYETNVLGFKGPRKMSVIIPGMTLNHKQIPYQPQNNHDSLLSRWQNRTMENLVELHNKAPVWNSDTQSYVLNFRGRVTQASVKNFQIVHKNDPDYIVMQFGRVADDVFTLDYNYPLCAVQAFGIGLSSFDSKLACE

SEQ ID NO: 93343 - protein, 39 aa, Homo sapiens
  Payload ID: 18641
  Gene Name: tubby like protein 3
  ENSP ID: ENSP00000437899
MEASRCRLSPSGDSVFHEEMMKMRQAKLDYQVLMVQLLS

SEQ ID NO: 93344 - protein, 109 aa, Homo sapiens
  Payload ID: 18641
  Gene Name: tubby like protein 3
  ENSP ID: ENSP00000440364
  MOD_RES (1)..(1): Any amino acid
XPYQPQNNHDSLLSRWQNRTMENLVELHNKAPVWNSDTQSYVLNFRGRVTQASVKNFQIVHKNDPDYIVMQFGRVADDVFTLDYNYPLCAVQAFGIGLSSFDRVPLTAI

SEQ ID NO: 93345 - protein, 133 aa, Homo sapiens
  Payload ID: 18641
  Gene Name: tubby like protein 3
  ENSP ID: ENSP00000441319
  MOD_RES (1)..(1): Any amino acid
XIPGMTLNHKQIPYQPQNNHDSLLSRWQNRTMENLVELHNKAPVWNSDTQSYVLNFRGRVTQASVKNFQIVHKNDPDYIVMQFGRVADDVFTLDYNYPLCAVQAFGIGLSSFDTDWPAPILVKSGCDHICDQL

SEQ ID NO: 93346 - protein, 39 aa, Homo sapiens; identical to SEQ ID NO: 93343
  Payload ID: 18641
  Gene Name: tubby like protein 3
  ENSP ID: ENSP00000441599

SEQ ID NO: 93347 - protein, 137 aa, Homo sapiens
  Payload ID: 18641
  Gene Name: tubby like protein 3
  ENSP ID: ENSP00000442631
MGTKFTVYDRGICPMKGRGLVGAAHTRQELAAISYETNVLGFKGPRKMSVIIPGMTLNHKQIPYQPQNNHDSLLSRWQNRTMENLVELHNKAPVWNSDTQSYVLNFRGRVTQASVKNFQIVHKNDPDYIVMQFGRVA

SEQ ID NO: 93348 - protein, 170 aa, Homo sapiens
  Payload ID: 18641
  Gene Name: tubby like protein 3
  Uniprot ID: O75386
  ENSP ID: ENSP00000444110
MMKMRQAKLDYQRLLLEKRQRKKRLEPFMVQPNPEARLRRAKPRASDEQTPLVNCHTPHSNVILHGIDGPAAVLKPDEVHAPSVSSSVVEEDAENTVDTASKPGLQERLQKHDISESVNFDEETDGISQSACLERPNSASSQNSTFSSFCQKTEDTGYRHFRFCYCRPTS

SEQ ID NO: 93349 - protein, 440 aa, Homo sapiens
  Payload ID: 18641
  Gene Name: tubby like protein 3
  ENSP ID: ENSP00000482208
MEASRCRLSPSGDSVFHEEMMKMRQAKLDYQRLLLEKRQRKKRLEPFMVQPNPEARLRRAKPRASDEQTPLVNCHTPHSNVILHGIDGPAAVLKPDEVHAPSVSSSVVEEDAENTVDTASKPGLQERLQKHDISESVNFDEETDGISQSACLERPNSASSQNSTDTGLPVLLLPPNQLITSWETDDLEDFVYSPAPQGVTVRCRIIRDKRGMDRGLPHLLYVLGKEENQKIFLLAARKRKKSKTANYLISIDPVDLSREGESYVGKLRSNLMGTKFTVYDRGICPMKGRGLVGAAHTRQELAAISYETNVLGFKGPRKMSVIIPGMTLNHKQIPYQPQNNHDSLLSRWQNRTMENLVELHNKAPVWNSDTQSYVLNFRGRVTQASVKNFQIVHKNDPDYIVMQFGRVADDVFTLDYNYPLCAVQAFGIGLSSFDSKLACE

SEQ ID NO: 93350 - protein, 678 aa, Homo sapiens
  Payload ID: 18642
  Gene Name: tubby like protein 4
  Uniprot ID: Q9NRJ4
  ENSP ID: ENSP00000356061
MYAAVEHGPVLCSDSNILCLSWKGRVPKSEKEKPVCRRRYYEEGWLATGNGRGVVGVTFTSSHCRRDRSTPQRINFNLRGHNSEVVLVRWNEPYQKLATCDADGGIFVWIQYEGRWSVELVNDRGAQVSDFTWSHDGTQALISYRDGFVLVGSVSGQRHWSSEINLESQITCGIWTPDDQQVLFGTADGQVIVMDCHGRMLAHVLLHESDGVLGMSWNYPIFLVEDSSESDTDSDDYAPPQDGPAAYPIPVQNIKPLLTVSFTSGDISLMNNYDDLSPTVIRSGLKEVVAQWCTQGDLLAVAGMERQTQLGELPNGPLLKSAMVKFYNVRGEHIFTLDTLVQRPIISICWGHRDSRLLMASGPALYVVRVEHRVSSLQLLCQQAIASTLREDKDVSKLTLPPRLCSYLSTAFIPTIKPPIPDPNNMRDFVSYPSAGNERLHCTMKRTEDDPEVGGPCYTLYLEYLGGLVPILKGRRISKLRPEFVIMDPRTDSKPDEIYGNSLISTVIDSCNCSDSSDIELSDDWAAKKSPKISRASKSPKLPRISIEARKSPKLPRAAQELSRSPRLPLRKPSVGSPSLTRREFPFEDITQHNYLAQVTSNIWGTKFKIVGLAAFLPTNLGAVIYKTSLLHLQPRQMTIYLPEVRKISMDYINLPVFNPNVFSEDEDDLPGDAVWTD

SEQ ID NO: 93351 - protein, 1543 aa, Homo sapiens
  Payload ID: 18642
  Gene Name: tubby like protein 4
  Uniprot ID: Q9NRJ4
  ENSP ID: ENSP00000356064
MYAAVEHGPVLCSDSNILCLSWKGRVPKSEKEKPVCRRRYYEEGWLATGNGRGVVGVTFTSSHCRRDRSTPQRINFNLRGHNSEVVLVRWNEPYQKLATCDADGGIFVWIQYEGRWSVELVNDRGAQVSDFTWSHDGTQALISYRDGFVLVGSVSGQRHWSSEINLESQITCGIWTPDDQQVLFGTADGQVIVMDCHGRMLAHVLLHESDGVLGMSWNYPIFLVEDSSESDTDSDDYAPPQDGPAAYPIPVQNIKPLLTVSFTSGDISLMNNYDDLSPTVIRSGLKEVVAQWCTQGDLLAVAGMERQTQLGELPNGPLLKSAMVKFYNVRGEHIFTLDTLVQRPIISICWGHRDSRLLMASGPALYVVRVEHRVSSLQLLCQQAIASTLREDKDVSKLTLPPRLCSYLSTAFIPTIKPPIPDPNNMRDFVSYPSAGNERLHCTMKRTEDDPEVGGPCYTLYLEYLGGLVPILKGRRISKLRPEFVIMDPRTDSKPDEIYGNSLISTVIDSCNCSDSSDIELSDDWAAKKSPKISRASKSPKLPRISIEARKSPKLPRAAQELSRSPRLPLRKPSVGSPSLTRREFPFEDITQHNYLAQVTSNIWGTKFKIVGLAAFLPTNLGAVIYKTSLLHLQPRQMTIYLPEVRKISMDYINLPVFNPNVFSEDEDDLPVTGASGVPENSPPCTVNIPIAPIHSSAQAMSPTQSIGLVQSLLANQNVQLDVLTNQTTAVGTAEHAGDSATQYPVSNRYSNPGQVIFGSVEMGRIIQNPPPLSLPPPPQGPMQLSTVGHGDRDHEHLQKSAKALRPTPQLAAEGDAVVFSAPQEVQVTKINPPPPYPGTIPAAPTTAAPPPPLPPPQPPVDVCLKKGDFSLYPTSVHYQTPLGYERITTFDSSGNVEEVCRPRTRMLCSQNTYTLPGPGSSATLRLTATEKKVPQPCSSATLNRLTVPRYSIPTGDPPPYPEIASQLAQGRGAAQRSDNSLIHATLRRNNREATLKMAQLADSPRAPLQPLAKSKGGPGGVVTQLPARPPPALYTCSQCSGTGPSSQPGASLAHTASASPLASQSSYSLLSPPDSARDRTDYVNSAFTEDEALSQHCQLEKPLRHPPLPEAAVTLKRPPPYQWDPMLGEDVWVPQERTAQTSGPNPLKLSSLMLSQGQHLDVSRLPFISPKSPASPTATFQTGYGMGVPYPGSYNNPPLPGVQAPCSPKDALSPTQFAQQEPAVVLQPLYPPSLSYCTLPPMYPGSSTCSSLQLPPVALHPWSSYSACPPMQNPQGTLPPKPHLVVEKPLVSPPPADLQSHLGTEVMVETADNFQEVLSLTESPVPQRTEKFGKKNRKRLDSRAEEGSVQAITEGKVKKEARTLSDFNSLISSPHLGREKKKVKSQKDQLKSKKLNKTNEFQDSSESEPELFISGDELMNQSQGSRKGWKSKRSPRAAGELEEAKCRRASEKEDGRLGSQGFVYVMANKQPLWNEATQVYQLDFGGRVTQESAKNFQIELEGRQVMQFGRIDGSAYILDFQYPFSAVQAFAVALANVTQRLK

SEQ ID NO: 93352 - protein, 216 aa, Homo sapiens
  Payload ID: 18642
  Gene Name: tubby like protein 4
  ENSP ID: ENSP00000481804
  MOD_RES (1)..(1): Any amino acid
XPLLKSAMVKFYNVRGEHIFTLDTLVQRPIISICWGHRDSRLLMASGPALYVVRVEHRVSSLQLLCQQAIASTLREDKDVSKLTLPPRLCSYLSTAFIPTIKPPIPDPNNMRDFVSYPSAGNERLHCTMKRTEDDPEVGGPCYTLYLEYLGGLVPILKGRRISKLRPEFVIMDPRTDSKPGSALRPASHPSCPGLLRSSPGPHGCPCASPLWARPA

SEQ ID NO: 93353 - protein, 1164 aa, Homo sapiens
  Payload ID: 18643
  Gene Name: tuberous sclerosis 1
  Uniprot ID: Q92574
  ENSP ID: ENSP00000298552
MAQQANVGELLAMLDSPMLGVRDDVTAVFKENLNSDRGPMLVNTLVDYYLETSSQPALHILTTLQEPHDKHLLDRINEYVGKAATRLSILSLLGHVIRLQPSWKHKLSQAPLLPSLLKCLKMDTDVVVLTTGVLVLITMLPMIPQSGKQHLLDFFDIFGRLSSWCLKKPGHVAEVYLVHLHASVYALFHRLYGMYPCNFVSFLRSHYSMKENLETFEEVVKPMMEHVRIHPELVTGSKDHELDPRRWKRLETHDVVIECAKISLDPTEASYEDGYSVSHQISARFPHRSADVTTSPYADTQNSYGCATSTPYSTSRLMLLNMPGQLPQTLSSPSTRLITEPPQATLWSPSMVCGMTTPPTSPGNVPPDLSHPYSKVFGTTAGGKGTPLGTPATSPPPAPLCHSDDYVHISLPQATVTPPRKEERMDSARPCLHRQHHLLNDRGSEEPPGSKGSVTLSDLPGFLGDLASEEDSIEKDKEEAAISRELSEITTAEAEPVVPRGGFDSPFYRDSLPGSQRKTHSAASSSQGASVNPEPLHSSLDKLGPDTPKQAFTPIDLPCGSADESPAGDRECQTSLETSIFTPSPCKIPPPTRVGFGSGQPPPYDHLFEVALPKTAHHFVIRKTEELLKKAKGNTEEDGVPSTSPMEVLDRLIQQGADAHSKELNKLPLPSKSVDWTHFGGSPPSDEIRTLRDQLLLLHNQLLYERFKRQQHALRNRRLLRKVIKAAALEEHNAAMKDQLKLQEKDIQMWKVSLQKEQARYNQLQEQRDTMVTKLHSQIRQLQHDREEFYNQSQELQTKLEDCRNMIAELRIELKKANNKVCHTELLLSQVSQKLSNSESVQQQMEFLNRQLLVLGEVNELYLEQLQNKHSDTTKEVEMMKAAYRKELEKNRSHVLQQTQRLDTSQKRILELESHLAKKDHLLLEQKKYLEDVKLQARGQLQAAESRYEAQKRITQVFELEILDLYGRLEKDGLLKKLEEEKAEAAEAAEERLDCCNDGCSDSMVGHNEEASGHNGETKTPRPSSARGSSGSRGGGGSSSSSSELSTPEKPPHQRAGPFSSRWETTMGEASASIPTTVGSLPSSKSFLGMKARELFRNKSESQCDEDGMTSSLSESLKTELGKDLGVEAKIPLNLDGPHPSPPTPDSVGQLHIMDYNETHHEHS

SEQ ID NO: 93354 - protein, 366 aa, Homo sapiens
  Payload ID: 18643
  Gene Name: tuberous sclerosis 1
  ENSP ID: ENSP00000386093
MAQQANVGELLAMLDSPMLGVRDDVTAVFKENLNSDRGPMLVNTLVDYYLETSSQPALHILTTLQEPHDKHLLDRINEYVGKAATRLSILSLLGHVIRLQPSWKHKLSQAPLLPSLLKCLKMDTDVVVLTTGVLVLITMLPMIPQSGKQHLLDFFDIFGRLSSWCLKKPGHVAEVYLVHLHASVYALFHRLYGMYPCNFVSFLRSHYSMKENLETFEEVVKPMMEHVRIHPELVTGSKDHELDPRRWKRLETHDVVIECAKISLDPTEASYEDGYSVSHQISARFPHRSADVTTSPYADTQNSYGCATSTPYSTSRLMLLNMPGQLPQTLSSPSTRLITEPPQVWCQLVCLLSPLLSGEADPLGQI

SEQ ID NO: 93355 - protein, 1164 aa, Homo sapiens; identical to SEQ ID NO: 93353
  Payload ID: 18643
  Gene Name: tuberous sclerosis 1
  Uniprot ID: Q92574
  ENSP ID: ENSP00000394524

SEQ ID NO: 93356 - protein, 1113 aa, Homo sapiens
  Payload ID: 18643
  Gene Name: tuberous sclerosis 1
  Uniprot ID: Q92574
  ENSP ID: ENSP00000444017
MAQQANVGELLAMLDSPMLGVRDDVTAVFKENLNSDRGPMLVNTLVDYYLETSSQPALHILTTLQEPHDKMDTDVVVLTTGVLVLITMLPMIPQSGKQHLLDFFDIFGRLSSWCLKKPGHVAEVYLVHLHASVYALFHRLYGMYPCNFVSFLRSHYSMKENLETFEEVVKPMMEHVRIHPELVTGSKDHELDPRRWKRLETHDVVIECAKISLDPTEASYEDGYSVSHQISARFPHRSADVTTSPYADTQNSYGCATSTPYSTSRLMLLNMPGQLPQTLSSPSTRLITEPPQATLWSPSMVCGMTTPPTSPGNVPPDLSHPYSKVFGTTAGGKGTPLGTPATSPPPAPLCHSDDYVHISLPQATVTPPRKEERMDSARPCLHRQHHLLNDRGSEEPPGSKGSVTLSDLPGFLGDLASEEDSIEKDKEEAAISRELSEITTAEAEPVVPRGGFDSPFYRDSLPGSQRKTHSAASSSQGASVNPEPLHSSLDKLGPDTPKQAFTPIDLPCGSADESPAGDRECQTSLETSIFTPSPCKIPPPTRVGFGSGQPPPYDHLFEVALPKTAHHFVIRKTEELLKKAKGNTEEDGVPSTSPMEVLDRLIQQGADAHSKELNKLPLPSKSVDWTHFGGSPPSDEIRTLRDQLLLLHNQLLYERFKRQQHALRNRRLLRKVIKAAALEEHNAAMKDQLKLQEKDIQMWKVSLQKEQARYNQLQEQRDTMVTKLHSQIRQLQHDREEFYNQSQELQTKLEDCRNMIAELRIELKKANNKVCHTELLLSQVSQKLSNSESVQQQMEFLNRQLLVLGEVNELYLEQLQNKHSDTTKEVEMMKAAYRKELEKNRSHVLQQTQRLDTSQKRILELESHLAKKDHLLLEQKKYLEDVKLQARGQLQAAESRYEAQKRITQVFELEILDLYGRLEKDGLLKKLEEEKAEAAEAAEERLDCCNDGCSDSMVGHNEEASGHNGETKTPRPSSARGSSGSRGGGGSSSSSSELSTPEKPPHQRAGPFSSRWETTMGEASASIPTTVGSLPSSKSFLGMKARELFRNKSESQCDEDGMTSSLSESLKTELGKDLGVEAKIPLNLDGPHPSPPTPDSVGQLHIMDYNETHHEHS

SEQ ID NO: 93357 - protein, 1807 aa, Homo sapiens
  Payload ID: 18644
  Gene Name: tuberous sclerosis 2
  Uniprot ID: P49815
  ENSP ID: ENSP00000219476
MAKPTSKDSGLKEKFKILLGLGTPRPNPRSAEGKQTEFIITAEILRELSMECGLNNRIRMIGQICEVAKTKKFEEHAVEALWKAVADLLQPERPLEARHAVLALLKAIVQGQGERLGVLRALFFKVIKDYPSNEDLHERLEVFKALTDNGRHITYLEEELADFVLQWMDVGLSSEFLLVLVNLVKFNSCYLDEYIARMVQMICLLCVRTASSVDIEVSLQVLDAVVCYNCLPAESLPLFIVTLCRTINVKELCEPCWKLMRNLLGTHLGHSAIYNMCHLMEDRAYMEDAPLLRGAVFFVGMALWGAHRLYSLRNSPTSVLPSFYQAMACPNEVVSYEIVLSITRLIKKYRKELQVVAWDILLNIIERLLQQLQTLDSPELRTIVHDLLTTVEELCDQNEFHGSQERYFELVERCADQRPESSLLNLISYRAQSIHPAKDGWIQNLQALMERFFRSESRGAVRIKVLDVLSFVLLINRQFYEEELINSVVISQLSHIPEDKDHQVRKLATQLLVDLAEGCHTHHFNSLLDIIEKVMARSLSPPPELEERDVAAYSASLEDVKTAVLGLLVILQTKLYTLPASHATRVYEMLVSHIQLHYKHSYTLPIASSIRLQAFDFLLLLRADSLHRLGLPNKDGVVRFSPYCVCDYMEPERGSEKKTSGPLSPPTGPPGPAPAGPAVRLGSVPYSLLFRVLLQCLKQESDWKVLKLVLGRLPESLRYKVLIFTSPCSVDQLCSALCSMLSGPKTLERLRGAPEGFSRTDLHLAVVPVLTALISYHNYLDKTKQREMVYCLEQGLIHRCASQCVVALSICSVEMPDIIIKALPVLVVKLTHISATASMAVPLLEFLSTLARLPHLYRNFAAEQYASVFAISLPYTNPSKFNQYIVCLAHHVIAMWFIRCRLPFRKDFVPFITKGLRSNVLLSFDDTPEKDSFRARSTSLNERPKSLRIARPPKQGLNNSPPVKEFKESSAAEAFRCRSISVSEHVVRSRIQTSLTSASLGSADENSVAQADDSLKNLHLELTETCLDMMARYVFSNFTAVPKRSPVGEFLLAGGRTKTWLVGNKLVTVTTSVGTGTRSLLGLDSGELQSGPESSSSPGVHVRQTKEAPAKLESQAGQQVSRGARDRVRSMSGGHGLRVGALDVPASQFLGSATSPGPRTAPAAKPEKASAGTRVPVQEKTNLAAYVPLLTQGWAEILVRRPTGNTSWLMSLENPLSPFSSDINNMPLQELSNALMAAERFKEHRDTALYKSLSVPAASTAKPPPLPRSNTVASFSSLYQSSCQGQLHRSVSWADSAVVMEEGSPGEVPVLVEPPGLEDVEAALGMDRRTDAYSRSSSVSSQEEKSLHAEELVGRGIPIERVVSSEGGRPSVDLSFQPSQPLSKSSSSPELQTLQDILGDPGDKADVGRLSPEVKARSQSGTLDGESAAWSASGEDSRGQPEGPLPSSSPRSPSGLRPRGYTISDSAPSRRGKRVERDALKSRATASNAEKVPGINPSFVFLQLYHSPFFGDESNKPILLPNESQSFERSVQLLDQIPSYDTHKIAVLYVGEGQSNSELAILSNEHGSYRYTEFLTGLGRLIELKDCQPDKVYLGGLDVCGEDGQFTYCWHDDIMQAVFHIATLMPTKDVDKHRCDKKRHLGNDFVSIVYNDSGEDFKLGTIKGQFNFVHVIVTPLDYECNLVSLQCRKDMEGLVDTSVAKIVSDRNLPFVARQMALHANMASQVHHSRSNPTDIYPSKWIARLRHIKRLRQRICEEAAYSNPSLPLVHPPSHSKAPAQTPAEPTPGYEVGQRKRLISSVEDFTEFV

SEQ ID NO: 93358 - protein, 1784 aa, Homo sapiens
  Payload ID: 18644
  Gene Name: tuberous sclerosis 2
  Uniprot ID: P49815
  ENSP ID: ENSP00000344383
MAKPTSKDSGLKEKFKILLGLGTPRPNPRSAEGKQTEFIITAEILRELSMECGLNNRIRMIGQICEVAKTKKFEEHAVEALWKAVADLLQPERPLEARHAVLALLKAIVQGQGERLGVLRALFFKVIKDYPSNEDLHERLEVFKALTDNGRHITYLEEELADFVLQWMDVGLSSEFLLVLVNLVKFNSCYLDEYIARMVQMICLLCVRTASSVDIEVSLQVLDAVVCYNCLPAESLPLFIVTLCRTINVKELCEPCWKLMRNLLGTHLGHSAIYNMCHLMEDRAYMEDAPLLRGAVFFVGMALWGAHRLYSLRNSPTSVLPSFYQAMACPNEVVSYEIVLSITRLIKKYRKELQVVAWDILLNIIERLLQQLQTLDSPELRTIVHDLLTTVEELCDQNEFHGSQERYFELVERCADQRPESSLLNLISYRAQSIHPAKDGWIQNLQALMERFFRSESRGAVRIKVLDVLSFVLLINRQFYEEELINSVVISQLSHIPEDKDHQVRKLATQLLVDLAEGCHTHHFNSLLDIIEKVMARSLSPPPELEERDVAAYSASLEDVKTAVLGLLVILQTKLYTLPASHATRVYEMLVSHIQLHYKHSYTLPIASSIRLQAFDFLLLLRADSLHRLGLPNKDGVVRFSPYCVCDYMEPERGSEKKTSGPLSPPTGPPGPAPAGPAVRLGSVPYSLLFRVLLQCLKQESDWKVLKLVLGRLPESLRYKVLIFTSPCSVDQLCSALCSMLSGPKTLERLRGAPEGFSRTDLHLAVVPVLTALISYHNYLDKTKQREMVYCLEQGLIHRCASQCVVALSICSVEMPDIIIKALPVLVVKLTHISATASMAVPLLEFLSTLARLPHLYRNFAAEQYASVFAISLPYTNPSKFNQYIVCLAHHVIAMWFIRCRLPFRKDFVPFITKGLRSNVLLSFDDTPEKDSFRARSTSLNERPKSLRIARPPKQGLNNSPPVKEFKESSAAEAFRCRSISVSEHVVRSRIQTSLTSASLGSADENSVAQADDSLKNLHLELTETCLDMMARYVFSNFTAVPKRSPVGEFLLAGGRTKTWLVGNKLVTVTTSVGTGTRSLLGLDSGELQSGPESSSSPGVHVRQTKEAPAKLESQAGQQVSRGARDRVRSMSGGHGLRVGALDVPASQFLGSATSPGPRTAPAAKPEKASAGTRVPVQEKTNLAAYVPLLTQGWAEILVRRPTGNTSWLMSLENPLSPFSSDINNMPLQELSNALMAAERFKEHRDTALYKSLSVPAASTAKPPPLPRSNTDSAVVMEEGSPGEVPVLVEPPGLEDVEAALGMDRRTDAYSRSSSVSSQEEKSLHAEELVGRGIPIERVVSSEGGRPSVDLSFQPSQPLSKSSSSPELQTLQDILGDPGDKADVGRLSPEVKARSQSGTLDGESAAWSASGEDSRGQPEGPLPSSSPRSPSGLRPRGYTISDSAPSRRGKRVERDALKSRATASNAEKVPGINPSFVFLQLYHSPFFGDESNKPILLPNESQSFERSVQLLDQIPSYDTHKIAVLYVGEGQSNSELAILSNEHGSYRYTEFLTGLGRLIELKDCQPDKVYLGGLDVCGEDGQFTYCWHDDIMQAVFHIATLMPTKDVDKHRCDKKRHLGNDFVSIVYNDSGEDFKLGTIKGQFNFVHVIVTPLDYECNLVSLQCRKDMEGLVDTSVAKIVSDRNLPFVARQMALHANMASQVHHSRSNPTDIYPSKWIARLRHIKRLRQRICEEAAYSNPSLPLVHPPSHSKAPAQTPAEPTPGYEVGQRKRLISSVEDFTEFV

SEQ ID NO: 93359 - protein, 1692 aa, Homo sapiens
  Payload ID: 18644
  Gene Name: tuberous sclerosis 2
  Uniprot ID: P49815
  ENSP ID: ENSP00000371978
MECGLNNRIRMIGQICEVAKTKKFEEHAVEALWKAVADLLQPERPLEARHAVLALLKAIVQGQGERLGVLRALFFKVIKDYPSNEDLHERLEVFKALTDNGRHITYLEEELADFVLQWMDVGLSSEFLLVLVNLVKFNSCYLDEYIARMVQMICLLCVRTASSVDIEVSLQVLDAVVCYNCLPAESLPLFIVTLCRTINVKELCEPCWKLMRNLLGTHLGHSAIYNMCHLMEDRAYMEDAPLLRGAVFFVGMALWGAHRLYSLRNSPTSVLPSFYQAMACPNEVVSYEIVLSITRLIKKYRKELQVVAWDILLNIIERLLQQLQTLDSPELRTIVHDLLTTVEELCDQNEFHGSQERYFELVERCADQRPESSLLNLISYRAQSIHPAKDGWIQNLQALMERFFRSESRGAVRIKVLDVLSFVLLINRQFYEEELINSVVISQLSHIPEDKDHQVRKLATQLLVDLAEGCHTHHFNSLLDIIEKVMARSLSPPPELEERDVAAYSASLEDVKTAVLGLLVILQTKLYTLPASHATRVYEMLVSHIQLHYKHSYTLPIASSIRLQAFDFLLLLRADSLHRLGLPNKDGVVRFSPYCVCDYMEPERGSEKKTSGPLSPPTGPPGPAPAGPAVRLGSVPYSLLFRVLLQCLKQESDWKVLKLVLGRLPESLRYKVLIFTSPCSVDQLCSALCSMLSGPKTLERLRGAPEGFSRTDLHLAVVPVLTALISYHNYLDKTKQREMVYCLEQGLIHRCASQCVVALSICSVEMPDIIIKALPVLVVKLTHISATASMAVPLLEFLSTLARLPHLYRNFAAEQYASVFAISLPYTNPSKFNQYIVCLAHHVIAMWFIRCRLPFRKDFVPFITKGLRSNVLLSFDDTPEKDSFRARSTSLNERPKSRIQTSLTSASLGSADENSVAQADDSLKNLHLELTETCLDMMARYVFSNFTAVPKRSPVGEFLLAGGRTKTWLVGNKLVTVTTSVGTGTRSLLGLDSGELQSGPESSSSPGVHVRQTKEAPAKLESQAGQQVSRGARDRVRSMSGGHGLRVGALDVPASQFLGSATSPGPRTAPAAKPEKASAGTRVPVQEKTNLAAYVPLLTQGWAEILVRRPTGNTSWLMSLENPLSPFSSDINNMPLQELSNALMAAERFKEHRDTALYKSLSVPAASTAKPPPLPRSNTDSAVVMEEGSPGEVPVLVEPPGLEDVEAALGMDRRTDAYSRSSSVSSQEEKSLHAEELVGRGIPIERVVSSEGGRPSVDLSFQPSQPLSKSSSSPELQTLQDILGDPGDKADVGRLSPEVKARSQSGTLDGESAAWSASGEDSRGQPEGPLPSSSPRSPSGLRPRGYTISDSAPSRRGKRVERDALKSRATASNAEKVPGINPSFVFLQLYHSPFFGDESNKPILLPNESQSFERSVQLLDQIPSYDTHKIAVLYVGEGQSNSELAILSNEHGSYRYTEFLTGLGRLIELKDCQPDKVYLGGLDVCGEDGQFTYCWHDDIMQAVFHIATLMPTKDVDKHRCDKKRHLGNDFVSIVYNDSGEDFKLGTIKGQFNFVHVIVTPLDYECNLVSLQCRKDMEGLVDTSVAKIVSDRNLPFVARQMALHANMASQVHHSRSNPTDIYPSKWIARLRHIKRLRQRICEEAAYSNPSLPLVHPPSHSKAPAQTPAEPTPGYEVGQRKRLISSVEDFTEFV

SEQ ID NO: 93360 - protein, 1740 aa, Homo sapiens
  Payload ID: 18644
  Gene Name: tuberous sclerosis 2
  Uniprot ID: P49815
  ENSP ID: ENSP00000384468
MAKPTSKDSGLKEKFKILLGLGTPRPNPRSAEGKQTEFIITAEILRELSMECGLNNRIRMIGQICEVAKTKKFEEHAVEALWKAVADLLQPERPLEARHAVLALLKAIVQGQGERLGVLRALFFKVIKDYPSNEDLHERLEVFKALTDNGRHITYLEEELADFVLQWMDVGLSSEFLLVLVNLVKFNSCYLDEYIARMVQMICLLCVRTASSVDIEVSLQVLDAVVCYNCLPAESLPLFIVTLCRTINVKELCEPCWKLMRNLLGTHLGHSAIYNMCHLMEDRAYMEDAPLLRGAVFFVGMALWGAHRLYSLRNSPTSVLPSFYQAMACPNEVVSYEIVLSITRLIKKYRKELQVVAWDILLNIIERLLQQLQTLDSPELRTIVHDLLTTVEELCDQNEFHGSQERYFELVERCADQRPESSLLNLISYRAQSIHPAKDGWIQNLQALMERFFRSESRGAVRIKVLDVLSFVLLINRQFYEEELINSVVISQLSHIPEDKDHQVRKLATQLLVDLAEGCHTHHFNSLLDIIEKVMARSLSPPPELEERDVAAYSASLEDVKTAVLGLLVILQTKLYTLPASHATRVYEMLVSHIQLHYKHSYTLPIASSIRLQAFDFLLLLRADSLHRLGLPNKDGVVRFSPYCVCDYMEPERGSEKKTSGPLSPPTGPPGPAPAGPAVRLGSVPYSLLFRVLLQCLKQESDWKVLKLVLGRLPESLRYKVLIFTSPCSVDQLCSALCSMLSGPKTLERLRGAPEGFSRTDLHLAVVPVLTALISYHNYLDKTKQREMVYCLEQGLIHRCASQCVVALSICSVEMPDIIIKALPVLVVKLTHISATASMAVPLLEFLSTLARLPHLYRNFAAEQYASVFAISLPYTNPSKFNQYIVCLAHHVIAMWFIRCRLPFRKDFVPFITKGLRSNVLLSFDDTPEKDSFRARSTSLNERPKRIQTSLTSASLGSADENSVAQADDSLKNLHLELTETCLDMMARYVFSNFTAVPKRSPVGEFLLAGGRTKTWLVGNKLVTVTTSVGTGTRSLLGLDSGELQSGPESSSSPGVHVRQTKEAPAKLESQAGQQVSRGARDRVRSMSGGHGLRVGALDVPASQFLGSATSPGPRTAPAAKPEKASAGTRVPVQEKTNLAAYVPLLTQGWAEILVRRPTGNTSWLMSLENPLSPFSSDINNMPLQELSNALMAAERFKEHRDTALYKSLSVPAASTAKPPPLPRSNTDSAVVMEEGSPGEVPVLVEPPGLEDVEAALGMDRRTDAYSRSSSVSSQEEKSLHAEELVGRGIPIERVVSSEGGRPSVDLSFQPSQPLSKSSSSPELQTLQDILGDPGDKADVGRLSPEVKARSQSGTLDGESAAWSASGEDSRGQPEGPLPSSSPRSPSGLRPRGYTISDSAPSRRGKRVERDALKSRATASNAEKVPGINPSFVFLQLYHSPFFGDESNKPILLPNESQSFERSVQLLDQIPSYDTHKIAVLYVGEGQSNSELAILSNEHGSYRYTEFLTGLGRLIELKDCQPDKVYLGGLDVCGEDGQFTYCWHDDIMQAVFHIATLMPTKDVDKHRCDKKRHLGNDFVSIVYNDSGEDFKLGTIKGQFNFVHVIVTPLDYECNLVSLQCRKDMEGLVDTSVAKIVSDRNLPFVARQMALHANMASQVHHSRSNPTDIYPSKWIARLRHIKRLRQRICEEAAYSNPSLPLVHPPSHSKAPAQTPAEPTPGYEVGQRKRLISSVEDFTEFV

SEQ ID NO: 93361 - protein, 125 aa, Homo sapiens
  Payload ID: 18644
  Gene Name: tuberous sclerosis 2
  ENSP ID: ENSP00000387937
  MOD_RES (1)..(1): Any amino acid
XAIVQGQVRPRATLGWVTSGCPLTVLSLLGRVWTPASGERLGVLRALFFKVIKDYPSNEDLHERLEVFKALTDNGRHITYLEEELADFVLQWMDVGLSSEFLLVLVNLVKFNSCYLDEYIARMVQ

SEQ ID NO: 93362 - protein, 1704 aa, Homo sapiens
  Payload ID: 18644
  Gene Name: tuberous sclerosis 2
  Uniprot ID: P49815
  ENSP ID: ENSP00000399232
MAKPTSKDSGLKEKFKILLGLGTPRPNPRSAEGKQTEFIITAEILRELSMECGLNNRIRMIGQICEVAKTKKFEEGERLGVLRALFFKVIKDYPSNEDLHERLEVFKALTDNGRHITYLEEELADFVLQWMDVGLSSEFLLVLVNLVKFNSCYLDEYIARMVQMICLLCVRTASSVDIEVSLQVLDAVVCYNCLPAESLPLFIVTLCRTINVKELCEPCWKLMRNLLGTHLGHSAIYNMCHLMEDRAYMEDAPLLRGAVFFVGMALWGAHRLYSLRNSPTSVLPSFYQAMACPNEVVSYEIVLSITRLIKKYRKELQVVAWDILLNIIERLLQQLQTLDSPELRTIVHDLLTTVEELCDQNEFHGSQERYFELVERCADQRPESSLLNLISYRAQSIHPAKDGWIQNLQALMERFFRSESRGAVRIKVLDVLSFVLLINRQFYEEELINSVVISQLSHIPEDKDHQVRKLATQLLVDLAEGCHTHHFNSLLDIIEKVMARSLSPPPELEERDVAAYSASLEDVKTAVLGLLVILQTKLYTLPASHATRVYEMLVSHIQLHYKHSYTLPIASSIRLQAFDFLLLLRADSLHRLGLPNKDGVVRFSPYCVCDYMEPERGSEKKTSGPLSPPTGPPGPAPAGPAVRLGSVPYSLLFRVLLQCLKQESDWKVLKLVLGRLPESLRYKVLIFTSPCSVDQLCSALCSMLSGPKTLERLRGAPEGFSRTDLHLAVVPVLTALISYHNYLDKTKQREMVYCLEQGLIHRCASQCVVALSICSVEMPDIIIKALPVLVVKLTHISATASMAVPLLEFLSTLARLPHLYRNFAAEQYASVFAISLPYTNPSKFNQYIVCLAHHVIAMWFIRCRLPFRKDFVPFITKGLRSNVLLSFDDTPEKDSFRARSTSLNERPKSRIQTSLTSASLGSADENSVAQADDSLKNLHLELTETCLDMMARYVFSNFTAVPKRSPVGEFLLAGGRTKTWLVGNKLVTVTTSVGTGTRSLLGLDSGELQSGPESSSSPGVHVRQTKEAPAKLESQAGQQVSRGARDRVRSMSGGHGLRVGALDVPASQFLGSATSPGPRTAPAAKPEKASAGTRVPVQEKTNLAAYVPLLTQGWAEILVRRPTGNTSWLMSLENPLSPFSSDINNMPLQELSNALMAAERFKEHRDTALYKSLSVPAASTAKPPPLPRSNTDSAVVMEEGSPGEVPVLVEPPGLEDVEAALGMDRRTDAYSRSSSVSSQEEKSLHAEELVGRGIPIERVVSSEGGRPSVDLSFQPSQPLSKSSSSPELQTLQDILGDPGDKADVGRLSPEVKARSQSGTLDGESAAWSASGEDSRGQPEGPLPSSSPRSPSGLRPRGYTISDSAPSRRGKRVERDALKSRATASNAEKVPGINPSFVFLQLYHSPFFGDESNKPILLPNESQSFERSVQLLDQIPSYDTHKIAVLYVGEGQSNSELAILSNEHGSYRYTEFLTGLGRLIELKDCQPDKVYLGGLDVCGEDGQFTYCWHDDIMQAVFHIATLMPTKDVDKHRCDKKRHLGNDFVSIVYNDSGEDFKLGTIKGQFNFVHVIVTPLDYECNLVSLQCRKDMEGLVDTSVAKIVSDRNLPFVARQMALHANMASQVHHSRSNPTDIYPSKWIARLRHIKRLRQRICEEAAYSNPSLPLVHPPSHSKAPAQTPAEPTPGYEVGQRKRLISSVEDFTEFV

SEQ ID NO: 93363 - protein, 108 aa, Homo sapiens
  Payload ID: 18644
  Gene Name: tuberous sclerosis 2
  ENSP ID: ENSP00000406980
MAKPTSKDSGLKEKFKILLGLGTPRPNPRSAEGKQTEFIITAEILRELSMECGLNNRIRMIGQICEVAKTKKFEEDDLSAVRPDRVLCGHRGLPAGAGRRGLLQLPAG

SEQ ID NO: 93364 - protein, 1751 aa, Homo sapiens
  Payload ID: 18644
  Gene Name: tuberous sclerosis 2
  ENSP ID: ENSP00000454487
MEGFSGASWSTMAKPTSKDSGLKEKFKILLGLGTPRPNPRSAEGKQTEFIITAEILRELSMECGLNNRIRMIGQICEVAKTKKFEEHAVEALWKAVADLLQPERPLEARHAVLALLKAIVQGQGERLGVLRALFFKVIKDYPSNEDLHERLEVFKALTDNGRHITYLEEELADFVLQWMDVGLSSEFLLVLVNLVKFNSCYLDEYIARMVQMICLLCVRTASSVDIEVSLQVLDAVVCYNCLPAESLPLFIVTLCRTINVKELCEPCWKLMRNLLGTHLGHSAIYNMCHLMEDRAYMEDAPLLRGAVFFVGMALWGAHRLYSLRNSPTSVLPSFYQAMACPNEVVSYEIVLSITRLIKKYRKELQVVAWDILLNIIERLLQQLQTLDSPELRTIVHDLLTTVEELCDQNEFHGSQERYFELVERCADQRPESSLLNLISYRAQSIHPAKDGWIQNLQALMERFFRSESRGAVRIKVLDVLSFVLLINRQFYEEELINSVVISQLSHIPEDKDHQVRKLATQLLVDLAEGCHTHHFNSLLDIIEKVMARSLSPPPELEERDVAAYSASLEDVKTAVLGLLVILQTKLYTLPASHATRVYEMLVSHIQLHYKHSYTLPIASSIRLQAFDFLLLLRADSLHRLGLPNKDGVVRFSPYCVCDYMEPERGSEKKTSGPLSPPTGPPGPAPAGPAVRLGSVPYSLLFRVLLQCLKQESDWKVLKLVLGRLPESLRYKVLIFTSPCSVDQLCSALCSMLSGPKTLERLRGAPEGFSRTDLHLAVVPVLTALISYHNYLDKTKQREMVYCLEQGLIHRCASQCVVALSICSVEMPDIIIKALPVLVVKLTHISATASMAVPLLEFLSTLARLPHLYRNFAAEQYASVFAISLPYTNPSKFNQYIVCLAHHVIAMWFIRCRLPFRKDFVPFITKGLRSNVLLSFDDTPEKDSFRARSTSLNERPKRIQTSLTSASLGSADENSVAQADDSLKNLHLELTETCLDMMARYVFSNFTAVPKRSPVGEFLLAGGRTKTWLVGNKLVTVTTSVGTGTRSLLGLDSGELQSGPESSSSPGVHVRQTKEAPAKLESQAGQQVSRGARDRVRSMSGGHGLRVGALDVPASQFLGSATSPGPRTAPAAKPEKASAGTRVPVQEKTNLAAYVPLLTQGWAEILVRRPTGNTSWLMSLENPLSPFSSDINNMPLQELSNALMAAERFKEHRDTALYKSLSVPAASTAKPPPLPRSNTDSAVVMEEGSPGEVPVLVEPPGLEDVEAALGMDRRTDAYSRSSSVSSQEEKSLHAEELVGRGIPIERVVSSEGGRPSVDLSFQPSQPLSKSSSSPELQTLQDILGDPGDKADVGRLSPEVKARSQSGTLDGESAAWSASGEDSRGQPEGPLPSSSPRSPSGLRPRGYTISDSAPSRRGKRVERDALKSRATASNAEKVPGINPSFVFLQLYHSPFFGDESNKPILLPNESQSFERSVQLLDQIPSYDTHKIAVLYVGEGQSNSELAILSNEHGSYRYTEFLTGLGRLIELKDCQPDKVYLGGLDVCGEDGQFTYCWHDDIMQAVFHIATLMPTKDVDKHRCDKKRHLGNDFVSIVYNDSGEDFKLGTIKGQFNFVHVIVTPLDYECNLVSLQCRKDMEGLVDTSVAKIVSDRNLPFVARQMALHANMASQVHHSRSNPTDIYPSKWIARLRHIKRLRQRICEEAAYSNPSLPLVHPPSHSKAPAQTPAEPTPGYEVGQRKRLISSVEDFTEFV

SEQ ID NO: 93365 - protein, 196 aa, Homo sapiens
  Payload ID: 18644
  Gene Name: tuberous sclerosis 2
  ENSP ID: ENSP00000454997
SAAGTELGAPCRMICLLCVRTASSVDIEVSLQVLDAVVCYNCLPAESLPLFIVTLCRTINVKELCEPCWKLMRNLLGTHLGHSAIYNMCHLMEDRAYMEDAPLLRGAVFFVGMALWGAHRLYSLRNSPTSVLPSFYQESSLLNLISYRAQSIHPAKDGWIQNLQALMERFFRSESRGAVRIKVLDVLSFVLLINRQ

SEQ ID NO: 93366 - protein, 535 aa, Homo sapiens
  Payload ID: 18644
  Gene Name: tuberous sclerosis 2
  ENSP ID: ENSP00000455817
  MOD_RES (1)..(1): Any amino acid
XLWDLPPSLLSVPSCGSGLELEDSAVVMEEGSPGEVPVLVEPPGLEDVEAALGMDRRTDAYSRSSSVSSQEEKSLHAEELVGRGIPIERVVSSEGGRPSVDLSFQPSQPLSKSSSSPELQTLQDILGDPGDKADVGRLSPEVKARSQSGTLDGESAAWSASGEDSRGQPEGPLPSSSPRSPSGLRPRGYTISDSAPSRRGKRVERDALKSRATASNAEKVPGINPSFVFLQLYHSPFFGDESNKPILLPNESQSFERSVQLLDQIPSYDTHKIAVLYVGEGQSNSELAILSNEHGSYRYTEFLTGLGRLIELKDCQPDKVYLGGLDVCGEDGQFTYCWHDDIMQAVFHIATLMPTKDVDKHRCDKKRHLGNDFVSIVYNDSGEDFKLGTIKGQFNFVHVIVTPLDYECNLVSLQCRKDMEGLVDTSVAKIVSDRNLPFVARQMALHANMASQVHHSRSNPTDIYPSKWIARLRHIKRLRQRICEEAAYSNPSLPLVHPPSHSKAPAQTPAEPTPGYEVGQRKRLISSVEDFTEFV

SEQ ID NO: 93367 - protein, 30 aa, Homo sapiens
  Payload ID: 18644
  Gene Name: tuberous sclerosis 2
  ENSP ID: ENSP00000455997
ISYRAQSIHPAKDGWIQNLQALMERFFRRS

SEQ ID NO: 93368 - protein, 32 aa, Homo sapiens
  Payload ID: 18644
  Gene Name: tuberous sclerosis 2
  ENSP ID: ENSP00000458541
  MOD_RES (1)..(1): Any amino acid
XFITKVGSGPVKAVSLGRPGLALPLAVHGRAE

SEQ ID NO: 93369 - protein, 35 aa, Homo sapiens
  Payload ID: 18644
  Gene Name: tuberous sclerosis 2
  ENSP ID: ENSP00000460310
DFVPFITKVGSGPVKAVSLGRPGLALPLAVHGRAE

SEQ ID NO: 93370 - protein, 129 aa, Homo sapiens
  Payload ID: 18645
  Gene Name: tubulin folding cofactor A
  Uniprot ID: O75347
  ENSP ID: ENSP00000306362
MADPRVRQIKIKTGVVKRLVKEKVMYEKEAKQQEEKIEKMRAEDGENYDIKKQAEILQESRMMIPDCQRRLEAAYLDLQRILVSKDFCVMFKFFFSIQYMESQKFKYLTLRTSWQYFLFTCPLYRYILK

SEQ ID NO: 93371 - protein, 108 aa, Homo sapiens
  Payload ID: 18645
  Gene Name: tubulin folding cofactor A
  Uniprot ID: O75347
  ENSP ID: ENSP00000369736
MADPRVRQIKIKTGVVKRLVKEKVMYEKEAKQQEEKIEKMRAEDGENYDIKKQAEILQESRMMIPDCQRRLEAAYLDLQRILENEKDLEEAEEYKEARLVLDSVKLEA

SEQ ID NO: 93372 - protein, 26 aa, Homo sapiens
  Payload ID: 18645
  Gene Name: tubulin folding cofactor A
  ENSP ID: ENSP00000429046
MADPRVRQIKIKTGVVKRQRSYKNPG

SEQ ID NO: 93373 - protein, 119 aa, Homo sapiens
  Payload ID: 18645
  Gene Name: tubulin folding cofactor A
  ENSP ID: ENSP00000429083
MLTRTSWFHGFFSWFSSSICWSTLSKFLRLVKEKVMYEKEAKQQEEKIEKMRAEDGENYDIKKQAEILQESRMMIPDCQRRLEAAYLDLQRILENEKDLEEAEEYKEARLVLDSVKLEA

SEQ ID NO: 93374 - protein, 79 aa, Homo sapiens
  Payload ID: 18645
  Gene Name: tubulin folding cofactor A
  ENSP ID: ENSP00000429288
MADPRVRQIKIKTGVVKRLVKEKVMYEKEAKQQEEKIEKMRAEDGENYDIKKQENEKDLEEAEEYKEARLVLDSVKLEA

SEQ ID NO: 93375 - protein, 84 aa, Homo sapiens
  Payload ID: 18645
  Gene Name: tubulin folding cofactor A
  ENSP ID: ENSP00000429313
MYEKEAKQQEEKIEKMRAEDGENYDIKKQAEILQESRMMIPDCQRRLEAAYLDLQRILENEKDLEEAEEYKEARLVLDSVKLEA

SEQ ID NO: 93376 - protein, 131 aa, Homo sapiens
  Payload ID: 18645
  Gene Name: tubulin folding cofactor A
  ENSP ID: ENSP00000429793
MADPRVRQIKIKTGVVKRLVKEKVMYEKEAKQQEEKIEKMRAEDGENYDIKKQAGLQLLASSDPPTPASQSPGMISAEILQESRMMIPDCQRRLEAAYLDLQRILENEKDLEEAEEYKEARLVLDSVKLEA

SEQ ID NO: 93377 - protein, 244 aa, Homo sapiens
  Payload ID: 18646
  Gene Name: tubulin folding cofactor B
  Uniprot ID: Q99426
  ENSP ID: ENSP00000221855
MEVTGVSAPTVTVFISSSLNTFRSEKRYSRSLTIAEFKCKLELLVGSPASCMELELYGVDDKFYSKLDQEDALLGSYPVDDGCRIHVIDHSGARLGEYEDVSRVEKYTISQEAYDQRQDTVRSFLKRSKLGRYNEEERAQQEAEAAQRLAEEKAQASSIPVGSRCEVRAAGQSPRRGTVMYVGLTDFKPGYWIGVRYDEPLGKNDGSVNGKRYFECQAKYGAFVKPAVVTVGDFPEEDYGLDEI

SEQ ID NO: 93378 - protein, 191 aa, Homo sapiens
  Payload ID: 18646
  Gene Name: tubulin folding cofactor B
  ENSP ID: ENSP00000465447
MEVTGVSAPTVTVFISSSLNTFRSEKRYSRSLTIAEFKCKLELLVGSPASCMELELYGVDDKFYSKLDQEDALLGSYPVDDGCRIHVIDHSGARLGEYEDVSRVEKYTISQEAYDQRQDTVRSFLKRSKLGRYNEEERAQQEAEAAQRLAEEKAQASSIPVGSRCEVSQISSLATGLVSAMMSHWGKMMAV

SEQ ID NO: 93379 - protein, 133 aa, Homo sapiens
  Payload ID: 18646
  Gene Name: tubulin folding cofactor B
  ENSP ID: ENSP00000465979
SLNTFRSEKRYSRSLTIAEFKCKLELLVGSPASCMELELYGVDDKFYSKLDQEDALLGSYPVDDGCRIHSLALSPRLACSGMISAHCNLRLPGSSDSPASASRVGGITDARHYTRVIDHSGARLGEYEDVSRV

SEQ ID NO: 93380 - protein, 169 aa, Homo sapiens
  Payload ID: 18646
  Gene Name: tubulin folding cofactor B
  ENSP ID: ENSP00000467172
MELELYGVDDKFYSKLDQEDALLGSYPVDDGCRIHVIDHSGARLGEYEDVSRVEKYTISQEAYDQRQDTVRSFLKRSKLGRYNEEERAQQEAEAAQRLAEEKAQASSIPVGSRCEVRAAGQSPRRGTVMYVGLTDFKPGYWIGVRYDEPLGKNDGSVNGKRYFECQAKY

SEQ ID NO: 93381 - protein, 193 aa, Homo sapiens
  Payload ID: 18646
  Gene Name: tubulin folding cofactor B
  Uniprot ID: Q99426
  ENSP ID: ENSP00000467487
MELELYGVDDKFYSKLDQEDALLGSYPVDDGCRIHVIDHSGARLGEYEDVSRVEKYTISQEAYDQRQDTVRSFLKRSKLGRYNEEERAQQEAEAAQRLAEEKAQASSIPVGSRCEVRAAGQSPRRGTVMYVGLTDFKPGYWIGVRYDEPLGKNDGSVNGKRYFECQAKYGAFVKPAVVTVGDFPEEDYGLDEI

SEQ ID NO: 93382 - protein, 45 aa, Homo sapiens
  Payload ID: 18646
  Gene Name: tubulin folding cofactor B
  ENSP ID: ENSP00000467825
MELELYGVDDKFYSKLDQEDALLGSYPVDDGCRIHKLAGRGGRCL

SEQ ID NO: 93383 - protein, 60 aa, Homo sapiens
  Payload ID: 18646
  Gene Name: tubulin folding cofactor B
  ENSP ID: ENSP00000468055
MELELYGVDDKFYSKLDQEDALLGSYPVDDGCRIHVSQISSLATGLVSAMMSHWGKMMAV

SEQ ID NO: 93384 - protein, 45 aa, Homo sapiens; identical to SEQ ID NO: 93382
  Payload ID: 18646
  Gene Name: tubulin folding cofactor B
  ENSP ID: ENSP00000485894

SEQ ID NO: 93385 - protein, 346 aa, Homo sapiens
  Payload ID: 18647
  Gene Name: tubulin folding cofactor C
  Uniprot ID: Q15814
  ENSP ID: ENSP00000361967
MESVSCSAAAVRTGDMESQRDLSLVPERLQRREQERQLEVERRKQKRQNQEVEKENSHFFVATFVRERAAVEELLERAESVERLEEAASRLQGLQKLINDSVFFLAAYDLRQGQEALARLQAALAERRRGLQPKKRFAFKTRGKDAASSTKVDAAPGIPPAVESIQDSPLPKKAEGDLGPSWVCGFSNLESQVLEKRASELHQRDVLLTELSNCTVRLYGNPNTLRLTKAHSCKLLCGPVSTSVFLEDCSDCVLAVACQQLRIHSTKDTRIFLQVTSRAIVEDCSGIQFAPYTWSYPEIDKDFESSGLDRSKNNWNDVDDFNWLARDMASPNWSILPEEERNIQWD

SEQ ID NO: 93386 - protein, 1192 aa, Homo sapiens
  Payload ID: 18648
  Gene Name: tubulin folding cofactor D
  Uniprot ID: Q9BTW9
  ENSP ID: ENSP00000347719
MALSDEPAAGGPEEEAEDETLAFGAALEAFGESAETRALLGRLREVHGGGAEREVALERFRVIMDKYQEQPHLLDPHLEWMMNLLLDIVQDQTSPASLVHLAFKFLYIITKVRGYKTFLRLFPHEVADVEPVLDLVTIQNPKDHEAWETRYMLLLWLSVTCLIPFDFSRLDGNLLTQPGQARMSIMDRILQIAESYLIVSDKARDAAAVLVSRFITRPDVKQSKMAEFLDWSLCNLARSSFQTMQGVITMDGTLQALAQIFKHGKREDCLPYAATVLRCLDGCRLPESNQTLLRKLGVKLVQRLGLTFLKPKVAAWRYQRGCRSLAANLQLLTQGQSEQKPLILTEDDDEDDDVPEGVERVIEQLLVGLKDKDTVVRWSAAKGIGRMAGRLPRALADDVVGSVLDCFSFQETDKAWHGGCLALAELGRRGLLLPSRLVDVVAVILKALTYDEKRGACSVGTNVRDAACYVCWAFARAYEPQELKPFVTAISSALVIAAVFDRDINCRRAASAAFQENVGRQGTFPHGIDILTTADYFAVGNRSNCFLVISVFIAGFPEYTQPMIDHLVTMKISHWDGVIRELAARALHNLAQQAPEFSATQVFPRLLSMTLSPDLHMRHGSILACAEVAYALYKLAAQENRPVTDHLDEQAVQGLKQIHQQLYDRQLYRGLGGQLMRQAVCVLIEKLSLSKMPFRGDTVIDGWQWLINDTLRHLHLISSHSRQQMKDAAVSALAALCSEYYMKEPGEADPAIQEELITQYLAELRNPEEMTRCGFSLALGALPGFLLKGRLQQVLTGLRAVTHTSPEDVSFAESRRDGLKAIARICQTVGVKAGAPDEAVCGENVSQIYCALLGCMDDYTTDSRGDVGTWVRKAAMTSLMDLTLLLARSQPELIEAHTCERIMCCVAQQASEKIDRFRAHAASVFLTLLHFDSPPIPHVPHRGELEKLFPRSDVASVNWSAPSQAFPRITQLLGLPTYRYHVLLGLVVSLGGLTESTIRHSTQSLFEYMKGIQSDPQALGSFSGTLLQIFEDNLLNERVSVPLLKTLDHVLTHGCFDIFTTEEDHPFAVKLLALCKKEIKNSKDIQKLLSGIAVFCEMVQFPGDVRRQALLQLCLLLCHRFPLIRKTTASQVYETLLTYSDVVGADVLDEVVTVLSDTAWDAELAVVREQRNRLCDLLGVPRPQLVPQPGAC

SEQ ID NO: 93387 - protein, 1230 aa, Homo sapiens
  Payload ID: 18648
  Gene Name: tubulin folding cofactor D
  ENSP ID: ENSP00000440671
MALSDEPAAGGPEEEAEDETLAFGAALEAFGESAETRALLGRLREVHGGGAEREVALERFRVIMDKYQEQPHLLDPHLEWMMNLLLDIVQDQTSPASLVHLAFKFLYIITKVRGYKTFLRLFPHEVADVEPVLDLVTIQNPKDHEAWETRYMLLLWLSVTCLIPFDFSRLDGNLLTQPGQARMSIMDRILQIAESYLIVSDKARDAAAVLVSRFITRPDVKQSKMAEFLDWSLCNLARSSFQTMQGVITMDGTLQALAQIFKHGKREDCLPYAATVLRCLDGCRLPESNQTLLRKLGVKLVQRLGLTFLKPKVAAWRYQRGCRSLAANLQLLTQGQSEQKPLILTEDDDEDDDVPEGVERVIEQLLVGLKDKDTVVRWSAAKGIGRMAGRLPRALADDVVGSVLDCFSFQETDKAWHGGCLALAELGRRGLLLPSRLVDVVAVILKALTYDEKRGACSVGTNVRDAACYVCWAFARAYEPQELKPFVTAISSALVIAAVFDRDINCRRAASAAFQENVGRQGTFPHGIDILTTADYFAVGNRSNCFLVISVFIAGFPEYTQPMIDHLVTMKISHWDGVIRELAARALHNLAQQAPEFSATQVFPRLLSMTLSPDLHMRHGSILACAEVAYALYKLAAQENRPVTDHLDEQAVQGLKQIHQQLYDRQLYRGLGGQLMRQAVCVLIEKLSLSKMPFRGDTVIDGWQWLINDTLRHLHLISSHSRQQMKDAAVSALAALCSEYYMKEPGEADPAIQEELITQYLAELRNPEEMTRCGFSLALGALPGFLLKGRLQQVLTGLRAVTHTSPEDVSFAESRRDGLKAIARICQTVGVKAGAPDEAVCGENVSQIYCALLGCMDDYTTDSRGDVGTWVRKAAMTSLMDLTLLLARSQPELIEAHTCERIMCCVAQQASEKIDRFRAHAASVFLTLLHFDSPPIPHVPHRGELEKLFPRSDVASVNWSAPSQAFPRITQLLGLPTYRYHVLLGLVVSLGGLTESTIRHSTQSLFEYMKGIQSDPQALGSFSGTLLQIFEDNLLNERVSVPLLKTLDHVLTHGCFDIFTTEEDHPFAVKLLALCKKEIKNSKDIQKLLSGIAVDFPSATLVCVGTVQMYAHTHLRLGAPGPHCAHGSALPRFCEMVQFPGDVRRQALLQLCLLLCHRFPLIRKTTASQVYETLLTYSDVVGADVLDEVVTVLSDTAWDAELAVVREQRNRLCDLLGVPRPQLVPQPGAC

SEQ ID NO: 93388 - protein, 237 aa, Homo sapiens
  Payload ID: 18648
  Gene Name: tubulin folding cofactor D
  ENSP ID: ENSP00000458365
VIAAVFDRDINCRRAASAAFQENVGRQGTFPHGIDILTTADYFAVGNRSNCFLVISVFIAGFPEYTQPMIDHLVTMKISHWDGVIRELAARALHNLAQQAPEFSATQVFPRLLSMTLSPDLHMRHGSILACAEVAYALYKLAAQENRPVTDHLDEQAVQGLKQIHQQLYDRQLYRGLGGQLMRQADLVIVPQMPPEHTVQGCHLSDVPMGARSCLLSGIKTIPHMSWTAGDLVALGV

SEQ ID NO: 93389 - protein, 260 aa, Homo sapiens
  Payload ID: 18648
  Gene Name: tubulin folding cofactor D
  ENSP ID: ENSP00000458512
AQQASEKIDRFRAHAASVFLTLLHFDSPPIPHVPHRGELEKLFPRSDVASVNWSAPSQAFPRITQLLGLPTYRYHVLLGLVVSLGGLTESTIRHSTQSLFEYMKGIQSDPQALGSFSGTLLQIFEDNLLNESHPFAVKLLALCKKEIKNSKDIQKLLSGIAVFCEMVQFPGDVRRQALLQLCLLLCHRFPLIRKTTASQVYETLLTYSDVVGADVLDEVVTVLSDTAWDAELAVVREQRNRLCDLLGVPRPQLVPQPGAC

SEQ ID NO: 93390 - protein, 141 aa, Homo sapiens
  Payload ID: 18648
  Gene Name: tubulin folding cofactor D
  ENSP ID: ENSP00000458535
MIDHLVTMKISHWDGVIRELAARALHNLAQQAPEFSATQVFPRLLSMTLSPDLHMRHGSILACAEVAYALYKLAAQENRPVTDHLDEQAVQGLKQIHQQLYDRQLYRGLGGQLMRQAVCVLIEKLSLSKMPFRGDTVIDGW

SEQ ID NO: 93391 - protein, 211 aa, Homo sapiens
  Payload ID: 18648
  Gene Name: tubulin folding cofactor D
  ENSP ID: ENSP00000458556
MGLRPMEGTFPHGIDILTTADYFAVGNRSNCFLVISVFIAGFPEYTQPMIDHLVTMKISHWDGVIRELAARALHNLAQQAPEFSATQVFPRLLSMTLSPDLHMRHGSILACAEVAYALYKLAAQENRPVTDHLDEQAVQGLKQIHQQLYDRQLYRGLGGQLMRQAVCVLIEKLSLSKMPFRGDTVIDGWQWLINDTLRHLHLISSHSRQQM

SEQ ID NO: 93392 - protein, 244 aa, Homo sapiens
  Payload ID: 18648
  Gene Name: tubulin folding cofactor D
  ENSP ID: ENSP00000458599
MIDHLVTMKISHWDGVIRELAARALHNLAQQAPEFSATQVFPRLLSMTLSPDLHMRHGSILACAEVAYALYKLAAQENRPVTDHLDEQAVQGLKQIHQQLYDRQLYRGLGGQLMRQAVCVLIEKLSLSKMPFRGDTVIDGWQWLINDTLRHLHLISSHSRQQMKDAAVSALAALCSEYYMKEPGEADPAIQEELITQYLAELRNPEEMTRCGFSLALGALPGFLLKGRLQQVLTGLRAVTHTSP

SEQ ID NO: 93393 - protein, 68 aa, Homo sapiens
  Payload ID: 18648
  Gene Name: tubulin folding cofactor D
  ENSP ID: ENSP00000458916
  MOD_RES (1)..(1): Any amino acid
XLLTYSDVVGADVLDEVVTVLSDTAWDAELAVVREQRNRLCDLLGVPRPQLVPQVTLSPSQHEVPVLP

SEQ ID NO: 93394 - protein, 117 aa, Homo sapiens
  Payload ID: 18648
  Gene Name: tubulin folding cofactor D
  ENSP ID: ENSP00000459063
MTLSPDLHMRHGSILACAEVAYALYKLAAQENRPVTDHLDEQAVQGLKQIHQQLYDRQLYRGLGGQLMRQAVCVLIEKLSLSKMPFRGDTVIDGWQWLINDTLRHLHLISSHSRQQM

SEQ ID NO: 93395 - protein, 134 aa, Homo sapiens
  Payload ID: 18648
  Gene Name: tubulin folding cofactor D
  ENSP ID: ENSP00000460450
MIDHLVTMKISHWDGVIRELAARALHNLAQQAPEFSATQVFPRLLSMTLSPDLHMRHGSILACAEVAYALYKLAAQENRPVTDHLDEQAVQGLKQIHQQLYDRQLYRGLGGQLMRQAVCVLIEKLSLSKMPFRG

SEQ ID NO: 93396 - protein, 256 aa, Homo sapiens
  Payload ID: 18648
  Gene Name: tubulin folding cofactor D
  ENSP ID: ENSP00000460949
MIDHLVTMKISHWDGVIRELAARALHNLAQQAPEFSATQVFPRLLSMTLSPDLHMRHGSILACAEVAYALYKLAAQENRPVTDHLDEQAVQGLKQIHQQLYDRQLYRGLGGQLMRQAVCVLIEKLSLSKMPFRGDTVIDGWQWLINDTLRHLHLISSHSRQQMKDAAVSALAALCSEYYMKEPGEADPAIQEELITQYLAELRNPEEMTRCGFSLALGALPGFLLKGRLQQVLTGLRAVTHTSPEDVSFAESRRDG

SEQ ID NO: 93397 - protein, 109 aa, Homo sapiens
  Payload ID: 18648
  Gene Name: tubulin folding cofactor D
  ENSP ID: ENSP00000461167
MIDHLVTMKISHWDGVIRELAARALHNLAQQAPEFSATQVFPRLLSMTLSPDLHMRHGSILACAEVAYALYKLAAQENRPVTDHLDEQAVQGLKQIHQQLYDRQLYRGL

SEQ ID NO: 93398 - protein, 251 aa, Homo sapiens
  Payload ID: 18648
  Gene Name: tubulin folding cofactor D
  ENSP ID: ENSP00000461680
MGLRPMEGTFPHGIDILTTADYFAVGNRSNCFLVIRVIRELAARALHNLAQQAPEFSATQVFPRLLSMTLSPDLHMRHGSILACAEVAYALYKLAAQENRPVTDHLDEQAVQGLKQIHQQLYDRQLYRGLGGQLMRQAVCVLIEKLSLSKMPFRGDTVIDGWQWLINDTLRHLHLISSHSRQQMKDAAVSALAALCSEYYMKEPGEADPAIQEELITQYLAELRNPEEMTRCGFSLALGALPGFLLKGRLQ

SEQ ID NO: 93399 - protein, 504 aa, Homo sapiens
  Payload ID: 18648
  Gene Name: tubulin folding cofactor D
  ENSP ID: ENSP00000487631
DAAVSALAALCSEYYMKEPGEADPAIQEELITQYLAELRNPEEMTRCGFSLALGALPGFLLKGRLQQVLTGLRAVTHTSPEDVSFAESRRDGLKAIARICQTVGVKAGAPDEAVCGENVSQIYCALLGCMDDYTTDSRGDVGTWVRKAAMTSLMDLTLLLARSQPELIEAHTCERIMCCVAQQASEKIDRFRAHAASVFLTLLHFDSPPIPHVPHRGELEKLFPRSDVASVNWSAPSQAFPRITQLLGLPTYRYHVLLGLVVSLGGLTESTIRHSTQSLFEYMKGIQSDPQALGSFSGTLLQIFEDNLLNERVSVPLLKTLDHVLTHGCFDIFTTEEDHPFAVKLLALCKKEIKNSKDIQKLLSGIAVDFPSATLACVGTVQMCAHTHLRLGAPGPHCAHGSALPRFCGMVQFPGDVRRQALLQLCLLLCHRFPLIRKTTASQVYETLLTYSDVVGADVLDEVVTVLSDTAWDAELAVVREQRNRLCDLLGVPRPQLVPQPGAC

SEQ ID NO: 93400 - protein, 92 aa, Homo sapiens
  Payload ID: 18648
  Gene Name: tubulin folding cofactor D
  ENSP ID: ENSP00000487671
DAAVSALAALCSEYYMKEPGEADPAIQEELITQYLAELRNPEEMTRCGFSLALGALPGFLLKGRLQQVLTGLRAVTHTSPEDVSFAESRRDG

SEQ ID NO: 93401 - protein, 466 aa, Homo sapiens
  Payload ID: 18648
  Gene Name: tubulin folding cofactor D
  ENSP ID: ENSP00000487976
DAAVSALAALCSEYYMKEPGEADPAIQEELITQYLAELRNPEEMTRCGFSLALGALPGFLLKGRLQQVLTGLRAVTHTSPEDVSFAESRRDGLKAIARICQTVGVKAGAPDEAVCGENVSQIYCALLGCMDDYTTDSRGDVGTWVRKAAMTSLMDLTLLLARSQPELIEAHTCERIMCCVAQQASEKIDRFRAHAASVFLTLLHFDSPPIPHVPHRGELEKLFPRSDVASVNWSAPSQAFPRITQLLGLPTYRYHVLLGLVVSLGGLTESTIRHSTQSLFEYMKGIQSDPQALGSFSGTLLQIFEDNLLNERVSVPLLKTLDHVLTHGCFDIFTTEEDHPFAVKLLALCKKEIKNSKDIQKLLSGIAVFCGMVQFPGDVRRQALLQLCLLLCHRFPLIRKTTASQVYETLLTYSDVVGADVLDEVVTVLSDTAWDAELAVVREQRNRLCDLLGVPRPQLVPQPGAC

SEQ ID NO: 93402 - protein, 68 aa, Homo sapiens; identical to SEQ ID NO: 93393
  Payload ID: 18648
  Gene Name: tubulin folding cofactor D
  ENSP ID: ENSP00000488013
  MOD_RES (1)..(1): Any amino acid

SEQ ID NO: 93403 - protein, 260 aa, Homo sapiens
  Payload ID: 18648
  Gene Name: tubulin folding cofactor D
  ENSP ID: ENSP00000488546
AQQASEKIDRFRAHAASVFLTLLHFDSPPIPHVPHRGELEKLFPRSDVASVNWSAPSQAFPRITQLLGLPTYRYHVLLGLVVSLGGLTESTIRHSTQSLFEYMKGIQSDPQALGSFSGTLLQIFEDNLLNESHPFAVKLLALCKKEIKNSKDIQKLLSGIAVFCGMVQFPGDVRRQALLQLCLLLCHRFPLIRKTTASQVYETLLTYSDVVGADVLDEVVTVLSDTAWDAELAVVREQRNRLCDLLGVPRPQLVPQPGAC

SEQ ID NO: 93404 - protein, 66 aa, Homo sapiens
  Payload ID: 18648
  Gene Name: tubulin folding cofactor D
  ENSP ID: ENSP00000488631
DAAVSALAALCSEYYMKEPGEADPAIQEELITQYLAELRNPEEMTRCGFSLALGALPGFLLKGRLQ

SEQ ID NO: 93405 - protein, 80 aa, Homo sapiens
  Payload ID: 18648
  Gene Name: tubulin folding cofactor D
  ENSP ID: ENSP00000488836
DAAVSALAALCSEYYMKEPGEADPAIQEELITQYLAELRNPEEMTRCGFSLALGALPGFLLKGRLQQVLTGLRAVTHTSP

SEQ ID NO: 93406 - protein, 527 aa, Homo sapiens
  Payload ID: 18649
  Gene Name: tubulin folding cofactor E
  Uniprot ID: Q15813
  ENSP ID: ENSP00000355560
MSDTLTADVIGRRVEVNGEHATVRFAGVVPPVAGPWLGVEWDNPERGKHDGSHEGTVYFKCRHPTGGSFIRPNKVNFGTDFLTAIKNRYVLEDGPEEDRKEQIVTIGNKPVETIGFDSIMKQQSQLSKLQEVSLRNCAVSCAGEKGGVAEACPNIRKVDLSKNLLSSWDEVIHIADQLRHLEVLNVSENKLKFPSGSVLTGTLSVLKVLVLNQTGITWAEVLRCVAGCPGLEELYLESNNIFISERPTDVLQTVKLLDLSSNQLIDENQLYLIAHLPRLEQLILSDTGISSLHFPDAGIGCKTSMFPSLKYLVVNDNQISQWSFFNELEKLPSLRALSCLRNPLTKEDKEAETARLLIIASIGQLKTLNKCEILPEERRRAELDYRKAFGNEWKQAGGHKDPEKNRLSEEFLTAHPRYQFLCLKYGAPEDWELKTQQPLMLKNQLLTLKIKYPHQLDQKVLEKQLPGSMTIQKVKGLLSRLLKVPVSDLLLSYESPKKPGREIELENDLKSLQFYSVENGDCLLVRW

SEQ ID NO: 93407 - protein, 527 aa, Homo sapiens; identical to SEQ ID NO: 93406
  Payload ID: 18649
  Gene Name: tubulin folding cofactor E
  Uniprot ID: Q15813
  ENSP ID: ENSP00000384571

SEQ ID NO: 93408 - protein, 578 aa, Homo sapiens
  Payload ID: 18649
  Gene Name: tubulin folding cofactor E
  Uniprot ID: Q15813
  ENSP ID: ENSP00000439170
MSDTLTADVIGRRVEVNGEHATVRFAGVVPPVAGPWLGVEWDNPERGKHDGSHEGTVYFKCRHPTGGSFIRPNKVNFGTDFLTAIKNRYVLEDGPEEDRKEQIVTIGNKPVETIGFDSIMKQQSQLSKLQEVSLRNCAVSCAGEKGGVAEACPNIRKVDLSKNLLSSWDEVIHIADQLRHLEVLNVSENKLKFPSGSVLTGTLSVLKVLVLNQTGITWAEAHAQCGGSRHGLDMQKDASKFVDLCVLQKCSTSNCIISAKDHTSMRMNVAKVLRCVAGCPGLEELYLESNNIFISERPTDVLQTVKLLDLSSNQLIDENQLYLIAHLPRLEQLILSDTGISSLHFPDAGIGCKTSMFPSLKYLVVNDNQISQWSFFNELEKLPSLRALSCLRNPLTKEDKEAETARLLIIASIGQLKTLNKCEILPEERRRAELDYRKAFGNEWKQAGGHKDPEKNRLSEEFLTAHPRYQFLCLKYGAPEDWELKTQQPLMLKNQLLTLKIKYPHQLDQKVLEKQLPGSMTIQKVKGLLSRLLKVPVSDLLLSYESPKKPGREIELENDLKSLQFYSVENGDCLLVRW

SEQ ID NO: 93409 - protein, 527 aa, Homo sapiens; identical to SEQ ID NO: 93406
  Payload ID: 18649
  Gene Name: Tubulin folding cofactor E
  ENSP ID: ENSP00000488933

SEQ ID NO: 93410 - protein, 527 aa, Homo sapiens; identical to SEQ ID NO: 93406
  Payload ID: 18649
  Gene Name: Tubulin folding cofactor E
  ENSP ID: ENSP00000489110

SEQ ID NO: 93411 - protein, 578 aa, Homo sapiens; identical to SEQ ID NO: 93408
  Payload ID: 18649
  Gene Name: Tubulin folding cofactor E
  ENSP ID: ENSP00000489157

SEQ ID NO: 93412 - protein, 118 aa, Homo sapiens
  Payload ID: 18650
  Gene Name: tubulin folding cofactor E-like
  ENSP ID: ENSP00000284259
MDQPSGRSFMQVLCEKYSPENFPYRRGPGMGVHVPATPQGSPMKDRLNLPSVLVLNSCGITCAGDEKEIAAFCAHVSELDLSDNKLEDWHEKEHVLGPSLGFANLSSTTAKLLGRRST

SEQ ID NO: 93413 - protein, 424 aa, Homo sapiens
  Payload ID: 18650
  Gene Name: tubulin folding cofactor E-like
  Uniprot ID: Q5QJ74
  ENSP ID: ENSP00000403925
MDQPSGRSFMQVLCEKYSPENFPYRRGPGMGVHVPATPQGSPMKDRLNLPSVLVLNSCGITCAGDEKEIAAFCAHVSELDLSDNKLEDWHEVSKIVSNVPQLEFLNLSSNPLNLSVLERTCAGSFSGVRKLVLNNSKASWETVHMILQELPDLEELFLCLNDYETVSCPSICCHSLKLLHITDNNLQDWTEIRKLGVMFPSLDTLVLANNHLNAIEEPDDSLARLFPNLRSISLHKSGLQSWEDIDKLNSFPKLEEVRLLGIPLLQPYTTEERRKLVIARLPSVSKLNGSVVTDGEREDSERFFIRYYVDVPQEEVPFRYHELITKYGKLEPLAEVDLRPQSSAKVEVHFNDQVEEMSIRLDQTVAELKKQLKTLVQLPTSNMLLYYFDHEAPFGPEEMKYSSRALHSFGIRDGDKIYVESKTK

SEQ ID NO: 93414 - protein, 118 aa, Homo sapiens; identical to SEQ ID NO: 93412
  Payload ID: 18650
  Gene Name: tubulin folding cofactor E-like
  ENSP ID: ENSP00000431156

SEQ ID NO: 93415 - protein, 83 aa, Homo sapiens
  Payload ID: 18650
  Gene Name: tubulin folding cofactor E-like
  ENSP ID: ENSP00000431803
MDQPSGRSFMQVLCEKYSPENFPYRRGPGMGVHVPATPQGSPMKDRLNLPSVLVLNSCGITCAGDEKEIAAFCAHVSELDLSD

SEQ ID NO: 93416 - protein, 238 aa, Homo sapiens
  Payload ID: 18650
  Gene Name: tubulin folding cofactor E-like
  ENSP ID: ENSP00000432783
MDQPSGRSFMQVLCEKYSPENFPYRRGPGMGVHVPATPQGSPMKDRLNLPSVLVLNSCGITCAGDEKEIAAFCAHVSELDLSDNKLEDWHEVSKIVSNVPQLEFLNLSSNPLNLSVLERTCAGSFSGVRKLVLNNSKASWETVHMILQELPDLEELFLCLNDYETVSCPSICCHSLKLLHITDNNLQDWTEIRKLGVMFPSLDTLVLANNHLNAIEEPDDSLARLFPNLRSISLHKSG

SEQ ID NO: 93417 - protein, 101 aa, Homo sapiens
  Payload ID: 18650
  Gene Name: tubulin folding cofactor E-like
  ENSP ID: ENSP00000433365
MDQPSGRSFMQVLCEKYSPENFPYRRGPGMGVHVPATPQGSPMKDRLNLPSVLVLNSCGITCAGDEKEIAAFCAHVSELDLSDNKLEDWHEVCSPGKTLIN

SEQ ID NO: 93418 - protein, 109 aa, Homo sapiens
  Payload ID: 18650
  Gene Name: tubulin folding cofactor E-like
  ENSP ID: ENSP00000436419
MGKKGLQSWEDIDKLNSFPKLEEVRLLGIPLLQPYTTEERRKLVIARLPSVSKLNGSVVTDGEREDSERFFIRYYVDVPQEEVPFRYHELITKYGKLEPLAEVDLRPQS

SEQ ID NO: 93419 - protein, 424 aa, Homo sapiens; identical to SEQ ID NO: 93413
  Payload ID: 18650
  Gene Name: tubulin folding cofactor E-like
  Uniprot ID: Q5QJ74
  ENSP ID: ENSP00000437184

SEQ ID NO: 93420 - protein, 290 aa, Homo sapiens
  Payload ID: 18651
  Gene Name: tubulin polyglutamylase complex subunit 1
  Uniprot ID: Q6ZTW0
  ENSP ID: ENSP00000352265
MAAVEKRRQAVPPPAGFTDSGRQSVSRAAGAAESEEDFLRQVGVTEMLRAALLKVLEARPEEPIAFLAHYFENMGLRSPVNGGAGEPPGQLLLQQQRLGRALWHLRLAHHSQRAAFNNNVSVAYECLSAGGRRKRPGLDGRTYSELLRRICRDGQAPEEVVAPLLRKVQCRDHEAVPLSVFRAGTLTCFVLLEFVARAGALFQLLEDSAAAVADRRVGQAVLDTLEGALQASDAAAPARFLEAGSRLGPDSLALALDRAVGGRRPSAPMTREEFLERAAALFIAKVKPVG

SEQ ID NO: 93421 - protein, 300 aa, Homo sapiens
  Payload ID: 18652
  Gene Name: tubulin polyglutamylase complex subunit 2
  Uniprot ID: Q68CL5
  ENSP ID: ENSP00000335144
MEEEASSPGLGCSKPHLEKLTLGITRILESSPGVTEVTIIEKPPAERHMISSWEQKNNCVMPEDVKNFYLMTNGFHMTWSVKLDEHIIPLGSMAINSISKLTQLTQSSMYSLPNAPTLADLEDDTHEASDDQPEKPHFDSRSVIFELDSCNGSGKVCLVYKSGKPALAEDTEIWFLDRALYWHFLTDTFTAYYRLLITHLGLPQWQYAFTSYGISPQAKQWFSMYKPITYNTNLLTEETDSFVNKLDPSKVFKSKNKIVIPKKKGPVQPAGGQKGPSGPSGPSTSSTSKSSSGSGNPTRK

SEQ ID NO: 93422 - protein, 257 aa, Homo sapiens
  Payload ID: 18652
  Gene Name: tubulin polyglutamylase complex subunit 2
  Uniprot ID: Q68CL5
  ENSP ID: ENSP00000372530
MEEEASSPGLGCSKPHLEKLTLGITRILESSPGVTEVTIIEKPPAERHMISSWEQKNNCVMPEDVKNFYLMTNGFHMTWSVKLDASDDQPEKPHFDSRSVIFELDSCNGSGKVCLVYKSGKPALAEDTEIWFLDRALYWHFLTDTFTAYYRLLITHLGLPQWQYAFTSYGISPQAKQWFSMYKPITYNTNLLTEETDSFVNKLDPSKVFKSKNKIVIPKKKGPVQPAGGQKGPSGPSGPSTSSTSKSSSGSGNPTRK

SEQ ID NO: 93423 - protein, 304 aa, Homo sapiens
  Payload ID: 18652
  Gene Name: tubulin polyglutamylase complex subunit 2
  Uniprot ID: Q68CL5
  ENSP ID: ENSP00000464780
MEEEASSPGLGCSKPHLEKLTLGITRILESSPGVTEVTIIEKPPAERHMISSWEQKNNCVMPEDVKNFYLMTNGFHMTWSVKLDEHIIPLGSMAINSISKLTQLTQSSMYSLPNAPTLADLEDDTHEASDDQPEKPHFDSRSVIFELDSCNGSGKVCLVYKSGKPALAEDTEIWFLDRALYWHFLTDTFTAYYRLLITHLGLPQWQYAFTSYGISPQAKITYNIKMNRRKCVHWKLAVEPLQWELRSCVSAGMGTGHKQRVSSMKPRSCSVCSRRQSNSMGTTVSQSFLSYGKNVLFFTVRCCF

SEQ ID NO: 93424 - protein, 43 aa, Homo sapiens
  Payload ID: 18652
  Gene Name: tubulin polyglutamylase complex subunit 2
  ENSP ID: ENSP00000465090
MEEEASSPGLGCSKPHLEKLTLGITRILEKPPAERHMISSWEQ

SEQ ID NO: 93425 - protein, 75 aa, Homo sapiens
  Payload ID: 18652
  Gene Name: tubulin polyglutamylase complex subunit 2
  ENSP ID: ENSP00000465449
MEEEASSPGLGCSKPHLEKLTLGITRILESSPGVTEVTIIEKPPAERHMISSWEQMKKQRLKEFKEFGRHSGSCL

SEQ ID NO: 93426 - protein, 248 aa, Homo sapiens
  Payload ID: 18652
  Gene Name: tubulin polyglutamylase complex subunit 2
  ENSP ID: ENSP00000465551
MEEEASSPGLGCSKPHLEKLTLGITRILESSPGVTEVTIIEKPPAERHMISSWEQKNNCVMPEDVKNFYLMTNGFHMTWSVKLDEHIIPLGSMAINSISKLTQLTQSSMYSLPNAPTLADLEDDTHEASDDQPEKPHFDSRSVIFELDSCNGSGKVCLVYKSGKPALAEDTEIWFLDRALYWHFLTDTFTAYYRLLITHLGLPQWQYAFTSYGISPQAKALLGLFDGSSPPVDLNNPRGRTGIRSRRF

SEQ ID NO: 93427 - protein, 49 aa, Homo sapiens
  Payload ID: 18652
  Gene Name: tubulin polyglutamylase complex subunit 2
  ENSP ID: ENSP00000465987
MEEEASSPGLGCSKPHLEKLTLGITRILGQGTHRPTPNSRSWRNRLTSQ

SEQ ID NO: 93428 - protein, 119 aa, Homo sapiens
  Payload ID: 18652
  Gene Name: tubulin polyglutamylase complex subunit 2
  ENSP ID: ENSP00000466788
MEEEASSPGLGCSKPHLEKLTLGITRILESSPGVTEVTIIEKPPAERHMISSWEQKNNCVMPEDVKNFYLMTNGFHMTWSVKLDVFSANKENMELPSLYLHPNHRRLEPSKKTAKFSSL

SEQ ID NO: 93429 - protein, 227 aa, Homo sapiens
  Payload ID: 18652
  Gene Name: tubulin polyglutamylase complex subunit 2
  Uniprot ID: Q68CL5
  ENSP ID: ENSP00000466973
MEEEASSPGLGCSKPHLEKLTLGITRILESSPGVTEVTIIEKPPAERHMISSWEQKNNCVMPEDVKNFYLMTNGFHMTWSVKLDEHIIPLGSMAINSISKLTQLTQSSMYSLPNAPTLADLEDDTHEASDDQPEKPHFDSRSVIFELDSCNGSGKVCLVYKSGKPALAEDTEIWFLDRALYWHFLTDTFTAYYRLLITHLGLPQWQYAFTSYGISPQAKVREEHLPL

SEQ ID NO: 93430 - protein, 30 aa, Homo sapiens
  Payload ID: 18652
  Gene Name: tubulin polyglutamylase complex subunit 2
  ENSP ID: ENSP00000467163
MEEEASSPGLGCSKPHLEKLTLGITRILGL

SEQ ID NO: 93431 - protein, 208 aa, Homo sapiens
  Payload ID: 18652
  Gene Name: tubulin polyglutamylase complex subunit 2
  ENSP ID: ENSP00000467204
  MOD_RES (1)..(1): Any amino acid
XKPHLEKLTLGITRILESSPGVTEVTIIEKPPAERHMISSWEQKNNCVMPEDVKNFYLMTNGFHMTWSVKLDEHIIPLGSMAINSISKLTQLTQSSMYSLPNAPTLADLEDDTHEASDDQPEKPHFDSRSVIFELDSCNGSGKVCLVYKSGKPALAEDTEIWFLDRALYWHFLTDTFTAYYRLLITHLGLPQWQYAFTSYGISPQAKV

SEQ ID NO: 93432 - protein, 265 aa, Homo sapiens
  Payload ID: 18652
  Gene Name: tubulin polyglutamylase complex subunit 2
  Uniprot ID: Q68CL5
  ENSP ID: ENSP00000467392
MEEEASSPGLGCSKPHLEKLTLGITRILESSPGVTEVTIIEKPPAERHMISSWEQKNNCVMPEDVKNFYLMTNGFHMTWSVKLDDLEDDTHEASDDQPEKPHFDSRSVIFELDSCNGSGKVCLVYKSGKPALAEDTEIWFLDRALYWHFLTDTFTAYYRLLITHLGLPQWQYAFTSYGISPQAKQWFSMYKPITYNTNLLTEETDSFVNKLDPSKVFKSKNKIVIPKKKGPVQPAGGQKGPSGPSGPSTSSTSKSSSGSGNPTRK

SEQ ID NO: 93433 - protein, 30 aa, Homo sapiens; identical to SEQ ID NO: 93430
  Payload ID: 18652
  Gene Name: tubulin polyglutamylase complex subunit 2
  ENSP ID: ENSP00000467995

SEQ ID NO: 93434 - protein, 188 aa, Homo sapiens
  Payload ID: 18652
  Gene Name: tubulin polyglutamylase complex subunit 2
  ENSP ID: ENSP00000468292
  MOD_RES (1)..(1): Any amino acid
XAERHMISSWEQKNNCVMPEDVKNFYLMTNGFHMTWSVKLDEHIIPLGSMAINSISKLTQLTQSSMYSLPNAPTLADLEDDTHEASDDQPEKPHFDSRSVIFELDSCNGSGKVCLVYKSGKPALAEDTEIWFLDRALYWHFLTDTFTAYYRLLITHLGLPQWQYAFTSYGISPQAKAWGLATSKESAA

SEQ ID NO: 93435 - protein, 232 aa, Homo sapiens
  Payload ID: 18652
  Gene Name: tubulin polyglutamylase complex subunit 2
  ENSP ID: ENSP00000478553
MEEEASSPGLGCSKPHLEKLTLGITRILESSPGVTEVTIIEKPPAERHMISSWEQKNNCVMPEDVKNFYLMTNGFHMTWSVKLDEHIIPLGSMAINSISKLTQLTQSSMYSLPNAPTLADLEDDTHEASDDQPEKPHFDSRSVIFELDSCNGSGKVCLVYKSGKPALAEDTEIWFLDRALYWHFLTDTFTAYYRLLITHLGLPQWQYAFTSYGISPQAKPKGSEGRSKRGCF

SEQ ID NO: 93436 - protein, 83 aa, Homo sapiens
  Payload ID: 18652
  Gene Name: tubulin polyglutamylase complex subunit 2
  ENSP ID: ENSP00000479065
  MOD_RES (1)..(1): Any amino acid
XFELDSCNGSGKVCLVYKSGKPALAEDTEIWFLDRALYWHFLTDTFTAYYRLLITHLGLPQWQYAFTSYGISPQAKVIKHNRL

SEQ ID NO: 93437 - protein, 162 aa, Homo sapiens
  Payload ID: 18652
  Gene Name: tubulin polyglutamylase complex subunit 2
  ENSP ID: ENSP00000482262
KNNCVMPEDVKNFYLMTNGFHMTWSVKLDASDDQPEKPHFDSRSVIFELDSCNGSGKVCLVYKSGKPALAEDTEIWFLDRALYWHFLTDTFTAYYRLLITHLGLPQWQYAFTSYGISPQAKQWFSMYKPITYNTNLLTEETDSFVNKLDPSKVFKSKNKIVI

SEQ ID NO: 93438 - protein, 59 aa, Homo sapiens
  Payload ID: 18652
  Gene Name: tubulin polyglutamylase complex subunit 2
  ENSP ID: ENSP00000483592
  MOD_RES (1)..(1): Any amino acid
XFLDRALYWHFLTDTFTAYYRLLITHLGLPQWQYAFTSYGISPQAKPKGSEGRSKRGCF

SEQ ID NO: 93439 - protein, 130 aa, Homo sapiens
  Payload ID: 18652
  Gene Name: tubulin polyglutamylase complex subunit 2
  ENSP ID: ENSP00000484407
MEEEASSPGLGCSKPHLEKLTLGITRILESSPGVTEVTIIEKPPAERHMISSWEQKNNCVMPEDVKNFYLMTNGFHMTWSVKLDEHIIPLGSMAINSISKLTQLTQSSMYSLPNAPTLADLEDDTHEDNL

SEQ ID NO: 93440 - protein, 219 aa, Homo sapiens
  Payload ID: 18653
  Gene Name: tubulin polymerization promoting protein
  Uniprot ID: O94811
  ENSP ID: ENSP00000353785
MADKAKPAKAANRTPPKSPGDPSKDRAAKRLSLESEGAGEGAAASPELSALEEAFRRFAVHGDARATGREMHGKNWSKLCKDCQVIDGRNVTVTDVDIVFSKIKGKSCRTITFEQFQEALEELAKKRFKDKSSEEAVREVHRLIEGKAPIISGVTKAISSPTVSRLTDTTKFTGSHKERFDPSGKGKGKAGRVDLVDESGYVSGYKHAGTYDQKVQGGK

SEQ ID NO: 93441 - protein, 170 aa, Homo sapiens
  Payload ID: 18654
  Gene Name: tubulin polymerization-promoting protein family member 2
  Uniprot ID: P59282
  ENSP ID: ENSP00000317595
MASEAEKTFHRFAAFGESSSSGTEMNNKNFSKLCKDCGIMDGKTVTSTDVDIVFSKVKAKNARTITFQQFKEAVKELGQKRFKGKSPDEVLENIYGLMEGKDPATTGATKATTVGAVDRLTDTSKYTGTHKERFDESGKGKGIAGREEMTDNTGYVSGYKGSGTYDKKTK

SEQ ID NO: 93442 - protein, 119 aa, Homo sapiens
  Payload ID: 18654
  Gene Name: tubulin polymerization-promoting protein family member 2
  ENSP ID: ENSP00000421438
EKTFHRFAAFGESSSSGTEMNNKNFSKLCKDCGIMDGKTVTSTDVDIVFSKVKAKNARTITFQQFKEAVKELGQKRFKGKSPDEVLENIYGLMEGKDPATTGATLLPRTGWKNIFGVKR

SEQ ID NO: 93443 - protein, 137 aa, Homo sapiens
  Payload ID: 18654
  Gene Name: tubulin polymerization-promoting protein family member 2
  ENSP ID: ENSP00000423171
MASEAEKTFHRFAAFGESSSSGTEMNNKNFSKLCKDCGIMDGKTVTSTDVDIVFSKVKAKNARTITFQQFKEAVKELGQKRFKGKSPDEVLENIYGLMEGKDPATTGATWMLSSRLDSTHTPTPVRLNSNISLIQLQ

SEQ ID NO: 93444 - protein, 137 aa, Homo sapiens
  Payload ID: 18654
  Gene Name: tubulin polymerization-promoting protein family member 2
  ENSP ID: ENSP00000427504
MASEAEKTFHRFAAFGESSSSGTEMNNKNFSKLCKDCGIMDGKTVTSTDVDIVFSKVKAKNARTITFQQFKEAVKELGQKRFKGKSPDEVLENIYGLMEGKDPATTGATVSDSLHPLDPTSLNPHCSSLPSLTLPTV

SEQ ID NO: 93445 - protein, 170 aa, Homo sapiens; identical to SEQ ID NO: 93441
  Payload ID: 18654
  Gene Name: tubulin polymerization-promoting protein family member 2
  Uniprot ID: P59282
  ENSP ID: ENSP00000435356

SEQ ID NO: 93446 - protein, 110 aa, Homo sapiens
  Payload ID: 18654
  Gene Name: tubulin polymerization-promoting protein family member 2
  ENSP ID: ENSP00000436874
  MOD_RES (1)..(1): Any amino acid
XHRFAAFGESSSSGTEMNNKNFSKLCKDCGIMDGKTVTSTDVDIVFSKVKAKNARTITFQQFKEAVKELGQKRFKGKSPDEVLENIYGLMEGKDPATTGATFPWLPMQET

SEQ ID NO: 93447 - protein, 63 aa, Homo sapiens
  Payload ID: 18654
  Gene Name: tubulin polymerization-promoting protein family member 2
  ENSP ID: ENSP00000451899
  MOD_RES (1)..(1): Any amino acid
XRTITFQQFKEAVKELGQKRFKGKSPDEVLENIYGLMEGKDPATTGATLLPRTGWKNIFGVKR

SEQ ID NO: 93448 - protein, 176 aa, Homo sapiens
  Payload ID: 18655
  Gene Name: tubulin polymerization-promoting protein family member 3
  Uniprot ID: Q9BW30
  ENSP ID: ENSP00000290942
MAASTDMAGLEESFRKFAIHGDPKASGQEMNGKNWAKLCKDCKVADGKSVTGTDVDIVFSKVKGKSARVINYEEFKKALEELATKRFKGKSKEEAFDAICQLVAGKEPANVGVTKAKTGGAVDRLTDTSRYTGSHKERFDESGKGKGIAGRQDILDDSGYVSAYKNAGTYDAKVKK

SEQ ID NO: 93449 - protein, 176 aa, Homo sapiens; identical to SEQ ID NO: 93448
  Payload ID: 18655
  Gene Name: tubulin polymerization-promoting protein family member 3
  Uniprot ID: Q9BW30
  ENSP ID: ENSP00000377529

SEQ ID NO: 93450 - protein, 176 aa, Homo sapiens; identical to SEQ ID NO: 93448
  Payload ID: 18655
  Gene Name: tubulin polymerization-promoting protein family member 3
  Uniprot ID: Q9BW30
  ENSP ID: ENSP00000457275

SEQ ID NO: 93451 - protein, 176 aa, Homo sapiens; identical to SEQ ID NO: 93448
  Payload ID: 18655
  Gene Name: tubulin polymerization-promoting protein family member 3
  Uniprot ID: Q9BW30
  ENSP ID: ENSP00000462435

SEQ ID NO: 93452 - protein, 377 aa, Homo sapiens
  Payload ID: 18656
  Gene Name: tubulin tyrosine ligase
  Uniprot ID: Q8NG68
  ENSP ID: ENSP00000233336
MYTFVVRDENSSVYAEVSRLLLATGHWKRLRRDNPRFNLMLGERNRLPFGRLGHEPGLVQLVNYYRGADKLCRKASLVKLIKTSPELAESCTWFPESYVIYPTNLKTPVAPAQNGIQPPISNSRTDEREFFLASYNRKKEDGEGNVWIAKSSAGAKGEGILISSEASELLDFIDNQGQVHVIQKYLEHPLLLEPGHRKFDIRSWVLVDHQYNIYLYREGVLRTASEPYHVDNFQDKTCHLTNHCIQKEYSKNYGKYEEGNEMFFKEFNQYLTSALNITLESSILLQIKHIIRNCLLSVEPAISTKHLPYQSFQLFGFDFMVDEELKVWLIEVNGAPACAQKLYAELCQGIVDIAISSVFPPPDVEQPQTQPAAFIKL

SEQ ID NO: 93453 - protein, 423 aa, Homo sapiens
  Payload ID: 18657
  Gene Name: tubulin tyrosine ligase-like family member 1
  Uniprot ID: O95922
  ENSP ID: ENSP00000266254
MAGKVKWVTDIEKSVLINNFEKRGWVQVTENEDWNFYWMSVQTIRNVFSVEAGYRLSDDQIVNHFPNHYELTRKDLMVKNIKRYRKELEKEGSPLAEKDENGKYLYLDFVPVTYMLPADYNLFVEEFRKSPSSTWIMKPCGKAQGKGIFLINKLSQIKKWSRDSKTSSFVSQSNKEAYVISLYINNPLLIGGRKFDLRLYVLVSTYRPLRCYMYKLGFCRFCTVKYTPSTSELDNMFVHLTNVAIQKHGEDYNHIHGGKWTVSNLRLYLESTRGKEVTSKLFDEIHWIIVQSLKAVAPVMNNDKHCFECYGYDIIIDDKLKPWLIEVNASPSLTSSTANDRILKYNLINDTLNIAVPNGEIPDCKWNKSPPKEVLGNYEILYDEELAQGDGADRELRSRQGQSLGPRAGRSRDSGRAVLTTWK

SEQ ID NO: 93454 - protein, 394 aa, Homo sapiens
  Payload ID: 18657
  Gene Name: tubulin tyrosine ligase-like family member 1
  Uniprot ID: O95922
  ENSP ID: ENSP00000333734
MAGKVKWVTDIEKSVLINNFEKRGWVQVTENEDWNFYWMSVQTIRNVFSVEAGYRLSDDQIVNHFPNHYELTRKDLMVKNIKRYRKELEKEGSPLAEKDENGKYLYLDFVPVTYMLPADYNLFVEEFRKSPSSTWIMKPCGKAQGKGIFLINKLSQIKKWSRDSKTSSFVSQSNKEAYVISLYINNPLLIGGRKFDLRLYVLVSTYRPLRCYMYKLGFCRFCTVKYTPSTSELDNMFVHLTNVAIQKHGEDYNHIHGGKWTVSNLRLYLESTRGKEVTSKLFDEIHWIIVQSLKAVAVNASPSLTSSTANDRILKYNLINDTLNIAVPNGEIPDCKWNKSPPKEVLGNYEILYDEELAQGDGADRELRSRQGQSLGPRAGRSRDSGRAVLTTWK

SEQ ID NO: 93455 - protein, 59 aa, Homo sapiens
  Payload ID: 18657
  Gene Name: tubulin tyrosine ligase-like family member 1
  Uniprot ID: O95922
  ENSP ID: ENSP00000401518
MAGKVKWVTDIEKSVLINNFEKRGWVQVTENEDWNFYWLLDLPEFRYRSCLNEFPDFRV

SEQ ID NO: 93456 - protein, 59 aa, Homo sapiens; identical to SEQ ID NO: 93455
  Payload ID: 18657
  Gene Name: tubulin tyrosine ligase-like family member 1
  Uniprot ID: O95922
  ENSP ID: ENSP00000403332

SEQ ID NO: 93457 - protein, 404 aa, Homo sapiens
  Payload ID: 18658
  Gene Name: tubulin tyrosine ligase-like family member 10
  Uniprot ID: Q6ZVT0
  ENSP ID: ENSP00000368590
MGSSQEEGLRCQPSQPDHDADGHCGPDLEGAERASATPGPPGLLNSHRPADSDDTNAAGPSAALLEGLLLGGGKPSPHSTRPGPFFYIGGSNGATIISSYCKSKGWQRIHDSRRDDYTLKWCEVKSRDSYGSFREGEQLLYQLPNNKLLTTKIGLLSTLRGRARAMSKASKVPGGVQARLEKDAAAPALEDLPWTSPGYLRPQRVLRMEEFFPETYRLDLKHEREAFFTLFDETQIWICKPTASNQGKGIFLLRNQEEVAALQAKTRSMEDDPIHHKTPFRGPQARVVQRYIQNPLLVDGRKFDVRSYLLIACTTPYMIFFGHGYARLTLSLYDPHSSDLGGHLTNQFMQKKSPLYMLLKEHTVWSMEHLNRYISDTFWKARGLAKDWVFTTLKVRPLCPPVWE

SEQ ID NO: 93458 - protein, 673 aa, Homo sapiens
  Payload ID: 18658
  Gene Name: tubulin tyrosine ligase-like family member 10
  Uniprot ID: Q6ZVT0
  ENSP ID: ENSP00000368591
MDHSCTRFIHRRGPPTRTRAGFKRGKRPRIQQRPRARVSGTIPASRLHPAPASQPGPCPAPGHCPVGPAHERPMGSSQEEGLRCQPSQPDHDADGHCGPDLEGAERASATPGPPGLLNSHRPADSDDTNAAGPSAALLEGLLLGGGKPSPHSTRPGPFFYIGGSNGATIISSYCKSKGWQRIHDSRRDDYTLKWCEVKSRDSYGSFREGEQLLYQLPNNKLLTTKIGLLSTLRGRARAMSKASKVPGGVQARLEKDAAAPALEDLPWTSPGYLRPQRVLRMEEFFPETYRLDLKHEREAFFTLFDETQIWICKPTASNQGKGIFLLRNQEEVAALQAKTRSMEDDPIHHKTPFRGPQARVVQRYIQNPLLVDGRKFDVRSYLLIACTTPYMIFFGHGYARLTLSLYDPHSSDLGGHLTNQFMQKKSPLYMLLKEHTVWSMEHLNRYISDTFWKARGLAKDWVFTTLKKRMQQIMAHCFLAAKPKLDCKLGYFDLIGCDFLIDDNFKVWLLEMNSNPALHTNCEVLKEVIPGVVIETLDLVLETFRKSLRGQKMLPLLSQRRFVLLHNGEADPRPHLGGSCSLRRWPPLPTRQAKSSGPPMPHAPDQPGARRPAPPPLVPQRPRPPGPDLDSAHDGEPQAPGTEQSGTGNRHPAQEPSPGTAKEEREEPENARP

SEQ ID NO: 93459 - protein, 673 aa, Homo sapiens; identical to SEQ ID NO: 93458
  Payload ID: 18658
  Gene Name: tubulin tyrosine ligase-like family member 10
  Uniprot ID: Q6ZVT0
  ENSP ID: ENSP00000368592

SEQ ID NO: 93460 - protein, 45 aa, Homo sapiens
  Payload ID: 18658
  Gene Name: tubulin tyrosine ligase-like family member 10
  ENSP ID: ENSP00000464269
  MOD_RES (1)..(1): Any amino acid
XNRYISDTFWKARGLAKDWVFTTLKCLTQDRSCTSLLSEFLAVNL

SEQ ID NO: 93461 - protein, 800 aa, Homo sapiens
  Payload ID: 18659
  Gene Name: tubulin tyrosine ligase-like family member 11
  Uniprot ID: Q8NHH1
  ENSP ID: ENSP00000321346
MAAAASVTGRVTWAASPMRSLGLGRRLSLPGPRLDAVTAAVNPSLSDHGNGLGRGTRGSGCSGGSLVADWGGGAAAAAAVALALAPALSTMRRGSSESELAARWEAEAVAAAKAAAKAEAEATAETVAEQVRVDAGAAGEPECKAGEEQPKVLAPAPAQPSAAEEGNTQVLQRPPPTLPPSKPKPVQGLCPHGKPRDKGRSCKRSSGHGSGENGSQRPVTVDSSKARTSLDALKISIRQLKWKEFPFGRRLPCDIYWHGVSFHDNDIFSGQVNKFPGMTEMVRKITLSRAVRTMQNLFPEEYNFYPRSWILPDEFQLFVAQVQMVKDDDPSWKPTFIVKPDGGCQGDGIYLIKDPSDIRLAGTLQSRPAVVQEYICKPLLIDKLKFDIRLYVLLKSLDPLEIYIAKDGLSRFCTEPYQEPTPKNLHRIFMHLTNYSLNIHSGNFIHSDSASTGSKRTFSSILCRLSSKGVDIKKVWSDIISVVIKTVIALTPELKVFYQSDIPTGRPGPTCFQILGFDILLMKNLKPILLEVNANPSMRIEHEHELSPGVFENVPSLVDEEVKVAVIRDTLRLMDPLKKKRENQSQQLEKPFAGKEDALDGELTSAPDCNANPEAHLPSICLKQVFPKYAKQFNYLRLVDRMANLFIRFLGIKGTMKLGPTGFRTFIRSCKLSSSSLSMAAVDILYIDITRRWNSMTLDQRDSGMCLQAFVEAFFFLAQRKFKMLPLHEQVASLIDLCEYHLSLLDEKRLVCGRGVPSGGRPPHRGPPQEPSPSAQPAGDNPPPRTSCANKLSHPRHTLS

SEQ ID NO: 93462 - protein, 538 aa, Homo sapiens
  Payload ID: 18659
  Gene Name: tubulin tyrosine ligase-like family member 11
  Uniprot ID: Q8NHH1
  ENSP ID: ENSP00000362881
MAAAASVTGRVTWAASPMRSLGLGRRLSLPGPRLDAVTAAVNPSLSDHGNGLGRGTRGSGCSGGSLVADWGGGAAAAAAVALALAPALSTMRRGSSESELAARWEAEAVAAAKAAAKAEAEATAETVAEQVRVDAGAAGEPECKAGEEQPKVLAPAPAQPSAAEEGNTQVLQRPPPTLPPSKPKPVQGLCPHGKPRDKGRSCKRSSGHGSGENGSQRPVTVDSSKARTSLDALKISIRQLKWKEFPFGRRLPCDIYWHGVSFHDNDIFSGQVNKFPGMTEMVRKITLSRAVRTMQNLFPEEYNFYPRSWILPDEFQLFVAQVQMVKDDDPSWKPTFIVKPDGGCQGDGIYLIKDPSDIRLAGTLQSRPAVVQEYICKPLLIDKLKFDIRLYVLLKSLDPLEIYIAKDGLSRFCTEPYQEPTPKNLHRIFMHLTNYSLNIHSGNFIHSDSASTGSKRTFSSILCRLSSKGVDIKKVWSDIISVVIKTVIALTPELKVFYQSDIPTGRPGPTCFQVTIASSQPAFPALTGLKRALWLRVG

SEQ ID NO: 93463 - protein, 122 aa, Homo sapiens
  Payload ID: 18659
  Gene Name: tubulin tyrosine ligase-like family member 11
  ENSP ID: ENSP00000478392
  MOD_RES (1)..(1): Any amino acid
XSSGHGSGENGSQRPVTVDSSKARTSLDALKISIRQLKWKEFPFGRRLPCDIYWHGVSFHDNDIFSGQVNKFPGMTEMVRKITLSRAVRTMQNLFPEESTSANLSLSTSSSLIFVCMSYSSP

SEQ ID NO: 93464 - protein, 66 aa, Homo sapiens
  Payload ID: 18659
  Gene Name: tubulin tyrosine ligase-like family member 11
  ENSP ID: ENSP00000478658
  MOD_RES (1)..(1): Any amino acid
XVTVDSSKARTSLDALKISIRQLKWKEFPFGRRLPCDIYWHGVSFHDNDIFSGQVNKFPGSNGERR

SEQ ID NO: 93465 - protein, 239 aa, Homo sapiens
  Payload ID: 18659
  Gene Name: tubulin tyrosine ligase-like family member 11
  ENSP ID: ENSP00000479407
  MOD_RES (1)..(1): Any amino acid
XSDHGNGLGRGTRGSGCSGGSLVADWGGGAAAAAAVALALAPALSTMRRGSSESELAARWEAEAVAAAKAAAKAEAEATAETVAEQVRVDAGAAGEPECKAGEEQPKVLAPAPAQPSAAEEGNTQVLQRPPPTLPPSKPKPVQGLCPHGKPRDKGRSCKRSSGHGSGENGSQRPVTVDSSKARTSLDALKISIRQLKWKEFPFGRRLPCDIYWHGVSFHDNDIFSGQVNKFPGSNGERR

SEQ ID NO: 93466 - protein, 644 aa, Homo sapiens
  Payload ID: 18660
  Gene Name: tubulin tyrosine ligase-like family member 12
  Uniprot ID: Q14166
  ENSP ID: ENSP00000216129
MEAERGPERRPAERSSPGQTPEEGAQALAEFAALHGPALRASGVPERYWGRLLHKLEHEVFDAGEVFGIMQVEEVEEEEDEAAREVRKQQPNPGNELCYKVIVTRESGLQAAHPNSIFLIDHAWTCRVEHARQQLQQVPGLLHRMANLMGIEFHGELPSTEAVALVLEEMWKFNQTYQLAHGTAEEKMPVWYIMDEFGSRIQHADVPSFATAPFFYMPQQVAYTLLWPLRDLDTGEEVTRDFAYGETDPLIRKCMLLPWAPTDMLDLSSCTPEPPAEHYQAILEENKEKLPLDINPVVHPHGHIFKVYTDVQQVASSLTHPRFTLTQSEADADILFNFSHFKDYRKLSQERPGVLLNQFPCENLLTVKDCLASIARRAGGPEGPPWLPRTFNLRTELPQFVSYFQQRERWGEDNHWICKPWNLARSLDTHVTKSLHSIIRHRESTPKVVSKYIESPVLFLREDVGKVKFDIRYIVLLRSVRPLRLFVYDVFWLRFSNRAFALNDLDDYEKHFTVMNYDPDVVLKQVHCEEFIPEFEKQYPEFPWTDVQAEIFRAFTELFQVACAKPPPLGLCDYPSSRAMYAVDLMLKWDNGPDGRRVMQPQILEVNFNPDCERACRYHPTFFNDVFSTLFLDQPGGCHVTCLV

SEQ ID NO: 93467 - protein, 65 aa, Homo sapiens
  Payload ID: 18660
  Gene Name: tubulin tyrosine ligase-like family member 12
  ENSP ID: ENSP00000476297
MYAVDLMLKWDNGPDGRRVMQPQILEVNFNPDCERACRYHPTFFNDVFSTLFLDQPGGCHVTCLV

SEQ ID NO: 93468 - protein, 592 aa, Homo sapiens
  Payload ID: 18661
  Gene Name: tubulin tyrosine ligase-like family member 2
  Uniprot ID: Q9BWV7
  ENSP ID: ENSP00000239587
MRGRDLCSSTQSQALGSLRTTTPAFTLNIPSEANHTEQPPAGLGARLQEAGVSIPPRRGRPTPTLEKKKKPHLMAEDEPSGALLKPLVFRVDETTPAVVQSVLLERGWNKFDKQEQNAEDWNLYWRTSSFRMTEHNSVKPWQQLNHHPGTTKLTRKDCLAKHLKHMRRMYGTSLYQFIPLTFVMPNDYTKFVAEYFQERQMLGTKHSYWICKPAELSRGRGILIFSDFKDFIFDDMYIVQKYISNPLLIGRYKCDLRIYVCVTGFKPLTIYVYQEGLVRFATEKFDLSNLQNNYAHLTNSSINKSGASYEKIKEVIGHGCKWTLSRFFSYLRSWDVDDLLLWKKIHRMVILTILAIAPSVPFAANCFELFGFDILIDDNLKPWLLEVNYSPALTLDCSTDVLVKRKLVHDIIDLIYLNGLRNEGREASNATHGNSNIDAAKSDRGGLDAPDCLPYDSLSFTSRMYNEDDSVVEKAVSVRPEAAPASQLEGEMSGQDFHLSTREMPQSKPKLRSRHTPHKTLMPYASLFQSHSCKTKTSPCVLSDRGKAPDPQAGNFVLVFPFNEATLGASRNGLNVKRIIQELQKLMNKQHS

SEQ ID NO: 93469 - protein, 50 aa, Homo sapiens
  Payload ID: 18661
  Gene Name: tubulin tyrosine ligase-like family member 2
  ENSP ID: ENSP00000423198
MRGRDLCSSTQSQALGSMTPEIPGVESHGLTLQLDPGQMESCSGALSCKQ

SEQ ID NO: 93470 - protein, 592 aa, Homo sapiens; identical to SEQ ID NO: 93468
  Payload ID: 18661
  Gene Name: tubulin tyrosine ligase-like family member 2
  Uniprot ID: Q9BWV7
  ENSP ID: ENSP00000424130

SEQ ID NO: 93471 - protein, 520 aa, Homo sapiens
  Payload ID: 18662
  Gene Name: tubulin tyrosine ligase-like family member 3
  ENSP ID: ENSP00000312148
  MOD_RES (1)..(1): Any amino acid
XFDDLLKFDDLDGTHALMSRMVQNEIPYFIWTTRRDVLDCRFLSKDQMINHYARAGSFTTKVGLCLNLRNLPWFDEVDANSFFPRCYCLGAEDDKKAFIEDFWLTAARNVLKLVVKSEWKSYPIQAVEEEASGDKQPKKQEKNPVLVSPEFVDEALCACEEYLSNLAHMDIDKDLEAPLYLTPEGWSLFLQRYYQVVHEGAELRHLDTQVQRCEDILQQLQAVVPQIDMEGDRNIWIVKPGAKSRGRGIMCMDHLEEMLKLVNGNPVVMKDGKWVVQKYIERPLLIFGTKFDLRQWFLVTDWNPLTVWFYRDSYIRFSTQPFSLKNLDNSVHLCNNSIQKHLENSCHRHPLLPPDNMWSSQRFQAHLQEMGAPNAWSTIIVPGMKDAVIHALQTSQDTVQCRKASFELYGADFVFGEDFQPWLIEINASPTMAPSTAVTARLCAGVQADTLRVVIDRMLDRNCDTGAFELIYKQPVTTSPASTPRPSCLLPMYSDTRARSSDDSTASWWALRPCRPQARP

SEQ ID NO: 93472 - protein, 352 aa, Homo sapiens
  Payload ID: 18662
  Gene Name: tubulin tyrosine ligase-like family member 3
  Uniprot ID: Q9Y4R7
  ENSP ID: ENSP00000373338
MDIDKDLEAPLYLTPEGWSLFLQRYYQVVHEGAELRHLDTQVQRCEDILQQLQAVVPQIDMEGDRNIWIVKPGAKSRGRGIMCMDHLEEMLKLVNGNPVVMKDGKWVVQKYIERPLLIFGTKFDLRQWFLVTDWNPLTVWFYRDSYIRFSTQPFSLKNLDNSVHLCNNSIQKHLENSCHRHPLLPPDNMWSSQRFQAHLQEMGAPNAWSTIIVPGMKDAVIHALQTSQDTVQCRKASFELYGADFVFGEDFQPWLIEINASPTMAPSTAVTARLCAGVQADTLRVVIDRMLDRNCDTGAFELIYKQPVTTSPASTPRPSCLLPMYSDTRARSSDDSTASWWALRPCRPQARP

SEQ ID NO: 93473 - protein, 189 aa, Homo sapiens
  Payload ID: 18662
  Gene Name: tubulin tyrosine ligase-like family member 3
  ENSP ID: ENSP00000389904
MNRLRNAKIYVERAVKQKKIFTIQGCYPVIRCLLRRRGWVEKKMVHRSGPTLLPPQKDLDSSAMGDSDTTEDEDEDEDEEFQPSQLFDFDDLLKFDDLDGTHALMSRMVQNEIPYFIWTTRRDVLDCRFLSKDQMINHYARAGSFTTKVGLCLNLRNLPWFDEVDANSFFPRCYCLGAEDDKKAFIGKE

SEQ ID NO: 93474 - protein, 915 aa, Homo sapiens
  Payload ID: 18662
  Gene Name: tubulin tyrosine ligase-like family member 3
  ENSP ID: ENSP00000392549
MQGPDAPLLLSARELGPGRRGSASWYRQEGGAVCNWLRKPQPLEPRTSFPSARRSEFRPPRRLPWAGPASAQSEEGHAGGRCQAGSPAPARRLSGAFKTLVPGTHAQGASDTHPLGPPHTPVLDPSPQDGFPVLWRGSSKASHMNRLRNAKIYVERAVKQKKIFTIQGCYPVIRCLLRRRGWVEKKMVHRSGPTLLPPQKDLDSSAMGDSDTTEDEDEDEDEEFQPSQLFDFDDLLKFDDLDGTHALMVGLCLNLRNLPWFDEVDANSFFPRCYCLGAEDDKKAFIEDFWLTAARNVLKLVVKSEWKSYPIQAVEEEASGDKQPKKQEKNPVLVSPEFVDEALCACEEYLSNLAHMDIDKDLEAPLYLTPEGWSLFLQRYYQVVHEGAELRHLDTQVQRCEDILQQLQAVVPQIDMEGDRNIWIVKPGAKSRGRGIMCMDHLEEMLKLVNGNPVVMKDGKWVVQKYIERPLLIFGTKFDLRQWFLVTDWNPLTVWFYRDSYIRFSTQPFSLKNLDNSVHLCNNSIQKHLENSCHRHPLLPPDNMWSSQRFQAHLQEMGAPNAWSTIIVPGMKDAVIHALQTSQDTVQCRKASFELYGADFVFGEDFQPWLIEINASPTMAPSTAVTARLCAGVQADTLRVVIDRMLDRNCDTGAFELIYKQPAVEVPQYVGIRLLVEGFTIKKPMAMCHRRMGVRPAVPLLTQRGSGEARHHFPSLHTKAQLPSPHVLRHQGQVLRRQHSKLVGTKALSTTGKALRTLPTAKVFISLPPNLDFKVAPSILKPRKAPALLCLRGPQLEVPCCLCPLKSEQFLAPVGRSRPKANSRPDCDKPRAEACPMKRLSPLKPLPLVGTFQRRRGLGDMKLGKPLLRFPTALVLDPTPNKKKQVKYLGLDSIAVGGSRVDGARPCTPGSTARA

SEQ ID NO: 93475 - protein, 115 aa, Homo sapiens
  Payload ID: 18662
  Gene Name: tubulin tyrosine ligase-like family member 3
  ENSP ID: ENSP00000394481
MNRLRNAKIYVERAVKQKKIFTIQGCYPVIRCLLRRRGWVEKKMVHRSGPTLLPPQKDLDSSAMGDSDTTEDEDEDEDEEFQPSQLFDFDDLLKFDDLDGTHALMSRMVQNEIPY

SEQ ID NO: 93476 - protein, 203 aa, Homo sapiens
  Payload ID: 18662
  Gene Name: tubulin tyrosine ligase-like family member 3
  ENSP ID: ENSP00000395912
MNRLRNAKIYVERAVKQKKIFTIQGCYPVIRCLLRRRGWVEKKMVHRSGPTLLPPQKDLDSSAMGDSDTTEDEDEDEDEEFQPSQLFDFDDLLKFDDLDGTHALMSRMVQNEIPYFIWTTRRDVLDCRFLSKDQMINHYARAGSFTTKVGLCLNLRNLPWFDEVDANSFFPRCYCLGAEDDKKAFIETGFHCVSQDGLDLLTS

SEQ ID NO: 93477 - protein, 118 aa, Homo sapiens
  Payload ID: 18662
  Gene Name: tubulin tyrosine ligase-like family member 3
  ENSP ID: ENSP00000396606
  MOD_RES (1)..(1): Any amino acid
XLRNAKIYVERAVKQKKIFTIQGCYPVIRCLLRRRGWVEKKMVHRSGPTLLPPQKDLDSSAMGDSDTTEDEDEDEDEEFQPSQLFDFDDLLKFDDLDGTHALMRRGRTQAPRHSGPAL

SEQ ID NO: 93478 - protein, 619 aa, Homo sapiens
  Payload ID: 18662
  Gene Name: tubulin tyrosine ligase-like family member 3
  ENSP ID: ENSP00000398097
SRMVQNEIPYFIWTTRRDVLDCRFLSKDQMINHYARAGSFTTKVGLCLNLRNLPWFDEVDANSFFPRCYCLGAEDDKKAFIEDFWLTAARNVLKLVVKSEWKSYPIQAVEEEASGDKQPKKQEKNPVLVSPEFVDEALCACEEYLSNLAHMDIDKDLEAPLYLTPEGWSLFLQRYYQVVHEGAELRHLDTQVQRCEDILQQLQAVVPQIDMEGDRNIWIVKPGAKSRGRGIMCMDHLEEMLKLVNGNPVVMKDGKWVVQKYIERPLLIFGTKFDLRQWFLVTDWNPLTVWFYRDSYIRFSTQPFSLKNLDNSVHLCNNSIQKHLENSCHRHPLLPPDNMWSSQRFQAHLQEMGAPNAWSTIIVPGMKDAVIHALQTSQDTVQCRKASFELYGADFVFGEDFQPWLIEINASPTMAPSTAVTARLCAGVQADTLRVVIDRMLDRNCDTGAFELIYKQPAVEVPQYVGIRLLVEGFTIKKPMAMCHRRMGVRPAVPLLTQRGSGEGKDSGTPTHSRGIRKFKEVAQGCTAQKGHSWDADPARHHFPSLHTKAQLPSPHVLRHQGQVLRRQHSKLVGTKALSTTGKALRTLPTAKVFISLPPNLDFKVAPSILKPRKVGLDL

SEQ ID NO: 93479 - protein, 116 aa, Homo sapiens
  Payload ID: 18662
  Gene Name: tubulin tyrosine ligase-like family member 3
  ENSP ID: ENSP00000398996
MNRLRNAKIYVERAVKQKKIFTIQGCYPVIRCLLRRRGWVEKKMVHRSGPTLLPPQKDLDSSAMGDSDTTEDEDEDEDEEFQPSQLFDFDDLLKFDDLDGTHALMASCAWTTWRRC

SEQ ID NO: 93480 - protein, 193 aa, Homo sapiens
  Payload ID: 18662
  Gene Name: tubulin tyrosine ligase-like family member 3
  ENSP ID: ENSP00000399191
  MOD_RES (1)..(1): Any amino acid
XKFDDLDGTHALMSRMVQNEIPYFIWTTRRDVLDCRFLSKDQMINHYARAGSFTTKVGLCLNLRNLPWFDEVDANSFFPRCYCLGAEDDKKAFIGDKQPKKQEKNPVLVSPEFVDEALCACEEYLSNLAHMDIDKDLEAPLYLTPEGWSLFLQRYYQVVHEGAELRHLDTQVQRCEDILQQLQAVVPQIDMEG

SEQ ID NO: 93481 - protein, 140 aa, Homo sapiens
  Payload ID: 18662
  Gene Name: tubulin tyrosine ligase-like family member 3
  ENSP ID: ENSP00000399782
MNRLRNAKIYVERAVKQKKIFTIQGCYPVIRCLLRRRGWVEKKMVHRSGPTLLPPQKDLDSSAMGDSDTTEDEDEDEDEEFQPSQLFDFDDLLKFDDLDGTHALMSRMVQNEIPYFIWTTRRDVLDCRFLSKDQMINHYA

SEQ ID NO: 93482 - protein, 112 aa, Homo sapiens
  Payload ID: 18662
  Gene Name: tubulin tyrosine ligase-like family member 3
  ENSP ID: ENSP00000399930
MNRLRNAKIYVERAVKQKKIFTIQGCYPVIRCLLRRRGWVEKKMVHRSGPTLLPPQKDLDSSAMGDSDTTEDEDEDEDEEFQPSQLFDFDDLLKFDDLDGTHALMSRMVQNE

SEQ ID NO: 93483 - protein, 122 aa, Homo sapiens
  Payload ID: 18662
  Gene Name: tubulin tyrosine ligase-like family member 3
  ENSP ID: ENSP00000400462
MNRLRNAKIYVERAVKQKKIFTIQGCYPVIRCLLRRRGWVEKKMVHRSGPTLLPPQKDLDSSAMGDSDTTEDEDEDEDEEFQPSQLFDFDDLLKFDDLDGTHALMSRMVQNEIPYFIWTTRR

SEQ ID NO: 93484 - protein, 109 aa, Homo sapiens
  Payload ID: 18662
  Gene Name: tubulin tyrosine ligase-like family member 3
  ENSP ID: ENSP00000401686
MNRLRNAKIYVERAVKQKKIFTIQGCYPVIRCLLRRRGWVEKKMVHRSGPTLLPPQKDLDSSAMGDSDTTEDEDEDEDEEFQPSQLFDFDDLLKFDDLDGTHALMVGLC

SEQ ID NO: 93485 - protein, 148 aa, Homo sapiens
  Payload ID: 18662
  Gene Name: tubulin tyrosine ligase-like family member 3
  ENSP ID: ENSP00000402197
MNRLRNAKIYVERAVKQKKIFTIQGCYPVIRCLLRRRGWVEKKMVHRSGPTLLPPQKDLDSSAMGDSDTTEDEDEDEDEEFQPSQLFDFDDLLKFDDLDGTHALMSRMVQNEIPYFIWTTRRDVLDCRFLSKDQMINHYARAGSFTTK

SEQ ID NO: 93486 - protein, 434 aa, Homo sapiens
  Payload ID: 18662
  Gene Name: tubulin tyrosine ligase-like family member 3
  Uniprot ID: Q9Y4R7
  ENSP ID: ENSP00000403874
MDIDKDLEAPLYLTPEGWSLFLQRYYQVVHEGAELRHLDTQVQRCEDILQQLQAVVPQIDMEGDRNIWIVKPGAKSRGRGIMCMDHLEEMLKLVNGNPVVMKDGKWVVQKYIERPLLIFGTKFDLRQWFLVTDWNPLTVWFYRDSYIRFSTQPFSLKNLDNSVHLCNNSIQKHLENSCHRHPLLPPDNMWSSQRFQAHLQEMGAPNAWSTIIVPGMKDAVIHALQTSQDTVQCRKASFELYGADFVFGEDFQPWLIEINASPTMAPSTAVTARLCAGVQADTLRVVIDRMLDRNCDTGAFELIYKQPAVEVPQYVGIRLLVEGFTIKKPMAMCHRRMGVRPAVPLLTQRGSGEARHHFPSLHTKAQLPSPHVLRHQGQVLRRQHSKLVGTKALSTTGKALRTLPTAKVFISLPPNLDFKVAPSILKPRKVGLDL

SEQ ID NO: 93487 - protein, 160 aa, Homo sapiens
  Payload ID: 18662
  Gene Name: tubulin tyrosine ligase-like family member 3
  ENSP ID: ENSP00000408128
MNRLRNAKIYVERAVKQKKIFTIQGCYPVIRCLLRRRGWVEKKMVHRSGPTLLPPQKDLDSSAMGDSDTTEDEDEDEDEEFQPSQLFDFDDLLKFDDLDGTHALMVGLCLNLRNLPWFDEVDANSFFPRCYCLGAEDDKKAFIEDFWLTAARNVLKLVVK

SEQ ID NO: 93488 - protein, 352 aa, Homo sapiens; identical to SEQ ID NO: 93472
  Payload ID: 18662
  Gene Name: tubulin tyrosine ligase-like family member 3
  Uniprot ID: Q9Y4R7
  ENSP ID: ENSP00000409246

SEQ ID NO: 93489 - protein, 326 aa, Homo sapiens
  Payload ID: 18662
  Gene Name: tubulin tyrosine ligase-like family member 3
  ENSP ID: ENSP00000409632
MDIDKDLEAPLYLTPEGWSLFLQRYYQVVHEGAELRHLDTQVQRCEDILQQLQAVVPQIDMEGDRNIWIVKPGAKSRGRGIMCMDHLEEMLKLVNGNPVVMKDGKWVVQKYIERPLLIFGTKFDLRQWFLVTDWNPLTVWFYRDSYIRFSTQPFSLKNLDNSVHLCNNSIQKHLENSCHRHPLLPPDNMWSSQRFQAHLQEMGAPNAWSTIIVPGMKDAVIHALQTSQDTVQCRKASFELYGADFVFGEDFQPWLIEINASPTMAPSTAVTARLCAGVQADTLRVVIDRMLDRNCDTGAFELIYKQGPAPNMQVSPERNAPLCPAP

SEQ ID NO: 93490 - protein, 161 aa, Homo sapiens
  Payload ID: 18662
  Gene Name: tubulin tyrosine ligase-like family member 3
  ENSP ID: ENSP00000412915
MNRLRNAKIYVERAVKQKKIFTIQGCYPVIRCLLRRRGWVEKKMVHRSGPTLLPPQKDLDSSAMGDSDTTEDEDEDEDEEFQPSQLFDFDDLLKFDDLDGTHALMVDANSFFPRCYCLGAEDDKKAFIEDFWLTAARNVLKLVVKSEWKSYPIQAVEEEAS

SEQ ID NO: 93491 - protein, 151 aa, Homo sapiens
  Payload ID: 18662
  Gene Name: tubulin tyrosine ligase-like family member 3
  ENSP ID: ENSP00000414965
MNRLRNAKIYVERAVKKKIFTIQGCYPVIRCLLRRRGWVEKKMVHRSGPTLLPPQKDLDSSAMGDSDTTEDEDEDEDEEFQPSQLFDFDDLLKFDDLDGTHALMSRMVQNEIPYFIWTTRRDVLDCRFLSKDQMINHYARAGSFTTKVGLC

SEQ ID NO: 93492 - protein, 108 aa, Homo sapiens
  Payload ID: 18662
  Gene Name: tubulin tyrosine ligase-like family member 3
  ENSP ID: ENSP00000430051
MDIDKDLEAPLYLTPEGWSLFLQRYYQVVHEGAELRHLDTQVQRCEDILQQLQAVVPQIDMEGDRNIWIVKPGAKSRGRGIMCMDHLEEMLKLVNGNPVVMKDGNPSP

SEQ ID NO: 93493 - protein, 181 aa, Homo sapiens
  Payload ID: 18662
  Gene Name: tubulin tyrosine ligase-like family member 3
  ENSP ID: ENSP00000473314
  MOD_RES (1)..(1): Any amino acid
XTVQCRKASFELYGADFVFGEDFQPWLIEINASPTMAPSTAVTARLCAGVQADTLRVVIDRMLDRNCDTGAFELIYKQAPALLCLRGPQLEVPCCLCPLKSEQFLAPVGRSRPKANSRPDCDKPRAEACPMKRLSPLKPLPLVGTFQRRRGLGDMKLGKPLLRFPTALVLDPTPNKKKQVK

SEQ ID NO: 93494 - protein, 70 aa, Homo sapiens
  Payload ID: 18662
  Gene Name: tubulin tyrosine ligase-like family member 3
  ENSP ID: ENSP00000473376
  MOD_RES (1)..(1): Any amino acid
XKFDDLDGTHALMSRMVQNEIPYFIWTTRRDVLDCRFLSKDQMINHYARAGSFTTKRRGFTVLARMVSIS

SEQ ID NO: 93495 - protein, 27 aa, Homo sapiens
  Payload ID: 18662
  Gene Name: tubulin tyrosine ligase-like family member 3
  ENSP ID: ENSP00000473440
LKFDDLDGTHALMRRGFTVLARMVSIS

SEQ ID NO: 93496 - protein, 1199 aa, Homo sapiens
  Payload ID: 18663
  Gene Name: tubulin tyrosine ligase-like family member 4
  Uniprot ID: Q14679
  ENSP ID: ENSP00000258398
MASAGTQHYSIGLRQKNSFKQSGPSGTVPATPPEKPSEGRVWPQAHQQVKPIWKLEKKQVETLSAGLGPGLLGVPPQPAYFFCPSTLCSSGTTAVIAGHSSSCYLHSLPDLFNSTLLYRRSSYRQKPYQQLESFCLRSSPSEKSPFSLPQKSLPVSLTANKATSSMVFSMAQPMASSSTEPYLCLAAAGENPSGKSLASAISGKIPSPLSSSYKPMLNNNSFMWPNSTPVPLLQTTQGLKPVSPPKIQPVSWHHSGGTGDCAPQPVDHKVPKSIGTVPADASAHIALSTASSHDTSTTSVASSWYNRNNLAMRAEPLSCALDDSSDSQDPTKEIRFTEAVRKLTARGFEKMPRQGCQLEQSSFLNPSFQWNVLNRSRRWKPPAVNQQFPQEDAGSVRRVLPGASDTLGLDNTVFCTKRISIHLLASHASGLNHNPACESVIDSSAFGEGKAPGPPFPQTLGIANVATRLSSIQLGQSEKERPEEARELDSSDRDISSATDLQPDQAETEDTEEELVDGLEDCCSRDENEEEEGDSECSSLSAVSPSESVAMISRSCMEILTKPLSNHEKVVRPALIYSLFPNVPPTIYFGTRDERVEKLPWEQRKLLRWKMSTVTPNIVKQTIGRSHFKISKRNDDWLGCWGHHMKSPSFRSIREHQKLNHFPGSFQIGRKDRLWRNLSRMQSRFGKKEFSFFPQSFILPQDAKLLRKAWESSSRQKWIVKPPASARGIGIQVIHKWSQLPKRRPLLVQRYLHKPYLISGSKFDLRIYVYVTSYDPLRIYLFSDGLVRFASCKYSPSMKSLGNKFMHLTNYSVNKKNAEYQANADEMACQGHKWALKALWNYLSQKGVNSDAIWEKIKDVVVKTIISSEPYVTSLLKMYVRRPYSCHELFGFDIMLDENLKPWVLEVNISPSLHSSSPLDISIKGQMIRDLLNLAGFVLPNAEDIISSPSSCSSSTTSLPTSPGDKCRMAPEHVTAQKMKKAYYLTQKIPDQDFYASVLDVLTPDDVRILVEMEDEFSRRGQFERIFPSHISSRYLRFFEQPRYFNILTTQWEQKYHGNKLKGVDLLRSWCYKGFHMGVVSDSAPVWSLPTSLLTISKDDVILNAFSKSETSKLGKQSSCEVSLLLSEDGTTPKSKKTQAGLSPYPQKPSSSKDSEDTSKEPSLSTQTLPVIKCSGQTSRLSASSTFQSISDSLLAVSP

SEQ ID NO: 93497 - protein, 1199 aa, Homo sapiens; identical to SEQ ID NO: 93496
  Payload ID: 18663
  Gene Name: tubulin tyrosine ligase-like family member 4
  Uniprot ID: Q14679
  ENSP ID: ENSP00000375951

SEQ ID NO: 93498 - protein, 174 aa, Homo sapiens
  Payload ID: 18663
  Gene Name: tubulin tyrosine ligase-like family member 4
  ENSP ID: ENSP00000391342
MASAGTQHYSIGLRQKNSFKQSGPSGTVPATPPEKPSEGRVWPQAHQQVKPIWKLEKKQVETLSAGLGPGLLGVPPQPAYFFCPSTLCSSGTTAVIAGHSSSCYLHSLPDLFNSTLLYRRSSYRQKPYQQLESFCLRSSPSEKSPFSLPQKSLPVSLTANKATSSMVFSMAQPM

SEQ ID NO: 93499 - protein, 194 aa, Homo sapiens
  Payload ID: 18663
  Gene Name: tubulin tyrosine ligase-like family member 4
  ENSP ID: ENSP00000392103
  MOD_RES (1)..(1): Any amino acid
XRKDRLWRNLSRMQSRFGKKEFSFFPQSFILPQDAKLLRKAWESSSRQKWIVKPPASARGIGIQVIHKWSQLPKRRPLLVQRYLHKPYLISGSKFDLRIYVYVTSYDPLRIYLFSDGLVRFASCKALKALWNYLSQKGVNSDAIWEKIKDVVVKTIISSEPYVTSLLKMYVRRPYSCHELFGFDIMLDENLKPW

SEQ ID NO: 93500 - protein, 973 aa, Homo sapiens
  Payload ID: 18663
  Gene Name: tubulin tyrosine ligase-like family member 4
  ENSP ID: ENSP00000393332
MVFSMAQPMASSSTEPYLCLAAAGENPSGKSLASAISGKIPSPLSSSYKPMLNNNSFMWPNSTPVPLLQTTQGLKPVSPPKIQPVSWHHSGGTGDCAPQPVDHKVPKSIGTVPADASAHIALSTASSHDTSTTSVASSWYNRNNLAMRAEPLSCALDDSSDSQDPTKEIRFTEAVRKLTARGFEKMPRQGCQLEQSSFLNPSFQWNVLNRSRRWKPPAVNQQFPQEDAGSVRRVLPGASDTLGLDNTVFCTKRISIHLLASHASGLNHNPACESVIDSSAFGEGKAPGPPFPQTLGIANVATRLSSIQLGQSEKERPEEARELDSSDRDISSATDLQPDQAETEDTEEELVDGLEDCCSRDENEEEEGDSECSSLSAVSPSESVAMISRSCMEILTKPLSNHEKVVRPALIYSLFPNVPPTIYFGTRDERVEKLPWEQRKLLRWKMSTVTPNIVKQTIGRSHFKISKRNDDWLGCWGHHMKSPSFRSIREHQKLNHFPGSFQIGRKDRLWRNLSRMQSRFGKKEFSFFPQSFILPQDAKLLRKAWESSSRQKWIVKPPASARGIGIQVIHKWSQLPKRRPLLVQRYLHKPYLISGSKFDLRIYVYVTSYDPLRIYLFSDGLVRFASCKYSPSMKSLGNKFMHLTNYSVNKKNAEYQANADEMACQGHKWALKALWNYLSQKGVNSDAIWEKIKDVVVKTIISSEPYVTSLLKMYVRRPYSCHELFGFDIMLDENLKPWVLEVNISPSLHSSSPLDISIKGQMIRDLLNLAGFVLPNAEDIISSPSSCSSSTTSLPTSPGDKCRMAPEHVTAQKMKKAYYLTQKIPDQDFYASVLDVLTPDDVRILVEMEDEFSRRGQFERIFPSHISSRYLRFFEQPRYFNILTTQWEQKYHGNKLKGVDLLRSWCYKGFHMGVVSDSAPVWSLPTSLLTISKDDVILNAFSKSETSKLGNPVPQRTVRTPAKSPAFLPRRYL

SEQ ID NO: 93501 - protein, 1135 aa, Homo sapiens
  Payload ID: 18663
  Gene Name: tubulin tyrosine ligase-like family member 4
  ENSP ID: ENSP00000396555
MASAGTQHYSIGLRQKNSFKQSGPSGTVPATPPEKPSEGRVWPQAHQQVKPIWKLEKKQVETLSAGLGPGLLGVPPQPAYFFCPSTLCSSGTTAVIAGHSSSCYLHSLPDLFNSTLLYRRSSYRQKPYQQLESFCLRSSPSEKSPFSLPQKSLPVSLTANKATSSMVFSMAQPMASSSTEPYLCLAAAGENPSGKSLASAISGKIPSPLSSSYKPMLNNNSFMWPNSTPVPLLQTTQGLKPVSPPKIQPVSWHHSGGTGDCAPQPVDHKVPKSIGTVPADASAHIALSTASSHDTSTTSVASSWYNRNNLAMRAEPLSCALDDSSDSQDPTKEIRFTEAVRKLTARGFEKMPRQGCQLEQSSFLNPSFQWNVLNRSRRWKPPAVNQQFPQEDAGSVRRVLPGASDTLGLDNTVFCTKRISIHLLASHASGLNHNPACESVIDSSAFGEGKAPGPPFPQTLGIANVATRLSSIQLGQSEKERPEEARELDSSDRDISSATDLQPDQAETEDTEEELVDGLEDCCSRDENEEEEGDSECSSLSAVSPSESVAMISRSCMEILTKPLSNHEKVVRPALIYSLFPNVPPTIYFGTRDERVEKLPWEQRKLLRWKMSTVTPNIVKQTIGRSHFKISKRNDDWLGCWGHHMKSPSFRSIREHQKPASARGIGIQVIHKWSQLPKRRPLLVQRYLHKPYLISGSKFDLRIYVYVTSYDPLRIYLFSDGLVRFASCKYSPSMKSLGNKFMHLTNYSVNKKNAEYQANADEMACQGHKWALKALWNYLSQKGVNSDAIWEKIKDVVVKTIISSEPYVTSLLKMYVRRPYSCHELFGFDIMLDENLKPWVLEVNISPSLHSSSPLDISIKGQMIRDLLNLAGFVLPNAEDIISSPSSCSSSTTSLPTSPGDKCRMAPEHVTAQKMKKAYYLTQKIPDQDFYASVLDVLTPDDVRILVEMEDEFSRRGQFERIFPSHISSRYLRFFEQPRYFNILTTQWEQKYHGNKLKGVDLLRSWCYKGFHMGVVSDSAPVWSLPTSLLTISKDDVILNAFSKSETSKLGKQSSCEVSLLLSEDGTTPKSKKTQAGLSPYPQKPSSSKDSEDTSKEPSLSTQTLPVIKCSGQTSRLSASSTFQSISDSLLAVSP

SEQ ID NO: 93502 - protein, 162 aa, Homo sapiens
  Payload ID: 18663
  Gene Name: tubulin tyrosine ligase-like family member 4
  ENSP ID: ENSP00000400068
  MOD_RES (1)..(1): Any amino acid
XAQKMKKAYYLTQKIPDQDFYASVLDVLTPDDVRILVEMEDEFSRRGQFERIFPSHISSRYLRFFEQPRYFNILTTQWEQKYHGNKLKDLLRSWCYKGFHMGVVSDSAPVWSLPTSLLTISKDDVILNAFSKSETSKLGNPVPQRTVRTPAKSPAFLPRRYL

SEQ ID NO: 93503 - protein, 100 aa, Homo sapiens
  Payload ID: 18663
  Gene Name: tubulin tyrosine ligase-like family member 4
  ENSP ID: ENSP00000405485
MASAGTQHYSIGLRQKNSFKQSGPSGTVPATPPEKPSEGRVWPQAHQQVKPIWKLEKKQVETLSAGLGPGLLGVPPQPAYFFCPSTLCSSGTTAVIAGHS

SEQ ID NO: 93504 - protein, 100 aa, Homo sapiens
  Payload ID: 18663
  Gene Name: tubulin tyrosine ligase-like family member 4
  ENSP ID: ENSP00000407434
  MOD_RES (1)..(1): Any amino acid
XNDDWLGCWGHHMKSPSFRSIREHQKLNHFPGSFQIGRKDRLWRNLSRMQSRFGKKEFSFFPQSFILPQDAKLLRKAWESSSRQKWIVKPVFAFHEEPWQ

SEQ ID NO: 93505 - protein, 101 aa, Homo sapiens
  Payload ID: 18663
  Gene Name: tubulin tyrosine ligase-like family member 4
  ENSP ID: ENSP00000411228
MASAGTQHYSIGLRQKNSFKQSGPSGTVPATPPEKPSEGRVWPQAHQQVKPIWKLEKKQVETLSAGLGPGLLGVPPQPAYFFCPSTLCSSGTTAVIAGHSS

SEQ ID NO: 93506 - protein, 179 aa, Homo sapiens
  Payload ID: 18663
  Gene Name: tubulin tyrosine ligase-like family member 4
  ENSP ID: ENSP00000415197
  MOD_RES (1)..(1): Any amino acid
XEILTKPLSNHEKVVRPALIYSLFPNVPPTIYFGTRDERVEKLPWEQRKLLRWKMSTVTPNIVKQTIGRSHFKISKRNDDWLGCWGHHMKSPSFRSIREHQKLNHFPGSFQIGRKDRLWRNLSRMQSRFGKKEFSFFPQSFILPQDAKLLRKAWESSSRQKWIVKPVSTQTLPHQRQQV

SEQ ID NO: 93507 - protein, 246 aa, Homo sapiens
  Payload ID: 18663
  Gene Name: tubulin tyrosine ligase-like family member 4
  ENSP ID: ENSP00000415845
  MOD_RES (1)..(1): Any amino acid
XIKDVVVKTIISSEPYVTSLLKMYVRRPYSCHELFGFDIMLDENLKPWVLEVNISPSLHSSSPLDISIKGQMIRDLLNLAGFVLPNAEDIISSPSSCSSSTTSLPTSPGDKCRMAPEHVTAQKMKKAYYLTQKIPDQDFYASVLDVLTPDDVRILVEMEDEFSRRGVDLLRSWCYKGFHMGVVSDSAPVWSLPTSLLTISKDDVILNAFSKSETSKLGKQSSCEVSLLLSEDGTTPKSKKTQAGLS

SEQ ID NO: 93508 - protein, 269 aa, Homo sapiens
  Payload ID: 18664
  Gene Name: tubulin tyrosine ligase-like family member 5
  Uniprot ID: Q6EMB2
  ENSP ID: ENSP00000286650
MPIVMARDLEETASSSEDEEVISQEDHPCIMWTGGCRRIPVLVFHADAILTKDNNIRVIGERYHLSYKIVRTDSRLVRSILTAHGFHEVHPSSTDYNLMWTGSHLKPFLLRTLSEAQKVNHFPRSYELTRKDRLYKNIIRMQHTHGFKAFHILPQTFLLPAEYAEFCNSYSKDRGPWIVKPVASSRGRGVYLINNPNQISLEENILVSRYINNPLLIDDFKFDVRLYVLVTSYDPLVIYLYEEGLARKCNWKMGNTMDKRRLPIYVQVL

SEQ ID NO: 93509 - protein, 1281 aa, Homo sapiens
  Payload ID: 18664
  Gene Name: tubulin tyrosine ligase-like family member 5
  Uniprot ID: Q6EMB2
  ENSP ID: ENSP00000298832
MPIVMARDLEETASSSEDEEVISQEDHPCIMWTGGCRRIPVLVFHADAILTKDNNIRVIGERYHLSYKIVRTDSRLVRSILTAHGFHEVHPSSTDYNLMWTGSHLKPFLLRTLSEAQKVNHFPRSYELTRKDRLYKNIIRMQHTHGFKAFHILPQTFLLPAEYAEFCNSYSKDRGPWIVKPVASSRGRGVYLINNPNQISLEENILVSRYINNPLLIDDFKFDVRLYVLVTSYDPLVIYLYEEGLARFATVRYDQGAKNIRNQFMHLTNYSVNKKSGDYVSCDDPEVEDYGNKWSMSAMLRYLKQEGRDTTALMAHVEDLIIKTIISAELAIATACKTFVPHRSSCFELYGFDVLIDSTLKPWLLEVNLSPSLACDAPLDLKIKASMISDMFTVVGFVCQDPAQRASTRPIYPTFESSRRNPFQKPQRCRPLSASDAEMKNLVGSAREKGPGKLGGSVLGLSMEEIKVLRRVKEENDRRGGFIRIFPTSETWEIYGSYLEHKTSMNYMLATRLFQDRMTADGAPELKIESLNSKAKLHAALYERKLLSLEVRKRRRRSSRLRAMRPKYPVITQPAEMNVKTETESEEEEEVALDNEDEEQEASQEESAGFLRENQAKYTPSLTALVENTPKENSMKVREWNNKGGHCCKLETQELEPKFNLMQILQDNGNLSKMQARIAFSAYLQHVQIRLMKDSGGQTFSASWAAKEDEQMELVVRFLKRASNNLQHSLRMVLPSRRLALLERRRILAHQLGDFIIVYNKETEQMAEKKSKKKVEEEEEDGVNMENFQEFIRQASEAELEEVLTFYTQKNKSASVFLGTHSKISKNNNNYSDSGAKGDHPETIMEEVKIKPPKQQQTTEIHSDKLSRFTTSAEKEAKLVYSNSSSGPTATLQKIPNTHLSSVTTSDLSPGPCHHSSLSQIPSAIPSMPHQPTILLNTVSASASPCLHPGAQNIPSPTGLPRCRSGSHTIGPFSSFQSAAHIYSQKLSRPSSAKAGSCYLNKHHSGIAKTQKEGEDASLYSKRYNQSMVTAELQRLAEKQAARQYSPSSHINLLTQQVTNLNLATGIINRSSASAPPTLRPIISPSGPTWSTQSDPQAPENHSSSPGSRSLQTGGFAWEGEVENNVYSQATGVVPQHKYHPTAGSYQLQFALQQLEQQKLQSRQLLDQSRARHQAIFGSQTLPNSNLWTMNNGAGCRISSATASGQKPTTLPQKVVPPPSSCASLVPKPPPNHEQVLRRATSQKASKGSSAEGQLNGLQSSLNPAAFVPITSSTDPAHTKI

SEQ ID NO: 93510 - protein, 1281 aa, Homo sapiens
  Payload ID: 18664
  Gene Name: tubulin tyrosine ligase-like family member 5
  ENSP ID: ENSP00000450713
MPIVMARDLEETASSSEDEEVISQEDHPCIMWTGGCRRIPVLVFHADAILTKDNNIRVIGERYHLSYKIVRTDSRLVRSILTAHGFHEVHPSSTDYNLMWTGSHLKPFLLRTLSEAQKVNHFPRSYELTRKDRLYKNIIRMQHTHGFKAFHILPQTFLLPAEYAEFCNSYSKDRGPWIVKPVASSRGRGVYLINNPNQISLEENILVSRYINNPLLIDDFKFDVRLYVLVTSYDPLVIYLYEEGLARFATVRYDQGAKNIRNQFMHLTNYSVNKKSGDYVSCDDPEVEDYGNKWSMSAMLRYLKQEGRDTTALMAHVEDLIIKTIISAELAIATACKTFVPHRSSCFELYGFDVLIDSTLKPWLLEVNLSPSLACDAPLDLKIKASMISDMFTVVGFVCQDPAQRASTRPIYPTFESSRRNPFQKPQRPVSAQFQSSKAKQRCRPLSASDAEMKNLVGSAREKGPGKLGGSVLGLSMEEIKVLRRVKEENDRRGGFIRIFPTSETWEIYGSYLEHKTSMNYMLATRLFQDRMTADGAPELKIESLNSKAKLHAALYERKLLSLEVRKRRRRSSRLRAMRPKYPVITQPAEMNVKTETESEEEEEVALDNEDEEQEASQEESAGFLRENQAKYTPSLTALVENTPKENSMKVREWNNKGGHCCKLETQELEPKFNLMQILQDNGNLSKMQARIAFSAYLQHVQIRLMKDSGGQTFSASWAAKEDEQMELVVRFLKRASNNLQHSLRMVLPSRRLALLERRRILAHQLGDFIIVYNKETEQMAEKKSKKKVEEEEEDGVNMENFQEFIRQASEAELEEVLTFYTQKNKSASVFLGTHSKISKNNNNYSDSGAKGDHPETIMEEVKIKPPKQQQTTEIHSDKLSRFTTSAEKEAKLVYSNSSSGPTATLQKIPNTHLSSVTTSDLSPGPCHHSSLSQIPSAIPSMPHQPTILLNTVSASASPCLHPGAQNIPSPTGLPRCRSGSHTIGPFSSFQSAAHIYSQKLSRPSSAKAAGSCYLNKHHSGIAKTQKEGEDASLYSKRYNQSMVTAELQRLAEKQAARQYSPSSHINLLTQQVTNLNLATGIINRSSASAPPTLRPIISPSGPTWSTQSDPQAPENHSSSPGSRSLQTGGFAWEGEVENNVYSQATGVVPQHKYHPTAGSYQLQFALQQLEQQKLQSRQLLDQSRARHQAIFGSQTLPNSNLWTMNNGAGCRISSATASGQKPTTLPQKVVPPPSSCASLVPKPPPNHEQVLRRATSQKASNTRFRSSFQNYLWYFFQAVS

SEQ ID NO: 93511 - protein, 124 aa, Homo sapiens
  Payload ID: 18664
  Gene Name: tubulin tyrosine ligase-like family member 5
  ENSP ID: ENSP00000451917
MPIVMARDLEETASSSEDEEVISQEDHPCIMWTGGCRRIPVLVFHADAILTKDNNIRVIGERYHLSYKIVRTDSRLVRSILTAHGFHEVHPSSTDYNLMWTGSHLKPFLLRTLSEAQKVNHFPR

SEQ ID NO: 93512 - protein, 775 aa, Homo sapiens
  Payload ID: 18664
  Gene Name: tubulin tyrosine ligase-like family member 5
  ENSP ID: ENSP00000451946
MNYMLATRLFQDRGNPRRSLLTGRTRMTADGAPELKIESLNSKAKLHAALYERKLLSLEVRKRRRRSSRLRAMRPKYPVITQPAEMNVKTETESEEEEEVALDNEDEEQEASQEESAGFLRENQAKYTPSLTALVENTPKENSMKVREWNNKGGHCCKLETQELEPKFNLMQILQDNGNLSKMQARIAFSAYLQHVQIRLMKDSGGQTFSASWAAKEDEQMELVVRFLKRASNNLQHSLRMVLPSRRLALLERRRILAHQLGDFIIVYNKETEQMAEKKSKKKVEEEEEDGVNMENFQEFIRQASEAELEEVLTFYTQKNKSASVFLGTHSKISKNNNNYSDSGAKGDHPETIMEEVKIKPPKQQQTTEIHSDKLSRFTTSAEKEAKLVYSNSSSGPTATLQKIPNTHLSSVTTSDLSPGPCHHSSLSQIPSAIPSMPHQPTILLNTVSASASPCLHPGAQNIPSPTGLPRCRSGSHTIGPFSSFQSAAHIYSQKLSRPSSAKAGSCYLNKHHSGIAKTQKEGEDASLYSKRYNQSMVTAELQRLAEKQAARQYSPSSHINLLTQQVTNLNLATGIINRSSASAPPTLRPIISPSGPTWSTQSDPQAPENHSSSPGSRSLQTGGFAWEGEVENNVYSQATGVVPQHKYHPTAGSYQLQFALQQLEQQKLQSRQLLDQSRARHQAIFGSQTLPNSNLWTMNNGAGCRISSATASGQKPTTLPQKVVPPPSSCASLVPKPPPNHEQVLRRATSQKASNTRFRSSFQNYLWYFFQAVS

SEQ ID NO: 93513 - protein, 817 aa, Homo sapiens
  Payload ID: 18664
  Gene Name: tubulin tyrosine ligase-like family member 5
  Uniprot ID: Q6EMB2
  ENSP ID: ENSP00000452524
MEEIKVLRRVKEENDRRGGFIRIFPTSETWEIYGSYLEHKTSMNYMLATRLFQDRGNPRRSLLTGRTRMTADGAPELKIESLNSKAKLHAALYERKLLSLEVRKRRRRSSRLRAMRPKYPVITQPAEMNVKTETESEEEEEVALDNEDEEQEASQEESAGFLRENQAKYTPSLTALVENTPKENSMKVREWNNKGGHCCKLETQELEPKFNLMQILQDNGNLSKMQARIAFSAYLQHVQIRLMKDSGGQTFSASWAAKEDEQMELVVRFLKRASNNLQHSLRMVLPSRRLALLERRRILAHQLGDFIIVYNKETEQMAEKKSKKKVEEEEEDGVNMENFQEFIRQASEAELEEVLTFYTQKNKSASVFLGTHSKISKNNNNYSDSGAKGDHPETIMEEVKIKPPKQQQTTEIHSDKLSRFTTSAEKEAKLVYSNSSSGPTATLQKIPNTHLSSVTTSDLSPGPCHHSSLSQIPSAIPSMPHQPTILLNTVSASASPCLHPGAQNIPSPTGLPRCRSGSHTIGPFSSFQSAAHIYSQKLSRPSSAKAGSCYLNKHHSGIAKTQKEGEDASLYSKRYNQSMVTAELQRLAEKQAARQYSPSSHINLLTQQVTNLNLATGIINRSSASAPPTLRPIISPSGPTWSTQSDPQAPENHSSSPGSRSLQTGGFAWEGEVENNVYSQATGVVPQHKYHPTAGSYQLQFALQQLEQQKLQSRQLLDQSRARHQAIFGSQTLPNSNLWTMNNGAGCRISSATASGQKPTTLPQKVVPPPSSCASLVPKPPPNHEQVLRRATSQKASNTRFRSSFQNYLWYFFQAVS

SEQ ID NO: 93514 - protein, 60 aa, Homo sapiens
  Payload ID: 18664
  Gene Name: tubulin tyrosine ligase-like family member 5
  ENSP ID: ENSP00000478640
NLLTQQVTNLNLATGIINRSSASAPPTLRPIISPSGPTWSTQSDPQAPENHSSSPGSSFI

SEQ ID NO: 93515 - protein, 185 aa, Homo sapiens
  Payload ID: 18665
  Gene Name: tubulin tyrosine ligase-like family member 6
  ENSP ID: ENSP00000365871
  MOD_RES (1)..(1): Any amino acid
XPMGALLLHPSRRGPAGVVASWTSSPAGRDGGVGIAGAWYFPRASSQAREMPQCPTLESQEGENSEEKGDSSKEDPKETVALAFVRENPGAQNGLQNAQQQGKKKRKKKRMPLKNSRKRRFPCFKKALICPGNLVRLQYDSTILTYQDPTAACAFQFLFNISPCLAPFRLIDEGKLVHFLIHSFP

SEQ ID NO: 93516 - protein, 891 aa, Homo sapiens
  Payload ID: 18665
  Gene Name: tubulin tyrosine ligase-like family member 6
  Uniprot ID: Q8N841
  ENSP ID: ENSP00000377043
MGALLLHPSRRGPAGVVASWTSSPAGRDGGVGIAGAWYFPRASSQAREMPQCPTLESQEGENSEEKGDSSKEDPKETVALAFVRENPGAQNGLQNAQQQGKKKRKKKRLVINLSSCRYESVRRAAQQYGFREGGEDDDWTLYWTDYSVSLERVMEMKSYQKINHFPGMSEICRKDLLARNMSRMLKMFPKDFRFFPRTWCLPADWGDLQTYSRSRKNKTYICKPDSGCQGKGIFITRTVKEIKPGEDMICQLYISKPFIIDGFKFDLRIYVLVTSCDPLRIFVYNEGLARFATTSYSRPCTDNLDDICMHLTNYSINKHSSNFSRDAHSGSKRKLSTFSAYLEDHSYNVEQIWRDIEDVIIKTLISAHPIIRHNYHTCFPNHTLNSACFEILGFDILLDHKLKPWLLEVNHSPSFSTDSRLDKEVKDGLLYDTLVLINLESCDKKKVLEEERQRGQFLQQCCSREMRIEEAKGFRAVQLKKTETYEKENCGGFRLIYPSLNSEKYEKFFQDNNSLFQNTVASRAREEYARQLIQELRLKREKKPFQMKKKVEMQGESAGEQVRKKGMRGWQQKQQQKDKAATQASKQYIQPLTLVSYTPDLLLSVRGERKNETDSSLNQEAPTEEASSVFPKLTSAKPFSSLPDLRNINLSSSKLEPSKPNFSIKEAKSASAVNVFTGTVHLTSVETTPESTTQLSISPKSPPTLAVTASSEYSGPETDRVVSFKCKKQQTPPHLTQKKMLKSFLPTKSKSFWESPNTNWTLLKSDMNKPHLISELLTKLQLSGKLSFFPAHYNPKLGMNNLSQNPSLPGECHSRSDSSGEKRQLDVSSLLLQSPQSYNVTLRDLLVIATPAQLDPRPCRSHASAMRDPCMQDQEAYSHCLISGQKGCERS

SEQ ID NO: 93517 - protein, 584 aa, Homo sapiens
  Payload ID: 18665
  Gene Name: tubulin tyrosine ligase-like family member 6
  Uniprot ID: Q8N841
  ENSP ID: ENSP00000399211
MRIGTPTAGPGPSAVMEGCLGVAELRKLSTFSAYLEDHSYNVEQIWRDIEDVIIKTLISAHPIIRHNYHTCFPNHTLNSACFEILGFDILLDHKLKPWLLEVNHSPSFSTDSRLDKEVKDGLLYDTLVLINLESCDKKKVLEEERQRGQFLQQCCSREMRIEEAKGFRAVQLKKTETYEKENCGGFRLIYPSLNSEKYEKFFQDNNSLFQNTVASRAREEYARQLIQELRLKREKKPFQMKKKVEMQGESAGEQVRKKGMRGWQQKQQQKDKAATQASKQYIQPLTLVSYTPDLLLSVRGERKNETDSSLNQEAPTEEASSVFPKLTSAKPFSSLPDLRNINLSSSKLEPSKPNFSIKEAKSASAVNVFTGTVHLTSVETTPESTTQLSISPKSPPTLAVTASSEYSGPETDRVVSFKCKKQQTPPHLTQKKMLKSFLPTKSKSFWESPNTNWTLLKSDMNKPHLISELLTKLQLSGKLSFFPAHYNPKLGMNNLSQNPSLPGECHSRSDSSGEKRQLDVSSLLLQSPQSYNVTLRDLLVIATPAQLDPRPCRSHASAMRDPCMQDQEAYSHCLISGQKGCERS

SEQ ID NO: 93518 - protein, 27 aa, Homo sapiens
  Payload ID: 18665
  Gene Name: tubulin tyrosine ligase-like family member 6
  ENSP ID: ENSP00000400624
MEGCLGVAELRSTTLQASPPTLGWIKR

SEQ ID NO: 93519 - protein, 48 aa, Homo sapiens
  Payload ID: 18665
  Gene Name: tubulin tyrosine ligase-like family member 6
  ENSP ID: ENSP00000414290
MGALLLHPSRRGPAGVVASWTSSPAGRDGGVGIAEPLEAFRGMLPVGK

SEQ ID NO: 93520 - protein, 208 aa, Homo sapiens
  Payload ID: 18665
  Gene Name: tubulin tyrosine ligase-like family member 6
  ENSP ID: ENSP00000415138
MEGCLGVAELRKLSTFSAYLEDHSYNVEQIWRDIEDVIIKTLISAHPIIRHNYHTCFPNHTLNSACFEILGFDILLDHKLKPWLLEVNHSPSFSTDSRLDKEVKDGLLYDTLVLINLESCDKKKVLEEERQRGQFLQQCCSREMRIEEAKGFRAVQLKKTETYEKENCGGFRLIYPSLNSEKYEKFFQDNNSLFQNTVASRAREEYAR

SEQ ID NO: 93521 - protein, 887 aa, Homo sapiens
  Payload ID: 18666
  Gene Name: tubulin tyrosine ligase-like family member 7
  Uniprot ID: Q6ZT98
  ENSP ID: ENSP00000260505
MPSLPQEGVIQGPSPLDLNTELPYQSTMKRKVRKKKKKGTITANVAGTKFEIVRLVIDEMGFMKTPDEDETSNLIWCDSAVQQEKISELQNYQRINHFPGMGEICRKDFLARNMTKMIKSRPLDYTFVPRTWIFPAEYTQFQNYVKELKKKRKQKTFIVKPANGAMGHGISLIRNGDKLPSQDHLIVQEYIEKPFLMEGYKFDLRIYILVTSCDPLKIFLYHDGLVRMGTEKYIPPNESNLTQLYMHLTNYSVNKHNEHFERDETENKGSKRSIKWFTEFLQANQHDVAKFWSDISELVVKTLIVAEPHVLHAYRMCRPGQPPGSESVCFEVLGFDILLDRKLKPWLLEINRAPSFGTDQKIDYDVKRGVLLNALKLLNIRTSDKRRNLAKQKAEAQRRLYGQNSIKRLLPGSSDWEQQRHQLERRKEELKERLAQVRKQISREEHENRHMGNYRRIYPPEDKALLEKYENLLAVAFQTFLSGRAASFQRELNNPLKRMKEEDILDLLEQCEIDDEKLMGKTTKTRGPKPLCSMPESTEIMKRPKYCSSDSSYDSSSSSSESDENEKEEYQNKKREKQVTYNLKPSNHYKLIQQPSSIRRSVSCPRSISAQSPSSGDTRPFSAQQMISVSRPTSASRSHSLNRASSYMRHLPHSNDACSTNSQVSESLRQLKTKEQEDDLTSQTLFVLKDMKIRFPGKSDAESELLIEDIIDNWKYHKTKVASYWLIKLDSVKQRKVLDIVKTSIRTVLPRIWKVPDVEEVNLYRIFNRVFNRLLWSRGQGLWNCFCDSGSSWESIFNKSPEVVTPLQLQCCQRLVELCKQCLLVVYKYATDKRGSLSGIGPDWGNSRYLLPGSTQFFLRTPTYNLKYNSPGMTRSNVLFTSRYGHL

SEQ ID NO: 93522 - protein, 553 aa, Homo sapiens
  Payload ID: 18666
  Gene Name: tubulin tyrosine ligase-like family member 7
  ENSP ID: ENSP00000432921
MIKSRPLDYTFVPRTWIFPAEYTQFQNYVKELKKKRKQKTFIVKPANGAMGHGISLIRNGDKLPSQDHLIVQEYIEKPFLMEGYKFDLRIYILVTSCDPLKIFLYHDGLVRMGTEKYIPPNESNLTQLYMHLTNYSVNKHNEHFERDETENKGSKRSIKWFTEFLQANQHDVAKFWSDISELVVKTLIVAEPHVLHAYRMCRPGQPPGSESVCFEVLGFDILLDRKLKPWLLEINRAPSFGTDQKIDYDVKRGVLLNALKLLNIRTSDKRRNLAKQKAEAQRRLYGQNSIKRLLPGSSDWEQQRHQLERRKEELKERLAQVRKQISREEHENRHMGNYRRIYPPEDKALLEKYENLLAVAFQTFLSGRAASFQRELNNPLKRMKEEDILDLLEQCEIDDEKLMGKTTKTRGPKPLCSMPESTEIMKRPKYCSSDSSYDSSSSSSESDENEKEEYQNKKREKQVTYNLKPSNHYKLIQQPSSIRRSVSCPRSISAQSPSSGDTRPFSAQQMISVSRPTSASRSHSLNRASSYMRHLPHSNDACSTNSQVIILAQ

SEQ ID NO: 93523 - protein, 477 aa, Homo sapiens
  Payload ID: 18666
  Gene Name: tubulin tyrosine ligase-like family member 7
  ENSP ID: ENSP00000434146
MCRPGQPPGSESVCFEVLGFDILLDRKLKPWLLEINRAPSFGTDQKIDYDVKRGVLLNALKLLNIRTSDKRRNLAKQKAEAQRRLYGQNSIKRLLPGSSDWEQQRHQLERRKEELKERLAQVRKQISREEHENRHMGNYRRIYPPEDKALLEKYENLLAVAFQTFLSGRAASFQRELNNPLKRMKEEDILDLLEQCEIDDEKLMGKTTKTRGPKPLCSMPESTEIMKRPKYCSSDSSYDSSSSSSESDENEKEEYQNKKREKQVTYNLKPSNHYKLIQQPSSIRRSVSCPRSISAQSPSSGDTRPFSAQQMISVSRPTSASRSHSLNRASSYMRHLPHSNDACSTNSQVSESLRQLKTKEQEDDLTSQTLFVLKDMKIRFPGKSDAESELLIEDIIDNWKYHKTKVASYWLIKLDSVKQRKVLDIVKTSIRTVLPRIWKVPDVEEVNLYRIFNRVFNRLLWSRGQGLWNCFCDSGYV

SEQ ID NO: 93524 - protein, 669 aa, Homo sapiens
  Payload ID: 18666
  Gene Name: tubulin tyrosine ligase-like family member 7
  Uniprot ID: Q6ZT98
  ENSP ID: ENSP00000435334
MPSLPQEGVIQGPSPLDLNTELPYQSTMKRKVRKKKKKGTITANVAGTKFEIVRLVIDEMGFMKTPDEDETSNLIWCDSAVQQEKISELQNYQRINHFPGMGEICRKDFLARNMTKMIKSRPLDYTFVPRTWIFPAEYTQFQNYVKELKKKRKQKTFIVKPANGAMGHGISLIRNGDKLPSQDHLIVQEYIEKPFLMEGYKFDLRIYILVTSCDPLKIFLYHDGLVRMGTEKYIPPNESNLTQLYMHLTNYSVNKHNEHFERDETENKGSKRSIKWFTEFLQANQHDVAKFWSDISELVVKTLIVAEPHVLHAYRMCRPGQPPGSESVCFEVLGFDILLDRKLKPWLLEINRAPSFGTDQKIDYDVKRGVLLNALKLLNIRTSDKRRNLAKQKAEAQRRLYGQNSIKRLLPGSSDWEQQRHQLERRKEELKERLAQVRKQISREEHENRHMGNYRRIYPPEDKALLEKYENLLAVAFQTFLSGRAASFQRELNNPLKRMKEEDILDLLEQCEIDDEKLMGKTTKTRGPKPLCSMPESTEIMKRPKYCSSDSSYDSSSSSSESDENEKEEYQNKKREKQVTYNLKPSNHYKLIQQPSSIRRSVSCPRSISAQSPSSGDTRPFSAQQMISVSRPTSASRSHSLNRASSYMRHLPHSNDACSTNSQVIILAQ

SEQ ID NO: 93525 - protein, 543 aa, Homo sapiens
  Payload ID: 18666
  Gene Name: tubulin tyrosine ligase-like family member 7
  ENSP ID: ENSP00000484660
MPSLPQEGVIQGPSPLDLNTELPYQSTMKRKVRKKKKKGTITANVAGTKFEIVRLVIDEMGFMKTPDEDETSNLIWCDSAVQQEKISELQNYQRINHFPGMGEICRKDFLARNMTKMIKSRPLDYTFVPRTWIFPAEYTQFQNYVKELKKKRKQKTFIVKPANGAMGHGISLIRNGDKLPSQDHLIVQEYIEKPFLMEGYKFDLRIYILVTSCDPLKIFLYHDGLVRMGTEKYIPPNESNLTQLYMHLTNYSVNKHNEHFERDETENKGSKRSIKWFTEFLQANQHDVAKFWSDISELVVKTLIVAEPHVLHAYRMCRPGQPPGSESVCFEVLGFDILLDRKLKPWLLEINRAPSFGTDQKIDYDVKRGVLLNALKLLNIRTSDKRRNLAKQKAEAQRRLYGQNSIKRLLPGSSDWEQQRHQLERRKEELKERLAQVRKQISREEHENRHMGNYRRIYPPEDKALLEKYENLLAVAFQTFLSGRAASFQRELNNPLKRMKEEDILDLLEQCEIDDEKLMGKTTKTRGPKGRITHYVVKLFKNT

SEQ ID NO: 93526 - protein, 834 aa, Homo sapiens
  Payload ID: 18667
  Gene Name: tubulin tyrosine ligase-like family member 8
  Uniprot ID: A6PVC2
  ENSP ID: ENSP00000266182
MRLLDGKQTSRYSENACEKKIFSIYGHYPVVRAALRRKGWVEKKFHFLPKVIPDVEDEGARVNDDTCAKVKENQEMALEKTDNIHDVMSRLVKNEMPYLLWTIKRDIIDYHSLTYDQMLNHYAKTASFTTKIGLCVNMRSLPWYVPANPDSFFPRCYSLCTESEQQEFLEDFRRTMASSILKWVVSHQSCSRSSRSKPRDQREEAGSSDLSSRQDAENAEAKLRGLPGQLVDIACKVCQAYLGQLEHEDIDTSADAVEDLTEAEWEDLTQQYYSLVQVPLGSSIVLCIFKIQKVMMSFEPPTARDRQCQALLNRITSVNPQTDIDGLRNIWIIKPAAKSRGRGESPDIVCMDRVEEILELAAADHPLSRDNKWVVQKYIETPLLICDTKFDIRQWFLVTDWNPLTIWFYKESYLRFSTQRFSLDKLDSAIHLCNNAVQKYLKNDVGRSPLLPAHNMWTSTRFQEYLQRQGRGAVWGSVIYPSMKKAIAHAMKVAQDHVEPRKNSFELYGADFVLGRDFRPWLIEINSSPTMHPSTPVTAQLCAQVQEDTIKVAVDRSCDIGNFELLWRQPVVEPPPFSGSDLCVAGVSVRRARRQVLPVCNLKASASLLDAQPLKARGPSAMPDPAQGPPSPALQRDLGLKEEKGLPLALLAPLRGAAESGGAAQPTRTKAAGKVELPACPCRHVDSQAPNTGVPVAQPAKSWDPNQLNAHPLEPVLRGLKTAEGALRPPPGGKGEGTVCSRLPHHGHHVAACQTTGTTWDGGPGVCFLRQLLASELPMGPGLPRDPRAPPCLVCRGLLPPAGPCKRCRSFCAAVLQGASFVRLGGRSCSPRTP

SEQ ID NO: 93527 - protein, 849 aa, Homo sapiens
  Payload ID: 18667
  Gene Name: tubulin tyrosine ligase-like family member 8
  ENSP ID: ENSP00000392252
MEPERKGLSLASSSDGDGREENKLKQGISQDLASSSRLDRYKIARQLTEKAIKEKKIFSIYGHYPVVRAALRRKGWVEKKFHFLPKVIPDVEDEGARVNDDTCAKVKENQEMALEKTDNIHDVMSRLVKNEMPYLLWTIKRDIIDYHSLTYDQMLNHYAKTASFTTKIGLCVNMRSLPWYVPANPDSFFPRCYSLCTESEQQEFLEDFRRTMASSILKWVVSHQSCSRSSRSKPRDQREEAGSSDLSSRQDAENAEAKLRGLPGQLVDIACKVCQAYLGQLEHEDIDTSADAVEDLTEAEWEDLTQQYYSLVHGDAFISNSRNYFSQCQALLNRITSVNPQTDIDGLRNIWIIKPAAKSRGRDIVCMDRVEEILELAAADHPLSRDNKWVVQKYIETPLLICDTKFDIRQWFLVTDWNPLTIWFYKESYLRFSTQRFSLDKLDSAIHLCNNAVQKYLKNDVGRSPLLPAHNMWTSTRFQEYLQRQGRGAVWGSVIYPSMKKAIAHAMKVAQDHVEPRKNSFELYGADFVLGRDFRPWLIEINSSPTMHPSTPVTAQLCAQVQEDTIKVAVDRSCDIGNFELLWRQPVVEPPPFSGSDLCVAGVSVRRARRQVLPVCNLKASASLLDAQPLKARGPSAMPDPAQGPPSPALQRDLGLKEEKGLPLALLAPLRGAAESGGAAQPTRTKAAGKVELPACPCRHVDSQAPNTGVPVAQPAKSWDPNQLNAHPLEPVLRGLKTAEGALRPPPGGKGEGTVCSRLPHHGHHVAACQTTGTTWDGGPGVCFLRQLLASELPMGPGLPRDPRAPPCLVCRGLLPPAGPCKRCRSFCAAVLQGASFVRLGGRSCSPRT

SEQ ID NO: 93528 - protein, 105 aa, Homo sapiens
  Payload ID: 18668
  Gene Name: tubulin tyrosine ligase-like family member 9
  ENSP ID: ENSP00000308980
MVPSREALLGPGTTAIRCPKKLQMTSLYPEKTQRIYKLPELIIQQGHQIQEPKLQGPWIVKGKRARAESIDPVQDHPHEHTHGRPSPQARMGGSEGRRGVGFLLV

SEQ ID NO: 93529 - protein, 105 aa, Homo sapiens; identical to SEQ ID NO: 93528
  Payload ID: 18668
  Gene Name: tubulin tyrosine ligase-like family member 9
  ENSP ID: ENSP00000365086

SEQ ID NO: 93530 - protein, 279 aa, Homo sapiens
  Payload ID: 18668
  Gene Name: tubulin tyrosine ligase-like family member 9
  ENSP ID: ENSP00000365100
MSRPKNQNYKGHGLSKGKEREQRASIRFKTTLMNTLMDVLRHRPGWVEVKDEGEWDFYWCDVSWLRENFDHTYMDEHVRISHFRNHYELTRKNYMVKNLKRFRKQLEREAGKLEAAKCDFFPKTFEMPCEYHLFVEEFRKNPGITWIMKPVARSQGKGIFLFRRLKDIVDWRKDTRSSDDQKDDIPVENYVAQRYIENPYLIGGRKFDLRVYVLVMSMFTSPTWLCKKHLPTTTQRRAASGRCSASGSTWRPNTGPRQWRHSSGTSTTSLSKACRVCRR

SEQ ID NO: 93531 - protein, 439 aa, Homo sapiens
  Payload ID: 18668
  Gene Name: tubulin tyrosine ligase-like family member 9
  Uniprot ID: Q3SXZ7
  ENSP ID: ENSP00000365105
MVPSREALLGPGTTAIRCPKKLQNQNYKGHGLSKGKEREQRASIRFKTTLMNTLMDVLRHRPGWVEVKDEGEWDFYWCDVSWLRENFDHTYMDEHVRISHFRNHYELTRKNYMVKNLKRFRKQLEREAGKLEAAKCDFFPKTFEMPCEYHLFVEEFRKNPGITWIMKPVARSQGKGIFLFRRLKDIVDWRKDTRSSDDQKDDIPVENYVAQRYIENPYLIGGRKFDLRVYVLVMSVFAECLLWSGHRRQDVHLTNVAVQKTSPDYHPKKGCKWTLQRFRQYLASKHGPEAVETLFRDIDNIFVKSLQSVQKVIISDKHCFELYGYDILIDQDLKPWLLEVNASPSLTASSQEDYELKTCLLEDTLHVVDMEARLTGREKRVGGFDLMWNDGPVSREEGAPDLSGMGNFVTNTHLGCVNDRKKQLRQLFCSLQVQKKASS

SEQ ID NO: 93532 - protein, 439 aa, Homo sapiens; identical to SEQ ID NO: 93531
  Payload ID: 18668
  Gene Name: tubulin tyrosine ligase-like family member 9
  Uniprot ID: Q3SXZ7
  ENSP ID: ENSP00000442515

SEQ ID NO: 93533 - protein, 184 aa, Homo sapiens
  Payload ID: 18668
  Gene Name: tubulin tyrosine ligase-like family member 9
  ENSP ID: ENSP00000480102
  MOD_RES (1)..(1): Any amino acid
XLEDTLHVVDMEARLRQRSEETTEAALLLPSSSEESFQLIPSCQEEISLSRCHPGLPPTPRSQHSTSQHSPPHLQPGTSFAGLAAAAYYLNWAPWIPPAHPQASLHQETANHWDWGRFNLDKLTWQLGPKRTNTASSATPRRSYLINEHRPYLESLGTRPGSGDTVGCSQVLLALTLGYLPSQC

SEQ ID NO: 93534 - protein, 225 aa, Homo sapiens
  Payload ID: 18668
  Gene Name: tubulin tyrosine ligase-like family member 9
  ENSP ID: ENSP00000480981
MSRPKNQNYKGHGLSKGKEREQRASIRFKTTLMNTLMDVLRHRPGWVEVKDEGEWDFYWCDVSWLRENFDHTYMDEHVRISHFRNHYELTRKNYMVKNLKRFRKQLEREAGKLEAAKCDFFPKTFEMPCEYHLFVEEFRKNPGITWIMKPVARSQGKGIFLFRRLKDIVDWRKGTTGKSSAAWRPSLPGARSVPLAATTQEALTTRKMIFPWRTMWLSVTLKILT

SEQ ID NO: 93535 - protein, 39 aa, Homo sapiens
  Payload ID: 18668
  Gene Name: tubulin tyrosine ligase-like family member 9
  ENSP ID: ENSP00000481910
  MOD_RES (1)..(1): Any amino acid
XVHLTNVAVQKTSPDYHPKKVAPGGQCVPITDSQQPGRL

SEQ ID NO: 93536 - protein, 341 aa, Homo sapiens
  Payload ID: 18668
  Gene Name: tubulin tyrosine ligase-like family member 9
  ENSP ID: ENSP00000483865
MSRPKMTSLYPEKTQRIYKLPELIIQQGHQIQEPKLQGPWIVKGKRARAESIDPVQDHPHEHTHGRPSPQARMGGSEGDTRSSDDQKDDIPVENYVAQRYIENPYLIGGRKFDLRVYVLVMSYIPLRAWLYRDGFARFSNTRFTLNSIDDQYVHLTNVAVQKTSPDYHPKKGCKWTLQRFRQYLASKHGPEAVETLFRDIDNIFVKSLQSVQKVIISDKHCFELYGYDILIDQDLKPWLLEVNASPSLTASSQEDYELKTCLLEDTLHVVDMEARLTGREKRVGGFDLMWNDGPVSREEGAPDLSGMGNFVTNTHLGCVNDRKKQLRQLFCSLQVQKKASS

SEQ ID NO: 93537 - protein, 225 aa, Homo sapiens; identical to SEQ ID NO: 93534
  Payload ID: 18668
  Gene Name: tubulin tyrosine ligase-like family member 9
  ENSP ID: ENSP00000484993

SEQ ID NO: 93538 - protein, 451 aa, Homo sapiens
  Payload ID: 18669
  Gene Name: tubulin, alpha 1a
  Uniprot ID: Q71U36
  ENSP ID: ENSP00000301071
MRECISIHVGQAGVQIGNACWELYCLEHGIQPDGQMPSDKTIGGGDDSFNTFFSETGAGKHVPRAVFVDLEPTVIDEVRTGTYRQLFHPEQLITGKEDAANNYARGHYTIGKEIIDLVLDRIRKLADQCTGLQGFLVFHSFGGGTGSGFTSLLMERLSVDYGKKSKLEFSIYPAPQVSTAVVEPYNSILTTHTTLEHSDCAFMVDNEAIYDICRRNLDIERPTYTNLNRLIGQIVSSITASLRFDGALNVDLTEFQTNLVPYPRIHFPLATYAPVISAEKAYHEQLSVAEITNACFEPANQMVKCDPRHGKYMACCLLYRGDVVPKDVNAAIATIKTKRTIQFVDWCPTGFKVGINYQPPTVVPGGDLAKVQRAVCMLSNTTAIAEAWARLDHKFDLMYAKRAFVHWYVGEGMEEGEFSEAREDMAALEKDYEEVGVDSVEGEGEEEGEEY

SEQ ID NO: 93539 - protein, 451 aa, Homo sapiens; identical to SEQ ID NO: 93538
  Payload ID: 18669
  Gene Name: tubulin, alpha 1a
  Uniprot ID: Q71U36
  ENSP ID: ENSP00000439020

SEQ ID NO: 93540 - protein, 231 aa, Homo sapiens
  Payload ID: 18669
  Gene Name: tubulin, alpha 1a
  ENSP ID: ENSP00000446613
MRECISIHVGQAGVQIGNACWELYCLEHGIQPDGQMPSDKTIGGGDDSFNTFFSETGAGKHVPRAVFVDLEPTVIGELTSVTQVRSQGAGTGGLSWGAPLVTHPLSLPAPRPSSSSPLLLPHHVLQMKFALAPTASSSTLSNLSQAKKMLPITMPEGTTPLARRSLTSCWTEFASWPTSARVSRASWFSTALVGELVLGSPRCSWNVSQLIMARSPSWSSLFTRRPRFPQL

SEQ ID NO: 93541 - protein, 416 aa, Homo sapiens
  Payload ID: 18669
  Gene Name: tubulin, alpha 1a
  Uniprot ID: Q71U36
  ENSP ID: ENSP00000446637
MPSDKTIGGGDDSFNTFFSETGAGKHVPRAVFVDLEPTVIDEVRTGTYRQLFHPEQLITGKEDAANNYARGHYTIGKEIIDLVLDRIRKLADQCTGLQGFLVFHSFGGGTGSGFTSLLMERLSVDYGKKSKLEFSIYPAPQVSTAVVEPYNSILTTHTTLEHSDCAFMVDNEAIYDICRRNLDIERPTYTNLNRLIGQIVSSITASLRFDGALNVDLTEFQTNLVPYPRIHFPLATYAPVISAEKAYHEQLSVAEITNACFEPANQMVKCDPRHGKYMACCLLYRGDVVPKDVNAAIATIKTKRTIQFVDWCPTGFKVGINYQPPTVVPGGDLAKVQRAVCMLSNTTAIAEAWARLDHKFDLMYAKRAFVHWYVGEGMEEGEFSEAREDMAALEKDYEEVGVDSVEGEGEEEGEEY

SEQ ID NO: 93542 - protein, 112 aa, Homo sapiens
  Payload ID: 18669
  Gene Name: tubulin, alpha 1a
  ENSP ID: ENSP00000448725
MPSDKTIGGGDDSFNTFFSETGAGKHVPRAVFVDLEPTVIDEVRTGTYRQLFHPEQLITGKEDAANNYARGHYTIGKEIIDLVLDRIRKLADQCTGLQGFLVFHSFGGGTGS

SEQ ID NO: 93543 - protein, 26 aa, Homo sapiens
  Payload ID: 18669
  Gene Name: tubulin, alpha 1a
  ENSP ID: ENSP00000449016
MPSDKTIGGGDDSFNTFFSETGAGKH

SEQ ID NO: 93544 - protein, 219 aa, Homo sapiens
  Payload ID: 18669
  Gene Name: tubulin, alpha 1a
  ENSP ID: ENSP00000450268
MPSDKTIGGGDDSFNTFFSETGAGKHVPRAVFVDLEPTVIDEVRTGTYRQLFHPEQLITGKEDAANNYARGHYTIGKEIIDLVLDRIRKLADQCTGLQGFLVFHSFGGGTGSGFTSLLMERLSVDYGKKSKLEFSIYPAPQVSTAVVEPYNSILTTHTTLEHSDCAFMVDNEAIYDICRRNLDIERPTYTNLNRLIGQIVSSITASLRFDGALNVDLTE

SEQ ID NO: 93545 - protein, 451 aa, Homo sapiens [sequence omitted]

SEQ ID NO: 93546 - protein, 49 aa, Homo sapiens
  Payload ID: 18670
  Gene Name: tubulin, alpha 1b
  ENSP ID: ENSP00000448045
MHRRGAQERAPGIAHSSCAAEPRPLSLRTDISSALVWPRASCARSCPEM

SEQ ID NO: 93547 - protein, 49 aa, Homo sapiens
  Payload ID: 18670
  Gene Name: tubulin, alpha 1b
  ENSP ID: ENSP00000448648
MPSDKTIGGGDDSFNTFFSETGAGKHVPRAVFVDLEPTVIDEVRTGTYR

SEQ ID NO: 93548 - protein, 246 aa, Homo sapiens
  Payload ID: 18670
  Gene Name: tubulin, alpha 1b
  ENSP ID: ENSP00000449325
MRECISIHVGQAGVQIGNACWELYCLEHGIQPDGQMPSDKTIGGGDDSFNTFFSETGAGKHVPRAVFVDLEPTVIDEVRTGTYRQLFHPEQLITGKEDAANNYARGHYTIGKEIIDLVLDRIRKLADQCTGLQGFLVSTAVVEPYNSILTTHTTLEHSDCAFMVDNEAIYDICRRNLDIERPTYTNLNRLISQIVSSITASLRFDGALNVDLTEFQTNLVPYPRIHFPLATYAPVISAEKAYHEQL

SEQ ID NO: 93549 - protein, 81 aa, Homo sapiens
  Payload ID: 18670
  Gene Name: tubulin, alpha 1b
  ENSP ID: ENSP00000449460
MPSDKTIGGGDDSFNTFFSETGAGKHVPRAVFVDLEPTVIDEVRTGTYRQLFHPEQLITGKEDAANNYARGHYTIGKEIID

SEQ ID NO: 93550 - protein, 75 aa, Homo sapiens
  Payload ID: 18670
  Gene Name: tubulin, alpha 1b
  ENSP ID: ENSP00000449748
MPSDKTIGGGDDSFNTFFSETGAGKHVPRAVFVDLEPTVIDEVRTGTYRQLFHPEQLITGKEDAANNYARGHYTI

SEQ ID NO: 93551 - protein, 449 aa, Homo sapiens
  Payload ID: 18671
  Gene Name: tubulin, alpha 1c
  Uniprot ID: Q9BQE3
  ENSP ID: ENSP00000301072
MRECISIHVGQAGVQIGNACWELYCLEHGIQPDGQMPSDKTIGGGDDSFNTFFSETGAGKHVPRAVFVDLEPTVIDEVRTGTYRQLFHPEQLITGKEDAANNYARGHYTIGKEIIDLVLDRIRKLADQCTGLQGFLVFHSFGGGTGSGFTSLLMERLSVDYGKKSKLEFSIYPAPQVSTAVVEPYNSILTTHTTLEHSDCAFMVDNEAIYDICRRNLDIERPTYTNLNRLISQIVSSITASLRFDGALNVDLTEFQTNLVPYPRIHFPLATYAPVISAEKAYHEQLTVAEITNACFEPANQMVKCDPRHGKYMACCLLYRGDVVPKDVNAAIATIKTKRTIQFVDWCPTGFKVGINYQPPTVVPGGDLAKVQRAVCMLSNTTAVAEAWARLDHKFDLMYAKRAFVHWYVGEGMEEGEFSEAREDMAALEKDYEEVGADSADGEDEGEEY

SEQ ID NO: 93552 - protein, 519 aa, Homo sapiens
  Payload ID: 18671
  Gene Name: tubulin, alpha 1c
  ENSP ID: ENSP00000443475
MTAWFNGVEELGRDECFVCLELDPSNGSFLNAKLYISNWILIYFTRTLQLPAPFNTCTSSKSRGEPGCDSKRECISIHVGQAGVQIGNACWELYCLEHGIQPDGQMPSDKTIGGGDDSFNTFFSETGAGKHVPRAVFVDLEPTVIDEVRTGTYRQLFHPEQLITGKEDAANNYARGHYTIGKEIIDLVLDRIRKLADQCTGLQGFLVFHSFGGGTGSGFTSLLMERLSVDYGKKSKLEFSIYPAPQVSTAVVEPYNSILTTHTTLEHSDCAFMVDNEAIYDICRRNLDIERPTYTNLNRLISQIVSSITASLRFDGALNVDLTEFQTNLVPYPRIHFPLATYAPVISAEKAYHEQLTVAEITNACFEPANQMVKCDPRHGKYMACCLLYRGDVVPKDVNAAIATIKTKRTIQFVDWCPTGFKVGINYQPPTVVPGGDLAKVQRAVCMLSNTTAVAEAWARLDHKFDLMYAKRAFVHWYVGEGMEEGEFSEAREDMAALEKDYEEVGADSADGEDEGEEY

SEQ ID NO: 93553 - protein, 88 aa, Homo sapiens
  Payload ID: 18671
  Gene Name: tubulin, alpha 1c
  ENSP ID: ENSP00000447669
MTAWFNGVEELGRDECFVCLELDPSNGSFLNAKLYISNWILIYFTRTLQLPAPFNTCTSSKSRGEPGCDSKCVNPALSLGFRTYKWSS

SEQ ID NO: 93554 - protein, 82 aa, Homo sapiens
  Payload ID: 18671
  Gene Name: tubulin, alpha 1c
  ENSP ID: ENSP00000447910
  MOD_RES (1)..(1): Any amino acid
XNAKLYISNWILIYFTRTLQLPAPFNTCTSSKSRGEPGCDSKSLTLLPRLECSGTILAHCSLRLPGSSDPPASASQVAEITA

SEQ ID NO: 93555 - protein, 130 aa, Homo sapiens
  Payload ID: 18671
  Gene Name: tubulin, alpha 1c
  ENSP ID: ENSP00000448211
MRECISIHVGQAGVQIGNACWELYCLEHGIQPDGQMPSDKTIGGGDDSFNTFFSETGAGKHVPRAVFVDLEPTVIDEVRTGTYRQLFHPEQLITGKEDAANNYARGHYTIGKEIIDLVLDRIRKLVSIVL

SEQ ID NO: 93556 - protein, 88 aa, Homo sapiens; identical to SEQ ID NO: 93553
  Payload ID: 18671
  Gene Name: tubulin, alpha 1c
  ENSP ID: ENSP00000448646

SEQ ID NO: 93557 - protein, 450 aa, Homo sapiens
  Payload ID: 18672
  Gene Name: tubulin, alpha 3c
  Uniprot ID: Q13748
  ENSP ID: ENSP00000382982
MRECISIHVGQAGVQIGNACWELYCLEHGIQPDGQMPSDKTIGGGDDSFNTFFSETGAGKHVPRAVFVDLEPTVVDEVRTGTYRQLFHPEQLITGKEDAANNYARGHYTIGKEIVDLVLDRIRKLADLCTGLQGFLIFHSFGGGTGSGFASLLMERLSVDYGKKSKLEFAIYPAPQVSTAVVEPYNSILTTHTTLEHSDCAFMVDNEAIYDICRRNLDIERPTYTNLNRLIGQIVSSITASLRFDGALNVDLTEFQTNLVPYPRIHFPLATYAPVISAEKAYHEQLSVAEITNACFEPANQMVKCDPRHGKYMACCMLYRGDVVPKDVNAAIATIKTKRTIQFVDWCPTGFKVGINYQPPTVVPGGDLAKVQRAVCMLSNTTAIAEAWARLDHKFDLMYAKRAFVHWYVGEGMEEGEFSEAREDLAALEKDYEEVGVDSVEAEAEEGEEY

SEQ ID NO: 93558 - protein, 418 aa, Homo sapiens
  Payload ID: 18672
  Gene Name: tubulin, alpha 3c
  Uniprot ID: Q13748
  ENSP ID: ENSP00000482878
MRECISIHVGQAGVQIGNACWELYCLEHGIQPDGQMPSDKTIGGGDDSFNTFFSETGAGKHVPRAVFVDLEPTVVDEVRTGTYRQLFHPEQLITGKEDAANNYARGHYTIGKEIVDLVLDRIRKLADLCTGLQGFLIFHSFGGGTGSGFASLLMERLSVDYGKKSKLEFAIYPAPQVSTAVVEPYNSILTTHTTLEHSDCAFMVDNEAIYDICRRNLDIERPTYTNLNRLIGQIVSSITASLRFDGALNVDLTEFQTNLVPYPRIHFPLATYAPVISAEKAYHEQLSVAEITNACFEPANQMVKCDPRHGKYMACCMLYRGDVVPKDVNAAIATIKTKRTIQFVDWCPTGFKVGINYQPPTVVPGGDLAKVQRAVCMLSNTTAIAEAWARLDLAALEKDYEEVGVDSVEAEAEEGEEY

SEQ ID NO: 93559 - protein, 450 aa, Homo sapiens; identical to SEQ ID NO: 93557
  Payload ID: 18673
  Gene Name: tubulin, alpha 3d
  Uniprot ID: Q13748
  ENSP ID: ENSP00000326042

SEQ ID NO: 93560 - protein, 450 aa, Homo sapiens
  Payload ID: 18674
  Gene Name: tubulin, alpha 3e
  Uniprot ID: Q6PEY2
  ENSP ID: ENSP00000318197
MRECISIHVGQAGVQIGNACWELYCLEHGIQPDGQMPSDKTIGGGDDSFNTFFSETGAGKHVPRAVFVDLEPTVVDEVRTGTYRQLFHPEQLITGKEDAASNYARGHYTIGKEIVDLVLDRIRKLADLCTGLQGFLIFHSFGGGTGSGFASLLMERLSVDYSKKSKLEFAIYPAPQVSTAVVEPYNSILTTHTTLEHSDCAFMVDNEAIYDICRRNLDIERPTYTNLNRLIGQIVSSITASLRFDGALNVDLTEFQTNLVPYPRIHFPLATYAPVISAEKAYHEQLSVAEITNACFEPANQMVKCDPRHGKYMACCMLYRGDVVPKDVNAAIATIKTKRTIQFVDWCPTGFKVGINYQPPTVVPGGDLAKVQRAVCMLSNTTAIAEAWARLVHKFDLMYAKWAFVHWYVGEGMEEGEFSEAREDLAALEKDCEEVGVDSVEAEAEEGEAY

SEQ ID NO: 93561 - protein, 448 aa, Homo sapiens
  Payload ID: 18675
  Gene Name: tubulin, alpha 4a
  Uniprot ID: P68366
  ENSP ID: ENSP00000248437
MRECISVHVGQAGVQMGNACWELYCLEHGIQPDGQMPSDKTIGGGDDSFTTFFCETGAGKHVPRAVFVDLEPTVIDEIRNGPYRQLFHPEQLITGKEDAANNYARGHYTIGKEIIDPVLDRIRKLSDQCTGLQGFLVFHSFGGGTGSGFTSLLMERLSVDYGKKSKLEFSIYPAPQVSTAVVEPYNSILTTHTTLEHSDCAFMVDNEAIYDICRRNLDIERPTYTNLNRLISQIVSSITASLRFDGALNVDLTEFQTNLVPYPRIHFPLATYAPVISAEKAYHEQLSVAEITNACFEPANQMVKCDPRHGKYMACCLLYRGDVVPKDVNAAIAAIKTKRSIQFVDWCPTGFKVGINYQPPTVVPGGDLAKVQRAVCMLSNTTAIAEAWARLDHKFDLMYAKRAFVHWYVGEGMEEGEFSEAREDMAALEKDYEEVGIDSYEDEDEGEE

SEQ ID NO: 93562 - protein, 433 aa, Homo sapiens
  Payload ID: 18675
  Gene Name: tubulin, alpha 4a
  Uniprot ID: P68366
  ENSP ID: ENSP00000375938
MGNACWELYCLEHGIQPDGQMPSDKTIGGGDDSFTTFFCETGAGKHVPRAVFVDLEPTVIDEIRNGPYRQLFHPEQLITGKEDAANNYARGHYTIGKEIIDPVLDRIRKLSDQCTGLQGFLVFHSFGGGTGSGFTSLLMERLSVDYGKKSKLEFSIYPAPQVSTAVVEPYNSILTTHTTLEHSDCAFMVDNEAIYDICRRNLDIERPTYTNLNRLISQIVSSITASLRFDGALNVDLTEFQTNLVPYPRIHFPLATYAPVISAEKAYHEQLSVAEITNACFEPANQMVKCDPRHGKYMACCLLYRGDVVPKDVNAAIAAIKTKRSIQFVDWCPTGFKVGINYQPPTVVPGGDLAKVQRAVCMLSNTTAIAEAWARLDHKFDLMYAKRAFVHWYVGEGMEEGEFSEAREDMAALEKDYEEVGIDSYEDEDEGEE

SEQ ID NO: 93563 - protein, 153 aa, Homo sapiens
  Payload ID: 18675
  Gene Name: tubulin, alpha 4a
  ENSP ID: ENSP00000396061
MGNACWELYCLEHGIQPDGQMPSDKTIGGGDDSFTTFFCETGAGKHVPRAVFVDLEPTVIDEIRNGPYRQLFHPEQLITGKEDAANNYARGHYTIGKEIIDPVLDRIRKLSDQCTGLQGFLVFHSFGGGTGSGFTSLLMERLSVDYGKKSKLE

SEQ ID NO: 93564 - protein, 156 aa, Homo sapiens
  Payload ID: 18675
  Gene Name: tubulin, alpha 4a
  ENSP ID: ENSP00000396212
MERLSVDYGKKSKLEFSIYPAPQVSTAVVEPYNSILTTHTTLEHSDCAFMVDNEAIYDICRRNLDIERPTYTNLNRLISQIVSSITASLRFDGALNVDLTEFQTNLVPYPRIHFPLATYAPVISAEKAYHEQLSVAEITNACFEPANQMVKCDPRH

SEQ ID NO: 93565 - protein, 119 aa, Homo sapiens
  Payload ID: 18675
  Gene Name: tubulin, alpha 4a
  ENSP ID: ENSP00000404740
MKVRECISVHVGQAGVQMGNACWELYCLEHGIQPDGQMPSDKTIGGGDDSFTTFFCETGAGKHVPRAVFVDLEPTVIDEIRNGPYRQLFHPEQLITGKEDAANNYARGHYTIGKEIIDP

SEQ ID NO: 93566 - protein, 180 aa, Homo sapiens
  Payload ID: 18675
  Gene Name: tubulin, alpha 4a
  ENSP ID: ENSP00000408194
MGNACWELYCLEHGIQPDGQMPSDKTIGGGDDSFTTFFCETGAGKHVPRAVFVDLEPTVIDEIRNGPYRQLFHPEQLITGKEDAANNYARGHYTIGKEIIDPVLDRIRKLSDQCTGLQGFLVFHSFGGGTGSGFTSLLMERLSVDYGKKSKLEFSIYPAPQVSTAVVEPYNSILTTHTTL

SEQ ID NO: 93567 - protein, 198 aa, Homo sapiens
  Payload ID: 18675
  Gene Name: tubulin, alpha 4a
  ENSP ID: ENSP00000416992
MAPILPGTRRVTSGASPQVPLPFWRECISVHVGQAGVQMGNACWELYCLEHGIQPDGQMPSDKTIGGGDDSFTTFFCETGAGKHVPRAVFVDLEPTVIDEIRNGPYRQLFHPEQLITGKEDAANNYARGHYTIGKEIIDPVLDRIRKLSDQCTGLQGFLVFHSFGGGTGSGFTSLLMERLSVDYGKKSKLEFSIYPAP

SEQ ID NO: 93568 - protein, 241 aa, Homo sapiens
  Payload ID: 18676
  Gene Name: tubulin, alpha 4b
  Uniprot ID: Q9H853
  ENSP ID: ENSP00000487719
MRHQQTERQDPSQPLSRQHGTYRQIFHPEQLITGKEDAANNYAWGHYTIGKEFIDLLLDRIRKLADQCTGLQGFLVFHSLGRGTGSDVTSFLMEWLSVNYGKKSKLGFSIYPAPQVSTAMVQPYNSILTTHTTLEHSDCAFMVDNKAIYDICHCNLDIERPTYTNLNRLISQIVSSITASLRFDGALNVDLTEFQTNLVSYLTSTSPWPPMHQSSLQKRYTTSSCWWQRLPMPALSLPTRW

SEQ ID NO: 93569 - protein, 383 aa, Homo sapiens
  Payload ID: 18677
  Gene Name: tubulin, alpha 8
  Uniprot ID: Q9NY65
  ENSP ID: ENSP00000318575
MIDLEPTVVDEVRAGTYRQLFHPEQLITGKEDAANNYARGHYTVGKESIDLVLDRIRKLTDACSGLQGFLIFHSFGGGTGSGFTSLLMERLSLDYGKKSKLEFAIYPAPQVSTAVVEPYNSILTTHTTLEHSDCAFMVDNEAIYDICRRNLDIERPTYTNLNRLISQIVSSITASLRFDGALNVDLTEFQTNLVPYPRIHFPLVTYAPIISAEKAYHEQLSVAEITSSCFEPNSQMVKCDPRHGKYMACCMLYRGDVVPKDVNVAIAAIKTKRTIQFVDWCPTGFKVGINYQPPTVVPGGDLAKVQRAVCMLSNTTAIAEAWARLDHKFDLMYAKRAFVHWYVGEGMEEGEFSEAREDLAALEKDYEEVGTDSFEEENEGEEF

SEQ ID NO: 93570 - protein, 449 aa, Homo sapiens
  Payload ID: 18677
  Gene Name: tubulin, alpha 8
  Uniprot ID: Q9NY65
  ENSP ID: ENSP00000333326
MRECISVHVGQAGVQIGNACWELFCLEHGIQADGTFDAQASKINDDDSFTTFFSETGNGKHVPRAVMIDLEPTVVDEVRAGTYRQLFHPEQLITGKEDAANNYARGHYTVGKESIDLVLDRIRKLTDACSGLQGFLIFHSFGGGTGSGFTSLLMERLSLDYGKKSKLEFAIYPAPQVSTAVVEPYNSILTTHTTLEHSDCAFMVDNEAIYDICRRNLDIERPTYTNLNRLISQIVSSITASLRFDGALNVDLTEFQTNLVPYPRIHFPLVTYAPIISAEKAYHEQLSVAEITSSCFEPNSQMVKCDPRHGKYMACCMLYRGDVVPKDVNVAIAAIKTKRTIQFVDWCPTGFKVGINYQPPTVVPGGDLAKVQRAVCMLSNTTAIAEAWARLDHKFDLMYAKRAFVHWYVGEGMEEGEFSEAREDLAALEKDYEEVGTDSFEEENEGEEF

SEQ ID NO: 93571 - protein, 47 aa, Homo sapiens
  Payload ID: 18677
  Gene Name: tubulin, alpha 8
  ENSP ID: ENSP00000407624
MIDLEPTVVDEVRAGTYRQLFHPEQLITGKEDAANNYARGHYTVGKE

SEQ ID NO: 93572 - protein, 467 aa, Homo sapiens
  Payload ID: 18677
  Gene Name: tubulin, alpha 8
  ENSP ID: ENSP00000412646
MLWGCRAKACWGPRLSDLVASLSPQRECISVHVGQAGVQIGNACWELFCLEHGIQADGTFDAQASKINDDDSFTTFFSETGNGKHVPRAVMIDLEPTVVDEVRAGTYRQLFHPEQLITGKEDAANNYARGHYTVGKESIDLVLDRIRKLTDACSGLQGFLIFHSFGGGTGSGFTSLLMERLSLDYGKKSKLEFAIYPAPQVSTAVVEPYNSILTTHTTLEHSDCAFMVDNEAIYDICRRNLDIERPTYTNLNRLISQIVSSITASLRFDGALNVDLTEFQTNLVPYPRIHFPLVTYAPIISAEKAYHEQLSVAEITSSCFEPNSQMVKCDPRHGKYMACCMLYRGDVVPKDVNVAIAAIKTKRTIQFVDWCPTGFKVGINYQPPTVVPGGDLAKVQRAVCMLSNTTAIAEAWARLDHKFDLMYAKRAFVHWYVGEGMEEGEFSEAREDLAALEKDYEEVGTDSFEEE

SEQ ID NO: 93573 - protein, 275 aa, Homo sapiens
  Payload ID: 18677
  Gene Name: tubulin, alpha 8
  ENSP ID: ENSP00000477306
  MOD_RES (1)..(1): Any amino acid
XFDGALNVDLTEFQTNLVPYPRIHFPLVTYAPIISAEKAYHEQLSVAEITSSCFEPNSQMVKCDPRHGKYMACCMLYRGDVVPKDVNVAIAAIKTKRTIQFVDWCPTGFKVGINYQPPTVVPGGDLAKVQRAVCMLSNTTAIAEAWARLDHKFDLMYAKRAFVHCQRIQLGISCSSMTSLVSASLEPFLKAVFDFHESFEDGRPADLQNAPRFGLARTRVLAKGFRLLTFDGNSTEVIPRWLHSVLWWHAIPVFPALMTFLYRIFTLITFFIVIM

SEQ ID NO: 93574 - protein, 446 aa, Homo sapiens
  Payload ID: 18678
  Gene Name: tubulin, alpha-like 3
  Uniprot ID: A6NHL2
  ENSP ID: ENSP00000369784
MRECLSIHIGQAGIQIGDACWELYCLEHGIQPNGVVLDTQQDQLENAKMEHTNASFDTFFCETRAGKHVPRALFVDLEPTVIDGIRTGQHRSLFHPEQLLSGKEDAANNYARGRYSVGSEVIDLVLERTRKLAEQCGGLQGFLIFRSFGGGTGSGFTSLLMERLTGEYSRKTKLEFSVYPAPRISTAVVEPYNSVLTTHSTTEHTDCTFMVDNEAVYDICHRKLGVECPSHASINRLVVQVVSSITASLRFEGPLNVDLIEFQTNLVPYPRIHFPMTAFAPIVSADKAYHEQFSVSDITTACFESSNQLVKCDPRLGKYMACCLLYRGDVVPKEVNAAIAATKSRHSVQFVDWCPTGFKVGINNRPPTVMPGGDLAKVHRSICMLSNTTAIVEAWARLDHKFDLMYAKRAFLHWYLREGMEEAEFLEAREDLAALERDYEEVAQSF

SEQ ID NO: 93575 - protein, 406 aa, Homo sapiens
  Payload ID: 18678
  Gene Name: tubulin, alpha-like 3
  Uniprot ID: A6NHL2
  ENSP ID: ENSP00000418799
MDQLENAKMEHTNASFDTFFCETRAGKHVPRALFVDLEPTVIDGIRTGQHRSLFHPEQLLSGKEDAANNYARGRYSVGSEVIDLVLERTRKLAEQCGGLQGFLIFRSFGGGTGSGFTSLLMERLTGEYSRKTKLEFSVYPAPRISTAVVEPYNSVLTTHSTTEHTDCTFMVDNEAVYDICHRKLGVECPSHASINRLVVQVVSSITASLRFEGPLNVDLIEFQTNLVPYPRIHFPMTAFAPIVSADKAYHEQFSVSDITTACFESSNQLVKCDPRLGKYMACCLLYRGDVVPKEVNAAIAATKSRHSVQFVDWCPTGFKVGINNRPPTVMPGGDLAKVHRSICMLSNTTAIVEAWARLDHKFDLMYAKRAFLHWYLREGMEEAEFLEAREDLAALERDYEEVAQSF

SEQ ID NO: 93576 - protein, 451 aa, Homo sapiens
  Payload ID: 18679
  Gene Name: tubulin, beta 1 class VI
  Uniprot ID: Q9H4B7
  ENSP ID: ENSP00000217133
MREIVHIQIGQCGNQIGAKFWEMIGEEHGIDLAGSDRGASALQLERISVYYNEAYGRKYVPRAVLVDLEPGTMDSIRSSKLGALFQPDSFVHGNSGAGNNWAKGHYTEGAELIENVLEVVRHESESCDCLQGFQIVHSLGGGTGSGMGTLLMNKIREEYPDRIMNSFSVMPSPKVSDTVVEPYNAVLSIHQLIENADACFCIDNEALYDICFRTLKLTTPTYGDLNHLVSLTMSGITTSLRFPGQLNADLRKLAVNMVPFPRLHFFMPGFAPLTAQGSQQYRALSVAELTQQMFDARNTMAACDLRRGRYLTVACIFRGKMSTKEVDQQLLSVQTRNSSCFVEWIPNNVKVAVCDIPPRGLSMAATFIGNNTAIQEIFNRVSEHFSAMFKRKAFVHWYTSEGMDINEFGEAENNIHDLVSEYQQFQDAKAVLEEDEEVTEEAEMEPEDKGH

SEQ ID NO: 93577 - protein, 445 aa, Homo sapiens
  Payload ID: 18680
  Gene Name: tubulin, beta 2A class IIa
  Uniprot ID: Q13885
  ENSP ID: ENSP00000369703
MREIVHIQAGQCGNQIGAKFWEVISDEHGIDPTGSYHGDSDLQLERINVYYNEAAGNKYVPRAILVDLEPGTMDSVRSGPFGQIFRPDNFVFGQSGAGNNWAKGHYTEGAELVDSVLDVVRKESESCDCLQGFQLTHSLGGGTGSGMGTLLISKIREEYPDRIMNTFSVMPSPKVSDTVVEPYNATLSVHQLVENTDETYSIDNEALYDICFRTLKLTTPTYGDLNHLVSATMSGVTTCLRFPGQLNADLRKLAVNMVPFPRLHFFMPGFAPLTSRGSQQYRALTVPELTQQMFDSKNMMAACDPRHGRYLTVAAIFRGRMSMKEVDEQMLNVQNKNSSYFVEWIPNNVKTAVCDIPPRGLKMSATFIGNSTAIQELFKRISEQFTAMFRRKAFLHWYTGEGMDEMEFTEAESNMNDLVSEYQQYQDATADEQGEFEEEEGEDEA

SEQ ID NO: 93578 - protein, 445 aa, Homo sapiens [sequence omitted]

SEQ ID NO: 93579 - protein, 450 aa, Homo sapiens
  Payload ID: 18682
  Gene Name: tubulin, beta 3 class III
  Uniprot ID: Q13509
  ENSP ID: ENSP00000320295
MREIVHIQAGQCGNQIGAKFWEVISDEHGIDPSGNYVGDSDLQLERISVYYNEASSHKYVPRAILVDLEPGTMDSVRSGAFGHLFRPDNFIFGQSGAGNNWAKGHYTEGAELVDSVLDVVRKECENCDCLQGFQLTHSLGGGTGSGMGTLLISKVREEYPDRIMNTFSVVPSPKVSDTVVEPYNATLSIHQLVENTDETYCIDNEALYDICFRTLKLATPTYGDLNHLVSATMSGVTTSLRFPGQLNADLRKLAVNMVPFPRLHFFMPGFAPLTARGSQQYRALTVPELTQQMFDAKNMMAACDPRHGRYLTVATVFRGRMSMKEVDEQMLAIQSKNSSYFVEWIPNNVKVAVCDIPPRGLKMSSTFIGNSTAIQELFKRISEQFTAMFRRKAFLHWYTGEGMDEMEFTEAESNMNDLVSEYQQYQDATAEEEGEMYEDDEEESEAQGPK

SEQ ID NO: 93580 - protein, 189 aa, Homo sapiens
  Payload ID: 18682
  Gene Name: tubulin, beta 3 class III
  ENSP ID: ENSP00000450538
MDSVRSGAFGHLFRPDNFIFGQSGAGNNWAKGHYTEGAELVDSVLDVVRKECENCDCLQGFQLTHSLGGGTGSGMGTLLISKVREEYPDRIMNTFSVVPSPKVSDTVVEPYNATLSIHQLVENTDETYCIDNEALYDICFRTLKLATPTYGDLNHLVSATMSGVTTSLRFPGQLNADLRKLAVNMVPFP

SEQ ID NO: 93581 - protein, 164 aa, Homo sapiens
  Payload ID: 18682
  Gene Name: tubulin, beta 3 class III
  ENSP ID: ENSP00000450765
MREIVHIQAGQCGNQIGAKFWEVISDEHGIDPSGNYVGDSDLQLERISVYYNEASSHKYVPRAILVDLEPGTMDSVRSGAFGHLFRPDNFIFGKFPLLQALMADPITGKPRSVDGDGCEKQGMVSSSHDPEWWELISPFYSWALEAQRKGSVGRTETTHAFQVE

SEQ ID NO: 93582 - protein, 118 aa, Homo sapiens
  Payload ID: 18682
  Gene Name: tubulin, beta 3 class III
  ENSP ID: ENSP00000450822
MREIVHIQAGQCGNQIGAKFWEVISDEHGIDPSGNYVGDSDLQLERISVYYNEASSHKYVPRAILVDLEPGTMDSVRSGAFGHLFRPDNFIFAGHWRPRERVLWGEQKPLMHFKWNEV

SEQ ID NO: 93583 - protein, 55 aa, Homo sapiens
  Payload ID: 18682
  Gene Name: tubulin, beta 3 class III
  ENSP ID: ENSP00000451276
MREIVHIQAGQCGNQIGAKFWEVISDEHGIDPSGNYVGDSDLQLERISVYYNEAS

SEQ ID NO: 93584 - protein, 148 aa, Homo sapiens
  Payload ID: 18682
  Gene Name: tubulin, beta 3 class III
  ENSP ID: ENSP00000451378
MREIVHIQAGQCGNQIGAKFWEVISDEHGIDPSGNYVGDSDLQLERISVYYNEASSHKYVPRAILVDLEPGTMDSVRSGAFGHLFRPDNFIFAHPAGRCQLASSPQLPGILGWLFGLLALPVGRKVCWSRRADPFTQDPLRRQSLALL

SEQ ID NO: 93585 - protein, 87 aa, Homo sapiens
  Payload ID: 18682
  Gene Name: tubulin, beta 3 class III
  ENSP ID: ENSP00000451465
MREIVHIQAGQCGNQIGAKFWEVISDEHGIDPSGNYVGDSDLQLERISVYYNEASCWSRTPGLKRSTCLGLPKCWECRHEPLHLVDV

SEQ ID NO: 93586 - protein, 378 aa, Homo sapiens
  Payload ID: 18682
  Gene Name: tubulin, beta 3 class III
  Uniprot ID: Q13509
  ENSP ID: ENSP00000451617
MDSVRSGAFGHLFRPDNFIFGQSGAGNNWAKGHYTEGAELVDSVLDVVRKECENCDCLQGFQLTHSLGGGTGSGMGTLLISKVREEYPDRIMNTFSVVPSPKVSDTVVEPYNATLSIHQLVENTDETYCIDNEALYDICFRTLKLATPTYGDLNHLVSATMSGVTTSLRFPGQLNADLRKLAVNMVPFPRLHFFMPGFAPLTARGSQQYRALTVPELTQQMFDAKNMMAACDPRHGRYLTVATVFRGRMSMKEVDEQMLAIQSKNSSYFVEWIPNNVKVAVCDIPPRGLKMSSTFIGNSTAIQELFKRISEQFTAMFRRKAFLHWYTGEGMDEMEFTEAESNMNDLVSEYQQYQDATAEEEGEMYEDDEEESEAQGPK

SEQ ID NO: 93587 - protein, 51 aa, Homo sapiens
  Payload ID: 18682
  Gene Name: tubulin, beta 3 class III
  ENSP ID: ENSP00000451985
MREIVHIQAGQCGNQIGAKLSWEQSPRSTAGTCSRGREVEVAGRERTTPGS

SEQ ID NO: 93588 - protein, 51 aa, Homo sapiens; identical to SEQ ID NO: 93587
  Payload ID: 18682
  Gene Name: tubulin, beta 3 class III
  ENSP ID: ENSP00000452001

SEQ ID NO: 93589 - protein, 46 aa, Homo sapiens
  Payload ID: 18682
  Gene Name: tubulin, beta 3 class III
  ENSP ID: ENSP00000452166
MDSVRSGAFGHLFRPDNFIFGQSGAGNNWAKGHYTEGAELVDSVLD

SEQ ID NO: 93590 - protein, 97 aa, Homo sapiens
  Payload ID: 18682
  Gene Name: tubulin, beta 3 class III
  ENSP ID: ENSP00000452554
MREIVHIQAGQCGNQIGAKFWEVISDEHGIDPSGNYVGDSDLQLERISVYYNEASSHKYVPRAILVDLEPGTMDSVRSGAFGHLFRPDNFIFGPHLL

SEQ ID NO: 93591 - protein, 148 aa, Homo sapiens; identical to SEQ ID NO: 93584
  Payload ID: 18682
  Gene Name: tubulin, beta 3 class III
  ENSP ID: ENSP00000485859

SEQ ID NO: 93592 - protein, 444 aa, Homo sapiens
  Payload ID: 18683
  Gene Name: tubulin, beta 4A class IVa
  Uniprot ID: P04350
  ENSP ID: ENSP00000264071
MREIVHLQAGQCGNQIGAKFWEVISDEHGIDPTGTYHGDSDLQLERINVYYNEATGGNYVPRAVLVDLEPGTMDSVRSGPFGQIFRPDNFVFGQSGAGNNWAKGHYTEGAELVDAVLDVVRKEAESCDCLQGFQLTHSLGGGTGSGMGTLLISKIREEFPDRIMNTFSVVPSPKVSDTVVEPYNATLSVHQLVENTDETYCIDNEALYDICFRTLKLTTPTYGDLNHLVSATMSGVTTCLRFPGQLNADLRKLAVNMVPFPRLHFFMPGFAPLTSRGSQQYRALTVPELTQQMFDAKNMMAACDPRHGRYLTVAAVFRGRMSMKEVDEQMLSVQSKNSSYFVEWIPNNVKTAVCDIPPRGLKMAATFIGNSTAIQELFKRISEQFTAMFRRKAFLHWYTGEGMDEMEFTEAESNMNDLVSEYQQYQDATAEEGEFEEEAEEEVA

SEQ ID NO: 93593 - protein, 444 aa, Homo sapiens; identical to SEQ ID NO: 93592
  Payload ID: 18683
  Gene Name: tubulin, beta 4A class IVa
  Uniprot ID: P04350
  ENSP ID: ENSP00000443590

SEQ ID NO: 93594 - protein, 110 aa, Homo sapiens
  Payload ID: 18683
  Gene Name: tubulin, beta 4A class IVa
  ENSP ID: ENSP00000468843
MREIVHLQAGQCGNQIGAKFWEVISDEHGIDPTGTYHGDSDLQLERINVYYNEATGGNYVPRAVLVDLEPGTMDSVRSGPFGQIFRPDNFVFVETGFHRVSQDGLDLLTS

SEQ ID NO: 93595 - protein, 109 aa, Homo sapiens
  Payload ID: 18683
  Gene Name: tubulin, beta 4A class IVa
  ENSP ID: ENSP00000469560
MREIVHLQAGQCGNQIGAKFWEVISDEHGIDPTGTYHGDSDLQLERINVYYNEATGGNYVPRAVLVDLEPGTMDSVRSGPFGQIFRPDNFVFGESPSREPEAGKPPYSC

SEQ ID NO: 93596 - protein, 107 aa, Homo sapiens
  Payload ID: 18683
  Gene Name: tubulin, beta 4A class IVa
  ENSP ID: ENSP00000469660
MREIVHLQAGQCGNQIGAKFWEVISDEHGIDPTGTYHGDSDLQLERINVYYNEATGGNYVPRAVLVDLEPGTMDSVRSGPFGQIFRPDNFVFGQSGAGNNWAKGHYT

SEQ ID NO: 93597 - protein, 160 aa, Homo sapiens
  Payload ID: 18683
  Gene Name: tubulin, beta 4A class IVa
  ENSP ID: ENSP00000469936
MREIVHLQAGQCGNQIGAKFWEVISDEHGIDPTGTYHGDSDLQLERINVYYNEAESCDCLQGFQLTHSLGGGTGSGMGTLLISKIREEFPDRIMNTFSVVPSPKVSDTVVEPYNATLSVHQLVENTDETYCIDNEALYDICFRTLKLTTPTYGDLNHLVS

SEQ ID NO: 93598 - protein, 157 aa, Homo sapiens
  Payload ID: 18683
  Gene Name: tubulin, beta 4A class IVa
  ENSP ID: ENSP00000470627
MRRGAADRETERLPGAQGPCSAVSAASSTLAAAAAPRARATAAASTLSATAMREIVHLQAGQCGNQIGAKFWEVISDEHGIDPTGTYHGDSDLQLERINVYYNEATGGNYVPRAVLVDLEPGTMDSVRSGPFGQIFRPDNFVFGQSGAGNNWAKGHY

SEQ ID NO: 93599 - protein, 144 aa, Homo sapiens
  Payload ID: 18683
  Gene Name: tubulin, beta 4A class IVa
  ENSP ID: ENSP00000470983
MREIVHLQAGQCGNQIGAKFWEGAELVDAVLDVVRKEAESCDCLQGFQLTHSLGGGTGSGMGTLLISKIREEFPDRIMNTFSVVPSPKVSDTVVEPYNATLSVHQLVENTDETYCIDNEALYDICFRTLKLTTPTYGDLNHLVS

SEQ ID NO: 93600 - protein, 93 aa, Homo sapiens
  Payload ID: 18683
  Gene Name: tubulin, beta 4A class IVa
  ENSP ID: ENSP00000471320
MREIVHLQAHTMGTVTCNWRGSTCTTTRPQEEIMSPERCWWTWNPAPWTLSVLAPSVRSFGRTTSCLANPEPATTGQRGTTRRAQSWWTLSWT

SEQ ID NO: 93601 - protein, 103 aa, Homo sapiens
  Payload ID: 18683
  Gene Name: tubulin, beta 4A class IVa
  ENSP ID: ENSP00000471503
MREIVHLQAGQCGNQIGAKFWEVISDEHGIDPTGTYHGDSDLQLERINVYYNEATGGNYVPRAVLVDLEPGTMDSVRSGPFGQIFRPDNFVFDRVCLSCCHPG

SEQ ID NO: 93602 - protein, 74 aa, Homo sapiens
  Payload ID: 18683
  Gene Name: tubulin, beta 4A class IVa
  ENSP ID: ENSP00000471880
MDSVRSGPFGQIFRPDNFVFGQSGAGNNWAKGHYTEGAELVDAVLDVVRKEAESCDCLQGFQLTHSLGGGTGSG

SEQ ID NO: 93603 - protein, 167 aa, Homo sapiens
  Payload ID: 18683
  Gene Name: tubulin, beta 4A class IVa
  ENSP ID: ENSP00000472375
MRRGAADRETEGPCSAVSAASSTLAAAAAPRARATAAASTLSATAMREIVHLQAGQCGNQIGAKFWEVISDEHGIDPTGTYHGDSDLQLERINVYYNEATGGNYVPRAVLVDLEPGTMDSVRSGPFGQIFRPDNFVFGQSGAGNNWAKGHYTEGAELVDAVLDVVRK

SEQ ID NO: 93604 - protein, 155 aa, Homo sapiens
  Payload ID: 18683
  Gene Name: tubulin, beta 4A class IVa
  ENSP ID: ENSP00000472481
MREIVHLQAGQCGNQIGAKFWEVISDEHGIDPTGTYHGDSDLQLERINVYYNEEFPDRIMNTFSVVPSPKVSDTVVEPYNATLSVHQLVENTDETYCIDNEALYDICFRTLKLTTPTYGDLNHLVSATMSGVTTCLRFPGQLNADLRKLAVNMVP

SEQ ID NO: 93605 - protein, 104 aa, Homo sapiens
  Payload ID: 18683
  Gene Name: tubulin, beta 4A class IVa
  ENSP ID: ENSP00000472795
MREIVHLQAGQCGNQIGAKAHTMGTVTCNWRGSTCTTTRPQEEIMSPERCWWTWNPAPWTLSVLAPSVRSFGRTTSCLANPEPATTGQRGTTRRAQSWWTLSWT

SEQ ID NO: 93606 - protein, 445 aa, Homo sapiens
  Payload ID: 18684
  Gene Name: tubulin, beta 4B class IVb
  Uniprot ID: P68371
  ENSP ID: ENSP00000341289
MREIVHLQAGQCGNQIGAKFWEVISDEHGIDPTGTYHGDSDLQLERINVYYNEATGGKYVPRAVLVDLEPGTMDSVRSGPFGQIFRPDNFVFGQSGAGNNWAKGHYTEGAELVDSVLDVVRKEAESCDCLQGFQLTHSLGGGTGSGMGTLLISKIREEYPDRIMNTFSVVPSPKVSDTVVEPYNATLSVHQLVENTDETYCIDNEALYDICFRTLKLTTPTYGDLNHLVSATMSGVTTCLRFPGQLNADLRKLAVNMVPFPRLHFFMPGFAPLTSRGSQQYRALTVPELTQQMFDAKNMMAACDPRHGRYLTVAAVFRGRMSMKEVDEQMLNVQNKNSSYFVEWIPNNVKTAVCDIPPRGLKMSATFIGNSTAIQELFKRISEQFTAMFRRKAFLHWYTGEGMDEMEFTEAESNMNDLVSEYQQYQDATAEEEGEFEEEAEEEVA

SEQ ID NO: 93607 - protein, 446 aa, Homo sapiens
  Payload ID: 18685
  Gene Name: tubulin, beta 6 class V
  Uniprot ID: Q9BUF5
  ENSP ID: ENSP00000318697
MREIVHIQAGQCGNQIGTKFWEVISDEHGIDPAGGYVGDSALQLERINVYYNESSSQKYVPRAALVDLEPGTMDSVRSGPFGQLFRPDNFIFGQTGAGNNWAKGHYTEGAELVDAVLDVVRKECEHCDCLQGFQLTHSLGGGTGSGMGTLLISKIREEFPDRIMNTFSVMPSPKVSDTVVEPYNATLSVHQLVENTDETYCIDNEALYDICFRTLKLTTPTYGDLNHLVSATMSGVTTSLRFPGQLNADLRKLAVNMVPFPRLHFFMPGFAPLTSRGSQQYRALTVPELTQQMFDARNMMAACDPRHGRYLTVATVFRGPMSMKEVDEQMLAIQSKNSSYFVEWIPNNVKVAVCDIPPRGLKMASTFIGNSTAIQELFKRISEQFSAMFRRKAFLHWFTGEGMDEMEFTEAESNMNDLVSEYQQYQDATANDGEEAFEDEEEEIDG

SEQ ID NO: 93608 - protein, 104 aa, Homo sapiens
  Payload ID: 18685
  Gene Name: tubulin, beta 6 class V
  ENSP ID: ENSP00000465040
MREIVHIQAGQCGNQIGTKFWEVISDEHGIDPAGGYVGDSALQLERINVYYNESSSQKYVPRAALVDLEPGTMDSVRSGPFGQLFRPDNFIFAHLHRGTEEKQE

SEQ ID NO: 93609 - protein, 115 aa, Homo sapiens
  Payload ID: 18685
  Gene Name: tubulin, beta 6 class V
  ENSP ID: ENSP00000465386
MREIVHIQAGQCGNQIGTKFWEVISDEHGIDPAGGYVGDSALQLERINVYYNESSSQKYVPRAALVDLEPGTMDSVRSGPFGQLFRPDNFIFVTFLRATGAGTVSTSAHHIATPA

SEQ ID NO: 93610 - protein, 31 aa, Homo sapiens
  Payload ID: 18685
  Gene Name: tubulin, beta 6 class V
  ENSP ID: ENSP00000465448
  MOD_RES (1)..(1): Any amino acid
XLVDLEPGTMDSVRSGPFGQLFRPDNFIFGV

SEQ ID NO: 93611 - protein, 130 aa, Homo sapiens
  Payload ID: 18685
  Gene Name: tubulin, beta 6 class V
  ENSP ID: ENSP00000465891
MREIVHIQAGQCGNQIGTKFWEVISDEHGIDPAGGYVGDSALQLERINVYYNESSSQKYVPRAALVDLEPGTMDSVRSGPFGQLFRPDNFIFGQTGAGNNWAKGHYTEGAELVDAVLDVVRKECEHCDCL

SEQ ID NO: 93612 - protein, 136 aa, Homo sapiens
  Payload ID: 18685
  Gene Name: tubulin, beta 6 class V
  ENSP ID: ENSP00000466849
MREIVHIQAGQCGNQIGTKFWEVISDEHGIDPAGGYVGDSALQLERINVYYNESSSQKYVPRAALVDLEPGTMDSVRSGPFGQLFRPDNFIFGQTGAGNNWAKGASSSRTRWAAARAQAWARCSSARSVRSSRTAS

SEQ ID NO: 93613 - protein, 141 aa, Homo sapiens
  Payload ID: 18685
  Gene Name: tubulin, beta 6 class V
  ENSP ID: ENSP00000467348
MREIVHIQAGQCGNQIGTKFWEVISDEHGIDPAGGYVGDSALQLERINVYYNESSSQKYVPRAALVDLEPGTMDSVRSGPFGQLFRPDNFIFGMFRQTHIFTHIQWSQLYTLFSTLVFLPGSPATYFEDLSISQVWLPHSC

SEQ ID NO: 93614 - protein, 104 aa, Homo sapiens
  Payload ID: 18685
  Gene Name: tubulin, beta 6 class V
  ENSP ID: ENSP00000467969
MREIVHIQAGQCGNQIGTKFWEVISDEHGIDPAGGYVGDSALQLERINVYYNESSSQKYVPRAALVDLEPGTMDSVRSGPFGQLFRPDNFIFAHHGITSHPPCR

SEQ ID NO: 93615 - protein, 110 aa, Homo sapiens
  Payload ID: 18685
  Gene Name: tubulin, beta 6 class V
  ENSP ID: ENSP00000468179
MREIVHIQAGQCGNQIGTKFWEVISDEHGIDPAGGYVGDSALQLERINVYYNESSSQKYVPRAALVDLEPGTMDSVRSGPFGQLFRPDNFIFATYFEDLSISQVWLPHSC

SEQ ID NO: 93616 - protein, 116 aa, Homo sapiens
  Payload ID: 18685
  Gene Name: tubulin, beta 6 class V
  ENSP ID: ENSP00000468571
MDSVRSGPFGQLFRPDNFIFGQTGAGNNWAKGHYTEGAELVDAVLDVVRKECEHCDCLQGFQLTHSLGGGTGSGMGTLLISKIREEFPDRIMNTFSVMPSPKVSDTVVEPYNATLS

SEQ ID NO: 93617 - protein, 338 aa, Homo sapiens
  Payload ID: 18685
  Gene Name: tubulin, beta 6 class V
  ENSP ID: ENSP00000468777
MREIVHIQAGQCGNQIGTKFWEVISDEHGIDPAGGYVGDSALQLERINVYYNESSCQTGAGNNWAKGHYTEGAELVDAVLDVVRKECEHCDCLQGFQLTHSLGGGTGSGMGTLLISKIREEFPDRIMNTFSVMPSPKVSDTVVEPYNATLSVHQLVENTDETYCIDNEALYDICFRTLKLTTPTYGDLNHLVSATMSGVTTSLRFPGQLNADLRKLAVNMVPFPRLHFFMPGFAPLTSRGSQQYRALTVPELTQQMFDARNMMAACDPRHGRYLTVATVFRGPMSMKEVDEQMLAIQSKNSSYFVEWIPNNVKVAVCDIPPRGLKMASTFIGNSTAIQ

SEQ ID NO: 93618 - protein, 96 aa, Homo sapiens
  Payload ID: 18685
  Gene Name: tubulin, beta 6 class V
  ENSP ID: ENSP00000468820
MREIVHIQAGQCGNQIGTKFWEVISDEHGIDPAGGYVGDSALQLERINVYYNESSSQKYVPRAALVDLEPGTMDSVRSGPFGQLFRPDNFIFELPL

SEQ ID NO: 93619 - protein, 119 aa, Homo sapiens
  Payload ID: 18686
  Gene Name: tubulin, beta 8 class VIII
  ENSP ID: ENSP00000454878
MREIVLTQIGQCGNQIGAKFWEVISDEHAIDSAGTYHGDSHLQLERINVYYNEASGGRYVPRAVLVDLEPGTMDSVRSGPFGQVFRPDNFIFVTGCAVLQVSVGPETTGPRDTTPKARS

SEQ ID NO: 93620 - protein, 89 aa, Homo sapiens
  Payload ID: 18686
  Gene Name: tubulin, beta 8 class VIII
  ENSP ID: ENSP00000454914
MNMPSTPLAPTTGTATCSWSASTCTTTRPAVAGTCPALCSWIWSRAPWTLCARGPSGRSSGQTTSSSVSCGRGLGCGSLARAAQNPGVC

SEQ ID NO: 93621 - protein, 444 aa, Homo sapiens
  Payload ID: 18686
  Gene Name: tubulin, beta 8 class VIII
  Uniprot ID: Q3ZCM7
  ENSP ID: ENSP00000456206
MREIVLTQIGQCGNQIGAKFWEVISDEHAIDSAGTYHGDSHLQLERINVYYNEASGGRYVPRAVLVDLEPGTMDSVRSGPFGQVFRPDNFIFGQCGAGNNWAKGHYTEGAELMESVMDVVRKEAESCDCLQGFQLTHSLGGGTGSGMGTLLLSKIREEYPDRIINTFSILPSPKVSDTVVEPYNATLSVHQLIENADETFCIDNEALYDICSKTLKLPTPTYGDLNHLVSATMSGVTTCLRFPGQLNADLRKLAVNMVPFPRLHFFMPGFAPLTSRGSQQYRALTVAELTQQMFDAKNMMAACDPRHGRYLTAAAIFRGRMPMREVDEQMFNIQDKNSSYFADWLPNNVKTAVCDIPPRGLKMSATFIGNNTAIQELFKRVSEQFTAMFRRKAFLHWYTGEGMDEMEFTEAESNMNDLVSEYQQYQDATAEEEEDEEYAEEEVA

SEQ ID NO: 93622 - protein, 75 aa, Homo sapiens
  Payload ID: 18686
  Gene Name: tubulin, beta 8 class VIII
  ENSP ID: ENSP00000456899
MREIVLTQIGQCGNQIGAKVAGTCPALCSWIWSRAPWTLCARGPSGRSSGQTTSSSVSVGPETTGPRDTTPKARS

SEQ ID NO: 93623 - protein, 407 aa, Homo sapiens
  Payload ID: 18686
  Gene Name: tubulin, beta 8 class VIII
  ENSP ID: ENSP00000457062
MREIVLTQIGQCGNQIGAKFWEVISDEHAIDSAGTYHGDSHLQLERINVYYNEASGQCGAGNNWAKGHYTEGAELMESVMDVVRKEAESCDCLQGFQLTHSLGGGTGSGMGTLLLSKIREEYPDRIINTFSILPSPKVSDTVVEPYNATLSVHQLIENADETFCIDNEALYDICSKTLKLPTPTYGDLNHLVSATMSGVTTCLRFPGQLNADLRKLAVNMVPFPRLHFFMPGFAPLTSRGSQQYRALTVAELTQQMFDAKNMMAACDPRHGRYLTAAAIFRGRMPMREVDEQMFNIQDKNSSYFADWLPNNVKTAVCDIPPRGLKMSATFIGNNTAIQELFKRVSEQFTAMFRRKAFLHWYTGEGMDEMEFTEAESNMNDLVSEYQQYQDATAEEEEDEEYAEEEVA

SEQ ID NO: 93624 - protein, 410 aa, Homo sapiens
  Payload ID: 18686
  Gene Name: tubulin, beta 8 class VIII
  ENSP ID: ENSP00000457610
MNMPSTPLAPTTGTATCSWSASTCTTTRPAVRPPSFPHRPPGNAALPSLMPSRPTQVAGQCGAGNNWAKGHYTEGAELMESVMDVVRKEAESCDCLQGFQLTHSLGGGTGSGMGTLLLSKIREEYPDRIINTFSILPSPKVSDTVVEPYNATLSVHQLIENADETFCIDNEALYDICSKTLKLPTPTYGDLNHLVSATMSGVTTCLRFPGQLNADLRKLAVNMVPFPRLHFFMPGFAPLTSRGSQQYRALTVAELTQQMFDAKNMMAACDPRHGRYLTAAAIFRGRMPMREVDEQMFNIQDKNSSYFADWLPNNVKTAVCDIPPRGLKMSATFIGNNTAIQELFKRVSEQFTAMFRRKAFLHWYTGEGMDEMEFTEAESNMNDLVSEYQQYQDATAEEEEDEEYAEEEVA

SEQ ID NO: 93625 - protein, 444 aa, Homo sapiens
  Payload ID: 18687
  Gene Name: tubulin, beta class I
  Uniprot ID: P07437
  ENSP ID: ENSP00000339001
MREIVHIQAGQCGNQIGAKFWEVISDEHGIDPTGTYHGDSDLQLDRISVYYNEATGGKYVPRAILVDLEPGTMDSVRSGPFGQIFRPDNFVFGQSGAGNNWAKGHYTEGAELVDSVLDVVRKEAESCDCLQGFQLTHSLGGGTGSGMGTLLISKIREEYPDRIMNTFSVVPSPKVSDTVVEPYNATLSVHQLVENTDETYCIDNEALYDICFRTLKLTTPTYGDLNHLVSATMSGVTTCLRFPGQLNADLRKLAVNMVPFPRLHFFMPGFAPLTSRGSQQYRALTVPELTQQVFDAKNMMAACDPRHGRYLTVAAVFRGRMSMKEVDEQMLNVQNKNSSYFVEWIPNNVKTAVCDIPPRGLKMAVTFIGNSTAIQELFKRISEQFTAMFRRKAFLHWYTGEGMDEMEFTEAESNMNDLVSEYQQYQDATAEEEEDFGEEAEEEA

SEQ ID NO: 93626 - protein, 372 aa, Homo sapiens
  Payload ID: 18687
  Gene Name: tubulin, beta class I
  ENSP ID: ENSP00000365578
MDSVRSGPFGQIFRPDNFVFGQSGAGNNWAKGHYTEGAELVDSVLDVVRKEAESCDCLQGFQLTHSLGGGTGSGMGTLLISKIREEYPDRIMNTFSVVPSPKVSDTVVEPYNATLSVHQLVENTDETYCIDNEALYDICFRTLKLTTPTYGDLNHLVSATMSGVTTCLRFPGQLNADLRKLAVNMVPFPRLHFFMPGFAPLTSRGSQQYRALTVPELTQQVFDAKNMMAACDPRHGRYLTVAAVFRGRMSMKEVDEQMLNVQNKNSSYFVEWIPNNVKTAVCDIPPRGLKMAVTFIGNSTAIQELFKRISEQFTAMFRRKAFLHWYTGEGMDEMEFTEAESNMNDLVSEYQQYQDATAEEEEDFGEEAEEEA

SEQ ID NO: 93627 - protein, 444 aa, Homo sapiens; identical to SEQ ID NO: 93625
  Payload ID: 18687
  Gene Name: tubulin, beta class I
  Uniprot ID: P07437
  ENSP ID: ENSP00000373058

SEQ ID NO: 93628 - protein, 372 aa, Homo sapiens; identical to SEQ ID NO: 93626
  Payload ID: 18687
  Gene Name: tubulin, beta class I
  ENSP ID: ENSP00000379668

SEQ ID NO: 93629 - protein, 426 aa, Homo sapiens
  Payload ID: 18687
  Gene Name: tubulin, beta class I
  ENSP ID: ENSP00000379672
MFWEVISDEHGIDPTGTYHGDSDLQLDRISVYYNEATGGKYVPRAILVDLEPGTMDSVRSGPFGQIFRPDNFVFGQSGAGNNWAKGHYTEGAELVDSVLDVVRKEAESCDCLQGFQLTHSLGGGTGSGMGTLLISKIREEYPDRIMNTFSVVPSPKVSDTVVEPYNATLSVHQLVENTDETYCIDNEALYDICFRTLKLTTPTYGDLNHLVSATMSGVTTCLRFPGQLNADLRKLAVNMVPFPRLHFFMPGFAPLTSRGSQQYRALTVPELTQQVFDAKNMMAACDPRHGRYLTVAAVFRGRMSMKEVDEQMLNVQNKNSSYFVEWIPNNVKTAVCDIPPRGLKMAVTFIGNSTAIQELFKRISEQFTAMFRRKAFLHWYTGEGMDEMEFTEAESNMNDLVSEYQQYQDATAEEEEDFGEEAEEEA

SEQ ID NO: 93630 - protein, 372 aa, Homo sapiens; identical to SEQ ID NO: 93626
  Payload ID: 18687
  Gene Name: tubulin, beta class I
  ENSP ID: ENSP00000383374

SEQ ID NO: 93631 - protein, 372 aa, Homo sapiens; identical to SEQ ID NO: 93626
  Payload ID: 18687
  Gene Name: tubulin, beta class I
  ENSP ID: ENSP00000383375

SEQ ID NO: 93632 - protein, 426 aa, Homo sapiens; identical to SEQ ID NO: 93629
  Payload ID: 18687
  Gene Name: tubulin, beta class I
  ENSP ID: ENSP00000383378

SEQ ID NO: 93633 - protein, 372 aa, Homo sapiens; identical to SEQ ID NO: 93626
  Payload ID: 18687
  Gene Name: tubulin, beta class I
  ENSP ID: ENSP00000391515

SEQ ID NO: 93634 - protein, 372 aa, Homo sapiens; identical to SEQ ID NO: 93626
  Payload ID: 18687
  Gene Name: tubulin, beta class I
  ENSP ID: ENSP00000392914

SEQ ID NO: 93635 - protein, 372 aa, Homo sapiens; identical to SEQ ID NO: 93626
  Payload ID: 18687
  Gene Name: tubulin, beta class I
  ENSP ID: ENSP00000393340

SEQ ID NO: 93636 - protein, 372 aa, Homo sapiens; identical to SEQ ID NO: 93626
  Payload ID: 18687
  Gene Name: tubulin, beta class I
  ENSP ID: ENSP00000394124

SEQ ID NO: 93637 - protein, 372 aa, Homo sapiens; identical to SEQ ID NO: 93626
  Payload ID: 18687
  Gene Name: tubulin, beta class I
  ENSP ID: ENSP00000394841

SEQ ID NO: 93638 - protein, 372 aa, Homo sapiens; identical to SEQ ID NO: 93626
  Payload ID: 18687
  Gene Name: tubulin, beta class I
  ENSP ID: ENSP00000395838

SEQ ID NO: 93639 - protein, 372 aa, Homo sapiens; identical to SEQ ID NO: 93626
  Payload ID: 18687
  Gene Name: tubulin, beta class I
  ENSP ID: ENSP00000399046

SEQ ID NO: 93640 - protein, 444 aa, Homo sapiens; identical to SEQ ID NO: 93625
  Payload ID: 18687
  Gene Name: tubulin, beta class I
  Uniprot ID: P07437
  ENSP ID: ENSP00000399155

SEQ ID NO: 93641 - protein, 426 aa, Homo sapiens; identical to SEQ ID NO: 93629
  Payload ID: 18687
  Gene Name: tubulin, beta class I
  ENSP ID: ENSP00000399280

SEQ ID NO: 93642 - protein, 426 aa, Homo sapiens; identical to SEQ ID NO: 93629
  Payload ID: 18687
  Gene Name: tubulin, beta class I
  ENSP ID: ENSP00000400108

SEQ ID NO: 93643 - protein, 444 aa, Homo sapiens; identical to SEQ ID NO: 93625
  Payload ID: 18687
  Gene Name: tubulin, beta class I
  Uniprot ID: P07437
  ENSP ID: ENSP00000400663

SEQ ID NO: 93644 - protein, 444 aa, Homo sapiens; identical to SEQ ID NO: 93625
  Payload ID: 18687
  Gene Name: tubulin, beta class I
  Uniprot ID: P07437
  ENSP ID: ENSP00000401317

SEQ ID NO: 93645 - protein, 426 aa, Homo sapiens; identical to SEQ ID NO: 93629
  Payload ID: 18687
  Gene Name: tubulin, beta class I
  ENSP ID: ENSP00000401546

SEQ ID NO: 93646 - protein, 372 aa, Homo sapiens; identical to SEQ ID NO: 93626
  Payload ID: 18687
  Gene Name: tubulin, beta class I
  ENSP ID: ENSP00000403213

SEQ ID NO: 93647 - protein, 426 aa, Homo sapiens; identical to SEQ ID NO: 93629
  Payload ID: 18687
  Gene Name: tubulin, beta class I
  ENSP ID: ENSP00000403868

SEQ ID NO: 93648 - protein, 444 aa, Homo sapiens; identical to SEQ ID NO: 93625
  Payload ID: 18687
  Gene Name: tubulin, beta class I
  Uniprot ID: P07437
  ENSP ID: ENSP00000406811

SEQ ID NO: 93649 - protein, 372 aa, Homo sapiens; identical to SEQ ID NO: 93626
  Payload ID: 18687
  Gene Name: tubulin, beta class I
  ENSP ID: ENSP00000406981

SEQ ID NO: 93650 - protein, 372 aa, Homo sapiens; identical to SEQ ID NO: 93626
  Payload ID: 18687
  Gene Name: tubulin, beta class I
  ENSP ID: ENSP00000407673

SEQ ID NO: 93651 - protein, 426 aa, Homo sapiens; identical to SEQ ID NO: 93629
  Payload ID: 18687
  Gene Name: tubulin, beta class I
  ENSP ID: ENSP00000409249

SEQ ID NO: 93652 - protein, 444 aa, Homo sapiens; identical to SEQ ID NO: 93625
  Payload ID: 18687
  Gene Name: tubulin, beta class I
  Uniprot ID: P07437
  ENSP ID: ENSP00000410071

SEQ ID NO: 93653 - protein, 444 aa, Homo sapiens; identical to SEQ ID NO: 93625
  Payload ID: 18687
  Gene Name: tubulin, beta class I
  Uniprot ID: P07437
  ENSP ID: ENSP00000410829

SEQ ID NO: 93654 - protein, 426 aa, Homo sapiens; identical to SEQ ID NO: 93629
  Payload ID: 18687
  Gene Name: tubulin, beta class I
  ENSP ID: ENSP00000413589

SEQ ID NO: 93655 - protein, 372 aa, Homo sapiens; identical to SEQ ID NO: 93626
  Payload ID: 18687
  Gene Name: tubulin, beta class I
  ENSP ID: ENSP00000414479

SEQ ID NO: 93656 - protein, 372 aa, Homo sapiens; identical to SEQ ID NO: 93626
  Payload ID: 18687
  Gene Name: tubulin, beta class I
  ENSP ID: ENSP00000416480

SEQ ID NO: 93657 - protein, 453 aa, Homo sapiens
  Payload ID: 18688
  Gene Name: tubulin, delta 1
  Uniprot ID: Q9UJT1
  ENSP ID: ENSP00000320797
MSIVTVQLGQCGNQIGFEVFDALLSDSHSSQGLCSMRENEAYQASCKERFFSEEENGVPIARAVLVDMEPKVINQMLSKAAQSGQWKYGQHACFCQKQGSGNNWAYGYSVHGPRHEESIMNIIRKEVEKCDSFSGFFIIMSMAGGTGSGLGAFVTQNLEDQYSNSLKMNQIIWPYGTGEVIVQNYNSILTLSHLYRSSDALLLHENDAIHKICAKLMNIKQISFSDINQVLAHQLGSVFQPTYSAESSFHYRRNPLGDLMEHLVPHPEFKMLSVRNIPHMSENSLAYTTFTWAGLLKHLRQMLISNAKMEEGIDRHVWPPLSGLPPLSKMSLNKDLHFNTSIANLVILRGKDVQSADVEGFKDPALYTSWLKPVNAFNVWKTQRAFSKYEKSAVLVSNSQFLVKPLDMIVGKAWNMFASKAYIHQYTKFGIEEEDFLDSFTSLEQVVASYCNL

SEQ ID NO: 93658 - protein, 398 aa, Homo sapiens
  Payload ID: 18688
  Gene Name: tubulin, delta 1
  Uniprot ID: Q9UJT1
  ENSP ID: ENSP00000342399
MSIVTVQLGQCGNQIGFEVFDALLSDSHSSQGLCSMRENEAYQASCKERFFSEEENGVPIARAVLVDMEPKVINQMLSKAAQSGQWKYGQHACFCQKQGSGNNWAYGYSVHGPRHEESIMNIIRKEVEKCDSFSGFFIIMSMAGGTGSGLGAFVTQNLEDQYSNSLKMNQIIWPYGTGEVIVQNYNSILTLSHLYRSSDALLLHENDAIHKICAKLMNIKQISFSDINQVLAHQLGSVFQPTYSAESSFHYRRNPLGIDRHVWPPLSGLPPLSKMSLNKDLHFNTSIANLVILRGKDVQSADVEGFKDPALYTSWLKPVNAFNVWKTQRAFSKYEKSAVLVSNSQFLVKPLDMIVGKAWNMFASKAYIHQYTKFGIEEEDFLDSFTSLEQVVASYCNL

SEQ ID NO: 93659 - protein, 199 aa, Homo sapiens
  Payload ID: 18688
  Gene Name: tubulin, delta 1
  Uniprot ID: Q9UJT1
  ENSP ID: ENSP00000342561
MSIVTVQLGQCGNQIGFEVFDALLSDSHSSQGLCSMRENEAYQASCKERFFSEEENGGIDRHVWPPLSGLPPLSKMSLNKDLHFNTSIANLVILRGKDVQSADVEGFKDPALYTSWLKPVNAFNVWKTQRAFSKYEKSAVLVSNSQFLVKPLDMIVGKAWNMFASKAYIHQYTKFGIEEEDFLDSFTSLEQVVASYCNL

SEQ ID NO: 93660 - protein, 351 aa, Homo sapiens
  Payload ID: 18688
  Gene Name: tubulin, delta 1
  Uniprot ID: Q9UJT1
  ENSP ID: ENSP00000365262
MSIVTVQLGQCGNQIGFEVFDALLSDSHSSQGLCSMRENEAYQASCKERFFSEEENGVPIARAVLVDMEPKVINQMLSKAAQSGQWKYGQHACFCQKQGSGNNWAYGYSVHGPRHEESIMNIIRKEVEKCDSFSGFFIIMSMAGGTGSGLGAFVTQNLEDQYSNSLKMNQIIWPYGTGEVIVQNYNSILTLSHLYRSSDALLLHENDAIHKICAKLMNIKQISFSDINQVLAHQLGSVFQPTYSAESSFHYRRNPLEGFKDPALYTSWLKPVNAFNVWKTQRAFSKYEKSAVLVSNSQFLVKPLDMIVGKAWNMFASKAYIHQYTKFGIEEEDFLDSFTSLEQVVASYCNL

SEQ ID NO: 93661 - protein, 396 aa, Homo sapiens
  Payload ID: 18688
  Gene Name: tubulin, delta 1
  Uniprot ID: Q9UJT1
  ENSP ID: ENSP00000377785
MSIVTVQLGQCGNQIGFEVFDALLSDSHSSQGLCSMRENEAYQASCKERFFSEEENGVPIARAVLVDMEPKVINQMLSKAAQSGQWKYGQHACFCQKQGSGNNWAYGYSVHGPRHEESIMNIIRKEVEKCDSFSGFFIIMSMAGGTGSGLGAFVTQNLEDQYSNSLKMNQIIWPYGTGEVIVQNYNSILTLSHLYRSSDALLLHENDAIHKICAKLMNIKQISFSDINQVLAHQLGSVFQPTYSAESSFHYRRNPLGDLMEHLVPHPEFKMLSVRNIPHMSENSLAYTTFTWAGLLKHLRQMLISNAKMEEGIDRHVWPPLSGLPPLSKMSLNKDLHFNTSIANLVILRGKDVQSADVGKKFRAYIHQYTKFGIEEEDFLDSFTSLEQVVASYCNL

SEQ ID NO: 93662 - protein, 237 aa, Homo sapiens
  Payload ID: 18688
  Gene Name: tubulin, delta 1
  Uniprot ID: Q9UJT1
  ENSP ID: ENSP00000441757
MNIKQISFSDINQVLAHQLGSVFQPTYSAESSFHYRRNPLGDLMEHLVPHPEFKMLSVRNIPHMSENSLAYTTFTWAGLLKHLRQMLISNAKMEEGIDRHVWPPLSGLPPLSKMSLNKDLHFNTSIANLVILRGKDVQSADVEGFKDPALYTSWLKPVNAFNVWKTQRAFSKYEKSAVLVSNSQFLVKPLDMIVGKAWNMFASKAYIHQYTKFGIEEEDFLDSFTSLEQVVASYCNL

SEQ ID NO: 93663 - protein, 97 aa, Homo sapiens
  Payload ID: 18688
  Gene Name: tubulin, delta 1
  ENSP ID: ENSP00000465579
MEPKVINQMLSKAAQSGQWKYGQHACFCQKQGSGNNWAYGYSVHGPRHEESIMNIIRKEVEKCDSFSGFFIIMSMAGGTGSGLGAFVTQNLEDQYSN

SEQ ID NO: 93664 - protein, 41 aa, Homo sapiens
  Payload ID: 18688
  Gene Name: tubulin, delta 1
  ENSP ID: ENSP00000466681
MEPKVINQMLSKAAQSGQWKYGQHACFCQKQGSGNNWAYGY

SEQ ID NO: 93665 - protein, 53 aa, Homo sapiens
  Payload ID: 18688
  Gene Name: tubulin, delta 1
  ENSP ID: ENSP00000467480
MVVFRGNTPSLWLSMSIVTVQLGQCGNQIGFEVFDALLSDSHSSQGLCSMREN

SEQ ID NO: 93666 - protein, 125 aa, Homo sapiens
  Payload ID: 18688
  Gene Name: tubulin, delta 1
  ENSP ID: ENSP00000467915
MSIVTVQLGQCGNQIGFEVFDALLSDSHSSQGLCSMRENEAYQASCKERFFSEEENGVPIARAVLVDMEPKVINQMLSKAAQSGQWKYGQHACFCQKQGSGNNWAYGRDKDSACYPDWSGTPGLQ

SEQ ID NO: 93667 - protein, 453 aa, Homo sapiens; identical to SEQ ID NO: 93657
  Payload ID: 18688
  Gene Name: tubulin, delta 1
  Uniprot ID: Q9UJT1
  ENSP ID: ENSP00000468518

SEQ ID NO: 93668 - protein, 351 aa, Homo sapiens; identical to SEQ ID NO: 93660
  Payload ID: 18688
  Gene Name: tubulin, delta 1
  Uniprot ID: Q9UJT1
  ENSP ID: ENSP00000480387

SEQ ID NO: 93669 - protein, 475 aa, Homo sapiens
  Payload ID: 18689
  Gene Name: tubulin, epsilon 1
  Uniprot ID: Q9UJT0
  ENSP ID: ENSP00000357651
MTQSVVVQVGQCGNQIGCCFWDLALREHAAVNQKGIYDEAISSFFRNVDTRVVGDGGSISKGKICSLKARAVLIDMEEGVVNEILQGPLRDVFDTKQLITDISGSGNNWAVGHKVFGSLYQDQILEKFRKSAEHCDCLQCFFIIHSMGGGTGSGLGTFLLKVLEDEFPEVYRFVTSIYPSGEDDVITSPYNSILAMKELNEHADCVLPIDNQSLFDIISKIDLMVNSGKLGTTVKPKSLVTSSSGALKKQHKKPFDAMNNIVANLLLNLTSSARFEGSLNMDLNEISMNLVPFPQLHYLVSSLTPLYTLTDVNIPPRRLDQMFSDAFSKDHQLLRADPKHSLYLACALMVRGNVQISDLRRNIERLKPSLQFVSWNQEGWKTSLCSVPPVGHSHSLLALANNTCVKPTFMELKERFMRLYKKKAHLHHYLQVEGMEESCFTEAVSSLSALIQEYDQLDATKNMPVQDLPRLSIAM

SEQ ID NO: 93670 - protein, 220 aa, Homo sapiens
  Payload ID: 18689
  Gene Name: tubulin, epsilon 1
  ENSP ID: ENSP00000474458
MTQSVVVQVGQCGNQIGCCFWDLALREHAAVNQKGIYDEAISSFFRNVDTRVVGDGGSISKGKICSLKARAVLIDMEEGVVNEILQGPLRDVFDTKQLITDISGSGNNWAVGHKVFGSLYQDQILEKFRKSAEHCDCLQCFFIIHSMGGGTGSGLGTFLLKVLEDEFPEVYRFVTSIYPSGEDDVITSPYNSILAMKELNEHADCVLPIDNQNIIYIHSS

SEQ ID NO: 93671 - protein, 54 aa, Homo sapiens
  Payload ID: 18689
  Gene Name: tubulin, epsilon 1
  ENSP ID: ENSP00000474989
MTQSVVVQVGQCGNQIGCCFWDLALREHAAVNQKGIYDEAISSFFRNVDTRKSN

SEQ ID NO: 93672 - protein, 53 aa, Homo sapiens
  Payload ID: 18689
  Gene Name: tubulin, epsilon 1
  ENSP ID: ENSP00000475087
MTQSVVVQVGQCGNQIGCCFWDLALREHAAVNQKGIYDEAISSFFRNVDTRQS

SEQ ID NO: 93673 - protein, 451 aa, Homo sapiens
  Payload ID: 18690
  Gene Name: tubulin, gamma 1
  Uniprot ID: P23258
  ENSP ID: ENSP00000251413
MPREIITLQLGQCGNQIGFEFWKQLCAEHGISPEGIVEEFATEGTDRKDVFFYQADDEHYIPRAVLLDLEPRVIHSILNSPYAKLYNPENIYLSEHGGGAGNNWASGFSQGEKIHEDIFDIIDREADGSDSLEGFVLCHSIAGGTGSGLGSYLLERLNDRYPKKLVQTYSVFPNQDEMSDVVVQPYNSLLTLKRLTQNADCVVVLDNTALNRIATDRLHIQNPSFSQINQLVSTIMSASTTTLRYPGYMNNDLIGLIASLIPTPRLHFLMTGYTPLTTDQSVASVRKTTVLDVMRRLLQPKNVMVSTGRDRQTNHCYIAILNIIQGEVDPTQVHKSLQRIRERKLANFIPWGPASIQVALSRKSPYLPSAHRVSGLMMANHTSISSLFERTCRQYDKLRKREAFLEQFRKEDMFKDNFDEMDTSREIVQQLIDEYHAATRPDYISWGTQEQ

SEQ ID NO: 93674 - protein, 265 aa, Homo sapiens
  Payload ID: 18690
  Gene Name: tubulin, gamma 1
  ENSP ID: ENSP00000464867
MPREIITLQLGQCGNQIGFEFWKQLCAEHGISPEGIVEEFATEGTDRKDVFFYQADDEHYIPRAVLLDLEPRVIHSILNSPYAKLYNPENIYLSEHGGGAGNNWASGFSQVVSYSLAGPTTRWGEKIHEDIFDIIDREADGSDSLEGFVLCHSIAGGTGSGLGSYLLERLNDRYPKKLVQTYSVFPNQDEMSDVVVQPYNSLLTLKRLTQNADCVVVLDNTALNRIATDRLHIQNPSFSQINQLVSTIMSASTTTLRYPGYMNND

SEQ ID NO: 93675 - protein, 135 aa, Homo sapiens
  Payload ID: 18690
  Gene Name: tubulin, gamma 1
  ENSP ID: ENSP00000465582
MPREIITLQLGQCGNQIGFEFWKQLCAEHGISPEGIVEEFATEGTDRKDVFFYQADDEHYIPRAVLLDLEPRVIHSILNSPYAKLYNPENIYLSEHGGGAGNNWASGFSQGEKIHEDIFDIIDREADGSDSLEVS

SEQ ID NO: 93676 - protein, 451 aa, Homo sapiens
  Payload ID: 18691
  Gene Name: tubulin, gamma 2
  Uniprot ID: Q9NRH3
  ENSP ID: ENSP00000251412
MPREIITLQLGQCGNQIGFEFWKQLCAEHGISPEGIVEEFATEGTDRKDVFFYQADDEHYIPRAVLLDLEPRVIHSILNSPYAKLYNPENIYLSEHGGGAGNNWASGFSQGEKIHEDIFDIIDREADGSDSLEGFVLCHSIAGGTGSGLGSYLLERLNDRYPKKLVQTYSVFPYQDEMSDVVVQPYNSLLTLKRLTQNADCVVVLDNTALNRIATDRLHIQNPSFSQINQLVSTIMSASTTTLRYPGYMNNDLIGLIASLIPTPRLHFLMTGYTPLTTDQSVASVRKTTVLDVMRRLLQPKNVMVSTGRDRQTNHCYIAILNIIQGEVDPTQVHKSLQRIRERKLANFIPWGPASIQVALSRKSPYLPSAHRVSGLMMANHTSISSLFESSCQQFDKLRKRDAFLEQFRKEDMFKDNFDEMDRSREVVQELIDEYHAATQPDYISWGTQEQ

SEQ ID NO: 93677 - protein, 902 aa, Homo sapiens
  Payload ID: 18692
  Gene Name: tubulin, gamma complex associated protein 2
  Uniprot ID: Q9BSJ2
  ENSP ID: ENSP00000252936
MSEFRIHHDVNELLSLLRVHGGDGAEVYIDLLQKNRTPYVTTTVSAHSAKVKIAEFSRTPEDFLKKYDELKSKNTRNLDPLVYLLSKLTEDKETLQYLQQNAKERAELAAAAVGSSTTSINVPAAASKISMQELEELRKQLGSVATGSTLQQSLELKRKMLRDKQNKKNSGQHLPIFPAWVYERPALIGDFLIGAGISTDTALPIGTLPLASQESAVVEDLLYVLVGVDGRYVSAQPLAGRQSRTFLVDPNLDLSIRELVHRILPVAASYSAVTRFIEEKSSFEYGQVNHALAAAMRTLVKEHLILVSQLEQLHRQGLLSLQKLWFYIQPAMRTMDILASLATSVDKGECLGGSTLSLLHDRSFSYTGDSQAQELCLYLTKAASAPYFEVLEKWIYRGIIHDPYSEFMVEEHELRKERIQEDYNDKYWDQRYTIVQQQIPSFLQKMADKILSTGKYLNVVRECGHDVTCPVAKEIIYTLKERAYVEQIEKAFNYASKVLLDFLMEEKELVAHLRSIKRYFLMDQGDFFVHFMDLAEEELRKPVEDITPPRLEALLELALRMSTANTDPFKDDLKIDLMPHDLITQLLRVLAIETKQEKAMAHADPTELALSGLEAFSFDYIVKWPLSLIINRKALTRYQMLFRHMFYCKHVERQLCSVWISNKTAKQHSLHSAQWFAGAFTLRQRMLNFVQNIQYYMMFEVMEPTWHILEKNLKSASNIDDVLGHHTGFLDTCLKDCMLTNPELLKVFSKLMSVCVMFTNCMQKFTQSMKLDGELGGQTLEHSTVLGLPAGAEERARKELARKHLAEHADTVQLVSGFEATINKFDKNFSAHLLDLLARLSIYSTSDCEHGMASVISRLDFNGFYTERLERLSAERSQKATPQVPVLRGPPAPAPRVAVTAQ

SEQ ID NO: 93678 - protein, 495 aa, Homo sapiens
  Payload ID: 18692
  Gene Name: tubulin, gamma complex associated protein 2
  ENSP ID: ENSP00000357550
MVEEHELRKERIQEDYNDKYWDQRYTIVQQQIPSFLQKMADKILSTGKYLNVVRECGHDVTCPVAKEIIYTLKERAYVEQIEKAFNYASKVLLDFLMEEKELVAHLRSIKRYFLMDQGDFFVHFMDLAEEELRKPVEDITPPRLEALLELALRMSTANTDPFKDDLKIDLMPHDLITQLLRVLAIETKQEKAMAHADPTELALSGLEAFSFDYIVKWPLSLIINRKALTRYQMLFRHMFYCKHVERQLCSVWISNKTAKQHSLHSAQWFAGAFTLRQRMLNFVQNIQYYMMFEVMEPTWHILEKNLKSASNIDDVLGHHTGFLDTCLKDCMLTNPELLKVFSKLMSVCVMFTNCMQKFTQSMKLDGELGGQTLEHSTVLGLPAGAEERARKELARKHLAEHADTVQLVSGFEATINKFDKNFSAHLLDLLARLSIYSTSDCEHGMASVISRLDFNGFYTERLERLSAERSQKATPQVPVLRGPPAPAPRVAVTAQ

SEQ ID NO: 93679 - protein, 902 aa, Homo sapiens; identical to SEQ ID NO: 93677
  Payload ID: 18692
  Gene Name: tubulin, gamma complex associated protein 2
  Uniprot ID: Q9BSJ2
  ENSP ID: ENSP00000357551

SEQ ID NO: 93680 - protein, 772 aa, Homo sapiens
  Payload ID: 18692
  Gene Name: tubulin, gamma complex associated protein 2
  Uniprot ID: Q9BSJ2
  ENSP ID: ENSP00000395666
MQELEELRKQLGSVATGSTLQQSLELKRKMLRDKQNKKNSGQHLPIFPAWVYERPALIGDFLIGAGISTDTALPIGTLPLASQESAVVEDLLYVLVGVDGRYVSAQPLAGRQSRTFLVDPNLDLSIRELVHRILPVAASYSAVTRFIEEKSSFEYGQVNHALAAAMRTLVKEHLILVSQLEQLHRQGLLSLQKLWFYIQPAMRTMDILASLATSVDKGECLGGSTLSLLHDRSFSYTGDSQAQELCLYLTKAASAPYFEVLEKWIYRGIIHDPYSEFMVEEHELRKERIQEDYNDKYWDQRYTIVQQQIPSFLQKMADKILSTGKYLNVVRECGHDVTCPVAKEIIYTLKERAYVEQIEKAFNYASKVLLDFLMEEKELVAHLRSIKRYFLMDQGDFFVHFMDLAEEELRKPVEDITPPRLEALLELALRMSTANTDPFKDDLKIDLMPHDLITQLLRVLAIETKQEKAMAHADPTELALSGLEAFSFDYIVKWPLSLIINRKALTRYQMLFRHMFYCKHVERQLCSVWISNKTAKQHSLHSAQWFAGAFTLRQRMLNFVQNIQYYMMFEVMEPTWHILEKNLKSASNIDDVLGHHTGFLDTCLKDCMLTNPELLKVFSKLMSVCVMFTNCMQKFTQSMKLDGELGGQTLEHSTVLGLPAGAEERARKELARKHLAEHADTVQLVSGFEATINKFDKNFSAHLLDLLARLSIYSTSDCEHGMASVISRLDFNGFYTERLERLSAERSQKATPQVPVLRGPPAPAPRVAVTAQ

SEQ ID NO: 93681 - protein, 721 aa, Homo sapiens
  Payload ID: 18692
  Gene Name: tubulin, gamma complex associated protein 2
  ENSP ID: ENSP00000436438
MSEFRIHHDVNELLSLLRVHGGDGAEVYIDLLQKNRTPYVTTTVSAHSAKVKIAEFSRTPEDFLKKYDELKSKNTRNLDPLVYLLSKLTEDKETLQYLQQNAKERAELAAAAVGSSTTSINVPAAASKISMQELEELRKQLGSVATGSTLQQSLELKRKMLRDKQNKKNSGQHLPIFPAWVYERPALIGDFLIGAGISTDTALPIGTLPLASQESAVVEDLLYVLVGVDGRYVSAQPLAGRQSRTFLVDPNLDLSIRELVHRILPVAASYSAVTRFIEEKSSFEYGQVNHALAAAMRTLVKEHLILVSQLEQLHRQGLLSLQKLWFYIQPAMRTMDILASLATSVDKGECLGGSTLSLLHDRSFSYTGDSQAQELCLYLTKAASAPYFEVLEKWIYRGIIHDPYSEFMVEEHELRKERIQEDYNDKYWDQRYTIVQQQIPSFLQKMADKILSTGKYLNVVRECGHDVTCPVAKEIIYTLKERAYVEQIEKAFNYASKVLLDFLMEEKELVAHLRSIKRYFLMDQGDFFVHFMDLAEEELRKPVEDITPPRLEALLELALRMSTANTDPFKDDLKIDLMPHDLITQLLRVLAIETKQEKAMAHADPTELALSGLEAFSFDYIVKWPLSLIINRKALTRYQMLFRHMFYCKHVERQLCSVWISNKTAKQHSLHSAQWFAGAFTLRQRMLNFVQNIQYYMMFEVMEPTWHILEKNLKSASWTPA

SEQ ID NO: 93682 - protein, 930 aa, Homo sapiens
  Payload ID: 18692
  Gene Name: tubulin, gamma complex associated protein 2
  Uniprot ID: Q9BSJ2
  ENSP ID: ENSP00000446093
MSEFRIHHDVNELLSLLRVHGGDGAEVYIDLLQKNRTPYVTTTVSAHSAKVKIAEFSRTPEDFLKKYDELKSKNTRNLDPLVYLLSKLTEDKETLQYLQQNAKERAELAAAAVGSSTTSINVPAAASKISMQELEELRKQLGSVATGSTLQQSLELKRKMLRDKQNKKNSGQHLPIFPAWVYERPALIGDFLIGAGISTDTALPIVLLRWNLALSPRLKCSGVISAHCNLHLPGTLPLASQESAVVEDLLYVLVGVDGRYVSAQPLAGRQSRTFLVDPNLDLSIRELVHRILPVAASYSAVTRFIEEKSSFEYGQVNHALAAAMRTLVKEHLILVSQLEQLHRQGLLSLQKLWFYIQPAMRTMDILASLATSVDKGECLGGSTLSLLHDRSFSYTGDSQAQELCLYLTKAASAPYFEVLEKWIYRGIIHDPYSEFMVEEHELRKERIQEDYNDKYWDQRYTIVQQQIPSFLQKMADKILSTGKYLNVVRECGHDVTCPVAKEIIYTLKERAYVEQIEKAFNYASKVLLDFLMEEKELVAHLRSIKRYFLMDQGDFFVHFMDLAEEELRKPVEDITPPRLEALLELALRMSTANTDPFKDDLKIDLMPHDLITQLLRVLAIETKQEKAMAHADPTELALSGLEAFSFDYIVKWPLSLIINRKALTRYQMLFRHMFYCKHVERQLCSVWISNKTAKQHSLHSAQWFAGAFTLRQRMLNFVQNIQYYMMFEVMEPTWHILEKNLKSASNIDDVLGHHTGFLDTCLKDCMLTNPELLKVFSKLMSVCVMFTNCMQKFTQSMKLDGELGGQTLEHSTVLGLPAGAEERARKELARKHLAEHADTVQLVSGFEATINKFDKNFSAHLLDLLARLSIYSTSDCEHGMASVISRLDFNGFYTERLERLSAERSQKATPQVPVLRGPPAPAPRVAVTAQ

SEQ ID NO: 93683 - protein, 78 aa, Homo sapiens
  Payload ID: 18692
  Gene Name: tubulin, gamma complex associated protein 2
  ENSP ID: ENSP00000473262
MSEFRIHHDVNELLSLLRVHGGDGAEVYIDLLQKNRTPYVTTTVSAHSAKAGMHVARSCLTAVSTSQADVILPSQLPK

SEQ ID NO: 93684 - protein, 907 aa, Homo sapiens
  Payload ID: 18693
  Gene Name: tubulin, gamma complex associated protein 3
  Uniprot ID: Q96CW5
  ENSP ID: ENSP00000261965
MATPDQKSPNVLLQNLCCRILGRSEADVAQQFQYAVRVIGSNFAPTVERDEFLVAEKIKKELIRQRREADAALFSELHRKLHSQGVLKNKWSILYLLLSLSEDPRRQPSKVSSYATLFAQALPRDAHSTPYYYARPQTLPLSYQDRSAQSAQSSGSVGSSGISSIGLCALSGPAPAPQSLLPGQSNQAPGVGDCLRQQLGSRLAWTLTANQPSSQATTSKGVPSAVSRNMTRSRREGDTGGTMEITEAALVRDILYVFQGIDGKNIKMNNTENCYKVEGKANLSRSLRDTAVRLSELGWLHNKIRRYTDQRSLDRSFGLVGQSFCAALHQELREYYRLLSVLHSQLQLEDDQGVNLGLESSLTLRRLLVWTYDPKIRLKTLAALVDHCQGRKGGELASAVHAYTKTGDPYMRSLVQHILSLVSHPVLSFLYRWIYDGELEDTYHEFFVASDPTVKTDRLWHDKYTLRKSMIPSFMTMDQSRKVLLIGKSINFLHQVCHDQTPTTKMIAVTKSAESPQDAADLFTDLENAFQGKIDAAYFETSKYLLDVLNKKYSLLDHMQAMRRYLLLGQGDFIRHLMDLLKPELVRPATTLYQHNLTGILETAVRATNAQFDSPEILRRLDVRLLEVSPGDTGWDVFSLDYHVDGPIATVFTRECMSHYLRVFNFLWRAKRMEYILTDIRKGHMCNAKLLRNMPEFSGVLHQCHILASEMVHFIHQMQYYITFEVLECSWDELWNKVQQAQDLDHIIAAHEVFLDTIISRCLLDSDSRALLNQLRAVFDQIIELQNAQDAIYRAALEELQRRLQFEEKKKQREIEGQWGVTAAEEEEENKRIGEFKESIPKMCSQLRILTHFYQGIVQQFLVLLTTSSDESLRFLSFRLDFNEHYKAREPRLRVSLGTRGRRSSHT

SEQ ID NO: 93685 - protein, 824 aa, Homo sapiens
  Payload ID: 18693
  Gene Name: tubulin, gamma complex associated protein 3
  Uniprot ID: Q96CW5
  ENSP ID: ENSP00000364821
MATPDQKSPNVLLQNLCCRILGRSEADVAQQFQYAVRVIGSNFAPTVERDEFLVAEKIKKELIRQRREADAALFSELHRKLHSQGVLKNKWSILYLLLSLSEDPRRQPSKVSSYATLFAQALPRDAHSTPYYYARPQTLPLSYQDRSAQSAQSSGSVGSSGISSIGLCALSGPAPAPQSLLPGQSNQAPGVGDCLRQQLGSRLAWTLTANQPSSQATTSKGVPSAVSRNMTRSRREGDTGGTMEITEAALVRDILYVFQGIDGKNIKMNNTENCYKVEGKANLSRSLRDTAVRLSELGWLHNKIRRYTDQRSLDRSFGLVGQSFCAALHQELREYYRLLSVLHSQLQLEDDQGVNLGLESSLTLRRLLVWTYDPKIRLKTLAALVDHCQGRKGGELASAVHAYTKTGDPYMRSLVQHILSLVSHPVLSFLYRWIYDGELEDTYHEFFVASDPTVKTDRLWHDKYTLRKSMIPSFMTMDQSRKVLLIGKSINFLHQVCHDQTPTTKMIAVTKSAESPQDAADLFTDLENAFQGKIDAAYFETSKYLLDVLNKKYSLLDHMQAMRRYLLLGQGDFIRHLMDLLKPELVRPATTLYQHNLTGILETAVRATNAQFDSPEILRRLDVRLLEVSPGDTGWDVFSLDYHVDGPIATVFTRECMSHYLRVFNFLWRAKRMEYILTDIRKGHMCNAKLLRNMPEFSGVLHQCHILASEMVHFIHQMQYYITFEVLECSWDELWNKVQQAQDLDHIIAAHEVFLDTIISRCLLDSDSRALLNQLRAVFDQIIELQNAQDAIYRAALEELQRRLQFEEKKKQREIEVEMCLYCV

SEQ ID NO: 93686 - protein, 439 aa, Homo sapiens
  Payload ID: 18693
  Gene Name: tubulin, gamma complex associated protein 3
  ENSP ID: ENSP00000478276
MATPDQKSPNVLLQNLCCRILGRSEADVAQQFQYAVRVIGSNFAPTVERDEFLVAEKIKKELIRQRREADAALFSELHRKLHSQGVLKNKWSILYLLLSLSEDPRRQPSKVSSYATLFAQALPRDAHSTPYYYARPQTLPLSYQDRSAQSAQSSGSVGSSGISSIGLCALSGPAPAPQSLLPGQSNQAPGVGDCLRQQLGSRLAWTLTANQPSSQATTSKGVPSAVSRNMTRSRREGDTGGTMEITEAALVRDILYVFQGIDGKNIKMNNTENCYKVEGKANLSRSLRDTAVRLSELGWLHNKIRRYTDQRSLDRSFGLVGQSFCAALHQELREYYRLLSVLHSQLQLEDDQGVNLGLESSLTLRRLLVWTYDPKIRLKTLAALVDHCQGPTRVFPTHVFPTRDFPTRDFPTRDFPMHVFPTRVFPTRVWHSLCFRTRL

SEQ ID NO: 93687 - protein, 437 aa, Homo sapiens
  Payload ID: 18693
  Gene Name: tubulin, gamma complex associated protein 3
  ENSP ID: ENSP00000480096
MATPDQKSPNVLLQNLCCRILGRSEADVAQQFQYAVRVIGSNFAPTVERDEFLVAEKIKKELIRQRREADAALFSELHRKLHSQGVLKNKWSILYLLLSLSEDPRRQPSKVSSYATLFAQALPRDAHSTPYYYARPQTLPLSYQDRSAQSAQSSGSVGSSGISSIGLCALSGPAPAPQSLLPGQSNQAPGVGDCLRQQLGSRLAWTLTANQPSSQATTSKGVPSAVSRNMTRSRREGDTGGTMEITEAALVRDILYVFQGIDGKNIKMNNTENCYKVEGKANLSRSLRDTAVRLSELGWLHNKIRRYTDQRSLDRSFGLVGQSFCAALHQELREYYRLLSVLHSQLQLEDDQGVNLGLESSLTLRRLLVWTYDPKIRLKTLAALVDHCQGPTRVFPTHVFPTRDFPTRDFPTRDFPTSFPRVFPTRVWHSLCFRTRL

SEQ ID NO: 93688 - protein, 129 aa, Homo sapiens
  Payload ID: 18693
  Gene Name: tubulin, gamma complex associated protein 3
  ENSP ID: ENSP00000482912
  MOD_RES (1)..(1): Any amino acid
XCAALHQELREYYRLLSVLHSQLQLEDDQGVNLGLESSLTLRRLLVWTYDPKIRLKTLAALVDHCQGRKGGELASAVHAYTKTGDPYMRSLVQHILSLVSHPVLSFLYRWIYDGELEDTYHEVRIGVRF

SEQ ID NO: 93689 - protein, 129 aa, Homo sapiens
  Payload ID: 18693
  Gene Name: tubulin, gamma complex associated protein 3
  ENSP ID: ENSP00000488256
  MOD_RES (1)..(1): Any amino acid
XFSGVLHQCHILASEMVHFIHQMQYYITFEVLECSWDELWNKVQQAQDLDHIIAAHEVFLDTIISRCLLDSDSRALLNQLRAVFDQIIELQNAQDAIYRAALEELQRRLQFEEKKKQREIEVEMCLYCV

SEQ ID NO: 93690 - protein, 212 aa, Homo sapiens
  Payload ID: 18693
  Gene Name: tubulin, gamma complex associated protein 3
  ENSP ID: ENSP00000488264
  MOD_RES (1)..(1): Any amino acid
XFSGVLHQCHILASEMVHFIHQMQYYITFEVLECSWDELWNKVQQAQDLDHIIAAHEVFLDTIISRCLLDSDSRALLNQLRAVFDQIIELQNAQDAIYRAALEELQRRLQFEEKKKQREIEGQWGVTAAEEEEENKRIGEFKESIPKMCSQLRILTHFYQGIVQQFLVLLTTSSDESLRFLSFRLDFNEHYKAREPRLRVSLGTRGRRSSHT

SEQ ID NO: 93691 - protein, 667 aa, Homo sapiens
  Payload ID: 18694
  Gene Name: tubulin, gamma complex associated protein 4
  Uniprot ID: Q9UGJ1
  ENSP ID: ENSP00000260383
MIHELLLALSGYPGSIFTWNKRSGLQVSQDFPFLHPSETSVLNRLCRLGTDYIRFTEFIEQYTGHVQQQDHHPSQQGQGGLHGIYLRAFCTGLDSVLQPYRQALLDLEQEFLGDPHLSISHVNYFLDQFQLLFPSVMVVVEQIKSQKIHGCQILETVYKHSCGGLPPVRSALEKILAVCHGVMYKQLSAWMLHGLLLDQHEEFFIKQGPSSGNVSAQPEEDEEDLGIGGLTGKQLRELQDLRLIEEENMLAPSLKQFSLRVEILPSYIPVRVAEKILFVGESVQMFENQNVNLTRKGSILKNQEDTFAAELHRLKQQPLFSLVDFEQVVDRIRSTVAEHLWKLMVEESDLLGQLKIIKDFYLLGRGELFQAFIDTAQHMLKTPPTAVTEHDVNVAFQQSAHKVLLDDDNLLPLLHLTIEYHGKEHKADATQAREGPSRETSPREAPASGWAALGLSYKVQWPLHILFTPAVLEKYNVVFKYLLSVRRVQAELQHCWALQMQRKHLKSNQTDAIKWRLRNHMAFLVDNLQYYLQVDVLESQFSQLLHQINSTRDFESIRLAHDHFLSNLLAQSFILLKPVFHCLNEILDLCHSFCSLVSQNLGPLDERGAAQLSILVKGFSRQSSLLFKILSSVRNHQINSDLAQLLLRLDYNKYYTQAGGTLGSFGM

SEQ ID NO: 93692 - protein, 82 aa, Homo sapiens
  Payload ID: 18694
  Gene Name: tubulin, gamma complex associated protein 4
  ENSP ID: ENSP00000454696
MIHELLLALSGYPGSIFTWNKRSGLQVSQDFPFLHPSETSVLNRLCRLGTDYIRFTEFIEQYTGHVQQQVSGPELRSWLLFV

SEQ ID NO: 93693 - protein, 171 aa, Homo sapiens
  Payload ID: 18694
  Gene Name: tubulin, gamma complex associated protein 4
  ENSP ID: ENSP00000454915
KVQWPLHILFTPAVLEKYNVVFKYLLSVRRVQAELQHCWALQMQRKHLKSNQTDAIKWRLRNHMAFLVDNLQYYLQVDVLESQFSQLLHQINSTRDFESIRLAHDHFLSNLLAQSFILLKPGFSRQSSLLFKILSSVRNHQINSDLAQLLLRLDYNKYYTQAGGTLGSFGM

SEQ ID NO: 93694 - protein, 397 aa, Homo sapiens
  Payload ID: 18694
  Gene Name: tubulin, gamma complex associated protein 4
  ENSP ID: ENSP00000455474
  MOD_RES (1)..(1): Any amino acid
XGIYLRAFCTGLDSVLQPYRQALLDLEQEFLGDPHLSISHVNYFLDQFQLLFPSVMVVVEQIKSQKIHGCQILETVYKHSCGGLPPVRSALEKILAVCHGVMYKQLSAWMLHGLLLDQHEEFFIKQGPSSGNVSAQPEEDEEDLGIGGLTGKQLRELQDLRLIEEENMLAPSLKQFSLRVEILPSYIPVRVAEKILFVGESVQMFENQNVNLTRKGSILKNQEDTFAAELHRLKQQPLFSLVDFEQVVDRIRSTVAEHLWKLMVEESDLLGQLKIIKDFYLLGRGELFQAFIDTAQHMLKTPPTAVTEHDVNVAFQQSAHKVLLDDDNLLPLLHLTIEYHGKEHKADATQAREGPSRETSPREAPASGWAALGLSYKVQWPLHILFTPAVLEKNRQF

SEQ ID NO: 93695 - protein, 66 aa, Homo sapiens
  Payload ID: 18694
  Gene Name: tubulin, gamma complex associated protein 4
  ENSP ID: ENSP00000455555
LLAQSFILLKPVFHCLNEILDLCHSFCSLVSQNLGPLDERGAAQLSILVKVRLPGSMQPCRKDRGL

SEQ ID NO: 93696 - protein, 103 aa, Homo sapiens
  Payload ID: 18694
  Gene Name: tubulin, gamma complex associated protein 4
  ENSP ID: ENSP00000455993
KSQKIHGCQILETVYKHSCGGLPPVRSALEKILAVCHGVMYKQLSAWMLHGLLLDQHEEFFIKQGPSSGNVSAQPEEDEEDLGIGGLTGKQLRELQDLSQKTM

SEQ ID NO: 93697 - protein, 105 aa, Homo sapiens
  Payload ID: 18694
  Gene Name: tubulin, gamma complex associated protein 4
  ENSP ID: ENSP00000456550
FLSNLLAQSFILLKPVFHCLNEILDLCHSFCSLVSQNLGPLDERGAAQLSILVKGFSRQSSLLFKILSSVRNHQINSDLAQLLLRLDYNKYYTQAGGTLGRKKPC

SEQ ID NO: 93698 - protein, 666 aa, Homo sapiens
  Payload ID: 18694
  Gene Name: tubulin, gamma complex associated protein 4
  Uniprot ID: Q9UGJ1
  ENSP ID: ENSP00000456648
MIHELLLALSGYPGSIFTWNKRSGLQVSQDFPFLHPSETSVLNRLCRLGTDYIRFTEFIEQYTGHVQQQDHHPSQQGQGGLHGIYLRAFCTGLDSVLQPYRQALLDLEQEFLGDPHLSISHVNYFLDQFQLLFPSVMVVVEQIKSQKIHGCQILETVYKHSCGGLPPVRSALEKILAVCHGVMYKQLSAWMLHGLLLDQHEEFFIKQGPSSGNVSAQPEEDEEDLGIGGLTGKQLRELQDLRLIEEENMLAPSLKQFSLRVEILPSYIPVRVAEKILFVGESVQMFENQNVNLTRKGSILKNQEDTFAAELHRLKQQPLFSLVDFEQVVDRIRSTVAEHLWKLMVEESDLLGQLKIIKDFYLLGRGELFQAFIDTAQHMLKTPPTAVTEHDVNVAFQQSAHKVLLDDDNLLPLLHLTIEYHGKEHKDATQAREGPSRETSPREAPASGWAALGLSYKVQWPLHILFTPAVLEKYNVVFKYLLSVRRVQAELQHCWALQMQRKHLKSNQTDAIKWRLRNHMAFLVDNLQYYLQVDVLESQFSQLLHQINSTRDFESIRLAHDHFLSNLLAQSFILLKPVFHCLNEILDLCHSFCSLVSQNLGPLDERGAAQLSILVKGFSRQSSLLFKILSSVRNHQINSDLAQLLLRLDYNKYYTQAGGTLGSFGM

SEQ ID NO: 93699 - protein, 194 aa, Homo sapiens
  Payload ID: 18695
  Gene Name: tubulin, gamma complex associated protein 5
  ENSP ID: ENSP00000479530
  MOD_RES (1)..(1): Any amino acid
XASWKRLTEEFLNAPLPSIKEIKTDAHYSILSLLLCLSDSPSNSSYVETPRNKEVEKKDDFDWGKYLMEDEEMDIGPYMDTPNWSEESEEENDQQPLSREDSGIQVDRTPLEEQDQNRKLDPCISWKADEPDDRSWLEHHVVHQYWTARPSQFPHSLHLHSNLAAVWDQHLYSSDPLYVPDDRVLVTETQVIRE

SEQ ID NO: 93700 - protein, 167 aa, Homo sapiens
  Payload ID: 18695
  Gene Name: tubulin, gamma complex associated protein 5
  ENSP ID: ENSP00000479810
  MOD_RES (1)..(1): Any amino acid
XLTEEFLNAPLPSIKEIKTDAHYSILSLLLCLSDSPSNSSYVETPRNKEVEKKDDFDWGKYLMEDEEMDIGPYMDTPNWSEESEEENDQQPLSREDSGIQVDRTPLEEQDQNRKLDPCISWKDDRSWLEHHVVHQYWTARPSQFPHSLHLHSNLAAVWDQHLYSSDP

SEQ ID NO: 93701 - protein, 1024 aa, Homo sapiens
  Payload ID: 18695
  Gene Name: tubulin, gamma complex associated protein 5
  Uniprot ID: Q96RT8
  ENSP ID: ENSP00000480316
MARHGPPWSRLDAQQERDVRELVRGVAGLQDEADPNFQLALNFAWSNFRFHRFLDVNSHKIEKTIEGIYEKFVIHSDLSKAASWKRLTEEFLNAPLPSIKEIKTDAHYSILSLLLCLSDSPSNSSYVETPRNKEVEKKDDFDWGKYLMEDEEMDIGPYMDTPNWSEESEEENDQQPLSREDSGIQVDRTPLEEQDQNRKLDPCISWKDEPDDRSWLEHHVVHQYWTARPSQFPHSLHLHSNLAAVWDQHLYSSDPLYVPDDRVLVTETQVIRETLWLLSGVKKLFIFQLIDGKVTVRNNIIVTHLTHSCLRSVLEQIAAYGQVVFRLQEFIDEVMGHSSESMLPGSGSVPKKSTEAPFRTYQAFMWALYKYFISFKEELAEIEKCIINNDTTITLAIVVDKLAPRLSQLKVLHKVFSTGVAEVPPDTRNVVRASHLLNTLYKAILEYDNVGEASEQTVSLLFSLWVETVRPYLQTVDEWIVHGHLWDGAREFIIQRNKNVPVNHRDFWYATYTLYSVSEKTENEEKMSDNASASSGSDQGPSSRQHTMVSFLKPVLKQIIMAGKSMQLLKNLQCAESTTCQAGARDAERKSLYTLFLESVQSRLRHGEDSTPQVLTEQQATKENLMKMQSIAESHLELDDVHDPLLAINFARMYLEQSDFHEKFAGGDVCVDRSSESVTCQTFELTLRSCLYPHIDKQYLDCCGNLMQTLKKDYRLVEYLQAMRNFFLMEGGDTMYDFYTSIFDKIREKETWQNVSFLNVQLQEAVGQRYPEDSSRLSISFENVDTAKKKLPVHILDGLTLSYKVPWPVDIVISLECQKIYNQVFLLLLQIKWAKYSLDVLLFGELVSTAEKPRLKEGLIHEQDTVAQFGPQKEPVRQQIHRMFLLRVKLMHFVNSLHNYIMTRILHSTGLEFQHQVEEAKDLDQLIKIHYRYLSTIHDRCLLREKVSFVKEAIMKVLNLALMFADGWQAGLGTWRMESIEKMESDFKNCHMFLVTILNKAVCRGSFPHLESLALSLMAGMEQS

SEQ ID NO: 93702 - protein, 1024 aa, Homo sapiens
  Payload ID: 18695
  Gene Name: tubulin, gamma complex associated protein 5
  Uniprot ID: Q96RT8
  ENSP ID: ENSP00000481853
MARHGPPWSRLDAQQERDVRELVRGVAGLQDEADPNFQLALNFAWSNFRFHRFLDVNSHKIEKTIEGIYEKFVIHSDLSKAASWKRLTEEFLNAPLPSIKEIKTDAHYSILSLLLCLSDSPSNSSYVETPRNKEVEKKDDFDWGKYLMEDEEMDIGPYMDTPNWSEESEEENDQQPLSREDSGIQVDRTPLEEQDQNRKLDPCISWKDEPDDRSWLEHHVVHQYWTARPSQFPHSLHLHSNLAAVWDQHLYSSDPLYVPDDRVLVTETQVIRETLWLLSGVKKLFIFQLIDGKVTVRNNIIVTHLTHSCLRSVLEQIAAYGQVVFRLQEFIDEVMGHSSESMLPGSGSVPKKSTEAPFRTYQAFMWALYKYFISFKEELAEIEKCIINNDTTITLAIVVDKLAPRLSQLKVLHKVFSTGVAEVPPDTRNVVRASHLLNTLYKAILEYDNVGEASEQTVSLLFSLWVETVRPYLQTVDEWIVHGHLWDGAREFIIQRNKNVPVNHRDFWYATYTLYSVSEKTENEEKMSDNASASSGSDQGPSSRQHTMVSFLKPVLKQIIMAGKSMQLLKNLQCAESTTCQAGARDAERKSLYTLFLESVQSRLRHGEDSTPQVLTEQQATKENLMKMQSIAESHLELDDVHDPLLAINFARMYLEQSDFHEKFAGGDVCVDRSSESVTCQTFELTLRSCLYPHIDKQYLDCCGNLMQTLKKDYRLVEYLQAMRNFFLMEGGDTMYDFYTSIFDKIREKETWQNVSFLNVQLQEAVGQRYPEDSSRLSISFENVDTAKKKLPVHILDGLTLSYKVPWPVDIVISLECQKIYNQVFLLLLQIKWAKYSLDVLLFGELVSTAEKPRLKEGLIHEQDTVAQFGPQKEPVRQQIHRMFLLRVKLMHFVNSLHNYIMTRILHSTGLEFQHQVEEAKDLDQLIKIHYRYLSTIHDRCLLREKVSFVKEAIMKVLNLALMFADGWQAGLGTWRMESIEKMESDFKNCHMFLVTILNKAVCRGSFPHCEYIMLKYFYLCISL

SEQ ID NO: 93703 - protein, 226 aa, Homo sapiens
  Payload ID: 18695
  Gene Name: tubulin, gamma complex associated protein 5
  ENSP ID: ENSP00000483015
  MOD_RES (1)..(1): Any amino acid
XLVEYLQAMRNFFLMEGGDTMYDFYTSIFDKIREKETWQNVSFLNVQLQEAVGQRYPEDSSRKWRPGTVAHTCNASTLGGRGGGSPEVRSSRPAWPTCLSISFENVDTAKKKLPVHILDGLTLSYKVPWPVDIVISLECQKIYNQVFLLLLQIKWAKYSLDVLLFGELVSTAEKPRLKEGLIHEQDTVAQFGPQKEPVRQQIHRMFLLRVKLMHFVNSLHNYIMTR

SEQ ID NO: 93704 - protein, 1024 aa, Homo sapiens
  Payload ID: 18695
  Gene Name: tubulin, gamma complex associated protein 5
  ENSP ID: ENSP00000484428
MARHGPPWSRLDAQQERDVRELVRGVAGLQDEADPNFQLALNFAWSNFRFHRFLDVNSHKIEKTIEGIYEKFVIHSDLSKAASWKRLTEEFLNAPLPSIKEIKTDAHYSILSLLLCLSDSPSNSSYVETPRNKEVEKKDDFDWGKYLMEDEEMDIGPYMDTPNWSEESEEENDQQPLSREDSGIQVDRTPLEEQDQNRKLDPCISWKDEPDDRSWLEHHVVHQYWTARPSHFPHSLHLHSNLAAVWDQHLYSSDPLYVPDDRVLVTETQVIRETLWLLSGVKKLFIFQLIDGKVTVRNNIIVTHLTHSCLRSVLEQIAAYGQVVFRLQEFIDEVMGHSSESMLPGSGSVPKKSTEAPFRTYQAFMWALYKYFISFKEELAEIEKCIINNDTTITLAIVVDKLAPRLSQLKVLHKVFSTGVAEVPPDTRNVVRASHLLNTLYKAILEYDNVGEASEQTVSLLFSLWVETVRPYLQTVDEWIVHGHLWDGAREFIIQRNKNVPVNHRDFWYATYTLYSVSEKTENEEKMSDNASASSGSDQGPSSRQHTMVSFLKPVLKQIIMAGKSMQLLKNLQCAESTTCQAGARDAERKSLYTLFLESVQSRLRHGEDSTPQVLTEQQATKENLMKMQSIAESHLELDDVHDPLLAINFARMYLEQSDFHEKFAGGDVCVDRSSESVTCQTFELTLRSCLYPHIDKQYLDCCGNLMQTLKKDYRLVEYLQAMRNFFLMEGGDTMYDFYTSIFDKIREKETWQNVSFLNVQLQEAVGQRYPEDSSRLSISFENVDTAKKKLPVHILDGLTLSYKVPWPVDIVISLECQKIYNQVFLLLLQIKWAKYSLDVLLFGELVSTAEKPRLKEGLIHEQDTVAQFGPQKEPVRQQIHRMFLLRVKLMHFVNSLHNYIMTRILHSTGLEFQHQVEEAKDLDQLIKIHYRYLSTIHDRCLLREKVSFVKEAIMKVLNLALMFADGWQAGLGTWRMESIEKMESDFKNCHMFLVTILNKAVCRGSFPHLESLALSLMAGMEQS

SEQ ID NO: 93705 - protein, 1026 aa, Homo sapiens
  Payload ID: 18695
  Gene Name: tubulin, gamma complex associated protein 5
  ENSP ID: ENSP00000484566
MARHGPPWSRLDAQQERDVRELVRGVAGLQDEADPNFQLALNFAWSNFRFHRFLDVNSHKIEKTIEGIYEKFVIHSDLSKAASWKRLTEEFLNAPLPSIKEIKTDAHYSILSLLLCLSDSPSNSSYVETPRNKEVEKKDDFDWGKYLMEDEEMDIGPYMDTPNWSEESEEENDQQPLSREDSGIQVDRTPLEEQDQNRKLDPCISWKDEPDDRSWLEHHVVHQYWTARPSQFPHSLHLHSNLAAVWDQHLYSSDPLYVPDDRVLVTETQVIRETLWLLSGVKKLFIFQLIDGKVTVRNNIIVTHLTHSCLRSVLEQIAAYGQVVFRLQEFIDEVMGHSSESMLPGSGSVPKKSTEAPFRTYQAFMWALYKYFISFKEELAEIEKCIINNDTTITLAIVVDKLAPRLSQLKVLHKVFSTGVAEVPPDTRNVVRASHLLNTLYKAILEYDNVGEASEQTVSLLFSLWVETVRPYLQTVDEWIVHGHLWDGAREFIIQRNKNVPVNHRDFWYATYTLYSVSEKTENEEKMSDNASASSGSDQGPSSRQHTMVSFLKPVLKQIIMAGKSMQLLKNLQCAESTTCQAGARDAERKSLYTLFLESVQSRLRHGEDSTPQVLTEQQATKENLMKMQSIAESHLELDDVHDPLLAINFARMYLEQSDFHEKFAGGDVCVDRSSESVTCQTFELTLRSCLYPHIDKQYLDCCGNLMQTLKKDYRLVEYLQAMRNFFLMEGGDTMYDFYTSIFDKIREKETWQNVSFLNVQLQEAVGQRYPEDSSRLSISFENVDTAKKKLPVHILDGLTLSYKVPWPVDIVISLECQKIYNQVFLLLLQIKWAKYSLDVLLFGELVSTAEKPRLKEGLIHEQDTVAQFGPQKEPVRQQIHRMFLLRVKLMHFVNSLHNYIMTRILHSTGLEFQHQVEEAKDLDQLIKIHYRYLSTIHDRCLLREKVSFVKEAIMKVLNLALMFADGWQAGLGTWRMESIEKMESDFKNCHMFLVTILNKAVCRGSFPHCLALLPMLERIGTVLAH

SEQ ID NO: 93706 - protein, 226 aa, Homo sapiens; identical to SEQ ID NO: 93703
  Payload ID: 18695
  Gene Name: tubulin, gamma complex associated protein 5
  ENSP ID: ENSP00000485682
  MOD_RES (1)..(1): Any amino acid

SEQ ID NO: 93707 - protein, 148 aa, Homo sapiens
  Payload ID: 18695
  Gene Name: tubulin, gamma complex associated protein 5
  ENSP ID: ENSP00000485856
  MOD_RES (1)..(1): Any amino acid
XRVKLMHFVNSLHNYIMTRILHSTGLEFQHQVEEAKDLDQLIKIHYRYLSTIHDRCLLREKVSFVKEAIMKVLNLALMFADGWQAGLGTWRMESIEKMESDFKNCHMFLVTILNKAVCRGSFPHFSIGLPVVCIRRWSLLSTGGLGGT

SEQ ID NO: 93708 - protein, 194 aa, Homo sapiens
  Payload ID: 18695
  Gene Name: tubulin, gamma complex associated protein 5
  ENSP ID: ENSP00000485928
  MOD_RES (1)..(1): Any amino acid
XASWKRLTEEFLNAPLPSIKEIKTDAHYSILSLLLCLSDSPSNSSYVETPRNKEVEKKDDFDWGKYLMEDEEMDIGPYMDTPNWSEESEEENDQQPLSREDSGIQVDRTPLEEQDQNRKLDPCISWKADEPDDRSWLEHHVVHQYWTARPSHFPHSLHLHSNLAAVWDQHLYSSDPLYVPDDRVLVTETQVIRE

SEQ ID NO: 93709 - protein, 23 aa, Homo sapiens
  Payload ID: 18695
  Gene Name: tubulin, gamma complex associated protein 5
  ENSP ID: ENSP00000485940
  MOD_RES (1)..(1): Any amino acid
XASWKRLTEEFLNAPLPSIKEIK

SEQ ID NO: 93710 - protein, 18 aa, Homo sapiens
  Payload ID: 18695
  Gene Name: tubulin, gamma complex associated protein 5
  ENSP ID: ENSP00000486220
  MOD_RES (1)..(1): Any amino acid
XLTEEFLNAPLPSIKEIK

SEQ ID NO: 93711 - protein, 1024 aa, Homo sapiens
  Payload ID: 18695
  Gene Name: tubulin, gamma complex associated protein 5
  ENSP ID: ENSP00000486245
MARHGPPWSRLDAQQERDVRELVRGVAGLQDEADPNFQLALNFAWSNFRFHRFLDVNSHKIEKTIEGIYEKFVIHSDLSKAASWKRLTEEFLNAPLPSIKEIKTDAHYSILSLLLCLSDSPSNSSYVETPRNKEVEKKDDFDWGKYLMEDEEMDIGPYMDTPNWSEESEEENDQQPLSREDSGIQVDRTPLEEQDQNRKLDPCISWKDEPDDRSWLEHHVVHQYWTARPSHFPHSLHLHSNLAAVWDQHLYSSDPLYVPDDRVLVTETQVIRETLWLLSGVKKLFIFQLIDGKVTVRNNIIVTHLTHSCLRSVLEQIAAYGQVVFRLQEFIDEVMGHSSESMLPGSGSVPKKSTEAPFRTYQAFMWALYKYFISFKEELAEIEKCIINNDTTITLAIVVDKLAPRLSQLKVLHKVFSTGVAEVPPDTRNVVRASHLLNTLYKAILEYDNVGEASEQTVSLLFSLWVETVRPYLQTVDEWIVHGHLWDGAREFIIQRNKNVPVNHRDFWYATYTLYSVSEKTENEEKMSDNASASSGSDQGPSSRQHTMVSFLKPVLKQIIMAGKSMQLLKNLQCAESTTCQAGARDAERKSLYTLFLESVQSRLRHGEDSTPQVLTEQQATKENLMKMQSIAESHLELDDVHDPLLAINFARMYLEQSDFHEKFAGGDVCVDRSSESVTCQTFELTLRSCLYPHIDKQYLDCCGNLMQTLKKDYRLVEYLQAMRNFFLMEGGDTMYDFYTSIFDKIREKETWQNVSFLNVQLQEAVGQRYPEDSSRLSISFENVDTAKKKLPVHILDGLTLSYKVPWPVDIVISLECQKIYNQVFLLLLQIKWAKYSLDVLLFGELVSTAEKPRLKEGLIHEQDTVAQFGPQKEPVRQQIHRMFLLRVKLMHFVNSLHNYIMTRILHSTGLEFQHQVEEAKDLDQLIKIHYRYLSTIHDRCLLREKVSFVKEAIMKVLNLALMFADGWQAGLGTWRMESIEKMESDFKNCHMFLVTILNKAVCRGSFPHCEYIMLKYFYLCISL

SEQ ID NO: 93712 - protein, 103 aa, Homo sapiens
  Payload ID: 18695
  Gene Name: tubulin, gamma complex associated protein 5
  ENSP ID: ENSP00000486427
MARHGPPWSRLDAQQERDVRELVRGVAGLQDEADPNFQLALNFAWSNFRFHRFLDVNSHKIEKTIEGIYEKFVIHSDLSKAASWKRLTEEFLNAPLPSIKEIK

SEQ ID NO: 93713 - protein, 103 aa, Homo sapiens; identical to SEQ ID NO: 93712
  Payload ID: 18695
  Gene Name: tubulin, gamma complex associated protein 5
  ENSP ID: ENSP00000486628

SEQ ID NO: 93714 - protein, 145 aa, Homo sapiens
  Payload ID: 18695
  Gene Name: tubulin, gamma complex associated protein 5
  ENSP ID: ENSP00000486735
MARHGPPWSRLDAQQERDVRELVRGVAGLQDEADPNFQLALNFAWSNFRFHRFLDVNSHKIEKTIEGIYEKFVIHSDLSKAASWKRLTEEFLNAPLPSIKEIKMHIIPYCHFFCVCQTLLQTAVMWRHQEIKKWKRKMISTGENT

SEQ ID NO: 93715 - protein, 103 aa, Homo sapiens; identical to SEQ ID NO: 93712
  Payload ID: 18695
  Gene Name: tubulin, gamma complex associated protein 5
  ENSP ID: ENSP00000487038

SEQ ID NO: 93716 - protein, 167 aa, Homo sapiens
  Payload ID: 18695
  Gene Name: tubulin, gamma complex associated protein 5
  ENSP ID: ENSP00000487344
  MOD_RES (1)..(1): Any amino acid
XLTEEFLNAPLPSIKEIKTDAHYSILSLLLCLSDSPSNSSYVETPRNKEVEKKDDFDWGKYLMEDEEMDIGPYMDTPNWSEESEEENDQQPLSREDSGIQVDRTPLEEQDQNRKLDPCISWKDDRSWLEHHVVHQYWTARPSHFPHSLHLHSNLAAVWDQHLYSSDP

SEQ ID NO: 93717 - protein, 1026 aa, Homo sapiens
  Payload ID: 18695
  Gene Name: tubulin, gamma complex associated protein 5
  ENSP ID: ENSP00000487481
MARHGPPWSRLDAQQERDVRELVRGVAGLQDEADPNFQLALNFAWSNFRFHRFLDVNSHKIEKTIEGIYEKFVIHSDLSKAASWKRLTEEFLNAPLPSIKEIKTDAHYSILSLLLCLSDSPSNSSYVETPRNKEVEKKDDFDWGKYLMEDEEMDIGPYMDTPNWSEESEEENDQQPLSREDSGIQVDRTPLEEQDQNRKLDPCISWKDEPDDRSWLEHHVVHQYWTARPSHFPHSLHLHSNLAAVWDQHLYSSDPLYVPDDRVLVTETQVIRETLWLLSGVKKLFIFQLIDGKVTVRNNIIVTHLTHSCLRSVLEQIAAYGQVVFRLQEFIDEVMGHSSESMLPGSGSVPKKSTEAPFRTYQAFMWALYKYFISFKEELAEIEKCIINNDTTITLAIVVDKLAPRLSQLKVLHKVFSTGVAEVPPDTRNVVRASHLLNTLYKAILEYDNVGEASEQTVSLLFSLWVETVRPYLQTVDEWIVHGHLWDGAREFIIQRNKNVPVNHRDFWYATYTLYSVSEKTENEEKMSDNASASSGSDQGPSSRQHTMVSFLKPVLKQIIMAGKSMQLLKNLQCAESTTCQAGARDAERKSLYTLFLESVQSRLRHGEDSTPQVLTEQQATKENLMKMQSIAESHLELDDVHDPLLAINFARMYLEQSDFHEKFAGGDVCVDRSSESVTCQTFELTLRSCLYPHIDKQYLDCCGNLMQTLKKDYRLVEYLQAMRNFFLMEGGDTMYDFYTSIFDKIREKETWQNVSFLNVQLQEAVGQRYPEDSSRLSISFENVDTAKKKLPVHILDGLTLSYKVPWPVDIVISLECQKIYNQVFLLLLQIKWAKYSLDVLLFGELVSTAEKPRLKEGLIHEQDTVAQFGPQKEPVRQQIHRMFLLRVKLMHFVNSLHNYIMTRILHSTGLEFQHQVEEAKDLDQLIKIHYRYLSTIHDRCLLREKVSFVKEAIMKVLNLALMFADGWQAGLGTWRMESIEKMESDFKNCHMFLVTILNKAVCRGSFPHCLALLPMLERIGTVLAH

SEQ ID NO: 93718 - protein, 1819 aa, Homo sapiens
  Payload ID: 18696
  Gene Name: tubulin, gamma complex associated protein 6
  Uniprot ID: Q96RT7
  ENSP ID: ENSP00000248846
MASITQLFDDLCEALLPAAKTHLGQRSVNRKRAKRSLKKVAYNALFTNLFQDETQQLQPDMSKLPARNKILMLSFDLRVGGLGPKADRLEELVEELEAAPCCPLLEVGSVLDLLVQLAGSGPPQVLPRKRDYFLNNKHVGRNVPYSGYDCDDLSVFEMDVQSLISREECLCHSMIQETLQVMEAAPGTGLPTVGLFSFGDPCGDRFERDTRVSLFGALVHSRTYDMDVRLGLPPVPDNADLSGLAIKVPPSVDQWEDEGFQSASNLTPDSQSEPSVTPDVDLWEAALTYEASKRRCWERVGCPPGHREEPYLTEAGRDAFDKFCRLHQGELQLLAGGVLQAPQPVLVKECELVKDVLNVLIGVVSATFSLCQPAQAFVVKRGVHVSGASPESISSLLSEVAEYGTCYTRLSHFSLQPVLDSLYSKGLVFQAFTSGLRRYLQYYRACVLSTPPTLSLLTIGFLFKKLGRQLRYLAELCGVGAVLPGTCGGGPRAAFPTGVKLLSYLYQEALHNCSNEHYPVLLSLLKTSCEPYTRFIHDWVYSGVFRDAYGEFMIQVNHEYLSFRDKLYWTHGYVLISKEVEDCVPVFLKHIAHDIYVCGKTINLLKLCCPRHYLCWSDVPVPRISVIFSLEELKEIEKDCAVYVGRMERVARHSSVSKEEKELRMEIAKQELIAHAREAASRVLSALSDRQMSERMALDARKREQFQRLKEQFVKDQERRQAARQEELDDDFSYARELRDRERRLKSLEEELERKARQALVDHYSKLSAEAARREQKALWRIQRHRLESARLRFLLEDEKHIQEMLKAVSEAHQPQEPPDVLLSVHPQVTSPGPEHPEGGQGCDSGSAEQHSPAWDGWNRPGLLTPQPLKPLAVGAGGRGLQQAEGARPFSDSLSIGDFLPVGPGAEPSVQTGMVPLLEVALQTINLDLPPSAPGEAPAAASTQPSRPQEYDFSTVLRPAVATSPAPGPLQAAECSLGSSGLQLWEDSCGKMDACGSASRETLLPSHPPRRAALEEGSSQPTERLFGQVSGGGLPTGDYASEIAPTRPRWNTHGHVSDASIRVGENVSDVAPTQPRWNTHGHVSNASISLGESVSDVAPTRPRWNIHGHVSNASIRVGENVSDVAPTRPRWNTHGHVSNASIRVGENVSDVAPTRPRWNTHGHVSDASISLGESVSDMAPARPRWNTHGHVSDASISLGESVSDMAPTRPRWNTHGHVSDTSIRVGENVSDVAPIRSRCNTHGHVSDASISLGEPVSDVVSTRPRWNTHVPIPPPHMVLGALSPEAEPNTPRPQQSPPGHTSQSALSLGAQSTVLDCGPRLPVEVGPSLSSPSSGCGEGSISVGENVSDVAPTQPWWPNTPGDSVSEELGPGRSGDTEDLSPNWPLNSQEDTAAQSSPGRGEEAEASAAEAQGGEQAYLAGLAGQYHLERYPDSYESMSEPPIAHLLRPVLPRAFAFPVDPQVQSAADETAVQLSELLTLPVLMKRSITAPLAAHISLVNKAAVDYFFVELHLEAHYEALRHFLLMEDGEFAQSLSDLLFEKLGAGQTPGELLNPLVLNSVLSKALQCSLHGDTPHASNLSLALKYLPEVFAPNAPDVLSCLELRYKVDWPLNIVITEGCVSKYSGVFSFLLQLKLMMWALKDVCFHLKRTALLSHMAGSVQFRQLQLFKHEMQHFVKVIQGYIANQILHVTWCEFRARLATVGDLEEIQRAHAEYLHKAVFRGLLTEKAAPVMNVIHSIFSLVLKFRSQLISQAWGPPGGPRGAEHPNFALMQQSYNTFKYYSHFLFKVVTKLVNRGYQPHLEDFLLRINFNNYYQDA

SEQ ID NO: 93719 - protein, 1493 aa, Homo sapiens
  Payload ID: 18696
  Gene Name: tubulin, gamma complex associated protein 6
  ENSP ID: ENSP00000397387
MASITQLFDDLCEALLPAAKTHLGQRSVNRKRAKRSLKKVAYNALFTNLFQDETQQLQPDMSKLPARNKILMLSFDLRVGGLGPKADRLEELVEELEAAPCCPLLEVGSVLDLLVQLAGSGPPQVLPRKRDYFLNNKHVGRNVPYSGYDCDDLSVFEMDVQSLISREECLCHSMIQETLQVMEAAPGTGLPTVGLFSFGDPCGDRFERDTRVSLFGALVHSRTYDMDVRLGLPPVPDNADLSGLAIKVPPSVDQWEDEGFQSASNLTPDSQSEPSVTPDVDLWEAALTYEASKRRCWERVGCPPGHREEPYLTEAGRDAFDKFCRLHQGELQLLAGGVLQAPQPVLVKECELVKDVLNVLIGVVSATFSLCQPAQAFVVKRGVHVSGASPESISSLLSEVAEYGTCYTRLSHFSLQPVLDSLYSKGLVFQAFTSGLRRYLQYYRACVLSTPPTLSLLTIGFLFKKLGRQLRYLAELCGVGAVLPGTCGGGPRAAFPTGVKLLSYLYQEALHNCSNEHYPVLLSLLKTSCEPYTRFIHDWVYSGVFRDAYGEFMIQVNHEYLSFRDKLYWTHGYVLISKEVEDCVPVFLKHIAHDIYVCGKTINLLKLCCPRHYLCWSDVPVPRISVIFSLEELKEIEKDCAVYVGRMERVARHSSVSKEEKELRMEIAKQELIAHAREAASRVLSALSDRQMSERMALDARKREQFQRLKEQFVKDQERRQAARQEELDDDFSYARELRDRERRLKSLEEELERKARQALVDHYSKLSAEAARREQKALWRIQRHRLESARLRFLLEDEKHIQEMLKAVSEAHQPQEPPDVLLSVHPQVTSPGPEHPEGGQGCDSGSAEQHSPAWDGWNRPGLLTPQPLKPLAVGAGGRGLQQAEGARPFSDSLSIGDFLPVGPGAEPSVQTGMVPLLEVALQTINLDLPPSAPGEAPAAASTQPSRPQEYDFSTVLRPAVATSPAPGPLQAAECSLGSSGLQLWEDSCGKMDACGSASRETLLPSHPPRRAALEEGSSQPTERLFGQVSGGGLPTGDYASEIAPTRPRWNTHGHVSDASIRVGENVSDVAPTQPRWNTHGHVSNASISLGESVSDVAPTRPRWNIHGHVSNASIRVGENVSDVAPTRPRWNTHGHVSNASIRVGENVSDVAPTRPRWNTHGHVSDASISLGESVSDMAPARPRWNTHGHVSDASISLGESVSDMAPTRPRWNTHGHVSDTSIRVGENVSDVAPIRSRCNTHGHVSDASISLGEPVSDVVSTRPRWNTHVPIPPPHMVLGALSPEAEPNTPRPQQSPPGHTSQSALSLGAQSTVLDCGPRLPVEVGPSLSSPSSGCGEGSISVGENVSDVAPTQPWWPNTPGDSVSEELGQSRVAGGQEWDCGTHRAWEALGGAGTLRTSLQIGLSTHRKTQLPRAAQAVVRRRRHRRRRLRVGSRPTWQAWQGSTTWSGTRTVTSPCPSRPLLIFCAPCFPGPSPSPWTPRSSLPLMRLLCS

SEQ ID NO: 93720 - protein, 488 aa, Homo sapiens
  Payload ID: 18696
  Gene Name: tubulin, gamma complex associated protein 6
  ENSP ID: ENSP00000405979
LDCGPRLPVEVGPSLSSPSSGCGEGSISVGENVSDVAPTQPWWPNTPGDSVSEELGPGRSGDTEDLSPNWPLNSQEDTAAQSSPGRGEEAEASAAEAQGGEQAYLAGLAGQYHLERYPDSYESMSEPPIAHLLRPVLPRAFAFPVDPQVQSAADETAVQLSELLTLPVLMKRSITAPLAAHISLVNKAAVDYFFVELHLEAHYEALRHFLLMEDGEFAQSLSDLLFEKLGAGQTPGELLNPLVLNSVLSKALQCSLHGDTPHASNLSLALKYLPEVFAPNAPDVLSCLELRYKVDWPLNIVITEGCVSKYSGVFSFLLQLKLMMWALKDVCFHLKRTVPSAAAVQARDAAFREGHPGLHRQPDPARHLVRVQGQVGHRGRPGGDPACARRVPAQGRLQAAPVMNVIHSIFSLVLKFRSQLISQAWGPPGGPRGAEHPNFALMQQSYNTFKYYSHFLFKVVTKLVNRGYQPHLEDFLLRINFNNYYQDA

SEQ ID NO: 93721 - protein, 277 aa, Homo sapiens
  Payload ID: 18696
  Gene Name: tubulin, gamma complex associated protein 6
  ENSP ID: ENSP00000409650
  MOD_RES (1)..(1): Any amino acid
XSVDQWEDEGFQSASNLTPDSQSEPSVTPDVDLWEAALTYEASKRSPPGHREEPYLTEAGRDAFDKFCRLHQGELQLLAGGVLQAPQPVLVKECELVKDVLNVLIGVVSATFSLCQPAQAFVVKRGVHVSGASPESISSLLSEVAEYGTCYTRLSHFSLQPVLDSLYSKGLVFQAFTSGLRRYLQYYRACVLSTPPTLSLLTIGFLFKKLGRQLRYLAELCGVGAVLPGTCGGGPRAAFPTGVKLLSYLYQEALHNCSNEHYPVLLSLLKTSCEPYT

SEQ ID NO: 93722 - protein, 476 aa, Homo sapiens
  Payload ID: 18697
  Gene Name: tubulointerstitial nephritis antigen
  Uniprot ID: Q9UJW2
  ENSP ID: ENSP00000259782
MWTGYKILIFSYLTTEIWMEKQYLSQREVDLEAYFTRNHTVLQGTRFKRAIFQGQYCRNFGCCEDRDDGCVTEFYAANALCYCDKFCDRENSDCCPDYKSFCREEKEWPPHTQPWYPEGCFKDGQHYEEGSVIKENCNSCTCSGQQWKCSQHVCLVRSELIEQVNKGDYGWTAQNYSQFWGMTLEDGFKFRLGTLPPSPMLLSMNEMTASLPATTDLPEFFVASYKWPGWTHGPLDQKNCAASWAFSTASVAADRIAIQSKGRYTANLSPQNLISCCAKNRHGCNSGSIDRAWWYLRKRGLVSHACYPLFKDQNATNNGCAMASRSDGRGKRHATKPCPNNVEKSNRIYQCSPPYRVSSNETEIMKEIMQNGPVQAIMQVREDFFHYKTGIYRHVTSTNKESEKYRKLQTHAVKLTGWGTLRGAQGQKEKFWIAANSWGKSWGENGYFRILRGVNESDIEKLIIAAWGQLTSSDEP

SEQ ID NO: 93723 - protein, 203 aa, Homo sapiens
  Payload ID: 18697
  Gene Name: tubulointerstitial nephritis antigen
  ENSP ID: ENSP00000359901
MEKQYLSQREVDLEAYFTRNHTVLQGTRFKRAIFQGQYCRNFGCCEDRDDGCVTEFYAANALCYCDKFCDRENSDCCPDYKSFCREEKEWPPHTQPWYPEGCFKDGQHYEEGSVIKENCNSCTCSGQQWKCSQHVCLVRSELIEQVNKGDYGWTAQNYSQFWGMTLEDGFKFRLGTLPPSPMLLSMNEMTVSVPSDSRMCMYL

SEQ ID NO: 93724 - protein, 205 aa, Homo sapiens
  Payload ID: 18697
  Gene Name: tubulointerstitial nephritis antigen
  ENSP ID: ENSP00000359906
MRAWMFVSMQAEIWMEKQYLSQREVDLEAYFTRNHTVLQGTRFKRAIFQGQYCRNFGCCEDRDDGCVTEFYAANALCYCDKFCDRENSDCCPDYKSFCREEKEWPPHTQPWYPEGCFKDGQHYEEGSVIKENCNSCTCSGQQWKCSQHVCLVRSELIEQVNKGDYGWTAQNYSQFWGMTLEDGFKFRLGTLPPSPMLLSMNEMTE

SEQ ID NO: 93725 - protein, 467 aa, Homo sapiens
  Payload ID: 18698
  Gene Name: tubulointerstitial nephritis antigen-like 1
  Uniprot ID: Q9GZM7
  ENSP ID: ENSP00000271064
MWRCPLGLLLLLPLAGHLALGAQQGRGRRELAPGLHLRGIRDAGGRYCQEQDLCCRGRADDCALPYLGAICYCDLFCNRTVSDCCPDFWDFCLGVPPPFPPIQGCMHGGRIYPVLGTYWDNCNRCTCQENRQWQCDQEPCLVDPDMIKAINQGNYGWQAGNHSAFWGMTLDEGIRYRLGTIRPSSSVMNMHEIYTVLNPGEVLPTAFEASEKWPNLIHEPLDQGNCAGSWAFSTAAVASDRVSIHSLGHMTPVLSPQNLLSCDTHQQQGCRGGRLDGAWWFLRRRGVVSDHCYPFSGRERDEAGPAPPCMMHSRAMGRGKRQATAHCPNSYVNNNDIYQVTPVYRLGSNDKEIMKELMENGPVQALMEVHEDFFLYKGGIYSHTPVSLGRPERYRRHGTHSVKITGWGEETLPDGRTLKYWTAANSWGPAWGERGHFRIVRGVNECDIESFVLGVWGRVGMEDMGHH

SEQ ID NO: 93726 - protein, 436 aa, Homo sapiens
  Payload ID: 18698
  Gene Name: tubulointerstitial nephritis antigen-like 1
  Uniprot ID: Q9GZM7
  ENSP ID: ENSP00000395137
MWRCPLGLLLLLPLAGHLALGAQQGRGRRELAPGLHLRGIRDAGGRYCQEQDLCCRGRADDCALPYLGAICYCDLFCNRTVSDCCPDFWDFCLGVPPPFPPIQGCMHGGRIYPVLGTYWDNCNRCWQAGNHSAFWGMTLDEGIRYRLGTIRPSSSVMNMHEIYTVLNPGEVLPTAFEASEKWPNLIHEPLDQGNCAGSWAFSTAAVASDRVSIHSLGHMTPVLSPQNLLSCDTHQQQGCRGGRLDGAWWFLRRRGVVSDHCYPFSGRERDEAGPAPPCMMHSRAMGRGKRQATAHCPNSYVNNNDIYQVTPVYRLGSNDKEIMKELMENGPVQALMEVHEDFFLYKGGIYSHTPVSLGRPERYRRHGTHSVKITGWGEETLPDGRTLKYWTAANSWGPAWGERGHFRIVRGVNECDIESFVLGVWGRVGMEDMGHH

SEQ ID NO: 93727 - protein, 362 aa, Homo sapiens
  Payload ID: 18698
  Gene Name: tubulointerstitial nephritis antigen-like 1
  ENSP ID: ENSP00000445392
MHGGRIYPVLGTYWDNCNRCTCQENRQWQCDQEPCLVDPDMIKAINQGNYGWQAGNHSAFWGMTLDEGIRYRLGTIRPSSSVMNMHEIYTVLNPGEVLPTAFEASEKWPNLIHEPLDQGNCAGSWAFSTAAVASDRVSIHSLGHMTPVLSPQNLLSCDTHQQQGCRGGRLDGAWWFLRRRGVVSDHCYPFSGRERDEAGPAPPCMMHSRAMGRGKRQATAHCPNSYVNNNDIYQVTPVYRLGSNDKEIMKELMENGPVQALMEVHEDFFLYKGGIYSHTPVSLGRPERYRRHGTHSVKITGWGEETLPDGRTLKYWTAANSWGPAWGERGHFRIVRGVNECDIESFVLGVWGRVGMEDMGHH

SEQ ID NO: 93728 - protein, 561 aa, Homo sapiens
  Payload ID: 18699
  Gene Name: tudor and KH domain containing
  Uniprot ID: Q9Y2W6
  ENSP ID: ENSP00000357812
MSTERTSWTSLSTIQKIALGLGIPASATVAYILYRRYRESREERLTFVGEDDIEIEMRVPQEAVKLIIGRQGANIKQLRKQTGARIDVDTEDVGDERVLLISGFPVQVCKAKAAIHQILTENTPVSEQLSVPQRSVGRIIGRGGETIRSICKASGAKITCDKESEGTLLLSRLIKISGTQKEVAAAKHLILEKVSEDEELRKRIAHSAETRVPRKQPISVRREDMTEPGGAGEPALWKNTSSSMEPTAPLVTPPPKGGGDMAVVVSKEGSWEKPSDDSFQKSEAQAIPEMPMFEIPSPDFSFHADEYLEVYVSASEHPNHFWIQIVGSRSLQLDKLVNEMTQHYENSVPEDLTVHVGDIVAAPLPTNGSWYRARVLGTLENGNLDLYFVDFGDNGDCPLKDLRALRSDFLSLPFQAIECSLARIAPSGDQWEEEALDEFDRLTHCADWKPLVAKISSYVQTGISTWPKIYLYDTSNGKKLDIGLELVHKGYAIELPEDIEENRAVPDMLKDMATETDASLSTLLTETKKSSGEITHTLSCLSLSEAASMSGDDNLEDDYLL

SEQ ID NO: 93729 - protein, 557 aa, Homo sapiens
  Payload ID: 18699
  Gene Name: tudor and KH domain containing
  ENSP ID: ENSP00000357813
MSTERTSWTSLSTIQKIALGLGIPASATVAYILYRRYRESREERLTFVGEDDIEIEMRVPQEAVKLIIGRQGANIKQTGARIDVDTEDVGDERVLLISGFPVQVCKAKAAIHQILTENTPVSEQLSVPQRSVGRIIGRGGETIRSICKASGAKITCDKESEGTLLLSRLIKISGTQKEVAAAKHLILEKVSEDEELRKRIAHSAETRVPRKQPISVRREDMTEPGGAGEPALWKNTSSSMEPTAPLVTPPPKGGGDMAVVVSKEGSWEKPSDDSFQKSEAQAIPEMPMFEIPSPDFSFHADEYLEVYVSASEHPNHFWIQIVGSRSLQLDKLVNEMTQHYENSVPEDLTVHVGDIVAAPLPTNGSWYRARVLGTLENGNLDLYFVDFGDNGDCPLKDLRALRSDFLSLPFQAIECSLARIAPSGDQWEEEALDEFDRLTHCADWKPLVAKISSYVQTGISTWPKIYLYDTSNGKKLDIGLELVHKGYAIELPEDIEENRAVPDMLKDMATETDASLSTLLTETKKSSGEITHTLSCLSLSEAASMSGDDNLEDDYLL

SEQ ID NO: 93730 - protein, 561 aa, Homo sapiens; identical to SEQ ID NO: 93728
  Payload ID: 18699
  Gene Name: tudor and KH domain containing
  Uniprot ID: Q9Y2W6
  ENSP ID: ENSP00000357815

SEQ ID NO: 93731 - protein, 516 aa, Homo sapiens
  Payload ID: 18699
  Gene Name: tudor and KH domain containing
  Uniprot ID: Q9Y2W6
  ENSP ID: ENSP00000357817
MSTERTSWTSLSTIQKIALGLGIPASATVAYILYRRYRESREERLTFVGEDDIEIEMRVPQEAVKLIIGRQGANIKQLRKQTGARIDVDTEDVGDERVLLISGFPVQASGAKITCDKESEGTLLLSRLIKISGTQKEVAAAKHLILEKVSEDEELRKRIAHSAETRVPRKQPISVRREDMTEPGGAGEPALWKNTSSSMEPTAPLVTPPPKGGGDMAVVVSKEGSWEKPSDDSFQKSEAQAIPEMPMFEIPSPDFSFHADEYLEVYVSASEHPNHFWIQIVGSRSLQLDKLVNEMTQHYENSVPEDLTVHVGDIVAAPLPTNGSWYRARVLGTLENGNLDLYFVDFGDNGDCPLKDLRALRSDFLSLPFQAIECSLARIAPSGDQWEEEALDEFDRLTHCADWKPLVAKISSYVQTGISTWPKIYLYDTSNGKKLDIGLELVHKGYAIELPEDIEENRAVPDMLKDMATETDASLSTLLTETKKSSGEITHTLSCLSLSEAASMSGDDNLEDDYLL

SEQ ID NO: 93732 - protein, 561 aa, Homo sapiens; identical to SEQ ID NO: 93728
  Payload ID: 18699
  Gene Name: tudor and KH domain containing
  Uniprot ID: Q9Y2W6
  ENSP ID: ENSP00000357819

SEQ ID NO: 93733 - protein, 561 aa, Homo sapiens; identical to SEQ ID NO: 93728
  Payload ID: 18699
  Gene Name: tudor and KH domain containing
  Uniprot ID: Q9Y2W6
  ENSP ID: ENSP00000395718

SEQ ID NO: 93734 - protein, 605 aa, Homo sapiens
  Payload ID: 18699
  Gene Name: tudor and KH domain containing
  ENSP ID: ENSP00000416645
MSTERTSWTSLSTIQKIALGLGIPASATVAYILYRRYRESREERLTFVGEDDIEIEMRVPQEAVKLIIGRQGANIKQLRKQTGARIDVDTEDVGDERVLLISGFPVQVCKAKAAIHQILTENTPVSEQLSVPQRSVGRIIGRGGETIRSICKASGAKITCDKESEGTLLLSRLIKISGTQKEVAAAKHLILEKVSEDEELRKRIAHSAETRVPRKQPISVRREDMTEPGGAGEPALWKNTSSSMEPTAPLVTPPPKGGGDMAVVVSKEGSWEKPSDDSFQKSEAQAIPEMPMFEIPSPDFSFHADEYLEVYVSASEHPNHFWIQIVGSRSLQLDKLVNEMTQHYENSVPEDLTVHVGDIVAAPLPTNGSWYRARVLGTLENGNLDLYFVDFGDNGDCPLKDLRALRSDFLSLPFQAIECSLARIAPSGDQWEEEALDEFDRLTHCADWKPLVAKISSYVQTGISTWPKIYLYDTSNGKKLDIGLELVHKGYAIELPEDIEENRAVPDMLKDMATETDASLSTLLTETKKSSGEITHTLSCLSLSEAASMSGDDNLEDDYLLSLGFSLLSHLLCCMLPAMNSLKHAQPWNWCYQSSVGNLYSLEVP

SEQ ID NO: 93735 - protein, 131 aa, Homo sapiens
  Payload ID: 18699
  Gene Name: tudor and KH domain containing
  ENSP ID: ENSP00000431557
MSTERTSWTSLSTIQKIALGLGIPASATVAYILYRRYRESREERLTFVGEDDIEIEMRVPQEAVKLIIGRQGANIKQLRKQTGARIDVDTEDVGDERVLLISGFPVQVCKAKAAIHQILTENTPVSEQLSV

SEQ ID NO: 93736 - protein, 58 aa, Homo sapiens
  Payload ID: 18699
  Gene Name: tudor and KH domain containing
  ENSP ID: ENSP00000432452
MSTERTSWTSLSTIQKIALGLGIPASATVAYILYRRYRESRVVSRRHLPQRLDLENRT

SEQ ID NO: 93737 - protein, 140 aa, Homo sapiens
  Payload ID: 18699
  Gene Name: tudor and KH domain containing
  ENSP ID: ENSP00000433678
MSTERTSWTSLSTIQKIALGLGIPASATVAYILYRRYRESREERLTFVGEDDIEIEMRVPQEAVKLIIGRQGANIKQLRKQTGARIDVDTEDVGDERVLLISGFPVQGEAARQFVLSVRHLEPKLPVTKNQKGHYYYQDL

SEQ ID NO: 93738 - protein, 140 aa, Homo sapiens; identical to SEQ ID NO: 93737
  Payload ID: 18699
  Gene Name: tudor and KH domain containing
  ENSP ID: ENSP00000437147

SEQ ID NO: 93739 - protein, 1189 aa, Homo sapiens
  Payload ID: 18700
  Gene Name: tudor domain containing 1
  Uniprot ID: Q9BXT4
  ENSP ID: ENSP00000251864
MSVKSPFNVMSRNNLEAPPCKMTEPFNFEKNENKLPPHESLRSPGTLPNHPNFRLKSSENGNKKNNFLLCEQTKQYLASQEDNSVSSNPNGINGEVVGSKGDRKKLPAGNSVSPPSAESNSPPKEVNIKPGNNVRPAKSKKLNKLVENSLSISNPGLFTSLGPPLRSTTCHRCGLFGSLRCSQCKQTYYCSTACQRRDWSAHSIVCRPVQPNFHKLENKSSIETKDVEVNNKSDCPLGVTKEIAIWAERIMFSDLRSLQLKKTMEIKGTVTEFKHPGDFYVQLYSSEVLEYMNQLSASLKETYANVHEKDYIPVKGEVCIAKYTVDQTWNRAIIQNVDVQQKKAHVLYIDYGNEEIIPLNRIYHLNRNIDLFPPCAIKCFVANVIPAEGNWSSDCIKATKPLLMEQYCSIKIVDILEEEVVTFAVEVELPNSGKLLDHVLIEMGYGLKPSGQDSKKENADQSDPEDVGKMTTENNIVVDKSDLIPKVLTLNVGDEFCGVVAHIQTPEDFFCQQLQSGRKLAELQASLSKYCDQLPPRSDFYPAIGDICCAQFSEDDQWYRASVLAYASEESVLVGYVDYGNFEILSLMRLCPIIPKLLELPMQAIKCVLAGVKPSLGIWTPEAICLMKKLVQNKIITVKVVDKLENSSLVELIDKSETPHVSVSKVLLDAGFAVGEQSMVTDKPSDVKETSVPLGVEGKVNPLEWTWVELGVDQTVDVVVCVIYSPGEFYCHVLKEDALKKLNDLNKSLAEHCQQKLPNGFKAEIGQPCCAFFAGDGSWYRALVKEILPNGHVKVHFVDYGNIEEVTADELRMISSTFLNLPFQGIRCQLADIQSRNKHWSEEAITRFQMCVAGIKLQARVVEVTENGIGVELTDLSTCYPRIISDVLIDEHLVLKSASPHKDLPNDRLVNKHELQVHVQGLQATSSAEQWKTIELPVDKTIQANVLEIISPNLFYALPKGMPENQEKLCMLTAELLEYCNAPKSRPPYRPRIGDACCAKYTSDDFWYRAVVLGTSDTDVEVLYADYGNIETLPLCRVQPITSSHLALPFQIIRCSLEGLMELNGSSSQLIIMLLKNFMLNQNVMLSVKGITKNVHTVSVEKCSENGTVDVADKLVTFGLAKNITPQRQSALNTEKMYRMNCCCTELQKQVEKHEHILLFLLNNSTNQNKFIEMKKLLKKTASLGGKPL

SEQ ID NO: 93740 - protein, 1104 aa, Homo sapiens
  Payload ID: 18700
  Gene Name: tudor domain containing 1
  ENSP ID: ENSP00000358286
MSVKSPFNVMSRNNLEAPPCKMTEPFNFEKNENKLPPHESLRSPGTLPNHPNFRLKSSENGNKKNNFLLCEQTKQYLASQEDNSVSSNPNGINGEVVGSKGDRKKLPAGNSVSPPSAESNSPPKEVNIKPGNNVRPAKSKKLNKLVENSLSISNPGLFTSLGPPLRSTTCHRCGLFGSLRCSQCKQTYYCSTACQRRDWSAHSIVCRPVQPNFHKLENKSSIETKDVEVNNKSDCPLGVTKEIAIWAERIMFSDLRSLQLKKTMEIKGTVTEFKHPGDFYVQLYSSEVLEYMNQLSASLKETYANVHEKDYIPVKGEVCIAKYTVDQTWNRAIIQNVDVQQKKAHVLYIDYGNEEIIPLNRIYHLNRNIDLFPPCAIKCFVANVIPAEGNWSSDCIKATKPLLMEQYCSIKIVDILEEEVVTFAVEVELPNSGKLLDHVLIEMGYGLKPSGQDSKKENADQSDPEDVGKMTTENNIVVDKSDLIPKVLTLNVGDEFCGVVAHIQTPEDFFCQQLQSGRKLAELQASLSKYCDQLPPRSDFYPAIGDICCAQFSEDDQWYRASVLAYASEESVLVGYVDYGNFEILSLMRLCPIIPKLLELPMQAIKCVLAGVKPSLGIWTPEAICLMKKLVQNKIITVKVVDKLENSSLVELIDKSETPHVSVSKVLLDAGFAVGEQSMVTDKPSDVKETSVPLGVEGKVNPLEWTWVELGVDQTVDVVVCVIYSPGEFYCHVLKEDALKKLNDLNKSLAEHCQQKLPNGFKAEIGQPCCAFFAGDGSWYRALVKEILPNGHVKVHFVDYGNIEEVTADELRMISSTFLNLPFQGIRCQLADIQSRNKHWSEEAITRFQMCVAGIKLQARVVEVTENGIGVELTDLSTCYPRIISDVLIDEHLVLKSASPHKDLPNDRLVNKHELQVHVQGLQATSSAEQWKTIELPVDKTIQANVLEIISPNLFYALPKGMPENQEKLCMLTAELLEYCNAPKSRPPYRPRIGDACCAKYTSDDFWYRAVVLGTSDTDVEVLYADYGNIETLPLCRVQPITSSHLALPFQIIRCSLEEKMYRMNCCCTELQKQVEKHEHILLFLLNNSTNQNKFIEMKKLLKS

SEQ ID NO: 93741 - protein, 1113 aa, Homo sapiens
  Payload ID: 18700
  Gene Name: tudor domain containing 1
  ENSP ID: ENSP00000358288
MSVKSPFNVMSRNNLEAPPCKMTEPFNFEKNENKLPPHESLRSPGTLPNHPNFRLKSSENGNKKNNFLLCEQTKQYLASQEDNSVSSNPNGINGEVVGSKGDRKKLPAGNSVSPPSAESNSPPKEVNIKPGNNVRPAKSKKLNKLVENSLSISNPGLFTSLGPPLRSTTCHRCGLFGSLRCSQCKQTYYCSTACQRRDWSAHSIVCRPVQPNFHKLENKSSIETKDVEVNNKSDCPLGVTKEIAIWAERIMFSDLRSLQLKKTMEIKGTVTEFKHPGDFYVQLYSSEVLEYMNQLSASLKETYANVHEKDYIPVKGEVCIAKYTVDQTWNRAIIQNVDVQQKKAHVLYIDYGNEEIIPLNRIYHLNRNIDLFPPCAIKCFVANVIPAEGNWSSDCIKATKPLLMEQYCSIKIVDILEEEVVTFAVEVELPNSGKLLDHVLIEMGYGLKPSGQDSKKENADQSDPEDVGKMTTENNIVVDKSDLIPKVLTLNVGDEFCGVVAHIQTPEDFFCQQLQSGRKLAELQASLSKYCDQLPPRSDFYPAIGDICCAQFSEDDQWYRASVLAYASEESVLVGYVDYGNFEILSLMRLCPIIPKLLELPMQAIKCVLAGVKPSLGIWTPEAICLMKKLVQNKIITVKVVDKLENSSLVELIDKSETPHVSVSKVLLDAGFAVGEQSMVTDKPSDVKETSVPLGVEGKVNPLEWTWVELGVDQTVDVVVCVIYSPGEFYCHVLKEDALKKLNDLNKSLAEHCQQKLPNGFKAEIGQPCCAFFAGDGSWYRALVKEILPNGHVKVHFVDYGNIEEVTADELRMISSTFLNLPFQGIRCQLADIQSRNKHWSEEAITRFQMCVAGIKLQARVVEVTENGIGVELTDLSTCYPRIISDVLIDEHLVLKSASPHKDLPNDRLVNKHELQVHVQGLQATSSAEQWKTIELPVDKTIQANVLEIISPNLFYALPKGMPENQEKLCMLTAELLEYCNAPKSRPPYRPRIGDACCAKYTSDDFWYRAVVLGTSDTDVEVLYADYGNIETLPLCRVQPITSSHLALPFQIIRCSLEEKMYRMNCCCTELQKQVEKHEHILLFLLNNSTNQNKFIEMKKLLKKTASLGGKPL

SEQ ID NO: 93742 - protein, 366 aa, Homo sapiens
  Payload ID: 18701
  Gene Name: tudor domain containing 10
  Uniprot ID: Q5VZ19
  ENSP ID: ENSP00000357465
MSWNISHPQLSDKLFGKNGVLEEQKSPGFKKRETEVYVGNLPLDISKEEILYLLKDFNPLDVHKIQNGCKCFAFVDLGSMQKVTLAIQELNGKLFHKRKLFVNTSKRPPKRTPDMIQQPRAPLVLEKASGEGFGKTAAIIQLAPKAPVDLCETEKLRAAFFAVPLEMRGSFLVLLLRECFRDLSWLALIHSVRGEAGLLVTSIVPKTPFFWAMHVTEALHQNMQALFSTLAQAEEQQPYLEGSTVMRGTRCLAEYHLGDYGHAWNRCWVLDRVDTWAVVMFIDFGQLATIPVQSLRSLDSDDFWTIPPLTQPFMLEKDILSSYEVVHRILKGKITGALNSAVTAPASNLAVVPPLLPLGCLQQAAA

SEQ ID NO: 93743 - protein, 351 aa, Homo sapiens
  Payload ID: 18701
  Gene Name: tudor domain containing 10
  Uniprot ID: Q5VZ19
  ENSP ID: ENSP00000357467
MSWNISHPQLSDKLFGKNGVLEEQKSPGFKKRETEVYVGNLPLDISKEEILYLLKDFNPLDVHKIQNGCKCFAFVDLGSMQKVTLAIQELNGKLFHKRKLFVNTSKRPPKRTPDMIQQPRAPLVLEKASGEGFGKTAAIIQLAPKAPVDLCETEKLRAAFFAVPLEMRGSFLVLLLRECFRDLSWLALIHSVRGEAGLLVTSIVPKTPFFWAMHVTEALHQNMQALFSTLAQAEEQQPYLEGSTVMRGTRCLAEYHLGDYGHAWNRCWVLDRVDTWAVVMFIDFGQLATIPVQSLRSLDSDDFWTIPPLTQPFMLEKDILSSYEVVHRILKGKITGALNSALHILKFEESK

SEQ ID NO: 93744 - protein, 395 aa, Homo sapiens
  Payload ID: 18702
  Gene Name: tudor domain containing 12
  Uniprot ID: Q587J7
  ENSP ID: ENSP00000390621
MLQLLVLKIEDPGCFWVIIKGCSPFLDHDVDYQKLNSAMNDFYNSTCQDIEIKPLTLEEGQVCVVYCEELKCWCRAIVKSITSSADQYLAECFLVDFAKNIPVKSKNIRVVVESFMQLPYRAKKFSLYCTKPVTLHIDFCRDSTDIVPAKKWDNAAIQYFQNLLKATTQVEARLCAVEEDTFEVYLYVTIKDEKVCVNDDLVAKNYACYMSPTKNKNLDYLEKPRLNIKSAPSFNKLNPALTLWPMFLQGKDVQGMEDSHGVNFPAQSLQHTWCKGIVGDLRPTATAQDKAVKCNMDSLRDSPKDKSEKKHHCISLKDTNKRVESSVYWPAKRGITIYADPDVPEASALSQKSNEKPLRLTEKKEYDEKNSCVKLLQFLNPDPLRADGISDLQQT

SEQ ID NO: 93745 - protein, 1177 aa, Homo sapiens
  Payload ID: 18702
  Gene Name: tudor domain containing 12
  Uniprot ID: Q587J7
  ENSP ID: ENSP00000416248
MLQLLVLKIEDPGCFWVIIKGCSPFLDHDVDYQKLNSAMNDFYNSTCQDIEIKPLTLEEGQVCVVYCEELKCWCRAIVKSITSSADQYLAECFLVDFAKNIPVKSKNIRVVVESFMQLPYRAKKFSLYCTKPVTLHIDFCRDSTDIVPAKKWDNAAIQYFQNLLKATTQVEARLCAVEEDTFEVYLYVTIKDEKVCVNDDLVAKNYACYMSPTKNKNLDYLEKPRLNIKSAPSFNKLNPALTLWPMFLQGKDVQGMEDSHGVNFPAQSLQHTWCKGIVGDLRPTATAQDKAVKCNMDSLRDSPKDKSEKKHHCISLKDTNKRVESSVYWPAKRGITIYADPDVPEASALSQKSNEKPLRLTEKKEYDEKNSCVKLLQFLNPDPLRADGISDLQQLQKLKGLQPPVVVLRNKIKPCLTIDSSPLSADLKKALQRNKFPGPSHTESYSWPPIARGCDVVVISHCESNPLLYLLPVLTVLQTGACYKSLPSRNGPLAVIVCPGWKKAQFIFELLGEYSMSSRPLHPVLLTIGLHKEEAKNTKLPRGCDVIVTTPYSLLRLLACQSLLFLRLCHLILDEVEVLFLEANEQMFAILDNFKKNIEVEERESAPHQIVAVGVHWNKHIEHLIKEFMNDPYIVITAMEEAALYGNVQQVVHLCLECEKTSSLLQALDFIPSQAQKTLIFTCSVAETEIVCKVVESSSIFCLKMHKEMIFNLQNVLEQWKKKLSSGSQIILALTDDCVPLLAITDATCVIHFSFPASPKVFGGRLYCMSDHFHAEQGSPAEQGDKKAKSVLLLTEKDASHAVGVLRYLERADAKVPAELYEFTAGVLEAKEDKKAGRPLCPYLKAFGFCKDKRICPDRHRINPETDLPRKLSSQALPSFGYIKIIPFYILNATNYFGRIVDKHMDLYATLNAEMNEYFKDSNKTTVEKVEKFGLYGLAEKTLFHRVQVLEVNQKEDAWALDDILVEFIDEGRTGLVTRDQLLHLPEHFHTLPPQAVEFIVCRVKPADNEIEWNPKVTRYIHHKIVGKLHDAKVILALGNTVWIDPMVHITNLSSLKTSVIDYNVRAEILSMGMGIDNPEHIEQLKKLREDAKIPACEESLSQTPPRVTGTSPAQDQDHPSEEQGGQGTPPAEDAACLQSPQPEDTGAEGGAESKTSSENQKPGGYLVFKRWLSSNR

SEQ ID NO: 93746 - protein, 112 aa, Homo sapiens
  Payload ID: 18702
  Gene Name: tudor domain containing 12
  ENSP ID: ENSP00000457498
  MOD_RES (1)..(1): Any amino acid
XKLREDAKIPACEESLSQTPPRVTGTSPAQDQDHPSEEQGGQGSCREPGVNPCLSRLGRLQQKMLLACRAPSLRTRVQKEGLSPRRAQKTRSLKLYLETLKVPSLAELHSRL

SEQ ID NO: 93747 - protein, 1934 aa, Homo sapiens
  Payload ID: 18703
  Gene Name: tudor domain containing 15
  Uniprot ID: B5MCY1
  ENSP ID: ENSP00000384376
MDSTSFLPTFLDVDLTISHIKCLPKDILVKFQGIKSNECEFDYHVLQREIQHTPKVKNNVEIDEFCLVEERVSGEWQRGRVMEKKNELYTVLLIDRGEELRVAGPQIASACGNLFELPPRVVFGIFANILPVGEKWSPKALNYFKSLVGIQVKGYVQAILPLQMFLFEVPKIISQALELQLGRLVDGDSFRLIVEMLEEFPQQMPDLLQHKRPELSLGNKDTSLDIQHVLDKLQPSLSVGSTESVKVSSALSPSKFYCQLIKWTPELENLTAHMTLHYDTVCQETSPTCDNFGLLCVARRRNGQWHRGILQQLLPPNQVKIWFMDYGSSEAIPSIYVKKLKQDFILVPLFSFPCSLTCLHSPDRDARIFQLSIFKQALLGQVVYAHIDWFNKDECLYYVTLQTQESTVNSKCLLKTVGTQVLCPMSDSKISNILSETSVSDVNSFAVESFMGNIEWSIDSLNKKGILKVGFPIKTVQMEIEAAYIAFIAYVLNPSNFWVRTNDHRNEFQEIMKNINKFYDLCENDEMILRKPEPGLFCCARYSKDRRFYRAVITEINGYKINVYFLDYGNTDSIPFFDVKILLPEFCELPALAMCCSLAHIFPVEDLWTKAAIDYFKKLVLNKAILLQVIAKKDDKYTVNIQSVEASENIDVISLMLQAGYAEYFQVELEYFPKSVSEYSMLNSESKNKVNIKKVISALLEGPKSKKYHSNNLVENNLSLPKSLAVNISEFKNPFTLSVGPESSWPYKEYIFRPGTVLEVKCSCYYGPGDFSCQLQCKSEDLKLLMEQIQNYYSIHSDPYEIGQTACVAKYSGKWCRAAVLTQVSKEVDIVFVDYGYQKRVLIEDLCAINPRFLLLESQAFRCCLNHFIEPVSCKLFSWTRKAFRDLWNFISSSRGLLTCIIYALVIIHPNHLYNLVDLQSSFTSAKEFLMNRGSAQYITLSETFPSLFSLYSYCYSSFNIQIGSEEEVYISHIYSPQKFYCQLGRNNKDLEMIETKITESVNLQNFPKYDSNKMRVCISKYVEDGLSYRALAIPTDSSSEFQVYFVDFGNKQLVGENMLRAISAQFPELLFTPMQAIKCFLSDLRDVDIPAEISSWFKDNFLGRSLKAIILSQESDGQLGIELYDGSQYINEKIKVLLHAYGKRHCDQACCMEKSNKINENKRFTTSLKGKTGNNYRHNVINKPSPVTYSERKIDQLMHPKNIHARFLKPSVCYKMEPVSKNKMKTSLNDGLKGIKIVPGAAHILENRRVGQKSVKVVSQSFIRALNQTTSQNPYDLIRPQIKDLPQPQIYLNAKVKGYVSNISNPANFHIQLAENESVIIRLADALNATARRLRERKSVKPLVGDLVVAEYSGDNAIYRAVIKKILPGNSFEVEFIDYGNSAIVNTSKIYELQREFLTVPQLGIHAFLSGVKWNEPDEIWDDKTVDYFTSKVHNKTVYCEFLKKHDQKWEVNMICDEKCVINELLKWKACSKLQKSALQMPQVLSQKVRPGDNEMKKGKSNESEGSMNSNQQLFKIPLEEFKLGQLEKAEMLNVSKSGRFYVKLSKNKKILSDLIVLITKEEKKSPFLSMESIEKGLECLAKSKNTLKWHRSKVEEKYVDDKVLVFLVDCGIYEIVPVCNTKLLSNEIRNIPRQAVPCKWIWFENSKNISFECLFADLEINILFLKYLDAVWEVEILVDDLLLLEYLNLNTVPVEENKLRLAEIVYNIESKTPVSSCTIKSFTWVQFQNDRQYSGIATAVSDPSDFSIQLEDFFDIMKYLFMLLSDLPETLQTLPQEFIIPGSSCLFKYKSEDQWNRVEISEVSPQSLCLVLVDYGFSFYIRYSEIINLKVVPEELLNLPRLSYPCILYGILPAKGKHWSEEAKIFFRDFLSKPDLVFQFREYHSETKLKVDVIHEKNNLADILVASGLATYSKDSPHLDAITATESAKNPI

SEQ ID NO: 93748 - protein, 1934 aa, Homo sapiens; identical to SEQ ID NO: 93747
  Payload ID: 18703
  Gene Name: tudor domain containing 15
  Uniprot ID: B5MCY1
  ENSP ID: ENSP00000478350

SEQ ID NO: 93749 - protein, 651 aa, Homo sapiens
  Payload ID: 18704
  Gene Name: tudor domain containing 3
  Uniprot ID: Q9H7E2
  ENSP ID: ENSP00000196169
MLRLQMTDGHISCTAVEFSYMSKISLNTPPGTKVKLSGIVDIKNGFLLLNDSNTTVLGGEVEHLIEKWELQRSLSKHNRSNIGTEGGPPPFVPFGQKCVSHVQVDSRELDRRKTLQVTMPVKPTNDNDEFEKQRTAAIAEVAKSKETKTFGGGGGGARSNLNMNAAGNRNREVLQKEKSTKSEGKHEGVYRELVDEKALKHITEMGFSKEASRQALMDNGNNLEAALNVLLTSNKQKPVMGPPLRGRGKGRGRIRSEDEEDLGNARPSAPSTLFDFLESKMGTLNVEEPKSQPQQLHQGQYRSSNTEQNGVKDNNHLRHPPRNDTRQPRNEKPPRFQRDSQNSKSVLEGSGLPRNRGSERPSTSSVSEVWAEDRIKCDRPYSRYDRTKDTSYPLGSQHSDGAFKKRDNSMQSRSGKGPSFAEAKENPLPQGSVDYNNQKRGKRESQTSIPDYFYDRKSQTINNEAFSGIKIEKHFNVNTDYQNPVRSNSFIGVPNGEVEMPLKGRRIGPIKPAGPVTAVPCDDKIFYNSGPKRRSGPIKPEKILESSIPMEYAKMWKPGDECFALYWEDNKFYRAEVEALHSSGMTAVVKFIDYGNYEEVLLSNIKPIQTEAWEEEGTYDQTLEFRRGGDGQPRRSTRPTQQFYQPPRARN

SEQ ID NO: 93750 - protein, 651 aa, Homo sapiens; identical to SEQ ID NO: 93749
  Payload ID: 18704
  Gene Name: tudor domain containing 3
  Uniprot ID: Q9H7E2
  ENSP ID: ENSP00000367113

SEQ ID NO: 93751 - protein, 129 aa, Homo sapiens
  Payload ID: 18704
  Gene Name: tudor domain containing 3
  ENSP ID: ENSP00000367114
MLRLQMTDGHISCTAVEFSYMSKISLNTPPGTKVKLSGIVDIKNGFLLLNDSNTTVLGGEVEHLIEKWELQRSLSKHNRSNIGTEGGPPPFVPFGQKCVSHVQVDSRELDRRKTLQVTMPVKPTNDNDE

SEQ ID NO: 93752 - protein, 651 aa, Homo sapiens; identical to SEQ ID NO: 93749
  Payload ID: 18704
  Gene Name: tudor domain containing 3
  Uniprot ID: Q9H7E2
  ENSP ID: ENSP00000367126

SEQ ID NO: 93753 - protein, 116 aa, Homo sapiens
  Payload ID: 18704
  Gene Name: tudor domain containing 3
  ENSP ID: ENSP00000432703
MLRLQMTDGHISCTAVEFSYMSKISLNTPPGTKVKLSGIVDIKNGFLLLNDSNTTVLGGEVEHLIEKWELQRSLSKHNRSNIGTEGGPPPFVPFGQFGRRNSQDKRKCEVLWCDPC

SEQ ID NO: 93754 - protein, 744 aa, Homo sapiens
  Payload ID: 18704
  Gene Name: tudor domain containing 3
  Uniprot ID: Q9H7E2
  ENSP ID: ENSP00000440190
MAQVAGAALSQAGWYLSDEGIEACTSSPDKVNVNDIILIALNTDLRTIGKKFLPSDINSGKVEKLEGPCVLQIQKIRNVAAPKDNEESQAAPRMLRLQMTDGHISCTAVEFSYMSKISLNTPPGTKVKLSGIVDIKNGFLLLNDSNTTVLGGEVEHLIEKWELQRSLSKHNRSNIGTEGGPPPFVPFGQKCVSHVQVDSRELDRRKTLQVTMPVKPTNDNDEFEKQRTAAIAEVAKSKETKTFGGGGGGARSNLNMNAAGNRNREVLQKEKSTKSEGKHEGVYRELVDEKALKHITEMGFSKEASRQALMDNGNNLEAALNVLLTSNKQKPVMGPPLRGRGKGRGRIRSEDEEDLGNARPSAPSTLFDFLESKMGTLNVEEPKSQPQQLHQGQYRSSNTEQNGVKDNNHLRHPPRNDTRQPRNEKPPRFQRDSQNSKSVLEGSGLPRNRGSERPSTSSVSEVWAEDRIKCDRPYSRYDRTKDTSYPLGSQHSDGAFKKRDNSMQSRSGKGPSFAEAKENPLPQGSVDYNNQKRGKRESQTSIPDYFYDRKSQTINNEAFSGIKIEKHFNVNTDYQNPVRSNSFIGVPNGEVEMPLKGRRIGPIKPAGPVTAVPCDDKIFYNSGPKRRSGPIKPEKILESSIPMEYAKMWKPGDECFALYWEDNKFYRAEVEALHSSGMTAVVKFIDYGNYEEVLLSNIKPIQTEAWEEEGTYDQTLEFRRGGDGQPRRSTRPTQQFYQPPRARN

SEQ ID NO: 93755 - protein, 650 aa, Homo sapiens
  Payload ID: 18704
  Gene Name: tudor domain containing 3
  Uniprot ID: Q9H7E2
  ENSP ID: ENSP00000477993
MLRLQMTDGHISCTAVEFSYMSKISLNTPPGTKVKLSGIVDIKNGFLLLNDSNTTVLGGEVEHLIEKWELQRSLSKHNRSNIGTEGGPPPFVPFGQCVSHVQVDSRELDRRKTLQVTMPVKPTNDNDEFEKQRTAAIAEVAKSKETKTFGGGGGGARSNLNMNAAGNRNREVLQKEKSTKSEGKHEGVYRELVDEKALKHITEMGFSKEASRQALMDNGNNLEAALNVLLTSNKQKPVMGPPLRGRGKGRGRIRSEDEEDLGNARPSAPSTLFDFLESKMGTLNVEEPKSQPQQLHQGQYRSSNTEQNGVKDNNHLRHPPRNDTRQPRNEKPPRFQRDSQNSKSVLEGSGLPRNRGSERPSTSSVSEVWAEDRIKCDRPYSRYDRTKDTSYPLGSQHSDGAFKKRDNSMQSRSGKGPSFAEAKENPLPQGSVDYNNQKRGKRESQTSIPDYFYDRKSQTINNEAFSGIKIEKHFNVNTDYQNPVRSNSFIGVPNGEVEMPLKGRRIGPIKPAGPVTAVPCDDKIFYNSGPKRRSGPIKPEKILESSIPMEYAKMWKPGDECFALYWEDNKFYRAEVEALHSSGMTAVVKFIDYGNYEEVLLSNIKPIQTEAWEEEGTYDQTLEFRRGGDGQPRRSTRPTQQFYQPPRARN

SEQ ID NO: 93756 - protein, 981 aa, Homo sapiens
  Payload ID: 18705
  Gene Name: tudor domain containing 5
  Uniprot ID: Q8NAT2
  ENSP ID: ENSP00000294848
MSEQERIQECLRKEIRSLLISTKDGLSPQELEKEYLLMVGNHLPLRILGYRSTMELVLDMPDVVRVCPGAGGTVILKAIPDESTKGIASLVAKQRSSHKLRNSMHKGRPSIYSGPRSHRRVPYRGRVAPILPAVVKSELKDLLALSPVLLSDFEKAFAKRFGRSFQYMQYGFLSMFEVLNAASDVISVEQTRAGSLLMLKKSVTEEKPRGCPAGKIFTQPFRMKQGSYSTGFPVAKPCFSQPTSNMEPPKQIMSMEKTSKLNVVETSRLNHTEKLNQLENTFKSVIAQIGPGGTISSELKHKIKFVVSKFPEGLFISKLLGEYEVIFKEQLSPKKLGFLNVTELVGALSDILHVEFRKGHQDLLVFDADKKPLPPVQSDKKIEAKACVSSPPRNSLSTAAVKETVWNCPSKKQKEPQQKICKKPNLVVKPLQLQVETNKSELNLAMANHDIPPDAVPNKKLCRLPPLDTSSLIGVFVEYIISPSQFYIRIYSRDSSELLEDMMIEMRRCYSNQLVSDRYVMPECFIQPGHLCCVRISEDKWWYRVIIHRVLEKQEVEVFYPDFGNIGIVQKSSLRFLKCCYTKLPAQAIPCSLAWVRPVEEHWTSKAILQFQKLCGLKPLVGVVDEYVDGILNIFLCDTSSNEDVYFHHVLRTEGHAIVCRENISSKGFSELNPLALYTTSSGGPEDIVLTELGYPSQQHYFNEDRKISPQSKESELRILDEIPTGMPCLESVTIGDDIWDENWLPLQAKMGKGGDAASHLFTASLGGKNQYSSCKEMPQKDWCFSTPKDTWDDSWQPSGLVNGTKVEVHKPEVLGAQEKNTGTNRTQKQLDINGSSDSSTLPKLEEFCTSLTQSEQSADGSQSEPNNSQTQPKQIQLSTAAPCSTTAVDDSAEKPSGSVESSPEILKNEDFSSSRAITLYKDKRQESVDQLSLILSYECQISQKLYIPRSTATAALGAAARLATSRSLLHWYPSVKRMEA

SEQ ID NO: 93757 - protein, 981 aa, Homo sapiens; identical to SEQ ID NO: 93756
  Payload ID: 18705
  Gene Name: tudor domain containing 5
  Uniprot ID: Q8NAT2
  ENSP ID: ENSP00000356586

SEQ ID NO: 93758 - protein, 1035 aa, Homo sapiens
  Payload ID: 18705
  Gene Name: tudor domain containing 5
  Uniprot ID: Q8NAT2
  ENSP ID: ENSP00000406052
MSEQERIQECLRKEIRSLLISTKDGLSPQELEKEYLLMVGNHLPLRILGYRSTMELVLDMPDVVRVCPGAGGTVILKAIPDESTKGIASLVAKQRSSHKLRNSMHKGRPSIYSGPRSHRRVPYRGRVAPILPAVVKSELKDLLALSPVLLSDFEKAFAKRFGRSFQYMQYGFLSMFEVLNAASDVISVEQTRAGSLLMLKKSVTEEKPRGCPAGKIFTQPFRMKQGSYSTGFPVAKPCFSQPTSNMEPPKQIMSMEKTSKLNVVETSRLNHTEKLNQLENTFKSVIAQIGPGGTISSELKHKIKFVVSKFPEGLFISKLLGEYEVIFKEQLSPKKLGFLNVTELVGALSDILHVEFRKGHQDLLVFDADKKPLPPVQSDKKIEAKACVSSPPRNSLSTAAVKETVWNCPSKKQKEPQQKICKKPNLVVKPLQLQVETNKSELNLAMANHDIPPDAVPNKKLCRLPPLDTSSLIGVFVEYIISPSQFYIRIYSRDSSELLEDMMIEMRRCYSNQLVSDRYVMPECFIQPGHLCCVRISEDKWWYRVIIHRVLEKQEVEVFYPDFGNIGIVQKSSLRFLKCCYTKLPAQAIPCSLAWVRPVEEHWTSKAILQFQKLCGLKPLVGVVDEYVDGILNIFLCDTSSNEDVYFHHVLRTEGHAIVCRENISSKGFSELNPLALYTTSSGGPEDIVLTELGYPSQQHYFNEDRKISPQSKESELRILQDINDEKSLSHLKSESKEPLKDSEFESLKTCNKSFEEDPKWSNPEPNDLKEENEDEIPTGMPCLESVTIGDDIWDENWLPLQAKMGKGGDAASHLFTASLGGKNQYSSCKEMPQKDWCFSTPKDTWDDSWQPSGLVNGTKVEVHKPEVLGAQEKNTGTNRTQKQLDINGSSDSSTLPKLEEFCTSLTQSEQSADGSQSEPNNSQTQPKQIQLSTAAPCSTTAVDDSAEKPSGSVESSPEILKNEDFSSSRAITLYKDKRQESVDQLSLILSYECQISQKLYIPRSTATAALGAAARLATSRSLLHWYPSVKRMEA

SEQ ID NO: 93759 - protein, 491 aa, Homo sapiens
  Payload ID: 18705
  Gene Name: tudor domain containing 5
  ENSP ID: ENSP00000410744
VIIHRVLEKQEVEVFYPDFGNIGIVQKSSLRFLKCCYTKLPAQAIPCSLAWVRPVEEHWTSKAILQFQKLCGLKPLVGVVDEYVDGILNIFLCDTSSNEDVYFHHVLRTEGHAIVCRENISSKGFSELNPLALYTTSSGGPEDIVLTELGYPSQQHYFNEDRKISPQSKESELRILQDINDEKSLSHLKSESKEPLKDSEFESLKTCNKSFEEDPKWSNPEPNDLKEENEDEIPTGMPCLESVTIGDDIWDENWLPLQAKMGKGGDAASHLFTASLGGKNQYSSCKEMPQKDWCFSTPKDTWDDSWQPSGLVNGTKVEVHKPEVLGAQEKNTGTNRTQKQLDINGSSDSSTLPKLEEFCTSLTQSEQSADGSQSEPNNSQTQPKQIQLSTAAPCSTTAVDDSAEKPSGSVESSPEILKNEDFSSSRAITLYKDKRQESVDQLSLILSYECQISQKLYIPRSTATAALGAAARLATSRSLLHWYPSVKRMEA

SEQ ID NO: 93760 - protein, 2096 aa, Homo sapiens
  Payload ID: 18706
  Gene Name: tudor domain containing 6
  Uniprot ID: O60522
  ENSP ID: ENSP00000346065
MCSTPGMPAPGASLALRVSFVDVHPDVIPVQLWGLVGERRGEYLRLSREIQEAAATRGQWALGSASASPGELCLVQVGLLWHRCRVVSRQAQESRVFLLDEGRTITAGAGSLAPGRREFFNLPSEVLGCVLAGLVPAGCGAGSGEPPQHWPADAVDFLSNLQGKEVHGCVLDVLLLHRLVLLEVPDVFQQMRELGLARRVPDSLFRSLLERYLTAATASVGSGVPVLSRVPLKQKQPGLDYFYPQLQLGVTEAVVITQVCHPHRIHCQLRSVSQEIHRLSESMAQVYRGSTGTGDENSTSATWEEREESPDKPGSPCASCGLDGHWYRALLLETFRPQRCAQVLHVDYGRKELVSCSSLRYLLPEYFRMPVVTYPCALYGLWDGGRGWSRSQVGDLKTLILGKAVNAKIEFYCSFEHVYYVSLYGEDGINLNRVFGVQSCCLADRVLQSQATEEEEPETSQSQSPAEEVDEEISLPALRSIRLKMNAFYDAQVEFVKNPSEFWIRLRKHNVTFSKLMRRMCGFYSSASKLDGVVLKPEPDDLCCVKWKENGYYRAIVTKLDDKSVDVFLVDRGNSENVDWYDVRMLLPQFRQLPILAVKCTLADIWPLGKTWSQEAVSFFKKTVLHKELVIHILDKQDHQYVIEILDESRTGEENISKVIAQAGYAKYQEFETKENILVNAHSPGHVSNHFTTESNKIPFAKTGEGEQKAKRENKTTSVSKALSDTTVVTNGSTELVVQEKVKRASVYFPLMQNCLEIKPGSSSKGELEVGSTVEVRVSYVENPGYFWCQLTRNIQGLKTLMSDIQYYCKNTAAPHQRNTLACLAKRTVNRQWSRALISGIQSVEHVNVTFVDYGDREMVSVKNIYSISEEFLKVKAQAFRCSLYNLIQPVGQNPFVWDVKAIQAFNEFIDNAWQKNLELKCTIFALASINEELFNIVDLLTPFQSACHFLVEKRLARPVKLQKPLESSVQLHSYFYSTHDMKIGSEELVYITHIDDPWTFYCQLARNANILEQLSCSITQLSKVLLNLKTSPLNPGTLCLAKYTDGNWYRGIVIEKEPKKVFFVDFGNIYVVTSDDLLPIPSDAYDVLLLPMQAVRCSLSDIPDHIPEEVVVWFQETILDKSLKALVVAKDPDGTLIIELYGDNIQISASINKKLGLLSYKDRIRKKESEVLCSTTETLEEKNENMKLPCTEYLSKSVGYKLPNKEILEESYKPQINSSYKELKLLQSLTKTNLVTQYQDSVGNKNSQVFPLTTEKKEEISAETPLKTARVEATLSERKIGDSCDKDLPLKFCEFPQKTIMPGFKTTVYVSHINDLSDFYVQLIEDEAEISHLSERLNSVKTRPEYYVGPPLQRGDMICAVFPEDNLWYRAVIKEQQPNDLLSVQFIDYGNVSVVHTNKIGRLDLVNAILPGLCIHCSLQGFEVPDNKNSKKMMHYFSQRTSEAAIRCEFVKFQDRWEVILADEHGIIADDMISRYALSEKSQVELSTQVIKSASSKSVNKSDIDTSVFLNWYNPEKKMIRAYATVIDGPEYFWCQFADTEKLQCLEVEVQTAGEQVADRRNCIPCPYIGDPCIVRYREDGHYYRALITNICEDYLVSVRLVDFGNIEDCVDPKALWAIPSELLSVPMQAFPCCLSGFNISEGLCSQEGNDYFYEIITEDVLEITILEIRRDVCDIPLAIVDLKSKGKSINEKMEKYSKTGIKSALPYENIDSEIKQTLGSYNLDVGLKKLSNKAVQNKIYMEQQTDELAEITEKDVNIIGTKPSNFRDPKTDNICEGFENPCKDKIDTEELEGELECHLVDKAEFDDKYLITGFNTLLPHANETKEILELNSLEVPLSPDDESKEFLELESIELQNSLVVDEEKGELSPVPPNVPLSQECVTKGAMELFTLQLPLSCEAEKQPELELPTAQLPLDDKMDPLSLGVSQKAQESMCTEDMRKSSCVESFDDQRRMSLHLHGADCDPKTQNEMNICEEEFVEYKNRDAISALMPLFSEEESSDGSKHNNGLPDHISAQLQNTYTLKAFTVGSKCVVWSSLRNTWSKCEILETAEEGTRVLNLSNGMEEIVNPENVWNGIPKLDKSPPEKRGLEVMEI

SEQ ID NO: 93761 - protein, 175 aa, Homo sapiens
  Payload ID: 18706
  Gene Name: tudor domain containing 6
  ENSP ID: ENSP00000397165
  MOD_RES (1)..(1): Any amino acid
XFDDQRRMSLHLHGADCDPKTQNEMNICEEEFVEYKNRDAISALMPLFSEEESSDGSKHNNGLPDHISAQLQNTYTLKAFTVGSKCVVWSSLRNTWSKCEILETAEEGTRVLNLSNGMEEIVNPENVWNGIPKLDKSPPEAVSQRVGKDLYFMSVGDTTIKEKGFGGDGDLTVDL

SEQ ID NO: 93762 - protein, 2066 aa, Homo sapiens
  Payload ID: 18706
  Gene Name: tudor domain containing 6
  Uniprot ID: O60522
  ENSP ID: ENSP00000443299
MCSTPGMPAPGASLALRVSFVDVHPDVIPVQLWGLVGERRGEYLRLSREIQEAAATRGQWALGSASASPGELCLVQVGLLWHRCRVVSRQAQESRVFLLDEGRTITAGAGSLAPGRREFFNLPSEVLGCVLAGLVPAGCGAGSGEPPQHWPADAVDFLSNLQGKEVHGCVLDVLLLHRLVLLEVPDVFQQMRELGLARRVPDSLFRSLLERYLTAATASVGSGVPVLSRVPLKQKQPGLDYFYPQLQLGVTEAVVITQVCHPHRIHCQLRSVSQEIHRLSESMAQVYRGSTGTGDENSTSATWEEREESPDKPGSPCASCGLDGHWYRALLLETFRPQRCAQVLHVDYGRKELVSCSSLRYLLPEYFRMPVVTYPCALYGLWDGGRGWSRSQVGDLKTLILGKAVNAKIEFYCSFEHVYYVSLYGEDGINLNRVFGVQSCCLADRVLQSQATEEEEPETSQSQSPAEEVDEEISLPALRSIRLKMNAFYDAQVEFVKNPSEFWIRLRKHNVTFSKLMRRMCGFYSSASKLDGVVLKPEPDDLCCVKWKENGYYRAIVTKLDDKSVDVFLVDRGNSENVDWYDVRMLLPQFRQLPILAVKCTLADIWPLGKTWSQEAVSFFKKTVLHKELVIHILDKQDHQYVIEILDESRTGEENISKVIAQAGYAKYQEFETKENILVNAHSPGHVSNHFTTESNKIPFAKTGEGEQKAKRENKTTSVSKALSDTTVVTNGSTELVVQEKVKRASVYFPLMQNCLEIKPGSSSKGELEVGSTVEVRVSYVENPGYFWCQLTRNIQGLKTLMSDIQYYCKNTAAPHQRNTLACLAKRTVNRQWSRALISGIQSVEHVNVTFVDYGDREMVSVKNIYSISEEFLKVKAQAFRCSLYNLIQPVGQNPFVWDVKAIQAFNEFIDNAWQKNLELKCTIFALASINEELFNIVDLLTPFQSACHFLVEKRLARPVKLQKPLESSVQLHSYFYSTHDMKIGSEELVYITHIDDPWTFYCQLARNANILEQLSCSITQLSKVLLNLKTSPLNPGTLCLAKYTDGNWYRGIVIEKEPKKVFFVDFGNIYVVTSDDLLPIPSDAYDVLLLPMQAVRCSLSDIPDHIPEEVVVWFQETILDKSLKALVVAKDPDGTLIIELYGDNIQISASINKKLGLLSYKDRIRKKESEVLCSTTETLEEKNENMKLPCTEYLSKSVGYKLPNKEILEESYKPQINSSYKELKLLQSLTKTNLVTQYQDSVGNKNSQVFPLTTEKKEEISAETPLKTARVEATLSERKIGDSCDKDLPLKFCEFPQKTIMPGFKTTVYVSHINDLSDFYVQLIEDEAEISHLSERLNSVKTRPEYYVGPPLQRGDMICAVFPEDNLWYRAVIKEQQPNDLLSVQFIDYGNVSVVHTNKIGRLDLVNAILPGLCIHCSLQGFEVPDNKNSKKMMHYFSQRTSEAAIRCEFVKFQDRWEVILADEHGIIADDMISRYALSEKSQVELSTQVIKSASSKSVNKSDIDTSVFLNWYNPEKKMIRAYATVIDGPEYFWCQFADTEKLQCLEVEVQTAGEQVADRRNCIPCPYIGDPCIVRYREDGHYYRALITNICEDYLVSVRLVDFGNIEDCVDPKALWAIPSELLSVPMQAFPCCLSGFNISEGLCSQEGNDYFYEIITEDVLEITILEIRRDVCDIPLAIVDLKSKGKSINEKMEKYSKTGIKSALPYENIDSEIKQTLGSYNLDVGLKKLSNKAVQNKIYMEQQTDELAEITEKDVNIIGTKPSNFRDPKTDNICEGFENPCKDKIDTEELEGELECHLVDKAEFDDKYLITGFNTLLPHANETKEILELNSLEVPLSPDDESKEFLELESIELQNSLVVDEEKGELSPVPPNVPLSQECVTKGAMELFTLQLPLSCEAEKQPELELPTAQLPLDDKMDPLSLGVSQKAQESMCTEDMRKSSCVESFDDQRRMSLHLHGADCDPKTQNEMNICEEEFVEYKNRDAISALMPLFSEEESSDGSKHNNGLPDHISAQLQNTYTLKAFTVGSKCVVWSSLRNTWSKCEILETAEEGTRKRGLEVMEI

SEQ ID NO: 93763 - protein, 1098 aa, Homo sapiens
  Payload ID: 18707
  Gene Name: tudor domain containing 7
  Uniprot ID: Q8NHU6
  ENSP ID: ENSP00000347444
MLEGDLVSKMLRAVLQSHKNGVALPRLQGEYRSLTGDWIPFKQLGFPTLEAYLRSVPAVVRIETSRSGEITCYAMACTETARIAQLVARQRSSKRKTGRQVNCQMRVKKTMPFFLEGKPKATLRQPGFASNFSVGKKPNPAPLRDKGNSVGVKPDAEMSPYMLHTTLGNEAFKDIPVQRHVTMSTNNRFSPKASLQPPLQMHLSRTSTKEMSDNLNQTVEKPNVKPPASYTYKMDEVQNRIKEILNKHNNGIWISKLPHFYKELYKEDLNQGILQQFEHWPHICTVEKPCSGGQDLLLYPAKRKQLLRSELDTEKVPLSPLPGPKQTPPLKGCPTVMAGDFKEKVADLLVKYTSGLWASALPKAFEEMYKVKFPEDALKNLASLSDVCSIDYISGNPQKAILYAKLPLPTDKIQKDAGQAHGDNDIKAMVEQEYLQVEESIAESANTFMEDITVPPLMIPTEASPSVLVVELSNTNEVVIRYVGKDYSAAQELMEDEMKEYYSKNPKITPVQAVNVGQLLAVNAEEDAWLRAQVISTEENKIKVCYVDYGFSENVEKSKAYKLNPKFCSLSFQATKCKLAGLEVLSDDPDLVKVVESLTCGKIFAVEILDKADIPLVVLYDTSGEDDININATCLKAICDKSLEVHLQVDAMYTNVKVTNICSDGTLYCQVPCKGLNKLSDLLRKIEDYFHCKHMTSECFVSLPFCGKICLFHCKGKWLRVEITNVHSSRALDVQFLDSGTVTSVKVSELREIPPRFLQEMIAIPPQAIKCCLADLPQSIGMWTPDAVLWLRDSVLNCSDCSIKVTKVDETRGIAHVYLFTPKNFPDPHRSINRQITNADLWKHQKDVFLSAISSGADSPNSKNGNMPMSGNTGENFRKNLTDVIKKSMVDHTSAFSTEELPPPVHLSKPGEHMDVYVPVACHPGYFVIQPWQEIHKLEVLMEEMILYYSVSEERHIAVEKDQVYAAKVENKWHRVLLKGILTNGLVSVYELDYGKHELVNIRKVQPLVDMFRKLPFQAVTAQLAGVKCNQWSEEASMVFRNHVEKKPLVALVQTVIENANPWDRKVVVYLVDTSLPDTDTWIHDFMSEYLIELSKVN

SEQ ID NO: 93764 - protein, 877 aa, Homo sapiens [sequence omitted]

SEQ ID NO: 93765 - protein, 1382 aa, Homo sapiens
  Payload ID: 18708
  Gene Name: tudor domain containing 9
  Uniprot ID: Q8NDG6
  ENSP ID: ENSP00000387303
MLRKLTIEQINDWFTIGKTVTNVELLGAPPAFPAGAAREEVQRQDVAPGAGPAAQAPALAQAPARPAAAFERSLSQRSSEVEYINKYRQLEAQELDVCRSVQPTSGPGPRPSLAKLSSVTCIPGTTYKYPDLPISRYKEEVVSLIESNSVVIIHGATGSGKSTQLPQYILDHYVQRSAYCSIVVTQPRKIGASSIARWISKERAWTLGGVVGYQVGLEKIATEDTRLIYMTTGVLLQKIVSAKSLMEFTHIIIDEVHERTEEMDFLLLVVRKLLRTNSRFVKVVLMSATISCKEFADYFAVPVQNKMNPAYIFEVEGKPHSVEEYYLNDLEHIHHSKLSPHLLEEPVITKDIYEVAVSLIQMFDDLDMKESGNKAWSGAQFVLERSSVLVFLPGLGEINYMHELLTSLVHKRLQVYPLHSSVALEEQNNVFLSPVPGYRKIILSTNIAESSVTVPDVKYVIDFCLTRTLVCDEDTNYQSLRLSWASKTSCNQRKGRAGRVSRGYCYRLVHKDFWDNSIPDHVVPEMLRCPLGSTILKVKLLDMGEPRALLATALSPPGLSDIERTILLLKEVGALAVSGQREDENPHDGELTFLGRVLAQLPVNQQLGKLIVLGHVFGCLDECLIIAAALSLKNFFAMPFRQHLDGYRNKVNFSGSSKSDCIALVEAFKTWKACRQTGELRYPKDELNWGRLNYIQIKRIREVAELYEELKTRISQFNMHVDSRRPVMDQEYIYKQRFILQVVLAGAFYPNYFTFGQPDEEMAVRELAGKDPKTTVVLKHIPPYGFLYYKQLQSLFRQCGQVKSIVFDGAKAFVEFSRNPTERFKTLPAVYMAIKMSQLKVSLELSVHSAEEIEGKVQGMNVSKLRNTRVNVDFQKQTVDPMQVSFNTSDRSQTVTDLLLTIDVTEVVEVGHFWGYRIDENNSEILKKLTAEINQLTLVPLPTHPHPDLVCLAPFADFDKQRYFRAQVLYVSGNSAEVFFVDYGNKSHVDLHLLMEIPCQFLELPFQALEFKICKMRPSAKSLVCGKHWSDGASQWFASLVSGCTLLVKVFSVVHSVLHVDVYQYSGVQDAINIRDVLIQQGYAELTEESYESKQSHEVLKGLFSKSVENMTDGSVPFPMKDDEKYLIRILLESFSTNKLGTPNCKAELHGPFNPYELKCHSLTRISKFRCVWIEKESINSVIISDAPEDLHQRMLVAASLSINATGSTMLLRETSLMPHIPGLPALLSMLFAPVIELRIDQNGKYYTGVLCGLGWNPATGASILPEHDMELAFDVQFSVEDVVEVNILRAAINKLVCDGPNGCKCLGPERVAQLQDIARQKLLGLFCQSKPREKIVPKWHEKPYEWNQVDPKLVMEQADRESSRGKNTFLYQLHKLVVLGT

SEQ ID NO: 93766 - protein, 918 aa, Homo sapiens
  Payload ID: 18708
  Gene Name: tudor domain containing 9
  ENSP ID: ENSP00000451637
  MOD_RES (1)..(1): Any amino acid
XRTNSRFVKVVLMSATISCKEFADYFAVPVQNKMNPAYIFEVEGKPHSVEEYYLNDLEHIHHSKLSPHLLEEPVITKDIYEVAVSLIQMFDDLDMKESGNKAWSGAQFVLERSSVLVFLPGLGEINYMHELLTSLVHKRLQVYPLHSSVALEEQNNVFLSPVPGYRKIILSTNIAESSVTVPDVKYVIDFCLTRTLVCDEDTNYQSLRLSWASKTSCNQRKGRAGRVSRGYCYRLVHKDFWDNSIPDHVVPEMLRCPLGSTILKVKLLDMGEPRALLATALSPPGLSDIERTILLLKEVGALAVSGQREDENPHDGELTFLGRVLAQLPVNQQLGKLIVLGHVFGCLDECLIIAAALSLKNFFAMPFRQHLDGYRNKVNFSGSSKSDCIALVEAFKTWKACRQTGELRYPKDELNWGRLNYIQIKRIREVAELYEELKTRISQFNMHVDSRRPVMDQEYIYKQRFILQVVLAGAFYPNYFTFGQPDEEMAVRELAGKDPKTTVVLKHIPPYGFLYYKQLQSLFRQCGQVKSIVFDGAKAFVEFSRNPTERFKTLPAVYMAIKMSQLKVSLELSVHSAEEIEGKVQGMNVSKLRNTRVNVDFQKQTVDPMQVSFNTSDRSQTVTDLLLTIDVTEVVEVGHFWGYRIDENNSEILKKLTAEINQLTLVPLPTHPHPDLVCLAPFADFDKQRYFRAQVLYVSGNSAEVFFVDYGNKSHVDLHLLMEIPCQFLELPFQALEFKICKMRPSAKSLVCGKHWSDGASQWFASLVSGCTLLVKVFSVVHSVLHVDVYQYSGVQDAINIRDVLIQQGYAELTEESYESKVNILRAAINKLVCDGPNGCKCLGPERVAQLQDIARQKLLGLFCQSKPREKIVPKWHEKPYEWNQVDPKLVMEQADRESSRGKNTFLYQLHKLVVLGT

SEQ ID NO: 93767 - protein, 199 aa, Homo sapiens [sequence omitted]

SEQ ID NO: 93768 - protein, 365 aa, Homo sapiens
  Payload ID: 18709
  Gene Name: tuftelin 1
  Uniprot ID: Q9NNX1
  ENSP ID: ENSP00000357841
MNGTRNWCTLVDVHPEDQAAAGRKTYAMVSSHSAGHSLASELVESHDGHEEIIKVYLKGRSGDKMIHEKNINQLKSEVQYIQEARNCLQKLREDISSKLDRNLGDSLHRQEIQVVLEKPNGFSQSPTALYSSPPEVDTCINEDVESLRKTVQDLLAKLQEAKRQHQSDCVAFEVTLSRYQREAEQSNVALQREEDRVEQKEAEVGELQRRLLGMETEHQALLAKVREGEVALEELRSNNADCQAEREKAATLEKEVAGLREKIHHLDDMLKSQQRKVRQMIEQLQNSKAVIQSKDATIQELKEKIAYLEAENLEMHDRMEHLIEKQISHGNFSTQARAKTENPGSIRISKPPSPKPMPVIRVVET

SEQ ID NO: 93769 - protein, 390 aa, Homo sapiens
  Payload ID: 18709
  Gene Name: tuftelin 1
  Uniprot ID: Q9NNX1
  ENSP ID: ENSP00000357842
MNGTRNWCTLVDVHPEDQAAGSVDILRLTLQGELTGDELEHIAQKAGRKTYAMVSSHSAGHSLASELVESHDGHEEIIKVYLKGRSGDKMIHEKNINQLKSEVQYIQEARNCLQKLREDISSKLDRNLGDSLHRQEIQVVLEKPNGFSQSPTALYSSPPEVDTCINEDVESLRKTVQDLLAKLQEAKRQHQSDCVAFEVTLSRYQREAEQSNVALQREEDRVEQKEAEVGELQRRLLGMETEHQALLAKVREGEVALEELRSNNADCQAEREKAATLEKEVAGLREKIHHLDDMLKSQQRKVRQMIEQLQNSKAVIQSKDATIQELKEKIAYLEAENLEMHDRMEHLIEKQISHGNFSTQARAKTENPGSIRISKPPSPKPMPVIRVVET

SEQ ID NO: 93770 - protein, 335 aa, Homo sapiens
  Payload ID: 18709
  Gene Name: tuftelin 1
  ENSP ID: ENSP00000376476
MNGTRNWCTLVDVHPEDQAAAGRKTYAMVSSHSAGHSLASELVESHDGHEEIIKVYLKGRSGDKMIHEKNINQLKSEVQYIQEVVLEKPNGFSQSPTALYSSPPEVDTCINEDVESLRKTVQDLLAKLQEAKRQHQSDCVAFEVTLSRYQREAEQSNVALQREEDRVEQKEAEVGELQRRLLGMETEHQALLAKVREGEVALEELRSNNADCQAEREKAATLEKEVAGLREKIHHLDDMLKSQQRKVRQMIEQLQNSKAVIQSKDATIQELKEKIAYLEAENLEMHDRMEHLIEKQISHGNFSTQARAKTENPGSIRISKPPSPKPMPVIRVVET

SEQ ID NO: 93771 - protein, 837 aa, Homo sapiens
  Payload ID: 18710
  Gene Name: tuftelin interacting protein 11
  Uniprot ID: Q9UBB9
  ENSP ID: ENSP00000383892
MSLSHLYRDGEGRIDDDDDERENFEITDWDLQNEFNPNRQRHWQTKEEATYGVWAERDSDDERPSFGGKRARDYSAPVNFISAGLKKGAAEEAELEDSDDEEKPVKQDDFPKDFGPRKLKTGGNFKPSQKGFAGGTKSFMDFGSWERHTKGIGQKLLQKMGYVPGRGLGKNAQGIINPIEAKQRKGKGAVGAYGSERTTQSMQDFPVVDSEEEAEEEFQKELSQWRKDPSGSKKKPKYSYKTVEELKAKGRISKKLTAPQKELSQVKVIDMTGREQKVYYSYSQISHKHNVPDDGLPLQSQQLPQSGKEAKAPGFALPELEHNLQLLIDLTEQEIIQNDRQLQYERDMVVNLFHELEKMTEVLDHEERVISNLSKVLEMVEECERRMQPDCSNPLTLDECARIFETLQDKYYEEYRMSDRVDLAVAIVYPLMKEYFKEWDPLKDCTYGTEIISKWKSLLENDQLLSHGGQDLSADAFHRLIWEVWMPFVRNIVTQWQPRNCDPMVDFLDSWVHIIPVWILDNILDQLIFPKLQKEVENWNPLTDTVPIHSWIHPWLPLMQARLEPLYSPIRSKLSSALQKWHPSDSSAKLILQPWKDVFTPGSWEAFMVKNIVPKLGMCLGELVINPHQQHMDAFYWVIDWEGMISVSSLVGLLEKHFFPKWLQVLCSWLSNSPNYEEITKWYLGWKSMFSDQVLAHPSVKDKFNEALDIMNRAVSSNVGAYMQPGARENIAYLTHTERRKDFQYEAMQERREAENMAQRGIGVAASSVPMNFKDLIETKAEEHNIVFMPVIGKRHEGKQLYTFGRIVIYIDRGVVFVQGEKTWVPTSLQSLIDMAK

SEQ ID NO: 93772 - protein, 837 aa, Homo sapiens; identical to SEQ ID NO: 93771
  Payload ID: 18710
  Gene Name: tuftelin interacting protein 11
  Uniprot ID: Q9UBB9
  ENSP ID: ENSP00000384297

SEQ ID NO: 93773 - protein, 837 aa, Homo sapiens; identical to SEQ ID NO: 93771
  Payload ID: 18710
  Gene Name: tuftelin interacting protein 11
  Uniprot ID: Q9UBB9
  ENSP ID: ENSP00000384421

SEQ ID NO: 93774 - protein, 837 aa, Homo sapiens; identical to SEQ ID NO: 93771
  Payload ID: 18710
  Gene Name: tuftelin interacting protein 11
  Uniprot ID: Q9UBB9
  ENSP ID: ENSP00000385861

SEQ ID NO: 93775 - protein, 190 aa, Homo sapiens
  Payload ID: 18710
  Gene Name: tuftelin interacting protein 11
  ENSP ID: ENSP00000394266
  MOD_RES (1)..(1): Any amino acid
XGRGLGKNAQGIINPIEAKQRKGKGAVGAYGSERTTQSMQDFPVVDSEEEAEEWLFLAASDCILLVQEFQKELSQWRKDPSGSKKKPKYSYKTVEELKAKGRISKKLTAPQKELSQVKVIDMTGREQKVYYSYSQISHKHNVPDDGLPLQSQQLPQSGKEAKAPGFALPELEHNLQLLIDLTEQEIIQND

SEQ ID NO: 93776 - protein, 86 aa, Homo sapiens
  Payload ID: 18710
  Gene Name: tuftelin interacting protein 11
  ENSP ID: ENSP00000397475
MSLSHLYRDGEGRIDDDDDERENFEITDWDLQNEFNPNRQRHWQTKEEATYGVWAERDSDDERPSFGGKRARDYSAPVNFISAGLK

SEQ ID NO: 93777 - protein, 121 aa, Homo sapiens
  Payload ID: 18710
  Gene Name: tuftelin interacting protein 11
  ENSP ID: ENSP00000399347
MSLSHLYRDGEGRIDDDDDERENFEITDWDLQNEFNPNRQRHWQTKEEATYGVWAERDSDDERPSFGGKRARDYSAPVNFISAGLKKGAAEEAELEDSDDEEKPVKQDDFPKDFGPRKLKT

SEQ ID NO: 93778 - protein, 88 aa, Homo sapiens
  Payload ID: 18710
  Gene Name: tuftelin interacting protein 11
  ENSP ID: ENSP00000404973
MSLSHLYRDGEGRIDDDDDERENFEITDWDLQNEFNPNRQRHWQTKEEATYGVWAERDSDDERPSFGGKRARDYSAPVNFISAGLKKG

SEQ ID NO: 93779 - protein, 42 aa, Homo sapiens
  Payload ID: 18710
  Gene Name: tuftelin interacting protein 11
  ENSP ID: ENSP00000411840
MSLSHLYRDGEGRIDDDDDERENFEITDWDLQNEFNPNRQRH

SEQ ID NO: 93780 - protein, 837 aa, Homo sapiens; identical to SEQ ID NO: 93771
  Payload ID: 18710
  Gene Name: tuftelin interacting protein 11
  Uniprot ID: Q9UBB9
  ENSP ID: ENSP00000480171

SEQ ID NO: 93781 - protein, 233 aa, Homo sapiens
  Payload ID: 18711
  Gene Name: tumor necrosis factor
  Uniprot ID: P01375
  ENSP ID: ENSP00000365290
MSTESMIRDVELAEEALPKKTGGPQGSRRCLFLSLFSFLIVAGATTLFCLLHFGVIGPQREEFPRDLSLISPLAQAVRSSSRTPSDKPVAHVVANPQAEGQLQWLNRRANALLANGVELRDNQLVVPSEGLYLIYSQVLFKGQGCPSTHVLLTHTISRIAVSYQTKVNLLSAIKSPCQRETPEGAEAKPWYEPIYLGGVFQLEKGDRLSAEINRPDYLDFAESGQVYFGIIAL

SEQ ID NO: 93782 - protein, 233 aa, Homo sapiens; identical to SEQ ID NO: 93781
  Payload ID: 18711
  Gene Name: tumor necrosis factor
  Uniprot ID: P01375
  ENSP ID: ENSP00000372988

SEQ ID NO: 93783 - protein, 171 aa, Homo sapiens
  Payload ID: 18711
  Gene Name: tumor necrosis factor
  ENSP ID: ENSP00000389265
FPRDLSLISPLAQAVRSSSRTPSDKPVAHVVANPQAEGQLQWLNRRANALLANGVELRDNQLVVPSEGLYLIYSQVLFKGQGCPSTHVLLTHTISRIAVSYQTKVNLLSAIKSPCQRETPEGAEAKPWYEPIYLGGVFQLEKGDRLSAEINRPDYLDFAESGQVYFGIIAL

SEQ ID NO: 93784 - protein, 233 aa, Homo sapiens; identical to SEQ ID NO: 93781
  Payload ID: 18711
  Gene Name: tumor necrosis factor
  Uniprot ID: P01375
  ENSP ID: ENSP00000389490

SEQ ID NO: 93785 - protein, 233 aa, Homo sapiens; identical to SEQ ID NO: 93781
  Payload ID: 18711
  Gene Name: tumor necrosis factor
  Uniprot ID: P01375
  ENSP ID: ENSP00000389492

SEQ ID NO: 93786 - protein, 233 aa, Homo sapiens; identical to SEQ ID NO: 93781
  Payload ID: 18711
  Gene Name: tumor necrosis factor
  Uniprot ID: P01375
  ENSP ID: ENSP00000392858

SEQ ID NO: 93787 - protein, 233 aa, Homo sapiens; identical to SEQ ID NO: 93781
  Payload ID: 18711
  Gene Name: tumor necrosis factor
  Uniprot ID: P01375
  ENSP ID: ENSP00000398698

SEQ ID NO: 93788 - protein, 233 aa, Homo sapiens; identical to SEQ ID NO: 93781
  Payload ID: 18711
  Gene Name: tumor necrosis factor
  Uniprot ID: P01375
  ENSP ID: ENSP00000410668

SEQ ID NO: 93789 - protein, 281 aa, Homo sapiens [sequence omitted]

SEQ ID NO: 93790 - protein, 101 aa, Homo sapiens
  Payload ID: 18712
  Gene Name: tumor necrosis factor (ligand) superfamily, member 10
  Uniprot ID: P50591
  ENSP ID: ENSP00000389931
MAMMEVQGGPSLGQTCVLIVIFTVLLQSLCVAVTYVYFTNELKQMQDKYSKSGIACFLKEDDSYWDPNDEESMNSPCWQVKWQLRQLVRKTPRMKRLWAAK

SEQ ID NO: 93791 - protein, 74 aa, Homo sapiens
  Payload ID: 18712
  Gene Name: tumor necrosis factor (ligand) superfamily, member 10
  ENSP ID: ENSP00000404008
  MOD_RES (1)..(1): Any amino acid
XLQSLCVAVTYVYFTNELKQMQDKYSKSGIACFLKEDDSYWDPNDEESMNSPCWQVKWQLRQLVRKKSNKIFLP

SEQ ID NO: 93792 - protein, 270 aa, Homo sapiens
  Payload ID: 18713
  Gene Name: tumor necrosis factor (ligand) superfamily, member 11
  Uniprot ID: O14788
  ENSP ID: ENSP00000239849
MFVALLGLGLGQVVCSVALFFYFRAQMDPNRISEDGTHCIYRILRLHENADFQDTTLESQDTKLIPDSCRRIKQAFQGAVQKELQHIVGSQHIRAEKAMVDGSWLDLAKRSKLEAQPFAHLTINATDIPSGSHKVSLSSWYHDRGWAKISNMTFSNGKLIVNQDGFYYLYANICFRHHETSGDLATEYLQLMVYVTKTSIKIPSSHTLMKGGSTKYWSGNSEFHFYSINVGGFFKLRSGEEISIEVSNPSLLDPDQDATYFGAFKVRDID

SEQ ID NO: 93793 - protein, 244 aa, Homo sapiens
  Payload ID: 18713
  Gene Name: tumor necrosis factor (ligand) superfamily, member 11
  Uniprot ID: O14788
  ENSP ID: ENSP00000351347
MDPNRISEDGTHCIYRILRLHENADFQDTTLESQDTKLIPDSCRRIKQAFQGAVQKELQHIVGSQHIRAEKAMVDGSWLDLAKRSKLEAQPFAHLTINATDIPSGSHKVSLSSWYHDRGWAKISNMTFSNGKLIVNQDGFYYLYANICFRHHETSGDLATEYLQLMVYVTKTSIKIPSSHTLMKGGSTKYWSGNSEFHFYSINVGGFFKLRSGEEISIEVSNPSLLDPDQDATYFGAFKVRDID

SEQ ID NO: 93794 - protein, 317 aa, Homo sapiens
  Payload ID: 18713
  Gene Name: tumor necrosis factor (ligand) superfamily, member 11
  Uniprot ID: O14788
  ENSP ID: ENSP00000381775
MRRASRDYTKYLRGSEEMGGGPGAPHEGPLHAPPPPAPHQPPAASRSMFVALLGLGLGQVVCSVALFFYFRAQMDPNRISEDGTHCIYRILRLHENADFQDTTLESQDTKLIPDSCRRIKQAFQGAVQKELQHIVGSQHIRAEKAMVDGSWLDLAKRSKLEAQPFAHLTINATDIPSGSHKVSLSSWYHDRGWAKISNMTFSNGKLIVNQDGFYYLYANICFRHHETSGDLATEYLQLMVYVTKTSIKIPSSHTLMKGGSTKYWSGNSEFHFYSINVGGFFKLRSGEEISIEVSNPSLLDPDQDATYFGAFKVRDID

SEQ ID NO: 93795 - protein, 244 aa, Homo sapiens; identical to SEQ ID NO: 93793
  Payload ID: 18713
  Gene Name: tumor necrosis factor (ligand) superfamily, member 11
  Uniprot ID: O14788
  ENSP ID: ENSP00000384042

SEQ ID NO: 93796 - protein, 244 aa, Homo sapiens; identical to SEQ ID NO: 93793
  Payload ID: 18713
  Gene Name: tumor necrosis factor (ligand) superfamily, member 11
  Uniprot ID: O14788
  ENSP ID: ENSP00000444913

SEQ ID NO: 93797 - protein, 249 aa, Homo sapiens
  Payload ID: 18714
  Gene Name: tumor necrosis factor (ligand) superfamily, member 12
  Uniprot ID: O43508
  ENSP ID: ENSP00000293825
MAARRSQRRRGRRGEPGTALLVPLALGLGLALACLGLLLAVVSLGSRASLSAQEPAQEELVAEEDQDPSELNPQTEESQDPAPFLNRLVRPRRSAPKGRKTRARRAIAAHYEVHPRPGQDGAQAGVDGTVSGWEEARINSSSPLRYNRQIGEFIVTRAGLYYLYCQVHFDEGKAVYLKLDLLVDGVLALRCLEEFSATAASSLGPQLRLCQVSGLLALRPGSSLRIRTLPWAHLKAAPFLTYFGLFQVH

SEQ ID NO: 93798 - protein, 134 aa, Homo sapiens
  Payload ID: 18714
  Gene Name: tumor necrosis factor (ligand) superfamily, member 12
  ENSP ID: ENSP00000314636
MAARRSQRRRGRRGEPGTALLVPLALGLGLALACLGLLLAVVSLGSRASLSAQEPAQEELVAEEDQDPSELNPQTEESQDPAPFLNRLVRPRRSAPKGRKTRARRAIAAHYEVHPRPGQDGAQADGGYTTCLRP

SEQ ID NO: 93799 - protein, 234 aa, Homo sapiens
  Payload ID: 18715
  Gene Name: tumor necrosis factor (ligand) superfamily, member 13
  Uniprot ID: O75888
  ENSP ID: ENSP00000314455
MPASSPFLLAPKGPPGNMGGPVREPALSVALWLSWGAALGAVACAMALLTQQTELQSLRREVSRLQGTGGPSQNGEGYPWQSLPEQSSDALEAWENGERSRKRRAVLTQKQKNDSDVTEVMWQPALRRGRGLQAQGYGVRIQDAGVYLLYSQVLFQDVTFTMGQVVSREGQGRQETLFRCIRSMPSHPDRAYNSCYSAGVFHLHQGDILSVIIPRARAKLNLSPHGTFLGFVKL

SEQ ID NO: 93800 - protein, 250 aa, Homo sapiens [sequence omitted]

SEQ ID NO: 93801 - protein, 223 aa, Homo sapiens
  Payload ID: 18715
  Gene Name: tumor necrosis factor (ligand) superfamily, member 13
  ENSP ID: ENSP00000369908
MPASSPFLLAPKGPPGNMGGPVREPALSVALWLSWGAALGAVACAMALLTQQTELQSLRREVSRLQGTGGPSQNGEGYPWQSLPEQQHSVLHLVPINATSKDDSDVTEVMWQPALRRGRGLQAQGYGVRIQDAGVYLLYSQVLFQDVTFTMGQVVSREGQGRQETLFRCIRSMPSHPDRAYNSCYSAGVFHLHQGDILSVIIPRARAKLNLSPHGTFLGFVKL

SEQ ID NO: 93802 - protein, 205 aa, Homo sapiens
  Payload ID: 18715
  Gene Name: tumor necrosis factor (ligand) superfamily, member 13
  Uniprot ID: O75888
  ENSP ID: ENSP00000379792
MGGPVREPALSVALWLSWGAALGAVACAMALLTQQTELQSLRREVSRLQGTGGPSQNGEGYPWQSLPEQHSVLHLVPINATSKDDSDVTEVMWQPALRRGRGLQAQGYGVRIQDAGVYLLYSQVLFQDVTFTMGQVVSREGQGRQETLFRCIRSMPSHPDRAYNSCYSAGVFHLHQGDILSVIIPRARAKLNLSPHGTFLGFVKL

SEQ ID NO: 93803 - protein, 247 aa, Homo sapiens
  Payload ID: 18715
  Gene Name: tumor necrosis factor (ligand) superfamily, member 13
  Uniprot ID: O75888
  ENSP ID: ENSP00000379794
MPASSPFLLAPKGPPGNMGGPVREPALSVALWLSWGAALGAVACAMALLTQQTELQSLRREVSRLQGTGGPSQNGEGYPWQSLPEQSSDALEAWENGERSRKRRAVLTQKQKKQHSVLHLVPINATSKDDSDVTEVMWQPALRRGRGLQAQGYGVRIQDAGVYLLYSQVLFQDVTFTMGQVVSREGQGRQETLFRCIRSMPSHPDRAYNSCYSAGVFHLHQGDILSVIIPRARAKLNLSPHGTFLGL

SEQ ID NO: 93804 - protein, 150 aa, Homo sapiens
  Payload ID: 18715
  Gene Name: tumor necrosis factor (ligand) superfamily, member 13
  ENSP ID: ENSP00000390771
MGGPVREPALSVALWLSWGAALGAVACAMALLTQQTELQSLRREVSRLQGTGGPSQNGEGYPWQSLPEQSSDALEAWENGERSRKRRAVLTQKQKNDSDVTEVMWQPALRRGRGLQAQGYGVRIQDAGVYLLYSQVLFQDVTFTMGQVVS

SEQ ID NO: 93805 - protein, 158 aa, Homo sapiens
  Payload ID: 18715
  Gene Name: tumor necrosis factor (ligand) superfamily, member 13
  ENSP ID: ENSP00000410094
MGGPVREPALSVALWLSWGAALGAVACAMALLTQQTELQSLRREVSRLQGTGGPSQNGEGYPWQSLPEQSSDALEAWENGERSRKRRAVLTQKQKKQHSVLHLVPINATSKDDSDVTEVMWQPALRRGRGLQAQGYGVRIQDAGVYLLYSQVLFQDVT

SEQ ID NO: 93806 - protein, 114 aa, Homo sapiens
  Payload ID: 18715
  Gene Name: tumor necrosis factor (ligand) superfamily, member 13
  ENSP ID: ENSP00000464998
MWQPALRRGRGLQAQGYGVRIQDAGVYLLYSQVLFQDVTFTMGQVVSREGQGRQETLFRCIRSMPSHPDRAYNSCYSAGVFHLHQGDILSVIIPRARAKLNLSPHGTFLGFVKL

SEQ ID NO: 93807 - protein, 222 aa, Homo sapiens
  Payload ID: 18715
  Gene Name: tumor necrosis factor (ligand) superfamily, member 13
  Uniprot ID: O75888
  ENSP ID: ENSP00000486052
MPASSPFLLAPKGPPGNMGGPVREPALSVALWLSWGAALGAVACAMALLTQQTELQSLRREVSRLQGTGGPSQNGEGYPWQSLPEQHSVLHLVPINATSKDDSDVTEVMWQPALRRGRGLQAQGYGVRIQDAGVYLLYSQVLFQDVTFTMGQVVSREGQGRQETLFRCIRSMPSHPDRAYNSCYSAGVFHLHQGDILSVIIPRARAKLNLSPHGTFLGFVKL

SEQ ID NO: 93808 - protein, 285 aa, Homo sapiens
  Payload ID: 18716
  Gene Name: tumor necrosis factor (ligand) superfamily, member 13b
  Uniprot ID: Q9Y275
  ENSP ID: ENSP00000365048
MDDSTEREQSRLTSCLKKREEMKLKECVSILPRKESPSVRSSKDGKLLAATLLLALLSCCLTVVSFYQVAALQGDLASLRAELQGHHAEKLPAGAGAPKAGLEEAPAVTAGLKIFEPPAPGEGNSSQNSRNKRAVQGPEETVTQDCLQLIADSETPTIQKGSYTFVPWLLSFKRGSALEEKENKILVKETGYFFIYGQVLYTDKTYAMGHLIQRKKVHVFGDELSLVTLFRCIQNMPETLPNNSCYSAGIAKLEEGDELQLAIPRENAQISLDGDVTFFGALKLL

SEQ ID NO: 93809 - protein, 266 aa, Homo sapiens
  Payload ID: 18716
  Gene Name: tumor necrosis factor (ligand) superfamily, member 13b
  Uniprot ID: Q9Y275
  ENSP ID: ENSP00000389540
MDDSTEREQSRLTSCLKKREEMKLKECVSILPRKESPSVRSSKDGKLLAATLLLALLSCCLTVVSFYQVAALQGDLASLRAELQGHHAEKLPAGAGAPKAGLEEAPAVTAGLKIFEPPAPGEGNSSQNSRNKRAVQGPEETGSYTFVPWLLSFKRGSALEEKENKILVKETGYFFIYGQVLYTDKTYAMGHLIQRKKVHVFGDELSLVTLFRCIQNMPETLPNNSCYSAGIAKLEEGDELQLAIPRENAQISLDGDVTFFGALKLL

SEQ ID NO: 93810 - protein, 164 aa, Homo sapiens
  Payload ID: 18716
  Gene Name: tumor necrosis factor (ligand) superfamily, member 13b
  Uniprot ID: Q9Y275
  ENSP ID: ENSP00000445334
MDDSTEREQSRLTSCLKKREEMKLKECVSILPRKESPSVRSSKDGKLLAATLLLALLSCCLTVVSFYQVAALQGDLASLRAELQGHHAEKLPAGAGAPKAGLEEAPAVTAGLKIFEPPAPGEGNSSQNSRNKRAVQGPEETVTQDCLQLIADSETPTIQKGFIY

SEQ ID NO: 93811 - protein, 204 aa, Homo sapiens
  Payload ID: 18717
  Gene Name: tumor necrosis factor (ligand) superfamily, member 14
  Uniprot ID: O43557
  ENSP ID: ENSP00000245912
MEESVVRPSVFVVDGQTDIPFTRLGRSHRRQSCSVARDGPAGSWEQLIQERRSHEVNPAAHLTGANSSLTGSGGPLLWETQLGLAFLRGLSYHDGALVVTKAGYYYIYSKVQLGGVGCPLGLASTITHGLYKRTPRYPEELELLVSQQSPCGRATSSSRVWWDSSFLGGVVHLEAGEKVVVRVLDERLVRLRDGTRSYFGAFMV

SEQ ID NO: 93812 - protein, 240 aa, Homo sapiens
  Payload ID: 18717
  Gene Name: tumor necrosis factor (ligand) superfamily, member 14
  Uniprot ID: O43557
  ENSP ID: ENSP00000469049
MEESVVRPSVFVVDGQTDIPFTRLGRSHRRQSCSVARVGLGLLLLLMGAGLAVQGWFLLQLHWRLGEMVTRLPDGPAGSWEQLIQERRSHEVNPAAHLTGANSSLTGSGGPLLWETQLGLAFLRGLSYHDGALVVTKAGYYYIYSKVQLGGVGCPLGLASTITHGLYKRTPRYPEELELLVSQQSPCGRATSSSRVWWDSSFLGGVVHLEAGEKVVVRVLDERLVRLRDGTRSYFGAFMV

SEQ ID NO: 93813 - protein, 174 aa, Homo sapiens
  Payload ID: 18718
  Gene Name: tumor necrosis factor (ligand) superfamily, member 15
  ENSP ID: ENSP00000363156
MRHFLSKVYSFPMRKLILFLVFPVVRQTPTQHFKNQFPALHWEHELGLAFTKNRMNYTNKFLLIPESGDYFIYSQVTFRGMTSECSEIRQAGRPNKPDSITVVITKVTDSYPEPTQLLMGTKSVCEVGSNWFQPIYLGAMFSLQEGDKLMVNVSDISLVDYTKEDKTFFGAFLL

SEQ ID NO: 93814 - protein, 251 aa, Homo sapiens
  Payload ID: 18718
  Gene Name: tumor necrosis factor (ligand) superfamily, member 15
  Uniprot ID: O95150
  ENSP ID: ENSP00000363157
MAEDLGLSFGETASVEMLPEHGSCRPKARSSSARWALTCCLVLLPFLAGLTTYLLVSQLRAQGEACVQFQALKGQEFAPSHQQVYAPLRADGDKPRAHLTVVRQTPTQHFKNQFPALHWEHELGLAFTKNRMNYTNKFLLIPESGDYFIYSQVTFRGMTSECSEIRQAGRPNKPDSITVVITKVTDSYPEPTQLLMGTKSVCEVGSNWFQPIYLGAMFSLQEGDKLMVNVSDISLVDYTKEDKTFFGAFLL

SEQ ID NO: 93815 - protein, 199 aa, Homo sapiens
  Payload ID: 18719
  Gene Name: tumor necrosis factor (ligand) superfamily, member 18
  Uniprot ID: Q9UNG2
  ENSP ID: ENSP00000385470
MTLHPSPITCEFLFSTALISPKMCLSHLENMPLSHSRTQGAQRSSWKLWLFCSIVMLLFLCSFSWLIFIFLQLETAKEPCMAKFGPLPSKWQMASSEPPCVNKVSDWKLEILQNGLYLIYGQVAPNANYNDVAPFEVRLYKNKDMIQTLTNKSKIQNVGGTYELHVGDTIDLIFNSEHQVLKNNTYWGIILLANPQFIS

SEQ ID NO: 93816 - protein, 183 aa, Homo sapiens
  Payload ID: 18720
  Gene Name: tumor necrosis factor (ligand) superfamily, member 4
  Uniprot ID: P23510
  ENSP ID: ENSP00000281834
MERVQPLEENVGNAARPRFERNKLLLVASVIQGLGLLLCFTYICLHFSALQVSHRYPRIQSIKVQFTEYKKEKGFILTSQKEDEIMKVQNNSVIINCDGFYLISLKGYFSQEVNISLHYQKDEEPLFQLKKVRSVNSLMVASLTYKDKVYLNVTTDNTSLDDFHVNGGELILIHQNPGEFCVL

SEQ ID NO: 93817 - protein, 133 aa, Homo sapiens
  Payload ID: 18720
  Gene Name: tumor necrosis factor (ligand) superfamily, member 4
  Uniprot ID: P23510
  ENSP ID: ENSP00000356691
MVSHRYPRIQSIKVQFTEYKKEKGFILTSQKEDEIMKVQNNSVIINCDGFYLISLKGYFSQEVNISLHYQKDEEPLFQLKKVRSVNSLMVASLTYKDKVYLNVTTDNTSLDDFHVNGGELILIHQNPGEFCVL

SEQ ID NO: 93818 - protein, 234 aa, Homo sapiens
  Payload ID: 18721
  Gene Name: tumor necrosis factor (ligand) superfamily, member 8
  Uniprot ID: P32971
  ENSP ID: ENSP00000223795
MDPGLQQALNGMAPPGDTAMHVPAGSVASHLGTTSRSYFYLTTATLALCLVFTVATIMVLVVQRTDSIPNSPDNVPLKGGNCSEDLLCILKRAPFKKSWAYLQVAKHLNKTKLSWNKDGILHGVRYQDGNLVIQFPGLYFIICQLQFLVQCPNNSVDLKLELLINKHIKKQALVTVCESGMQTKHVYQNLSQFLLDYLQVNTTISVNVDTFQYIDTSTFPLENVLSIFLYSNSD

SEQ ID NO: 93819 - protein, 164 aa, Homo sapiens
  Payload ID: 18721
  Gene Name: tumor necrosis factor (ligand) superfamily, member 8
  ENSP ID: ENSP00000484651
MDPGLQQALNGMAPPGDTAMHVPAGSVASHLGTTSRSYFYLTTATLALCLVFTVATIMVLVVQRTDSIPNSPDNVPLKGGNCSEDLLCILKRAPFKKSWAYLQVAKHLNKTKLSWNKDGILHGVRYQDGNLVIQFPDYCGMILHHSHSTLDSGKGHCCLETLQP

SEQ ID NO: 93820 - protein, 254 aa, Homo sapiens
  Payload ID: 18722
  Gene Name: tumor necrosis factor (ligand) superfamily, member 9
  Uniprot ID: P41273
  ENSP ID: ENSP00000245817
MEYASDASLDPEAPWPPAPRARACRVLPWALVAGLLLLLLLAAACAVFLACPWAVSGARASPGSAASPRLREGPELSPDDPAGLLDLRQGMFAQLVAQNVLLIDGPLSWYSDPGLAGVSLTGGLSYKEDTKELVVAKAGVYYVFFQLELRRVVAGEGSGSVSLALHLQPLRSAAGAAALALTVDLPPASSEARNSAFGFQGRLLHLSAGQRLGVHLHTEARARHAWQLTQGATVLGLFRVTPEIPAGLPSPRSE

SEQ ID NO: 93821 - protein, 468 aa, Homo sapiens
  Payload ID: 18723
  Gene Name: tumor necrosis factor receptor superfamily, member 10a
  Uniprot ID: O00220
  ENSP ID: ENSP00000221132
MAPPPARVHLGAFLAVTPNPGSAASGTEAAAATPSKVWGSSAGRIEPRGGGRGALPTSMGQHGPSARARAGRAPGPRPAREASPRLRVHKTFKFVVVGVLLQVVPSSAATIKLHDQSIGTQQWEHSPLGELCPPGSHRSEHPGACNRCTEGVGYTNASNNLFACLPCTACKSDEEERSPCTTTRNTACQCKPGTFRNDNSAEMCRKCSRGCPRGMVKVKDCTPWSDIECVHKESGNGHNIWVILVVTLVVPLLLVAVLIVCCCIGSGCGGDPKCMDRVCFWRLGLLRGPGAEDNAHNEILSNADSLSTFVSEQQMESQEPADLTGVTVQSPGEAQCLLGPAEAEGSQRRRLLVPANGADPTETLMLFFDKFANIVPFDSWDQLMRQLDLTKNEIDVVRAGTAGPGDALYAMLMKWVNKTGRNASIHTLLDALERMEERHAREKIQDLLVDSGKFIYLEDGTGSAVSLE

SEQ ID NO: 93822 - protein, 75 aa, Homo sapiens
  Payload ID: 18723
  Gene Name: tumor necrosis factor receptor superfamily, member 10a
  ENSP ID: ENSP00000428884
MCRKCSRGCPRGMVKVKDCTPWSDIECVHKESGNGHNIWVILVVTLVVPLLLVAVLIVCCCIGSGCGGDPKCMDR

SEQ ID NO: 93823 - protein, 310 aa, Homo sapiens
  Payload ID: 18723
  Gene Name: tumor necrosis factor receptor superfamily, member 10a
  ENSP ID: ENSP00000480778
MAPPPARVHLACKSDEEERSPCTTTRNTACQCKPGTFRNDNSAEMCRKCSRGCPRGMVKVKDCTPWSDIECVHKESGNGHNIWVILVVTLVVPLLLVAVLIVCCCIGSGCGGDPKCMDRVCFWRLGLLRGPGAEDNAHNEILSNADSLSTFVSEQQMESQEPADLTGVTVQSPGEAQCLLGPAEAEGSQRRRLLVPANGADPTETLMLFFDKFANIVPFDSWDQLMRQLDLTKNEIDVVRAGTAGPGDALYAMLMKWVNKTGRNASIHTLLDALERMEERHAREKIQDLLVDSGKFIYLEDGTGSAVSLE

SEQ ID NO: 93824 - protein, 440 aa, Homo sapiens
  Payload ID: 18724
  Gene Name: tumor necrosis factor receptor superfamily, member 10b
  Uniprot ID: O14763
  ENSP ID: ENSP00000276431
MEQRGQNAPAASGARKRHGPGPREARGARPGPRVPKTLVLVVAAVLLLVSAESALITQQDLAPQQRAAPQQKRSSPSEGLCPPGHHISEDGRDCISCKYGQDYSTHWNDLLFCLRCTRCDSGEVELSPCTTTRNTVCQCEEGTFREEDSPEMCRKCRTGCPRGMVKVGDCTPWSDIECVHKESGTKHSGEVPAVEETVTSSPGTPASPCSLSGIIIGVTVAAVVLIVAVFVCKSLLWKKVLPYLKGICSGGGGDPERVDRSSQRPGAEDNVLNEIVSILQPTQVPEQEMEVQEPAEPTGVNMLSPGESEHLLEPAEAERSQRRRLLVPANEGDPTETLRQCFDDFADLVPFDSWEPLMRKLGLMDNEIKVAKAEAAGHRDTLYTMLIKWVNKTGRDASVHTLLDALETLGERLAKQKIEDHLLSSGKFMYLEGNADSAMS

SEQ ID NO: 93825 - protein, 411 aa, Homo sapiens
  Payload ID: 18724
  Gene Name: tumor necrosis factor receptor superfamily, member 10b
  Uniprot ID: O14763
  ENSP ID: ENSP00000317859
MEQRGQNAPAASGARKRHGPGPREARGARPGPRVPKTLVLVVAAVLLLVSAESALITQQDLAPQQRAAPQQKRSSPSEGLCPPGHHISEDGRDCISCKYGQDYSTHWNDLLFCLRCTRCDSGEVELSPCTTTRNTVCQCEEGTFREEDSPEMCRKCRTGCPRGMVKVGDCTPWSDIECVHKESGIIIGVTVAAVVLIVAVFVCKSLLWKKVLPYLKGICSGGGGDPERVDRSSQRPGAEDNVLNEIVSILQPTQVPEQEMEVQEPAEPTGVNMLSPGESEHLLEPAEAERSQRRRLLVPANEGDPTETLRQCFDDFADLVPFDSWEPLMRKLGLMDNEIKVAKAEAAGHRDTLYTMLIKWVNKTGRDASVHTLLDALETLGERLAKQKIEDHLLSSGKFMYLEGNADSAMS

SEQ ID NO: 93826 - protein, 90 aa, Homo sapiens
  Payload ID: 18724
  Gene Name: tumor necrosis factor receptor superfamily, member 10b
  ENSP ID: ENSP00000427999
MEQRGQNAPAASGARKRHGPGPREARGARPGPRVPKTLVLVVAAVLLLDTISQKTVEIASPANMDRTIALTGMTSFSACAAPGVIQVKWS

SEQ ID NO: 93827 - protein, 259 aa, Homo sapiens
  Payload ID: 18725
  Gene Name: tumor necrosis factor receptor superfamily, member 10c, decoy without an intracellular domain
  Uniprot ID: O14798
  ENSP ID: ENSP00000349324
MARIPKTLKFVVVIVAVLLPVLAYSATTARQEEVPQQTVAPQQQRHSFKGEECPAGSHRSEHTGACNPCTEGVDYTNASNNEPSCFPCTVCKSDQKHKSSCTMTRDTVCQCKEGTFRNENSPEMCRKCSRCPSGEVQVSNCTSWDDIQCVEEFGANATVETPAAEETMNTSPGTPAPAAEETMNTSPGTPAPAAEETMTTSPGTPAPAAEETMTTSPGTPAPAAEETMITSPGTPASSHYLSCTIVGIIVLIVLLIVFV

SEQ ID NO: 93828 - protein, 155 aa, Homo sapiens [sequence omitted]

SEQ ID NO: 93829 - protein, 67 aa, Homo sapiens
  Payload ID: 18725
  Gene Name: tumor necrosis factor receptor superfamily, member 10c, decoy without an intracellular domain
  ENSP ID: ENSP00000428235
MARIPKTLKFVVVIVAVLLPDLIDQNILEPVTRAQRVWITPTLPTMNLLASHVQFVNQIKNIKVPAP

SEQ ID NO: 93830 - protein, 386 aa, Homo sapiens
  Payload ID: 18726
  Gene Name: tumor necrosis factor receptor superfamily, member 10d, decoy with truncated death domain
  Uniprot ID: Q9UBN6
  ENSP ID: ENSP00000310263
MGLWGQSVPTASSARAGRYPGARTASGTRPWLLDPKILKFVVFIVAVLLPVRVDSATIPRQDEVPQQTVAPQQQRRSLKEEECPAGSHRSEYTGACNPCTEGVDYTIASNNLPSCLLCTVCKSGQTNKSSCTTTRDTVCQCEKGSFQDKNSPEMCRTCRTGCPRGMVKVSNCTPRSDIKCKNESAASSTGKTPAAEETVTTILGMLASPYHYLIIIVVLVIILAVVVVGFSCRKKFISYLKGICSGGGGGPERVHRVLFRRRSCPSRVPGAEDNARNETLSNRYLQPTQVSEQEIQGQELAELTGVTVELPEEPQRLLEQAEAEGCQRRRLLVPVNDADSADISTLLDASATLEEGHAKETIQDQLVGSEKLFYEEDEAGSATSCL

SEQ ID NO: 93831 - protein, 299 aa, Homo sapiens
  Payload ID: 18727
  Gene Name: tumor necrosis factor receptor superfamily, member 11a, NFKB activator
  Uniprot ID: Q9Y6Q6
  ENSP ID: ENSP00000269485
MAPRARRRRPLFALLLLCALLARLQVALQIAPPCTSEKHYEHLGRCCNKCEPGKYMSSKCTTTSDSVCLPCGPDEYLDSWNEEDKCLLHKVCDTGKALVAVVAGNSTTPRRCACTAGYHWSQDCECCRRNTECAPGLGAQHPLQLNKDTVCKPCLAGYFSDAFSSTDKCRPWTNCTFLGKRVEHHGTEKSDAVCSSSLPARKPPNGNVTGNSNSTFISSGQVMNFKGDIIVVYVSQTSQEGAAAAAEPMGRPVQEETLARRDSFAGNGPRFPDPCGGPEGLREPEKASRPVQEQGGAKA

SEQ ID NO: 93832 - protein, 616 aa, Homo sapiens
  Payload ID: 18727
  Gene Name: tumor necrosis factor receptor superfamily, member 11a, NFKB activator
  Uniprot ID: Q9Y6Q6
  ENSP ID: ENSP00000465500
MAPRARRRRPLFALLLLCALLARLQVALQIAPPCTSEKHYEHLGRCCNKCEPGKYMSSKCTTTSDSVCLPCGPDEYLDSWNEEDKCLLHKVCDTGKALVAVVAGNSTTPRRCACTAGYHWSQDCECCRRNTECAPGLGAQHPLQLNKDTVCKPCLAGYFSDAFSSTDKCRPWTNCTFLGKRVEHHGTEKSDAVCSSSLPARKPPNEPHVYLPGLIILLLFASVALVAAIIFGVCYRKKGKALTANLWHWINEACGRLSGDKESSGDSCVSTHTANFGQQGACEGVLLLTLEEKTFPEDMCYPDQGGVCQGTCVGGGPYAQGEDARMLSLVSKTEIEEDSFRQMPTEDEYMDRPSQPTDQLLFLTEPGSKSTPPFSEPLEVGENDSLSQCFTGTQSTVGSESCNCTEPLCRTDWTPMSSENYLQKEVDSGHCPHWAASPSPNWADVCTGCRNPPGEDCEPLVGSPKRGPLPQCAYGMGLPPEEEASRTEARDQPEDGADGRLPSSARAGAGSGSSPGGQSPASGNVTGNSNSTFISSGQVMNFKGDIIVVYVSQTSQEGAAAAAEPMGRPVQEETLARRDSFAGNGPRFPDPCGGPEGLREPEKASRPVQEQGGAKA

SEQ ID NO: 93833 - protein, 263 aa, Homo sapiens
  Payload ID: 18727
  Gene Name: tumor necrosis factor receptor superfamily, member 11a, NFKB activator
  Uniprot ID: Q9Y6Q6
  ENSP ID: ENSP00000479567
MAPRARRRRPLFALLLLCALLARLQVALQIAPPCTSEKHYEHLGRCCNKCEPGKYMSSKCTTTSDSVCLPCGPDEYLDSWNEEDKCLLHKVCDTGKALVAVVAGNSTTPRRCACTAGYHWSQDCECCRRNTECAPGLGAQHPLQLNKDTVCKPCLAGYFSDAFSSTDKCRPWTNCTFLGKRVEHHGTEKSDAVCSSSLPARKPPNEPHVYLPGLIILLLFASVALVAAIIFGVCYRKKGKALTANLWHWINEACGRLSGDKEM

SEQ ID NO: 93834 - protein, 337 aa, Homo sapiens
  Payload ID: 18727
  Gene Name: tumor necrosis factor receptor superfamily, member 11a, NFKB activator
  Uniprot ID: Q9Y6Q6
  ENSP ID: ENSP00000482466
MAPRARRRRPLFALLLLCALLARLQVALQIAPPCTSEKHYEHLGRCCNKCEPGKYMSSKCTTTSDSVCLPCGPDEYLDSWNEEDKCLLHKVCDTGKALVAVVAGNSTTPRRCACTAGYHWSQDCECCRRNTECAPGLGAQHPLQLNKDTVCKPCLAGYFSDAFSSTDKCRPWTNCTFLGKRVEHHGTEKSDAVCSSSLPARKPPNEPHVYLPGLIILLLFASVALVAAIIFGVCYRKKGKALTGNVTGNSNSTFISSGQVMNFKGDIIVVYVSQTSQEGAAAAAEPMGRPVQEETLARRDSFAGNGPRFPDPCGGPEGLREPEKASRPVQEQGGAKA

SEQ ID NO: 93835 - protein, 401 aa, Homo sapiens
  Payload ID: 18728
  Gene Name: tumor necrosis factor receptor superfamily, member 11b
  Uniprot ID: O00300
  ENSP ID: ENSP00000297350
MNNLLCCALVFLDISIKWTTQETFPPKYLHYDEETSHQLLCDKCPPGTYLKQHCTAKWKTVCAPCPDHYYTDSWHTSDECLYCSPVCKELQYVKQECNRTHNRVCECKEGRYLEIEFCLKHRSCPPGFGVVQAGTPERNTVCKRCPDGFFSNETSSKAPCRKHTNCSVFGLLLTQKGNATHDNICSGNSESTQKCGIDVTLCEEAFFRFAVPTKFTPNWLSVLVDNLPGTKVNAESVERIKRQHSSQEQTFQLLKLWKHQNKDQDIVKKIIQDIDLCENSVQRHIGHANLTFEQLRSLMESLPGKKVGAEDIEKTIKACKPSDQILKLLSLWRIKNGDQDTLKGLMHALKHSKTYHFPKTVTQSLKKTIRFLHSFTMYKLYQKLFLEMIGNQVQSVKISCL

SEQ ID NO: 93836 - protein, 145 aa, Homo sapiens
  Payload ID: 18728
  Gene Name: tumor necrosis factor receptor superfamily, member 11b
  ENSP ID: ENSP00000427924
MNNLLCCALVFLDISIKWTTQETFPPKYLHYDEETSHQLLCDKCPPGTYLKQHCTAKWKTVCAPCPDHYYTDSWHTSDECLYCSPVCKELQYVKQECNRTHNRVCECKEGRYLEIEFCLKHRSCPPGFGVVQAGCRRRPKPQICI

SEQ ID NO: 93837 - protein, 129 aa, Homo sapiens
  Payload ID: 18729
  Gene Name: tumor necrosis factor receptor superfamily, member 12A
  Uniprot ID: Q9NP84
  ENSP ID: ENSP00000326737
MARGSLRRLLRLLVLGLWLALLRSVAGEQAPGTAPCSRGSSWSADLDKCMDCASCRARPHSDFCLGCAAAPPAPFRLLWPILGGALSLTFVLGLLSGFLVWRRCRRREKFTTPIEETGGEGCPAVALIQ

SEQ ID NO: 93838 - protein, 94 aa, Homo sapiens
  Payload ID: 18729
  Gene Name: tumor necrosis factor receptor superfamily, member 12A
  Uniprot ID: Q9NP84
  ENSP ID: ENSP00000343894
MARGSLRRLLRLLVLGLWLALLRSVAGEQAPGAAAPPAPFRLLWPILGGALSLTFVLGLLSGFLVWRRCRRREKFTTPIEETGGEGCPAVALIQ

SEQ ID NO: 93839 - protein, 94 aa, Homo sapiens
  Payload ID: 18729
  Gene Name: tumor necrosis factor receptor superfamily, member 12A
  ENSP ID: ENSP00000458305
MARGSLRRLLRLLVLGLWLALLRSVAGEQAPASDPRPPPQAPPPAPAAAPGARTWTSAWTARLAGRDRTATSAWAALQHLLPPSGCFGPSLGAL

SEQ ID NO: 93840 - protein, 80 aa, Homo sapiens
  Payload ID: 18729
  Gene Name: tumor necrosis factor receptor superfamily, member 12A
  ENSP ID: ENSP00000458898
MDCASCRARPHSDFCLGCAAAPPAPFRLLWPILGGALSLTFVLGLLSGFLVWRRCRRREKFTTPIEETGGEGCPAVALIQ

SEQ ID NO: 93841 - protein, 226 aa, Homo sapiens
  Payload ID: 18729
  Gene Name: tumor necrosis factor receptor superfamily, member 12A
  ENSP ID: ENSP00000460610
MARGSLRRLLRLLVLGLWLALLRSVAGEQAPGTRDSGVGEPRAGAREPDWVSGEQRRTGGTGGCGDLGSGGLQTARSRLWEVPSLSKLHSQSGPQFLPPSNWGWGGSSVPQVRSTSNGERKRCSTSCPLPAALAHPWGRSEPDLRAGAAFWLFGLETMPQEREVHHPHRGDRRRGLPSCGADPVTMCPLPAGARPLIIHSSILEPVSASQTRREPSSSNHKGGGGR

SEQ ID NO: 93842 - protein, 47 aa, Homo sapiens
  Payload ID: 18729
  Gene Name: tumor necrosis factor receptor superfamily, member 12A
  ENSP ID: ENSP00000461756
MARGSLRRLLRLLVLGLWLALLRSVAGEQAPDPRIAESRPQPLTRGP

SEQ ID NO: 93843 - protein, 293 aa, Homo sapiens
  Payload ID: 18730
  Gene Name: tumor necrosis factor receptor superfamily, member 13B
  Uniprot ID: O14836
  ENSP ID: ENSP00000261652
MSGLGRSRRGGRSRVDQEERFPQGLWTGVAMRSCPEEQYWDPLLGTCMSCKTICNHQSQRTCAAFCRSLSCRKEQGKFYDHLLRDCISCASICGQHPKQCAYFCENKLRSPVNLPPELRRQRSGEVENNSDNSGRYQGLEHRGSEASPALPGLKLSADQVALVYSTLGLCLCAVLCCFLVAVACFLKKRGDPCSCQPRSRPRQSPAKSSQDHAMEAGSPVSTSPEPVETCSFCFPECRAPTQESAVTPGTPDPTCAGRWGCHTRTTVLQPCPHIPDSGLGIVCVPAQEGGPGA

SEQ ID NO: 93844 - protein, 247 aa, Homo sapiens
  Payload ID: 18730
  Gene Name: tumor necrosis factor receptor superfamily, member 13B
  Uniprot ID: O14836
  ENSP ID: ENSP00000462952
MSGLGRSRRGGRSRVDQEERWSLSCRKEQGKFYDHLLRDCISCASICGQHPKQCAYFCENKLRSPVNLPPELRRQRSGEVENNSDNSGRYQGLEHRGSEASPALPGLKLSADQVALVYSTLGLCLCAVLCCFLVAVACFLKKRGDPCSCQPRSRPRQSPAKSSQDHAMEAGSPVSTSPEPVETCSFCFPECRAPTQESAVTPGTPDPTCAGRWGCHTRTTVLQPCPHIPDSGLGIVCVPAQEGGPGA

SEQ ID NO: 93845 - protein, 248 aa, Homo sapiens
  Payload ID: 18730
  Gene Name: tumor necrosis factor receptor superfamily, member 13B
  ENSP ID: ENSP00000463582
MSGLGRSRRGGRSRVDQEERWSLSCRKEQGKFYDHLLRDCISCASICGQHPKQCAYFCENKLRSPVNLPPELRRQRSGEVENNSDNSGRYQGLEHRGSEASPALPGLKLSADQVALVYSTLGLCLCAVLCCFLVAVACFLKKRGDPCSCQPRSRPRQSPAKSSQDHAMEAGSPVSTSPEPVETCSFCFPECRAPTQESAVTPGTPDPTCAGRKTKPPPVLTAGNCGVHRPPPETSTGSPRGQRLLWTQ

SEQ ID NO: 93846 - protein, 156 aa, Homo sapiens
  Payload ID: 18730
  Gene Name: tumor necrosis factor receptor superfamily, member 13B
  ENSP ID: ENSP00000464069
MSGLGRSRRGGRSRVDQEERFPQGLWTGVAMRSCPEEQYWDPLLGTCMSCKTICNHQSQRTCAAFCRSLSCRKEQGKFYDHLLRDCISCASICGQHPKQCAYFCENKLRSPVNLPPELRRQRSGEVENNSDNSGRYQGLEHRGSEASPGKRSPLLY

SEQ ID NO: 93847 - protein, 184 aa, Homo sapiens
  Payload ID: 18731
  Gene Name: tumor necrosis factor receptor superfamily, member 13C
  Uniprot ID: Q96RJ3
  ENSP ID: ENSP00000291232
MRRGPRSLRGRDAPAPTPCVPAECFDLLVRHCVACGLLRTPRPKPAGASSPAPRTALQPQESVGAGAGEAALPLPGLLFGAPALLGLALVLALVLVGLVSWRRRQRRLRGASSAEAPDGDKDAPEPLDKVIILSPGISDATAPAWPPPGEDPGTTPPGHSVPVPATELGSTELVTTKTAGPEQQ

SEQ ID NO: 93848 - protein, 283 aa, Homo sapiens
  Payload ID: 18732
  Gene Name: tumor necrosis factor receptor superfamily, member 14
  Uniprot ID: Q92956
  ENSP ID: ENSP00000347948
MEPPGDWGPPPWRSTPKTDVLRLVLYLTFLGAPCYAPALPSCKEDEYPVGSECCPKCSPGYRVKEACGELTGTVCEPCPPGTYIAHLNGLSKCLQCQMCDPAMGLRASRNCSRTENAVCGCSPGHFCIVQDGDHCAACRAYATSSPGQRVQKGGTESQDTLCQNCPPGTFSPNGTLEECQHQTKCSWLVTKAGAGTSSSHWVWWFLSGSLVIVIVCSTVGLIICVKRRKPRGDVVKVIVSVQRKRQEAEGEATVIEALQAPPDVTTVAVEETIPSFTGRSPNH

SEQ ID NO: 93849 - protein, 193 aa, Homo sapiens
  Payload ID: 18732
  Gene Name: tumor necrosis factor receptor superfamily, member 14
  ENSP ID: ENSP00000386859
MEPPGDWGPPPWRSTPKTDVLRLVLYLTFLGAPCYAPALPSCKEDEYPVGSECCPKCSPGYRVKEACGELTGTVCEPCPPGTYIAHLNGLSKCLQCQMCDPAMGLRASRNCSRTENAVCGCSPGHFCIVQDGDHCAACRAYATSSPGQRVQKGGTESQDTLCQNCPPGTFSPNGTLEECQHQTNRAWKSQTDL

SEQ ID NO: 93850 - protein, 231 aa, Homo sapiens
  Payload ID: 18732
  Gene Name: tumor necrosis factor receptor superfamily, member 14
  ENSP ID: ENSP00000399292
MEPPGDWGPPPWRSTPKTDVLRLVLYLTFLGAPCYAPALPSCKEDEYPVGSECCPKCSPGYRVKEACGELTGTVCEPCPPGTYIAHLNGLSKCLQCQMCDPAMGLRASRNCSRTENAVCGCSPGHFCIVQDGDHCAACRAYATSSPGQRVQKGGTESQDTLCQNCPPGTFSPNGTLEECQHQTKCSWLVTKAGAGTSSSHWVWWFLSGSLVIVIVCSTVGLIICVKRRKPR

SEQ ID NO: 93851 - protein, 231 aa, Homo sapiens; identical to SEQ ID NO: 93850
  Payload ID: 18732
  Gene Name: tumor necrosis factor receptor superfamily, member 14
  ENSP ID: ENSP00000399533

SEQ ID NO: 93852 - protein, 183 aa, Homo sapiens
  Payload ID: 18732
  Gene Name: tumor necrosis factor receptor superfamily, member 14
  ENSP ID: ENSP00000411854
MEPPGDWGPPPWRSTPKTDVLRLVLYLTFLGAPCYAPALPSCKEDEYPVGSECCPKCSPGYRVKEACGELTGTVCEPCPPGTYIAHLNGLSKCLQCQMCDPAMGLRASRNCSRTENAVCGCSPGHFCIVQDGDHCAACRAYATSSPGQRVQKGGTESQDTLCQNCPPGTFSPNGTLEECQHQT

SEQ ID NO: 93853 - protein, 231 aa, Homo sapiens; identical to SEQ ID NO: 93850
  Payload ID: 18732
  Gene Name: tumor necrosis factor receptor superfamily, member 14
  ENSP ID: ENSP00000415254

SEQ ID NO: 93854 - protein, 283 aa, Homo sapiens; identical to SEQ ID NO: 93848
  Payload ID: 18732
  Gene Name: tumor necrosis factor receptor superfamily, member 14
  Uniprot ID: Q92956
  ENSP ID: ENSP00000478308

SEQ ID NO: 93855 - protein, 193 aa, Homo sapiens; identical to SEQ ID NO: 93849
  Payload ID: 18732
  Gene Name: tumor necrosis factor receptor superfamily, member 14
  ENSP ID: ENSP00000485884

SEQ ID NO: 93856 - protein, 231 aa, Homo sapiens; identical to SEQ ID NO: 93850
  Payload ID: 18732
  Gene Name: tumor necrosis factor receptor superfamily, member 14
  ENSP ID: ENSP00000485902

SEQ ID NO: 93857 - protein, 25 aa, Homo sapiens
  Payload ID: 18732
  Gene Name: tumor necrosis factor receptor superfamily, member 14
  ENSP ID: ENSP00000485988
  MOD_RES (1)..(1): Any amino acid
XGTLEECQHQTNWPNHMCEKKKAKG

SEQ ID NO: 93858 - protein, 183 aa, Homo sapiens; identical to SEQ ID NO: 93852
  Payload ID: 18732
  Gene Name: tumor necrosis factor receptor superfamily, member 14
  ENSP ID: ENSP00000486250

SEQ ID NO: 93859 - protein, 25 aa, Homo sapiens
  Payload ID: 18732
  Gene Name: tumor necrosis factor receptor superfamily, member 14
  ENSP ID: ENSP00000486304
  MOD_RES (1)..(1): Any amino acid
XGTLEECQHQTNWPNHMCEKKKAKG

SEQ ID NO: 93860 - protein, 231 aa, Homo sapiens; identical to SEQ ID NO: 93850
  Payload ID: 18732
  Gene Name: tumor necrosis factor receptor superfamily, member 14
  ENSP ID: ENSP00000486883

SEQ ID NO: 93861 - protein, 231 aa, Homo sapiens; identical to SEQ ID NO: 93850
  Payload ID: 18732
  Gene Name: tumor necrosis factor receptor superfamily, member 14
  ENSP ID: ENSP00000487464

SEQ ID NO: 93862 - protein, 184 aa, Homo sapiens
  Payload ID: 18733
  Gene Name: tumor necrosis factor receptor superfamily, member 17
  Uniprot ID: Q02223
  ENSP ID: ENSP00000053243
MLQMAGQCSQNEYFDSLLHACIPCQLRCSSNTPPLTCQRYCNASVTNSVKGTNAILWTCLGLSLIISLAVFVLMFLLRKINSEPLKDEFKNTGSGLLGMANIDLEKSRTGDEIILPRGLEYTVEECTCEDCIKSKPKVDSDHCFPLPAMEEGATILVTTKTNDYCKSLPAALSATEIEKSISAR

SEQ ID NO: 93863 - protein, 135 aa, Homo sapiens
  Payload ID: 18733
  Gene Name: tumor necrosis factor receptor superfamily, member 17
  Uniprot ID: Q02223
  ENSP ID: ENSP00000379753
MLQMAGQCSQNEYFDSLLHACIPCQLRCSSNTPPLTCQRYCNARSGLLGMANIDLEKSRTGDEIILPRGLEYTVEECTCEDCIKSKPKVDSDHCFPLPAMEEGATILVTTKTNDYCKSLPAALSATEIEKSISAR

SEQ ID NO: 93864 - protein, 133 aa, Homo sapiens
  Payload ID: 18733
  Gene Name: tumor necrosis factor receptor superfamily, member 17
  ENSP ID: ENSP00000454314
  MOD_RES (1)..(1): Any amino acid
XQNEYFDSLLHACIPCQLRCSSNTPPLTCQRYCNASVTNSVKGTNAILWTCLGLSLIISLAVFVLMFLLRKINSEPLKDEFKNTEMESRSVAQAGVQWRDLNSLQPLPLGFKQFSHLSLLSNWDYRIRSPGHG

SEQ ID NO: 93865 - protein, 255 aa, Homo sapiens
  Payload ID: 18734
  Gene Name: tumor necrosis factor receptor superfamily, member 18
  Uniprot ID: Q9Y5U5
  ENSP ID: ENSP00000328207
MAQHGAMGAFRALCGLALLCALSLGQRPTGGPGCGPGRLLLGTGTDARCCRVHTTRCCRDYPGEECCSEWDCMCVQPEFHCGDPCCTTCRHHPCPPGQGVQSQGKFSFGFQCIDCASGTFSGGHEGHCKPWTDCCWRCRRRPKTPEAASSPRKSGASDRQRRRGGWETCGCEPGRPPGPPTAASPSPGAPQAAGALRSALGRALLPWQQKWVQEGGSDQRPGPCSSAAAAGPCRRERETQSWPPSSLAGPDGVGS

SEQ ID NO: 93866 - protein, 234 aa, Homo sapiens
  Payload ID: 18734
  Gene Name: tumor necrosis factor receptor superfamily, member 18
  Uniprot ID: Q9Y5U5
  ENSP ID: ENSP00000368567
MAQHGAMGAFRALCGLALLCALSLGQRPTGGPGCGPGRLLLGTGTDARCCRVHTTRCCRDYPGEECCSEWDCMCVQPEFHCGDPCCTTCRHHPCPPGQGVQSQGKFSFGFQCIDCASGTFSGGHEGHCKPWTDCTQFGFLTVFPGNKTHNAVCVPGSPPAEPLGWLTVVLLAVAACVLLLTSAQLGLHIWQLRKTQLLLEVPPSTEDARSCQFPEEERGERSAEEKGRLGDLWV

SEQ ID NO: 93867 - protein, 241 aa, Homo sapiens
  Payload ID: 18734
  Gene Name: tumor necrosis factor receptor superfamily, member 18
  Uniprot ID: Q9Y5U5
  ENSP ID: ENSP00000368570
MAQHGAMGAFRALCGLALLCALSLGQRPTGGPGCGPGRLLLGTGTDARCCRVHTTRCCRDYPGEECCSEWDCMCVQPEFHCGDPCCTTCRHHPCPPGQGVQSQGKFSFGFQCIDCASGTFSGGHEGHCKPWTDCTQFGFLTVFPGNKTHNAVCVPGSPPAEPLGWLTVVLLAVAACVLLLTSAQLGLHIWQLRSQCMWPRETQLLLEVPPSTEDARSCQFPEEERGERSAEEKGRLGDLWV

SEQ ID NO: 93868 - protein, 169 aa, Homo sapiens
  Payload ID: 18734
  Gene Name: tumor necrosis factor receptor superfamily, member 18
  ENSP ID: ENSP00000462735
MCVQPEFHCGDPCCTTCRHHPCPPGQGVQSQGKFSFGFQCIDCASGTFSGGHEGHCKPWTDCTQFGFLTVFPGNKTHNAVCVPGSPPAEPLGWLTVVLLAVAACVLLLTSAQLGLHIWQLRSQCMWPRETQLLLEVPPSTEDARSCQFPEEERGERSAEEKGRLGDLWV

SEQ ID NO: 93869 - protein, 417 aa, Homo sapiens
  Payload ID: 18735
  Gene Name: tumor necrosis factor receptor superfamily, member 19
  Uniprot ID: Q9NS68
  ENSP ID: ENSP00000248484
MALKVLLEQEKTFFTLLVLLGYLSCKVTCESGDCRQQEFRDRSGNCVPCNQCGPGMELSKECGFGYGEDAQCVTCRLHRFKEDWGFQKCKPCLDCAVVNRFQKANCSATSDAICGDCLPGFYRKTKLVGFQDMECVPCGDPPPPYEPHCASKVNLVKIASTASSPRDTALAAVICSALATVLLALLILCVIYCKRQFMEKKPSWSLRSQDIQYNGSELSCFDRPQLHEYAHRACCQCRRDSVQTCGPVRLLPSMCCEEACSPNPATLGCGVHSAASLQARNAGPAGEMVPTFFGSLTQSICGEFSDAWPLMQNPMGGDNISFCDSYPELTGEDIHSLNPELESSTSLDSNSSQDLVGGAVPVQSHSENFTAATDLSRYNNTLVESASTQDALTMRSQLDQESGAVIHPATQTSLQEA

SEQ ID NO: 93870 - protein, 423 aa, Homo sapiens
  Payload ID: 18735
  Gene Name: tumor necrosis factor receptor superfamily, member 19
  Uniprot ID: Q9NS68
  ENSP ID: ENSP00000371693
MALKVLLEQEKTFFTLLVLLGYLSCKVTCESGDCRQQEFRDRSGNCVPCNQCGPGMELSKECGFGYGEDAQCVTCRLHRFKEDWGFQKCKPCLDCAVVNRFQKANCSATSDAICGDCLPGFYRKTKLVGFQDMECVPCGDPPPPYEPHCASKVNLVKIASTASSPRDTALAAVICSALATVLLALLILCVIYCKRQFMEKKPSWSLRSQDIQYNGSELSCFDRPQLHEYAHRACCQCRRDSVQTCGPVRLLPSMCCEEACSPNPATLGCGVHSAASLQARNAGPAGEMVPTFFGSLTQSICGEFSDAWPLMQNPMGGDNISFCDSYPELTGEDIHSLNPELESSTSLDSNSSQDLVGGAVPVQSHSENFTAATDLSRYNNTLVESASTQDALTMRSQLDQESGAVIHPATQTSLQVRQRLGSL

SEQ ID NO: 93871 - protein, 417 aa, Homo sapiens; identical to SEQ ID NO: 93869
  Payload ID: 18735
  Gene Name: tumor necrosis factor receptor superfamily, member 19
  Uniprot ID: Q9NS68
  ENSP ID: ENSP00000371698

SEQ ID NO: 93872 - protein, 285 aa, Homo sapiens
  Payload ID: 18735
  Gene Name: tumor necrosis factor receptor superfamily, member 19
  Uniprot ID: Q9NS68
  ENSP ID: ENSP00000385408
MECVPCGDPPPPYEPHCASKVNLVKIASTASSPRDTALAAVICSALATVLLALLILCVIYCKRQFMEKKPSWSLRSQDIQYNGSELSCFDRPQLHEYAHRACCQCRRDSVQTCGPVRLLPSMCCEEACSPNPATLGCGVHSAASLQARNAGPAGEMVPTFFGSLTQSICGEFSDAWPLMQNPMGGDNISFCDSYPELTGEDIHSLNPELESSTSLDSNSSQDLVGGAVPVQSHSENFTAATDLSRYNNTLVESASTQDALTMRSQLDQESGAVIHPATQTSLQEA

SEQ ID NO: 93873 - protein, 455 aa, Homo sapiens
  Payload ID: 18736
  Gene Name: tumor necrosis factor receptor superfamily, member 1A
  Uniprot ID: P19438
  ENSP ID: ENSP00000162749
MGLSTVPDLLLPLVLLELLVGIYPSGVIGLVPHLGDREKRDSVCPQGKYIHPQNNSICCTKCHKGTYLYNDCPGPGQDTDCRECESGSFTASENHLRHCLSCSKCRKEMGQVEISSCTVDRDTVCGCRKNQYRHYWSENLFQCFNCSLCLNGTVHLSCQEKQNTVCTCHAGFFLRENECVSCSNCKKSLECTKLCLPQIENVKGTEDSGTTVLLPLVIFFGLCLLSLLFIGLMYRYQRWKSKLYSIVCGKSTPEKEGELEGTTTKPLAPNPSFSPTPGFTPTLGFSPVPSSTFTSSSTYTPGDCPNFAAPRREVAPPYQGADPILATALASDPIPNPLQKWEDSAHKPQSLDTDDPATLYAVVENVPPLRWKEFVRRLGLSDHEIDRLELQNGRCLREAQYSMLATWRRRTPRREATLELLGRVLRDMDLLGCLEDIEEALCGPAALPPAPSLLR

SEQ ID NO: 93874 - protein, 218 aa, Homo sapiens
  Payload ID: 18736
  Gene Name: tumor necrosis factor receptor superfamily, member 1A
  Uniprot ID: P19438
  ENSP ID: ENSP00000380389
MGLSTVPDLLLPLVLLELLVGIYPSGVIGLVPHLGDREKRDSVCPQGKYIHPQNNSICCTKCHKGTYLYNDCPGPGQDTDCRECESGSFTASENHLRHCLSCSKCRKEMGQVEISSCTVDRDTVCGCRKNQYRHYWSENLFQCFNCSLCLNGTVHLSCQEKQNTVCTCHAGFFLRENECVSCSKVLLCRPGWNAVARSRLTATSASQIQAILLLQPPK

SEQ ID NO: 93875 - protein, 254 aa, Homo sapiens
  Payload ID: 18736
  Gene Name: tumor necrosis factor receptor superfamily, member 1A
  ENSP ID: ENSP00000413224
MGLSTVPDLLLPLVLLELLVGIYPSGVIGLVPHLGDREKRDSVCPQGKYIHPQNNSICCTKCHKGTYLYNDCPGPGQDTDCRECESGSFTASENHLRHCLSCSKCRKEMGQVEISSCTVDRDTVCGCRKNQYRHYWSENLFQCFNCSLCLNGTVHLSCERSSPEAKPSPHPRGWPLPHAVALPFLPPPVFCGSDNQLLSGRPHPVPRHFLCPVGWGCRRFSFSCAALLPTGQEKQNTVCTCHAGFFLRENECVS

SEQ ID NO: 93876 - protein, 412 aa, Homo sapiens
  Payload ID: 18736
  Gene Name: tumor necrosis factor receptor superfamily, member 1A
  ENSP ID: ENSP00000438343
MGLSTVPDLLLPLVLLELLVGIYPSGVIGLVPHLGDREKRDSVCPQGKYIHPQNNSICCTKCHKEMGQVEISSCTVDRDTVCGCRKNQYRHYWSENLFQCFNCSLCLNGTVHLSCQEKQNTVCTCHAGFFLRENECVSCSNCKKSLECTKLCLPQIENVKGTEDSGTTVLLPLVIFFGLCLLSLLFIGLMYRYQRWKSKLYSIVCGKSTPEKEGELEGTTTKPLAPNPSFSPTPGFTPTLGFSPVPSSTFTSSSTYTPGDCPNFAAPRREVAPPYQGADPILATALASDPIPNPLQKWEDSAHKPQSLDTDDPATLYAVVENVPPLRWKEFVRRLGLSDHEIDRLELQNGRCLREAQYSMLATWRRRTPRREATLELLGRVLRDMDLLGCLEDIEEALCGPAALPPAPSLLR

SEQ ID NO: 93877 - protein, 71 aa, Homo sapiens
  Payload ID: 18736
  Gene Name: tumor necrosis factor receptor superfamily, member 1A
  ENSP ID: ENSP00000439981
MGLSTVPDLLLPLVLLELLVGIYPSGVIGLVPHLGDREKRDSVCPQGKYIHPQNNSICCTKCHKGTYLYND

SEQ ID NO: 93878 - protein, 122 aa, Homo sapiens
  Payload ID: 18736
  Gene Name: tumor necrosis factor receptor superfamily, member 1A
  ENSP ID: ENSP00000441803
MGLSTVPDLLLPLEPTCTMTVQARGRIRTAGSVRAAPSPLQKTTSDTASAAPNAERKWVRWRSLLAQWTGTPCVAAGRTSTGIIGVKTFSSASIAASASMGPCTSPARRNRTPCAPAMQVSF

SEQ ID NO: 93879 - protein, 298 aa, Homo sapiens
  Payload ID: 18736
  Gene Name: tumor necrosis factor receptor superfamily, member 1A
  ENSP ID: ENSP00000442059
MGLSTVPDLLLPLVLLELLVGIYPSGVIGLVPHLGDREKRDSVCPQGKYIHPQNNSICCTKCHKGTYLYNDCPGPGQDTDCRECESGSFTASENHLRHCLSCSKCRKEMGQVEISSCTVDRDTVCGCRKNQYRHYWSENLFQCFNCSLCLNGTVHLSCQEKQNTVCTCHAGFFLRENECVSCSNCKKSLECTKLCLPQIENVKGTEDSGTTVLLPLVIFFGLCLLSLLFIGLMYRYQRWKSKLYSIGEWGLWEGEGAGGGEGGHGWVRWTCVEGGEECPLSSYRWGLWAEGGPGWLGR

SEQ ID NO: 93880 - protein, 72 aa, Homo sapiens
  Payload ID: 18736
  Gene Name: tumor necrosis factor receptor superfamily, member 1A
  ENSP ID: ENSP00000442405
MGLSTVPDLLLPLVLLELLVGIYPSGVIGLVPHLGDREKRDSVCPQGKYIHPQNNSICCTKCHKEPVPALLE

SEQ ID NO: 93881 - protein, 118 aa, Homo sapiens
  Payload ID: 18736
  Gene Name: tumor necrosis factor receptor superfamily, member 1A
  ENSP ID: ENSP00000442919
MGLSTVPDLLLPLVLLELLVGIYPSGVIGLVPHLGDREKRDSVCPQGKYIHPQNNSICCTKCHKGPGQDTDCRECESGSFTASENHLRHCLSCSKCRKEMGQVEISSCTVDRDTVCGC

SEQ ID NO: 93882 - protein, 461 aa, Homo sapiens
  Payload ID: 18737
  Gene Name: tumor necrosis factor receptor superfamily, member 1B
  Uniprot ID: P20333
  ENSP ID: ENSP00000365435
MAPVAVWAALAVGLELWAAAHALPAQVAFTPYAPEPGSTCRLREYYDQTAQMCCSKCSPGQHAKVFCTKTSDTVCDSCEDSTYTQLWNWVPECLSCGSRCSSDQVETQACTREQNRICTCRPGWYCALSKQEGCRLCAPLRKCRPGFGVARPGTETSDVVCKPCAPGTFSNTTSSTDICRPHQICNVVAIPGNASMDAVCTSTSPTRSMAPGAVHLPQPVSTRSQHTQPTPEPSTAPSTSFLLPMGPSPPAEGSTGDFALPVGLIVGVTALGLLIIGVVNCVIMTQVKKKPLCLQREAKVPHLPADKARGTQGPEQQHLLITAPSSSSSSLESSASALDRRAPTRNQPQAPGVEASGAGEARASTGSSDSSPGGHGTQVNVTCIVNVCSSSDHSSQCSSQASSTMGDTDSSPSESPKDEQVPFSKEECAFRSQLETPETLLGSTEEKPLPLGVPDAGMKPS

SEQ ID NO: 93883 - protein, 155 aa, Homo sapiens
  Payload ID: 18737
  Gene Name: tumor necrosis factor receptor superfamily, member 1B
  ENSP ID: ENSP00000440425
MAPVAVWAALAVGLELWAAAHALPAQVAFTPYAPEPGSTCRLREYYDQTAQMCCSKCSPGQHAKVFCTKTSDTVCDSCEDSTYTQLWNWVPECLSCGSRCSSDQVETQACTREQNRICTCRPGWYCALSKQEGCRLCAPLRKCRPGFGVARPDLS

SEQ ID NO: 93884 - protein, 655 aa, Homo sapiens
  Payload ID: 18738
  Gene Name: tumor necrosis factor receptor superfamily, member 21
  Uniprot ID: O75509
  ENSP ID: ENSP00000296861
MGTSPSSSTALASCSRIARRATATMIAGSLLLLGFLSTTTAQPEQKASNLIGTYRHVDRATGQVLTCDKCPAGTYVSEHCTNTSLRVCSSCPVGTFTRHENGIEKCHDCSQPCPWPMIEKLPCAALTDRECTCPPGMFQSNATCAPHTVCPVGWGVRKKGTETEDVRCKQCARGTFSDVPSSVMKCKAYTDCLSQNLVVIKPGTKETDNVCGTLPSFSSSTSPSPGTAIFPRPEHMETHEVPSSTYVPKGMNSTESNSSASVRPKVLSSIQEGTVPDNTSSARGKEDVNKTLPNLQVVNHQQGPHHRHILKLLPSMEATGGEKSSTPIKGPKRGHPRQNLHKHFDINEHLPWMIVLFLLLVLVVIVVCSIRKSSRTLKKGPRQDPSAIVEKAGLKKSMTPTQNREKWIYYCNGHGIDILKLVAAQVGSQWKDIYQFLCNASEREVAAFSNGYTADHERAYAALQHWTIRGPEASLAQLISALRQHRRNDVVEKIRGLMEDTTQLETDKLALPMSPSPLSPSPIPSPNAKLENSALLTVEPSPQDKNKGFFVDESEPLLRCDSTSSGSSALSRNGSFITKEKKDTVLRQVRLDPCDLQPIFDDMLHFLNPEELRVIEEIPQAEDKLDRLFEIIGVKSQEASQTLLDSVYSHLPDLL

SEQ ID NO: 93885 - protein, 372 aa, Homo sapiens
  Payload ID: 18739
  Gene Name: tumor necrosis factor receptor superfamily, member 25
  Uniprot ID: Q93038
  ENSP ID: ENSP00000314451
MEQRPRGCAAVAAALLLVLLGARAQGGTRSPRCDCAGDFHKKIGLFCCRGCPAASQVALENCSAVADTRCGCKPGWFVECQVSQCVSSSPFYCQPCLDCGALHRHTRLLCSRRDTDCGTCLPGFYEHGDGCVSCPTSTLGSCPERCAAVCGWRQMFWVQVLLAGLVVPLLLGATLTYTYRHCWPHKPLVTADEAGMEALTPPPATHLSPLDSAHTLLAPPDSSEKICTVQLVGNSWTPGYPETQEALCPQVTWSWDQLPSRALGPAAAPTLSPESPAGSPAMMLQPGPQLYDVMDAVPARRWKEFVRTLGLREAEIEAVEVEIGRFRDQQYEMLKRWRQQQPAGLGAVYAALERMGLDGCVEDLRSRLQRGP

SEQ ID NO: 93886 - protein, 234 aa, Homo sapiens
  Payload ID: 18739
  Gene Name: tumor necrosis factor receptor superfamily, member 25
  Uniprot ID: Q93038
  ENSP ID: ENSP00000326762
MEQRPRGCAAVAAALLLVLLGARAQGGTRSPRCDCAGDFHKKIGLFCCRGCPADEAGMEALTPPPATHLSPLDSAHTLLAPPDSSEKICTVQLVGNSWTPGYPETQEALCPQVTWSWDQLPSRALGPAAAPTLSPESPAGSPAMMLQPGPQLYDVMDAVPARRWKEFVRTLGLREAEIEAVEVEIGRFRDQQYEMLKRWRQQQPAGLGAVYAALERMGLDGCVEDLRSRLQRGP

SEQ ID NO: 93887 - protein, 380 aa, Homo sapiens
  Payload ID: 18739
  Gene Name: tumor necrosis factor receptor superfamily, member 25
  Uniprot ID: Q93038
  ENSP ID: ENSP00000337713
MEQRPRGCAAVAAALLLVLLGARAQGGTRSPRCDCAGDFHKKIGLFCCRGCPAGHYLKAPCTEPCGNSTCLVCPQDTFLAWENHHNSECARCQACDEQASQVALENCSAVADTRCGCKPGWFVECQVSQCVSSSPFYCQPCLDCGALHRHTRLLCSRRDTDCGTCLPGFYEHGDGCVSCPTSTLGSCPERCAAVCGWRQNEAGMEALTPPPATHLSPLDSAHTLLAPPDSSEKICTVQLVGNSWTPGYPETQEALCPQVTWSWDQLPSRALGPAAAPTLSPESPAGSPAMMLQPGPQLYDVMDAVPARRWKEFVRTLGLREAEIEAVEVEIGRFRDQQYEMLKRWRQQQPAGLGAVYAALERMGLDGCVEDLRSRLQRGP

SEQ ID NO: 93888 - protein, 417 aa, Homo sapiens
  Payload ID: 18739
  Gene Name: tumor necrosis factor receptor superfamily, member 25
  Uniprot ID: Q93038
  ENSP ID: ENSP00000349341
MEQRPRGCAAVAAALLLVLLGARAQGGTRSPRCDCAGDFHKKIGLFCCRGCPAGHYLKAPCTEPCGNSTCLVCPQDTFLAWENHHNSECARCQACDEQASQVALENCSAVADTRCGCKPGWFVECQVSQCVSSSPFYCQPCLDCGALHRHTRLLCSRRDTDCGTCLPGFYEHGDGCVSCPTSTLGSCPERCAAVCGWRQMFWVQVLLAGLVVPLLLGATLTYTYRHCWPHKPLVTADEAGMEALTPPPATHLSPLDSAHTLLAPPDSSEKICTVQLVGNSWTPGYPETQEALCPQVTWSWDQLPSRALGPAAAPTLSPESPAGSPAMMLQPGPQLYDVMDAVPARRWKEFVRTLGLREAEIEAVEVEIGRFRDQQYEMLKRWRQQQPAGLGAVYAALERMGLDGCVEDLRSRLQRGP

SEQ ID NO: 93889 - protein, 426 aa, Homo sapiens
  Payload ID: 18739
  Gene Name: tumor necrosis factor receptor superfamily, member 25
  Uniprot ID: Q93038
  ENSP ID: ENSP00000367013
MEQRPRGCAAVAAALLLVLLGARAQGGTRSPRCDCAGDFHKKIGLFCCRGCPAGHYLKAPCTEPCGNSTCLVCPQDTFLAWENHHNSECARCQACDEQASQVALENCSAVADTRCGCKPGWFVECQVSQCVSSSPFYCQPCLDCGALHRHTRLLCSRRDTDCGTCLPGFYEHGDGCVSCPTPPPSLAGAPWGAVQSAVPLSVAGGRVGVFWVQVLLAGLVVPLLLGATLTYTYRHCWPHKPLVTADEAGMEALTPPPATHLSPLDSAHTLLAPPDSSEKICTVQLVGNSWTPGYPETQEALCPQVTWSWDQLPSRALGPAAAPTLSPESPAGSPAMMLQPGPQLYDVMDAVPARRWKEFVRTLGLREAEIEAVEVEIGRFRDQQYEMLKRWRQQQPAGLGAVYAALERMGLDGCVEDLRSRLQRGP

SEQ ID NO: 93890 - protein, 218 aa, Homo sapiens
  Payload ID: 18739
  Gene Name: tumor necrosis factor receptor superfamily, member 25
  Uniprot ID: Q93038
  ENSP ID: ENSP00000404274
MEQRPRGCAAVAAALLLVLLGARAQGGTRSPRCDCAGDFHKKIGLFCCRGCPAGHYLKAPCTEPCGNSTCLVCPQDTFLAWENHHNSECARCQACDEQASQVALENCSAVADTRCGCKPGWFVECQVSQCVSSSPFYCQPCLDCGALHRHTRLLCSRRDTDCGTCLPGFYEHGDGCVSCPTVLGPGAPGWPCGPPPAWGHPDLHIPPLLASQAPGYCR

SEQ ID NO: 93891 - protein, 126 aa, Homo sapiens
  Payload ID: 18739
  Gene Name: tumor necrosis factor receptor superfamily, member 25
  Uniprot ID: Q93038
  ENSP ID: ENSP00000421976
MEQRPRGCAAVAAALLLVLLGARAQGGTRSPRCDCAGDFHKKIGLFCCRGCPAASQVALENCSAVADTRCGCKPGWFVECQVSQCVSSSPFYCQPCLDCGALHRHTRLLCHPSVTLGQRPHPSSTS

SEQ ID NO: 93892 - protein, 136 aa, Homo sapiens
  Payload ID: 18739
  Gene Name: tumor necrosis factor receptor superfamily, member 25
  Uniprot ID: Q93038
  ENSP ID: ENSP00000423121
MEQRPRGCAAVAAALLLVLLGARAQGGTRSPRCDCAGDFHKKIGLFCCRGCPAASQVALENCSAVADTRCGCKPGWFVECQVSQCVSSSPFYCQPCLDCGALHRHTRLLCSRRDTDCGTCLPGFYEHGDGCVSCPT

SEQ ID NO: 93893 - protein, 181 aa, Homo sapiens
  Payload ID: 18739
  Gene Name: tumor necrosis factor receptor superfamily, member 25
  Uniprot ID: Q93038
  ENSP ID: ENSP00000424071
MEQRPRGCAAVAAALLLVLLGARAQGGTRSPRCDCAGDFHKKIGLFCCRGCPAGHYLKAPCTEPCGNSTCLVCPQDTFLAWENHHNSECARCQACDEQASQVALENCSAVADTRCGCKPGWFVECQVSQCVSSSPFYCQPCLDCGALHRHTRLLCSRRDTDCGTCLPGFYEHGDGCVSCPT

SEQ ID NO: 93894 - protein, 277 aa, Homo sapiens
  Payload ID: 18739
  Gene Name: tumor necrosis factor receptor superfamily, member 25
  Uniprot ID: Q93038
  ENSP ID: ENSP00000431554
MEQRPRGCAAVAAALLLVLLGARAQGGTRSPRCDCAGDFHKKIGLFCCRGCPAGHYLKAPCTEPCGNSTCLVCPQDTFLAWENHHNSECARCQACDEQASQVALENCSAVADTRCGCKPGWFVECQVSQCVSSSPFYCQPCLDCGALHRHTRLLCSRRDTDCGTCLPGFYEHGDGCVSCPTPPPSLAGAPWGAVQSAVPLSVAGGRVGGVLGMRVGELGWTEGRRVRRGATTQHPPAAFSVLGPGAPGWPCGPPPAWGHPDLHIPPLLASQAPGYCR

SEQ ID NO: 93895 - protein, 253 aa, Homo sapiens
  Payload ID: 18739
  Gene Name: tumor necrosis factor receptor superfamily, member 25
  ENSP ID: ENSP00000434129
MEQRPRGCAAVAAALLLVLLGARAQGGTRSPRCDCAGDFHKKIGLFCCRGCPAGHYLKAPCTEPCGNSTCLVCPQDTFLAWENHHNSECARCQACDEQASQVALENCSAVADTRCGCKPGWFVECQVSQCVSSSPFYCQPCLDCGALHRHTRLLCSRRDTDCGTCLPGFYEHGDGCVSCPTSTLGSCPERCAAVCGWRQSRWCAGNASGRTGMDRGEAGEEGGNHPTPTSCFQCSGSRCSWLALWSPSCLGPP

SEQ ID NO: 93896 - protein, 45 aa, Homo sapiens
  Payload ID: 18739
  Gene Name: tumor necrosis factor receptor superfamily, member 25
  ENSP ID: ENSP00000465381
MFWVQVLLAGLVVPLLLGATLTYTYRHCWPHKPLVTDEAGMEALT

SEQ ID NO: 93897 - protein, 277 aa, Homo sapiens
  Payload ID: 18740
  Gene Name: tumor necrosis factor receptor superfamily, member 4
  Uniprot ID: P43489
  ENSP ID: ENSP00000368538
MCVGARRLGRGPCAALLLLGLGLSTVTGLHCVGDTYPSNDRCCHECRPGNGMVSRCSRSQNTVCRPCGPGFYNDVVSSKPCKPCTWCNLRSGSERKQLCTATQDTVCRCRAGTQPLDSYKPGVDCAPCPPGHFSPGDNQACKPWTNCTLAGKHTLQPASNSSDAICEDRDPPATQPQETQGPPARPITVQPTEAWPRTSQGPSTRPVEVPGGRAVAAILGLGLVLGLLGPLAILLALYLLRRDQRLPPDAHKPPGGGSFRTPIQEEQADAHSTLAKI

SEQ ID NO: 93898 - protein, 300 aa, Homo sapiens
  Payload ID: 18741
  Gene Name: tumor necrosis factor receptor superfamily, member 6b, decoy
  Uniprot ID: O95407
  ENSP ID: ENSP00000359013
MRALEGPGLSLLCLVLALPALLPVPAVRGVAETPTYPWRDAETGERLVCAQCPPGTFVQRPCRRDSPTTCGPCPPRHYTQFWNYLERCRYCNVLCGEREEEARACHATHNRACRCRTGFFAHAGFCLEHASCPPGAGVIAPGTPSQNTQCQPCPPGTFSASSSSSEQCQPHRNCTALGLALNVPGSSSHDTLCTSCTGFPLSTRVPGAEECERAVIDFVAFQDISIKRLQRLLQALEAPEGWGPTPRAGRAALQLKLRRRLTELLGAQDGALLVRLLQALRVARMPGLERSVRERFLPVH

SEQ ID NO: 93899 - protein, 595 aa, Homo sapiens
  Payload ID: 18742
  Gene Name: tumor necrosis factor receptor superfamily, member 8
  Uniprot ID: P28908
  ENSP ID: ENSP00000263932
MRVLLAALGLLFLGALRAFPQDRPFEDTCHGNPSHYYDKAVRRCCYRCPMGLFPTQQCPQRPTDCRKQCEPDYYLDEADRCTACVTCSRDDLVEKTPCAWNSSRVCECRPGMFCSTSAVNSCARCFFHSVCPAGMIVKFPGTAQKNTVCEPASPGVSPACASPENCKEPSSGTIPQAKPTPVSPATSSASTMPVRGGTRLAQEAASKLTRAPDSPSSVGRPSSDPGLSPTQPCPEGSGDCRKQCEPDYYLDEAGRCTACVSCSRDDLVEKTPCAWNSSRTCECRPGMICATSATNSCARCVPYPICAAETVTKPQDMAEKDTTFEAPPLGTQPDCNPTPENGEAPASTSPTQSLLVDSQASKTLPIPTSAPVALSSTGKPVLDAGPVLFWVILVLVVVVGSSAFLLCHRRACRKRIRQKLHLCYPVQTSQPKLELVDSRPRRSSTQLRSGASVTEPVAEERGLMSQPLMETCHSVGAAYLESLPLQDASPAGGPSSPRDLPEPRVSTEHTNNKIEKIYIMKADTVIVGTVKAELPEGRGLAGPAEPELEEELEADHTPHYPEQETEPPLGSCSDVMLSVEEEGKEDPLPTAASGK

SEQ ID NO: 93900 - protein, 483 aa, Homo sapiens
  Payload ID: 18742
  Gene Name: tumor necrosis factor receptor superfamily, member 8
  Uniprot ID: P28908
  ENSP ID: ENSP00000390650
MFCSTSAVNSCARCFFHSVCPAGMIVKFPGTAQKNTVCEPASPGVSPACASPENCKEPSSGTIPQAKPTPVSPATSSASTMPVRGGTRLAQEAASKLTRAPDSPSSVGRPSSDPGLSPTQPCPEGSGDCRKQCEPDYYLDEAGRCTACVSCSRDDLVEKTPCAWNSSRTCECRPGMICATSATNSCARCVPYPICAAETVTKPQDMAEKDTTFEAPPLGTQPDCNPTPENGEAPASTSPTQSLLVDSQASKTLPIPTSAPVALSSTGKPVLDAGPVLFWVILVLVVVVGSSAFLLCHRRACRKRIRQKLHLCYPVQTSQPKLELVDSRPRRSSTLRSGASVTEPVAEERGLMSQPLMETCHSVGAAYLESLPLQDASPAGGPSSPRDLPEPRVSTEHTNNKIEKIYIMKADTVIVGTVKAELPEGRGLAGPAEPELEEELEADHTPHYPEQETEPPLGSCSDVMLSVEEEGKEDPLPTAASGK

SEQ ID NO: 93901 - protein, 132 aa, Homo sapiens
  Payload ID: 18742
  Gene Name: tumor necrosis factor receptor superfamily, member 8
  Uniprot ID: P28908
  ENSP ID: ENSP00000398337
MSQPLMETCHSVGAAYLESLPLQDASPAGGPSSPRDLPEPRVSTEHTNNKIEKIYIMKADTVIVGTVKAELPEGRGLAGPAEPELEEELEADHTPHYPEQETEPPLGSCSDVMLSVEEEGKEDPLPTAASGK

SEQ ID NO: 93902 - protein, 55 aa, Homo sapiens
  Payload ID: 18742
  Gene Name: tumor necrosis factor receptor superfamily, member 8
  ENSP ID: ENSP00000421938
MRVLLAALGLLFLGALRAFPQGCSRHSSAHRGLLTAGSSVSLTTTWMRPTAVQPA

SEQ ID NO: 93903 - protein, 255 aa, Homo sapiens
  Payload ID: 18743
  Gene Name: tumor necrosis factor receptor superfamily, member 9
  Uniprot ID: Q07011
  ENSP ID: ENSP00000366729
MGNSCYNIVATLLLVLNFERTRSLQDPCSNCPAGTFCDNNRNQICSPCPPNSFSSAGGQRTCDICRQCKGVFRTRKECSSTSNAECDCTPGFHCLGAGCSMCEQDCKQGQELTKKGCKDCCFGTFNDQKRGICRPWTNCSLDGKSVLVNGTKERDVVCGPSPADLSPGASSVTPPAPAREPGHSPQIISFFLALTSTALLFLLFFLTLRFSVVKRGRKKLLYIFKQPFMRPVQTTQEEDGCSCRFPEEEEGGCEL

SEQ ID NO: 93904 - protein, 75 aa, Homo sapiens
  Payload ID: 18743
  Gene Name: tumor necrosis factor receptor superfamily, member 9
  ENSP ID: ENSP00000464978
SSTSNAECDCTPGFHCLGAGCSMCEQDCKQGQELTKKGCKDCCFGTFNDQKRGICRPWTNIRVADEWNHDSQEKY

SEQ ID NO: 93905 - protein, 87 aa, Homo sapiens
  Payload ID: 18743
  Gene Name: tumor necrosis factor receptor superfamily, member 9
  ENSP ID: ENSP00000465272
ERDVVCGPSPADLSPGASSVTPPAPAREPGHSPQIISFFLALTSTALLFLLFFLTLRFSVVKRGRKKLLYIFKQHGSSGDTFTILES

SEQ ID NO: 93906 - protein, 255 aa, Homo sapiens; identical to SEQ ID NO: 93903
  Payload ID: 18743
  Gene Name: tumor necrosis factor receptor superfamily, member 9
  Uniprot ID: Q07011
  ENSP ID: ENSP00000478699

SEQ ID NO: 93907 - protein, 316 aa, Homo sapiens
  Payload ID: 18744
  Gene Name: tumor necrosis factor, alpha-induced protein 1 (endothelial)
  Uniprot ID: Q13829
  ENSP ID: ENSP00000226225
MSGDTCLCPASGAKPKLSGFKGGGLGNKYVQLNVGGSLYYTTVRALTRHDTMLKAMFSGRMEVLTDKEGWILIDRCGKHFGTILNYLRDDTITLPQNRQEIKELMAEAKYYLIQGLVNMCQSALQDKKDSYQPVCNIPIITSLKEEERLIESSTKPVVKLLYNRSNNKYSYTSNSDDHLLKNIELFDKLSLRFNGRVLFIKDVIGDEICCWSFYGQGRKLAEVCCTSIVYATEKKQTKVEFPEARIYEETLNVLLYETPRVPDNSLLEATSRSRSQASPSEDEETFELRDRVRRIHVKRYSTYDDRQLGHQSTHRD

SEQ ID NO: 93908 - protein, 212 aa, Homo sapiens
  Payload ID: 18744
  Gene Name: tumor necrosis factor, alpha-induced protein 1 (endothelial)
  Uniprot ID: Q13829
  ENSP ID: ENSP00000440749
MAEAKYYLIQGLVNMCQSALQDKKDSYQPVCNIPIITSLKEEERLIESSTKPVVKLLYNRSNNKYSYTSNSDDHLLKNIELFDKLSLRFNGRVLFIKDVIGDEICCWSFYGQGRKLAEVCCTSIVYATEKKQTKVEFPEARIYEETLNVLLYETPRVPDNSLLEATSRSRSQASPSEDEETFELRDRVRRIHVKRYSTYDDRQLGHQSTHRD

SEQ ID NO: 93909 - protein, 125 aa, Homo sapiens
  Payload ID: 18744
  Gene Name: tumor necrosis factor, alpha-induced protein 1 (endothelial)
  ENSP ID: ENSP00000464515
MSGDTCLCPASGAKPKLSGFKGGGLGNKYVQLNVGGSLYYTTVRALTRHDTMLKAMFSGRMEVLTDKEGWILIDRCGKHFGTILNYLRDDTITLPQNRQEIKELMAEAKYYLIQGLVNMCQSALQ

SEQ ID NO: 93910 - protein, 107 aa, Homo sapiens
  Payload ID: 18744
  Gene Name: tumor necrosis factor, alpha-induced protein 1 (endothelial)
  ENSP ID: ENSP00000464637
MSGDTCLCPASGAKPKLSGFKGGGLGNKYVQLNVGGSLYYTTVRALTRHDTMLKAMFSGRMEVLTDKEGWILIDRCGKHFGTILNYLRDDTITLPQNRQEIKELMAE

SEQ ID NO: 93911 - protein, 157 aa, Homo sapiens
  Payload ID: 18744
  Gene Name: tumor necrosis factor, alpha-induced protein 1 (endothelial)
  ENSP ID: ENSP00000466301
MAEAKYYLIQGLVNMCQSALQDKKDSYQPVCNIPIITSLKEEERLIESSTKPVVKLLYNRSNNKYSYTSNSDDHLLKNIELFDKLSLRFNGRVLFIKDVIGDEICCWSFYGQGRKLAEVCCTSIVYATEKKQTKVWGIAPAWVGEDTHPLCGGRGRA

SEQ ID NO: 93912 - protein, 654 aa, Homo sapiens
  Payload ID: 18745
  Gene Name: tumor necrosis factor, alpha-induced protein 2
  Uniprot ID: Q03169
  ENSP ID: ENSP00000332326
MSEASSEDLVPPLEAGAAPYREEEEAAKKKKEKKKKSKGLANVFCVFTKGKKKKGQPSSAEPEDAAGSRQGLDGPPPTVEELKAALERGQLEAARPLLALERELAAAAAAGGVSEEELVRRQSKVEALYELLRDQVLGVLRRPLEAPPERLRQALAVVAEQEREDRQAAAAGPGTSGLAATRPRRWLQLWRRGVAEAAEERMGQRPAAGAEVPESVFLHLGRTMKEDLEAVVERLKPLFPAEFGVVAAYAESYHQHFAAHLAAVAQFELCERDTYMLLLWVQNLYPNDIINSPKLVGELQGMGLGSLLPPRQIRLLEATFLSSEAANVRELMDRALELEARRWAEDVPPQRLDGHCHSELAIDIIQITSQAQAKAESITLDLGSQIKRVLLVELPAFLRSYQRAFNEFLERGKQLTNYRANVIANINNCLSFRMSMEQNWQVPQDTLSLLLGPLGELKSHGFDTLLQNLHEDLKPLFKRFTHTRWAAPVETLENIIATVDTRLPEFSELQGCFREELMEALHLHLVKEYIIQLSKGRLVLKTAEQQQQLAGYILANADTIQHFCTQHGSPATWLQPALPTLAEIIRLQDPSAIKIEVATYATCYPDFSKGHLSAILAIKGNLSNSEVKRIRSILDVSMGAQEPSRPLFSLIKVG

SEQ ID NO: 93913 - protein, 654 aa, Homo sapiens; identical to SEQ ID NO: 93912
  Payload ID: 18745
  Gene Name: tumor necrosis factor, alpha-induced protein 2
  Uniprot ID: Q03169
  ENSP ID: ENSP00000452634

SEQ ID NO: 93914 - protein, 97 aa, Homo sapiens
  Payload ID: 18745
  Gene Name: tumor necrosis factor, alpha-induced protein 2
  ENSP ID: ENSP00000452824
MSEASSEDLVPPLEAGAAPYREEEEAAKKKKEKKKKSKGLANVFCVFTKGKKKKGQPSSAEPEDAAGSRQGLDGPPPTGQCEGVDGPSSGARGTALG

SEQ ID NO: 93915 - protein, 243 aa, Homo sapiens
  Payload ID: 18745
  Gene Name: tumor necrosis factor, alpha-induced protein 2
  ENSP ID: ENSP00000452914
  MOD_RES (1)..(1): Any amino acid
XPLFKRFTHTRWAAPVETLENIIATVDTRLPEFSELQGCFREELMEALHLHLVKEYIIQLSKGRLVLKTAEQQQQLAGYILANADTIQHFCTQHGSPATWLQPALPTLAEIIRLQDPSAIKIEVATYATCYPDFSKGHLSAILAIKGNLSNSEVKRIRSILDVSMGAQEPSRPLFSLIKPRAAVSGIQQWWNGRQNWKRKKEKMSSRLAGAFRVLWRAVSTASIRRHIQVAPRPLQAGPAMGP

SEQ ID NO: 93916 - protein, 48 aa, Homo sapiens
  Payload ID: 18745
  Gene Name: tumor necrosis factor, alpha-induced protein 2
  ENSP ID: ENSP00000452992
MSEASSEDLVPPLEAGAAPYREEEEAAKKKKEKKKKSPRASFCTWAAP

SEQ ID NO: 93917 - protein, 39 aa, Homo sapiens
  Payload ID: 18745
  Gene Name: tumor necrosis factor, alpha-induced protein 2
  ENSP ID: ENSP00000453103
MSEASSEDLVPPLEAGAAPYREEEEAAKKKKEKKKKSKG

SEQ ID NO: 93918 - protein, 347 aa, Homo sapiens
  Payload ID: 18745
  Gene Name: tumor necrosis factor, alpha-induced protein 2
  ENSP ID: ENSP00000453142
VRARHLHAAALGAEPLPQANVRELMDRALELEARRWAEDVPPQRLDGHCHSELAIDIIQITSQAQAKAESITLDLGSQIKRVLLVELPAFLRSYQRAFNEFLERGKQLTNYRANVIANINNCLSFRMSMEQNWQVPQDTLSLLLGPLGELKSHGFDTLLQNLHEDLKPLFKRFTHTRWAAPVETLENIIATVDTRLPEFSELQGCFREELMEALHLHLVKEYIIQLSKGRLVLKTAEQQQQLAGYILANADTIQHFCTQHGSPATWLQPALPTLAEIIRLQDPSAIKIEVATYATCYPDFSKGHLSAILAIKGNLSNSEVKRIRSILDVSMGAQEPSRPLFSLIKVG

SEQ ID NO: 93919 - protein, 66 aa, Homo sapiens
  Payload ID: 18745
  Gene Name: tumor necrosis factor, alpha-induced protein 2
  ENSP ID: ENSP00000453458
  MOD_RES (1)..(1): Any amino acid
XTNYRANVIANINNCLSFRMSMEQNWQVPQDTLSLLLGPLGELKSHGFDTLLQNLHEDLKPFLSRA

SEQ ID NO: 93920 - protein, 790 aa, Homo sapiens
  Payload ID: 18746
  Gene Name: tumor necrosis factor, alpha-induced protein 3
  Uniprot ID: P21580
  ENSP ID: ENSP00000237289
MAEQVLPQALYLSNMRKAVKIRERTPEDIFKPTNGIIHHFKTMHRYTLEMFRTCQFCPQFREIIHKALIDRNIQATLESQKKLNWCREVRKLVALKTNGDGNCLMHATSQYMWGVQDTDLVLRKALFSTLKETDTRNFKFRWQLESLKSQEFVETGLCYDTRNWNDEWDNLIKMASTDTPMARSGLQYNSLEEIHIFVLCNILRRPIIVISDKMLRSLESGSNFAPLKVGGIYLPLHWPAQECYRYPIVLGYDSHHFVPLVTLKDSGPEIRAVPLVNRDRGRFEDLKVHFLTDPENEMKEKLLKEYLMVIEIPVQGWDHGTTHLINAAKLDEANLPKEINLVDDYFELVQHEYKKWQENSEQGRREGHAQNPMEPSVPQLSLMDVKCETPNCPFFMSVNTQPLCHECSERRQKNQNKLPKLNSKPGPEGLPGMALGASRGEAYEPLAWNPEESTGGPHSAPPTAPSPFLFSETTAMKCRSPGCPFTLNVQHNGFCERCHNARQLHASHAPDHTRHLDPGKCQACLQDVTRTFNGICSTCFKRTTAEASSSLSTSLPPSCHQRSKSDPSRLVRSPSPHSCHRAGNDAPAGCLSQAARTPGDRTGTSKCRKAGCVYFGTPENKGFCTLCFIEYRENKHFAAASGKVSPTASRFQNTIPCLGRECGTLGSTMFEGYCQKCFIEAQNQRFHEAKRTEEQLRSSQRRDVPRTTQSTSRPKCARASCKNILACRSEELCMECQHPNQRMGPGAHRGEPAPEDPPKQRCRAPACDHFGNAKCNGYCNECFQFKQMYG

SEQ ID NO: 93921 - protein, 25 aa, Homo sapiens
  Payload ID: 18746
  Gene Name: tumor necrosis factor, alpha-induced protein 3
  ENSP ID: ENSP00000393577
MAEQVLPQALYLSNMRKAVKIRERT

SEQ ID NO: 93922 - protein, 162 aa, Homo sapiens
  Payload ID: 18746
  Gene Name: tumor necrosis factor, alpha-induced protein 3
  ENSP ID: ENSP00000401562
MAEQVLPQALYLSNMRKAVKIRERTPEDIFKPTNGIIHHFKTMHRYTLEMFRTCQFCPQFREIIHKALIDRNIQATLESQKKLNWCREVRKLVALKTNGDGNCLMHATSQYMWGVQDTDLVLRKALFSTLKETDTRNFKFRWQLESLKSQEFVETGLCYDTR

SEQ ID NO: 93923 - protein, 98 aa, Homo sapiens
  Payload ID: 18746
  Gene Name: tumor necrosis factor, alpha-induced protein 3
  ENSP ID: ENSP00000409845
MAEQVLPQALYLSNMRKAVKIRERTPEDIFKPTNGIIHHFKTMHRYTLEMFRTCQFCPQFREIIHKALIDRNIQATLESQKKLNWCREVRKLVALKTN

SEQ ID NO: 93924 - protein, 749 aa, Homo sapiens
  Payload ID: 18746
  Gene Name: tumor necrosis factor, alpha-induced protein 3
  ENSP ID: ENSP00000478438
MAEQVLPQALYLSNMRKAVKIRERTPEDIFKPTNGIIHHFKTMHRYTLEMFRTCQFCPQFREIIHKALIDRNIQATLESQKKLNWCREVRKLVALKTNGDGNCLMHATSQYMWGVQDTDLVLRKALFSTLKETDTRNFKFRWQLESLKSQEFVETGLCYDTRNWNDEWDNLIKMASTDTPMARSGLQYNSLEEIHIFVLCNILRRPIIVISDKMLRSLESGSNFAPLKVGGIYLPLHWPAQECYRYPIVLGYDSHHFVPLVTLKDSGPEIRAVPLVNRDRGRFEDLKVHFLTDPENEMKEKLLKEYLMVIEIPVQGWDHGTTHLINAAKLDEANLPKEINLVDDYFELVQHEYKKWQENSEQGRREGHAQNPMEPSVPQLSLMDVKCETPNCPFFMSVNTQPLCHECSERRQKNQNKLPKLNSKPGPEGLPGMALGASRGEAYEPLAWNPEESTGGPHSAPPTAPSPFLFSETTAMKCRSPGCPFTLNVQHNGFCERCHNARQLHASHAPDHTRHLDPGKCQACLQDVTRTFNGICSTCFKRTTAEASSSLSTSLPPSCHQRSKSDPSRLVRSPSPHSCHRAGNDAPAGCLSQAARTPGDRTGTSKCRKAGCVYFGTPENKGFCTLCFIEYRENKHFAAASGKVSPTASRFQNTIPCLGRECGTLGSTMFEGYCQKCFIEAQNQRFHEAKRTEEQLRSSQRRDVPRTTQSTSRPKCARASCKNILACRSEELCMECQHQPEDGPWGPPG

SEQ ID NO: 93925 - protein, 214 aa, Homo sapiens
  Payload ID: 18746
  Gene Name: tumor necrosis factor, alpha-induced protein 3
  ENSP ID: ENSP00000479556
MAEQVLPQALYLSNMRKAVKIRERTPEDIFKPTNGIIHHFKTMHRYTLEMFRTCQFCPQFREIIHKALIDRNIQATLESQKKLNWCREVRKLVALKTNGDGNCLMHATSQYMWGVQDTDLVLRKALFSTLKETDTRNFKFRWQLESLKSQEFVETGLCYDTRNWNDEWDNLIKWLPQTHPWPEVDFSTTHWKKYTYLSFATSSEGQSLSFQTKC

SEQ ID NO: 93926 - protein, 470 aa, Homo sapiens
  Payload ID: 18746
  Gene Name: tumor necrosis factor, alpha-induced protein 3
  ENSP ID: ENSP00000481122
MAEQVLPQALYLSNMRKAVKIRERTPEDIFKPTNGIIHHFKTMHRYTLEMFRTCQFCPQFREIIHKALIDRNIQATLESQKKLNWCREVRKLVALKTNGDGNCLMHATSQYMWGVQDTDLVLRKALFSTLKETDTRNFKFRWQLESLKSQEFVETGLCYDTRNWNDEWDNLIKMASTDTPMARSGLQYNSLEEIHIFVLCNILRRPIIVISDKMLRSLESGSNFAPLKVGGIYLPLHWPAQECYRYPIVLGYDSHHFVPLVTLKDSGPEIRAVPLVNRDRGRFEDLKVHFLTDPENEMKEKLLKEYLMVIEIPVQGWDHGTTHLINAAKLDEANLPKEINLVDDYFELVQHEYKKWQENSEQGRREGHAQNPMEPSVPQLSLMDVKCETPNCPFFMSVNTQPLCHECSERRQKNQNKLPKLNSKPGPEGLPGMALGASRGEAYEPLAWNPEESTGGSFGPTDSTQPFSVQ

SEQ ID NO: 93927 - protein, 669 aa, Homo sapiens
  Payload ID: 18746
  Gene Name: tumor necrosis factor, alpha-induced protein 3
  ENSP ID: ENSP00000481454
MAEQVLPQALYLSNMRKAVKIRERTPEDIFKPTNGIIHHFKTMHRYTLEMFRTCQFCPQFREIIHKALIDRNIQATLESQKKLNWCREVRKLVALKTNGDGNCLMHATSQYMWGVQDTDLVLRKALFSTLKETDTRNFKFRWQLESLKSQEFVETGLCYDTRNWNDEWDNLIKMASTDTPMARSGLQYNSLEEIHIFVLCNILRRPIIVISDKMLRSLESGSNFAPLKVGGIYLPLHWPAQECYRYPIVLGYDSHHFVPLVTLKDSGPEIRAVPLVNRDRGRFEDLKVHFLTDPENEMKEKLLKEYLMVIEIPVQGWDHGTTHLINAAKLDEANLPKEINLVDDYFELVQHEYKKWQENSEQGRREGHAQNPMEPSVPQLSLMDVKCETPNCPFFMSVNTQPLCHECSERRQKNQNKLPKLNSKPGPEGLPGMALGASRGEAYEPLAWNPEESTGGPHSAPPTAPSPFLFSETTAMKCRSPGCPFTLNVQHNGFCERCHNARQLHASHAPDHTRHLDPGKCQACLQDVTRTFNGICSTCFKRTTAEASSSLSTSLPPSCHQRSKSDPSRLVRSPSPHSCHRAGNDAPAGCLSQAARTPGDRTGTSKCRKAGCVYFGTPENKGFCTLFHRVQRKQTFCCCLRESQSHSVQVPEHHSVPGEGMRHPWKHHV

SEQ ID NO: 93928 - protein, 790 aa, Homo sapiens; identical to SEQ ID NO: 93920
  Payload ID: 18746
  Gene Name: tumor necrosis factor, alpha-induced protein 3
  Uniprot ID: P21580
  ENSP ID: ENSP00000481570

SEQ ID NO: 93929 - protein, 531 aa, Homo sapiens
  Payload ID: 18746
  Gene Name: tumor necrosis factor, alpha-induced protein 3
  ENSP ID: ENSP00000484332
MAEQVLPQALYLSNMRKAVKIRERTPEDIFKPTNGIIHHFKTMHRYTLEMFRTCQFCPQFREIIHKALIDRNIQATLESQKKLNWCREVRKLVALKTNGDGNCLMHATSQYMWGVQDTDLVLRKALFSTLKETDTRNFKFRWQLESLKSQEFVETGLCYDTRNWNDEWDNLIKMASTDTPMARSGLQYNSLEEIHIFVLCNILRRPIIVISDKMLRSLESGSNFAPLKVGGIYLPLHWPAQECYRYPIVLGYDSHHFVPLVTLKDSGPEIRAVPLVNRDRGRFEDLKVHFLTDPENEMKEKLLKEYLMVIEIPVQGWDHGTTHLINAAKLDEANLPKEINLVDDYFELVQHEYKKWQENSEQGRREGHAQNPMEPSVPQLSLMDVKCETPNCPFFMSVNTQPLCHECSERRQKNQNKLPKLNSKPGPEGLPGMALGASRGEAYEPLAWNPEESTGGPHSAPPTAPSPFLFSETTAMKCRSPGCPFTLNVQHNGFCERCHNARQLRQPRPRPHKALGSREVPSLPPGCYQDI

SEQ ID NO: 93930 - protein, 277 aa, Homo sapiens
  Payload ID: 18747
  Gene Name: tumor necrosis factor, alpha-induced protein 6
  Uniprot ID: P98066
  ENSP ID: ENSP00000243347
MIILIYLFLLLWEDTQGWGFKDGIFHNSIWLERAAGVYHREARSGKYKLTYAEAKAVCEFEGGHLATYKQLEAARKIGFHVCAAGWMAKGRVGYPIVKPGPNCGFGKTGIIDYGIRLNRSERWDAYCYNPHAKECGGVFTDPKQIFKSPGFPNEYEDNQICYWHIRLKYGQRIHLSFLDFDLEDDPGCLADYVEIYDSYDDVHGFVGRYCGDELPDDIISTGNVMTLKFLSDASVTAGGFQIKYVAMDPVSKSSQGKNTSTTSTGNKNFLAGRFSHL

SEQ ID NO: 93931 - protein, 188 aa, Homo sapiens
  Payload ID: 18748
  Gene Name: tumor necrosis factor, alpha-induced protein 8
  Uniprot ID: O95379
  ENSP ID: ENSP00000274456
MATDVFNSKNLAVQAQKKILGKMVSKSIATTLIDDTSSEVLDELYRVTREYTQNKKEAEKIIKNLIKTVIKLAILYRNNQFNQDELALMEKFKKKVHQLAMTVVSFHQVDYTFDRNVLSRLLNECREMLHQIIQRHLTAKSHGRVNNVFDHFSDCEFLAALYNPFGNFKPHLQKLCDGINKMLDEENI

SEQ ID NO: 93932 - protein, 39 aa, Homo sapiens
  Payload ID: 18748
  Gene Name: tumor necrosis factor, alpha-induced protein 8
  ENSP ID: ENSP00000408534
MHSEAEESKEGLGLNTGIYGENSCHSTQRLSRHPKNCSS

SEQ ID NO: 93933 - protein, 198 aa, Homo sapiens
  Payload ID: 18748
  Gene Name: tumor necrosis factor, alpha-induced protein 8
  Uniprot ID: O95379
  ENSP ID: ENSP00000421848
MHSEAEESKEVATDVFNSKNLAVQAQKKILGKMVSKSIATTLIDDTSSEVLDELYRVTREYTQNKKEAEKIIKNLIKTVIKLAILYRNNQFNQDELALMEKFKKKVHQLAMTVVSFHQVDYTFDRNVLSRLLNECREMLHQIIQRHLTAKSHGRVNNVFDHFSDCEFLAALYNPFGNFKPHLQKLCDGINKMLDEENI

SEQ ID NO: 93934 - protein, 198 aa, Homo sapiens; identical to SEQ ID NO: 93933
  Payload ID: 18748
  Gene Name: tumor necrosis factor, alpha-induced protein 8
  Uniprot ID: O95379
  ENSP ID: ENSP00000422245

SEQ ID NO: 93935 - protein, 200 aa, Homo sapiens
  Payload ID: 18748
  Gene Name: tumor necrosis factor, alpha-induced protein 8
  ENSP ID: ENSP00000427160
MSKQPRLLLLCKVATDVFNSKNLAVQAQKKILGKMVSKSIATTLIDDTSSEVLDELYRVTREYTQNKKEAEKIIKNLIKTVIKLAILYRNNQFNQDELALMEKFKKKVHQLAMTVVSFHQVDYTFDRNVLSRLLNECREMLHQIIQRHLTAKSHGRVNNVFDHFSDCEFLAALYNPFGNFKPHLQKLCDGINKMLDEENI

SEQ ID NO: 93936 - protein, 210 aa, Homo sapiens
  Payload ID: 18748
  Gene Name: tumor necrosis factor, alpha-induced protein 8
  Uniprot ID: O95379
  ENSP ID: ENSP00000427424
MTLPRYCEVVLLIAHGEKMLKLVATDVFNSKNLAVQAQKKILGKMVSKSIATTLIDDTSSEVLDELYRVTREYTQNKKEAEKIIKNLIKTVIKLAILYRNNQFNQDELALMEKFKKKVHQLAMTVVSFHQVDYTFDRNVLSRLLNECREMLHQIIQRHLTAKSHGRVNNVFDHFSDCEFLAALYNPFGNFKPHLQKLCDGINKMLDEENI

SEQ ID NO: 93937 - protein, 68 aa, Homo sapiens
  Payload ID: 18748
  Gene Name: tumor necrosis factor, alpha-induced protein 8
  ENSP ID: ENSP00000429432
MVSKSIATTLIDDTSSEVLDELYRVTREYTQNKKEAEKIIKNLIKTVIKLAILYRNNQFNQDELALME

SEQ ID NO: 93938 - protein, 186 aa, Homo sapiens
  Payload ID: 18749
  Gene Name: tumor necrosis factor, alpha-induced protein 8-like 1
  Uniprot ID: Q8WVP5
  ENSP ID: ENSP00000331827
MDTFSTKSLALQAQKKLLSKMASKAVVAVLVDDTSSEVLDELYRATREFTRSRKEAQKMLKNLVKVALKLGLLLRGDQLGGEELALLRRFRHRARCLAMTAVSFHQVDFTFDRRVLAAGLLECRDLLHQAVGPHLTAKSHGRINHVFGHLADCDFLAALYGPAEPYRSHLRRICEGLGRMLDEGSL

SEQ ID NO: 93939 - protein, 186 aa, Homo sapiens; identical to SEQ ID NO: 93938
  Payload ID: 18749
  Gene Name: tumor necrosis factor, alpha-induced protein 8-like 1
  Uniprot ID: Q8WVP5
  ENSP ID: ENSP00000444215

SEQ ID NO: 93940 - protein, 184 aa, Homo sapiens
  Payload ID: 18750
  Gene Name: tumor necrosis factor, alpha-induced protein 8-like 2
  Uniprot ID: Q6P589
  ENSP ID: ENSP00000357906
MESFSSKSLALQAEKKLLSKMAGRSVAHLFIDETSSEVLDELYRVSKEYTHSRPQAQRVIKDLIKVAIKVAVLHRNGSFGPSELALATRFRQKLRQGAMTALSFGEVDFTFEAAVLAGLLTECRDVLLELVEHHLTPKSHGRIRHVFDHFSDPGLLTALYGPDFTQHLGKICDGLRKLLDEGKL

SEQ ID NO: 93941 - protein, 292 aa, Homo sapiens
  Payload ID: 18751
  Gene Name: tumor necrosis factor, alpha-induced protein 8-like 3
  Uniprot ID: Q5GJ75
  ENSP ID: ENSP00000328016
MGKPRQNPSTLVSTLCEAEPKGKLWVNGYAGTQGTRDATLQTRLIPLSFHLQRGKGLAAPLSALSAPRLPERPADGRVAVDAQPAARSMDSDSGEQSEGEPVTAAGPDVFSSKSLALQAQKKILSKIASKTVANMLIDDTSSEIFDELYKVTKEHTHNKKEAHKIMKDLIKVAIKIGILYRNNQFSQEELVIVEKFRKKLNQTAMTIVSFYEVEYTFDRNVLSNLLHECKDLVHELVQRHLTPRTHGRINHVFNHFADVEFLSTLYSLDGDCRPNLKRICEGINKLLDEKVL

SEQ ID NO: 93942 - protein, 184 aa, Homo sapiens
  Payload ID: 18752
  Gene Name: tumor protein D52
  Uniprot ID: P55327
  ENSP ID: ENSP00000368390
MDRGEQGLLRTDPVPEEGEDVAATISATETLSEEEQEELRRELAKVEEEIQTLSQVLAAKEKHLAEIKRKLGINSLQELKQNIAKGWQDVTATSAYKKTSETLSQAGQKASAAFSSVGSVITKKLEDVKNSPTFKSFEEKVENLKSKVGGTKPAGGDFGEVLNSAANASATTTEPLPEKTQESL

SEQ ID NO: 93943 - protein, 224 aa, Homo sapiens
  Payload ID: 18752
  Gene Name: tumor protein D52
  Uniprot ID: P55327
  ENSP ID: ENSP00000368391
MDCREMDLYEDYQSPFDFDAGVNKSYLYLSPSGNSSPPGSPTLQKFGLLRTDPVPEEGEDVAATISATETLSEEEQEELRRELAKVEEEIQTLSQVLAAKEKHLAEIKRKLGINSLQELKQNIAKGWQDVTATSAYKKTSETLSQAGQKASAAFSSVGSVITKKLEDVKNSPTFKSFEEKVENLKSKVGGTKPAGGDFGEVLNSAANASATTTEPLPEKTQESL

SEQ ID NO: 93944 - protein, 238 aa, Homo sapiens
  Payload ID: 18752
  Gene Name: tumor protein D52
  Uniprot ID: P55327
  ENSP ID: ENSP00000410222
MDCREMDLYEDYQSPFDFDAGVNKSYLYLSPSGNSSPPGSPTLQKFGLLRTDPVPEEGEDVAATISATETLSEEEQEELRRELAKVEEEIQTLSQVLAAKEKHLAEIKRKLGINSLQELKQNIAKGWQDVTATSAYKKTSETLSQAGQKASAAFSSVGSVITKKLEDVNIRSIQHSISMPAMRNSPTFKSFEEKVENLKSKVGGTKPAGGDFGEVLNSAANASATTTEPLPEKTQESL

SEQ ID NO: 93945 - protein, 60 aa, Homo sapiens
  Payload ID: 18752
  Gene Name: tumor protein D52
  ENSP ID: ENSP00000428951
MPAMRNSPTFKSFEEKVENLKSKVGGTKPAGGDFGEVLNSAANASATTTEPLPEKTQESL

SEQ ID NO: 93946 - protein, 247 aa, Homo sapiens
  Payload ID: 18752
  Gene Name: tumor protein D52
  Uniprot ID: P55327
  ENSP ID: ENSP00000429309
MDCREMDLYEDYQSPFDFDAGVNKSYLYLSPSGNSSPPGSPTLQKFGLLRTDPVPEEGEDVAATISATETLSEEEQEELRRELAKVEEEIQTLSQVLAAKEKHLAEIKRKLGINSLQELKQNIAKGWQDVTATSAYKKTSETLSQAGQKASAAFSSVGSVITKKLEDVKLQAFSHSFSIRSIQHSISMPAMRNSPTFKSFEEKVENLKSKVGGTKPAGGDFGEVLNSAANASATTTEPLPEKTQESL

SEQ ID NO: 93947 - protein, 233 aa, Homo sapiens
  Payload ID: 18752
  Gene Name: tumor protein D52
  Uniprot ID: P55327
  ENSP ID: ENSP00000429351
MDCREMDLYEDYQSPFDFDAGVNKSYLYLSPSGNSSPPGSPTLQKFGLLRTDPVPEEGEDVAATISATETLSEEEQEELRRELAKVEEEIQTLSQVLAAKEKHLAEIKRKLGINSLQELKQNIAKGWQDVTATSAYKKTSETLSQAGQKASAAFSSVGSVITKKLEDVKLQAFSHSFRNSPTFKSFEEKVENLKSKVGGTKPAGGDFGEVLNSAANASATTTEPLPEKTQESL

SEQ ID NO: 93948 - protein, 151 aa, Homo sapiens
  Payload ID: 18752
  Gene Name: tumor protein D52
  Uniprot ID: P55327
  ENSP ID: ENSP00000429708
MDCREMDLYEDYQSPFDFDAGVNKSYLYLSPSGNSSPPGSPTLQKFGLLRTDPVPEEGEDVAATISATETLSEEEQEELRRELAKVEEEIQTLSQVLAAKEKHLAEIKRKLGINSLQELKQNIAKGWQDVTATSARSKLLAAETELLCLLY

SEQ ID NO: 93949 - protein, 207 aa, Homo sapiens
  Payload ID: 18752
  Gene Name: tumor protein D52
  Uniprot ID: P55327
  ENSP ID: ENSP00000429915
MDRGEQGLLRTDPVPEEGEDVAATISATETLSEEEQEELRRELAKVEEEIQTLSQVLAAKEKHLAEIKRKLGINSLQELKQNIAKGWQDVTATSAYKKTSETLSQAGQKASAAFSSVGSVITKKLEDVKLQAFSHSFSIRSIQHSISMPAMRNSPTFKSFEEKVENLKSKVGGTKPAGGDFGEVLNSAANASATTTEPLPEKTQESL

SEQ ID NO: 93950 - protein, 38 aa, Homo sapiens
  Payload ID: 18752
  Gene Name: tumor protein D52
  ENSP ID: ENSP00000430140
MDRGEQAFYFIWNFWLELGKDLSFLHSYKMSAENRPSP

SEQ ID NO: 93951 - protein, 111 aa, Homo sapiens
  Payload ID: 18752
  Gene Name: tumor protein D52
  ENSP ID: ENSP00000430323
MDRGEQGLLRTDPVPEEGEDVAATISATETLSEEEQEELRRELAKVEEEIQTLSQVLAAKEKHLAEIKRKLGINSLQELKQNIAKGWQDVTATSARSKLLAAETELLCLLY

SEQ ID NO: 93952 - protein, 38 aa, Homo sapiens; identical to SEQ ID NO: 93950
  Payload ID: 18752
  Gene Name: tumor protein D52
  ENSP ID: ENSP00000430421

SEQ ID NO: 93953 - protein, 61 aa, Homo sapiens
  Payload ID: 18752
  Gene Name: tumor protein D52
  ENSP ID: ENSP00000430646
MDRGEQGRRRNPDSVSSVSSKREASSRDQAETWNQFSTGTKTEHCQRVARRDSNICLQEDI

SEQ ID NO: 93954 - protein, 148 aa, Homo sapiens
  Payload ID: 18752
  Gene Name: tumor protein D52
  ENSP ID: ENSP00000430865
  MOD_RES (1)..(1): Any amino acid
XGLGLGLWLGAGLSAARRLEQVPSLLGRRRKLHLPDPDLASWGPGRSGSGGGRWDCMCECLLRTDPVPEEGEDVAATISATETLSEEEQEELRRELAKVEEEIQTLSQVLAAKEKHLAEIKRKLGINSLQELKQNIAKGWQDVTATSA

SEQ ID NO: 93955 - protein, 209 aa, Homo sapiens
  Payload ID: 18753
  Gene Name: tumor protein D52-like 1
  ENSP ID: ENSP00000306285
MEAQAQGLLETEPLQGTDEDAVASADFSSMLSEEEKEELKAELVQLEDEITTLRQVLSAKERHLVEIKQKLGMNLMNELKQNFSKSWHDMQTTTAYKKTHETLSHAGQKATAAFSNVGTAISKKFGDMRSHSIGYSIRHSISMPAMRNSPTFKSFEERVETTVTSLKTKVGGTNPNGGSFEEVLSSTAHASAQSLAGGSRRTKEEELQC

SEQ ID NO: 93956 - protein, 131 aa, Homo sapiens
  Payload ID: 18753
  Gene Name: tumor protein D52-like 1
  Uniprot ID: Q16890
  ENSP ID: ENSP00000357373
MEAQAQGLLETEPLQGTDEDAVASADFSSMLSEEEKEELKAELVQLEDEITTLRQVLSAKERHLVEIKQKLGMNLMNELKQNFSKSWHDMQTTTAYKKTHETLSHAGQKATAAFSNVGTAISKKFGDMRRK

SEQ ID NO: 93957 - protein, 144 aa, Homo sapiens
  Payload ID: 18753
  Gene Name: tumor protein D52-like 1
  Uniprot ID: Q16890
  ENSP ID: ENSP00000357387
MEAQAQGLLETEPLQGTDEDAVASADFSSMLSEEEKEELKAELVQLEDEITTLRQVLSAKERHLVEIKQKLGMNLMNELKQNFSKSWHDMQTTTAYKKTHETLSHAGQKATAAFSNVGTAISKKFGDMSYSIRHSISMPAMRRK

SEQ ID NO: 93958 - protein, 102 aa, Homo sapiens
  Payload ID: 18753
  Gene Name: tumor protein D52-like 1
  Uniprot ID: Q16890
  ENSP ID: ENSP00000376273
MLSEEEKEELKAELVQLEDEITTLRQVLSAKERHLVEIKQKLGMNLMNELKQNFSKSWHDMQTTTAYKKTHETLSHAGQKATAAFSNVGTAISKKFGDMRRK

SEQ ID NO: 93959 - protein, 102 aa, Homo sapiens; identical to SEQ ID NO: 93958
  Payload ID: 18753
  Gene Name: tumor protein D52-like 1
  Uniprot ID: Q16890
  ENSP ID: ENSP00000432590

SEQ ID NO: 93960 - protein, 102 aa, Homo sapiens; identical to SEQ ID NO: 93958
  Payload ID: 18753
  Gene Name: tumor protein D52-like 1
  Uniprot ID: Q16890
  ENSP ID: ENSP00000432787

SEQ ID NO: 93961 - protein, 92 aa, Homo sapiens
  Payload ID: 18753
  Gene Name: tumor protein D52-like 1
  ENSP ID: ENSP00000432806
MLSEEEKEELKAELVQLEDEITTLRQVLSAKERHLVEIKQKLGMNLMNELKQNFSKSWHDMQTTTAYKKTHETLSHAGQKATAAFSNVGTAI

SEQ ID NO: 93962 - protein, 204 aa, Homo sapiens
  Payload ID: 18753
  Gene Name: tumor protein D52-like 1
  Uniprot ID: Q16890
  ENSP ID: ENSP00000434142
MEAQAQGLLETEPLQGTDEDAVASADFSSMLSEEEKEELKAELVQLEDEITTLRQVLSAKERHLVEIKQKLGMNLMNELKQNFSKSWHDMQTTTAYKKTHETLSHAGQKATAAFSNVGTAISKKFGDMSYSIRHSISMPAMRNSPTFKSFEERVETTVTSLKTKVGGTNPNGGSFEEVLSSTAHASAQSLAGGSRRTKEEELQC

SEQ ID NO: 93963 - protein, 166 aa, Homo sapiens
  Payload ID: 18753
  Gene Name: tumor protein D52-like 1
  ENSP ID: ENSP00000434743
MEAQAQGLLETEPLQGTDEDAVASADFSSMLSEEEKEELKAELVQLEDEITTLRQVLSAKERHLVEIKQKLGMNLMNELKQNFSKSWHDMQTTTAYKKTHETLSHAGQKATAAFSNVGTAISKKFGDMSYSIRHSISMPAMRNSPTFKSFEERVETTVTSLKVQMK

SEQ ID NO: 93964 - protein, 175 aa, Homo sapiens
  Payload ID: 18753
  Gene Name: tumor protein D52-like 1
  Uniprot ID: Q16890
  ENSP ID: ENSP00000435447
MLSEEEKEELKAELVQLEDEITTLRQVLSAKERHLVEIKQKLGMNLMNELKQNFSKSWHDMQTTTAYKKTHETLSHAGQKATAAFSNVGTAISKKFGDMSYSIRHSISMPAMRNSPTFKSFEERVETTVTSLKTKVGGTNPNGGSFEEVLSSTAHASAQSLAGGSRRTKEEELQC

SEQ ID NO: 93965 - protein, 191 aa, Homo sapiens
  Payload ID: 18753
  Gene Name: tumor protein D52-like 1
  ENSP ID: ENSP00000436953
MEAQAQGLLETEPLQGTDEDAVASADFSSMLSEEEKEELKAELVQLEDEITTLRQVLSAKERHLVEIKQKLGMNLMNELKQNFSKSWHDMQTTTAYKKTHETLSHAGQKATAAFSNVGTAISKKFGDMRNSPTFKSFEERVETTVTSLKTKVGGTNPNGGSFEEVLSSTAHASAQSLAGGSRRTKEEELQC

SEQ ID NO: 93966 - protein, 229 aa, Homo sapiens
  Payload ID: 18754
  Gene Name: tumor protein D52-like 2
  Uniprot ID: O43399
  ENSP ID: ENSP00000217121
MDSAGQDINLNSPNKGLLSDSMTDVPVDTGVAARTPAVEGLTEAEEEELRAELTKVEEEIVTLRQVLAAKERHCGELKRRLGLSTLGELKQNLSRSWHDVQVSSAYVKTSEKLGEWNEKVTQSDLYKKTQETLSQAGQKTSAALSTVGSAISRKLGDMRAHPFSHSFSSYSIRHSISMPAMRNSATFKSFEDRVGTIKSKVVGDRENGSDNLPSSAGSGDKPLSDPAPF

SEQ ID NO: 93967 - protein, 209 aa, Homo sapiens
  Payload ID: 18754
  Gene Name: tumor protein D52-like 2
  Uniprot ID: O43399
  ENSP ID: ENSP00000340006
MDSAGQDINLNSPNKGLLSDSMTDVPVDTGVAARTPAVEGLTEAEEEELRAELTKVEEEIVTLRQVLAAKERHCGELKRRLGLSTLGELKQNLSRSWHDVQVSSAYKKTQETLSQAGQKTSAALSTVGSAISRKLGDMRAHPFSHSFSSYSIRHSISMPAMRNSATFKSFEDRVGTIKSKVVGDRENGSDNLPSSAGSGDKPLSDPAPF

SEQ ID NO: 93968 - protein, 206 aa, Homo sapiens
  Payload ID: 18754
  Gene Name: tumor protein D52-like 2
  Uniprot ID: O43399
  ENSP ID: ENSP00000343547
MDSAGQDINLNSPNKGLLSDSMTDVPVDTGVAARTPAVEGLTEAEEEELRAELTKVEEEIVTLRQVLAAKERHCGELKRRLGLSTLGELKQNLSRSWHDVQVSSAYVKTSEKLGEWNEKVTQSDLYKKTQETLSQAGQKTSAALSTVGSAISRKLGDMRNSATFKSFEDRVGTIKSKVVGDRENGSDNLPSSAGSGDKPLSDPAPF

SEQ ID NO: 93969 - protein, 186 aa, Homo sapiens
  Payload ID: 18754
  Gene Name: tumor protein D52-like 2
  Uniprot ID: O43399
  ENSP ID: ENSP00000343554
MDSAGQDINLNSPNKGLLSDSMTDVPVDTGVAARTPAVEGLTEAEEEELRAELTKVEEEIVTLRQVLAAKERHCGELKRRLGLSTLGELKQNLSRSWHDVQVSSAYKKTQETLSQAGQKTSAALSTVGSAISRKLGDMRNSATFKSFEDRVGTIKSKVVGDRENGSDNLPSSAGSGDKPLSDPAPF

SEQ ID NO: 93970 - protein, 220 aa, Homo sapiens
  Payload ID: 18754
  Gene Name: tumor protein D52-like 2
  Uniprot ID: O43399
  ENSP ID: ENSP00000344647
MDSAGQDINLNSPNKGLLSDSMTDVPVDTGVAARTPAVEGLTEAEEEELRAELTKVEEEIVTLRQVLAAKERHCGELKRRLGLSTLGELKQNLSRSWHDVQVSSAYVKTSEKLGEWNEKVTQSDLYKKTQETLSQAGQKTSAALSTVGSAISRKLGDMSSYSIRHSISMPAMRNSATFKSFEDRVGTIKSKVVGDRENGSDNLPSSAGSGDKPLSDPAPF

SEQ ID NO: 93971 - protein, 200 aa, Homo sapiens
  Payload ID: 18754
  Gene Name: tumor protein D52-like 2
  Uniprot ID: O43399
  ENSP ID: ENSP00000351350
MDSAGQDINLNSPNKGLLSDSMTDVPVDTGVAARTPAVEGLTEAEEEELRAELTKVEEEIVTLRQVLAAKERHCGELKRRLGLSTLGELKQNLSRSWHDVQVSSAYKKTQETLSQAGQKTSAALSTVGSAISRKLGDMSSYSIRHSISMPAMRNSATFKSFEDRVGTIKSKVVGDRENGSDNLPSSAGSGDKPLSDPAPF

SEQ ID NO: 93972 - protein, 163 aa, Homo sapiens
  Payload ID: 18754
  Gene Name: tumor protein D52-like 2
  Uniprot ID: O43399
  ENSP ID: ENSP00000358943
MDSAGQGVAARTPAVEGLTEAEEEELRAELTKVEEEIVTLRQVLAAKERHCGELKRRLGLSTLGELKQNLSRSWHDVQVSSAYKKTQETLSQAGQKTSAALSTVGSAISRKLGDMRNSATFKSFEDRVGTIKSKVVGDRENGSDNLPSSAGSGDKPLSDPAPF

SEQ ID NO: 93973 - protein, 222 aa, Homo sapiens
  Payload ID: 18754
  Gene Name: tumor protein D52-like 2
  ENSP ID: ENSP00000482024
MDSAGQDINLNSPNKGLLSDSMTDVPVDTGVAARTPAVEGLTEAEEEELRAELTKVEEEIVTLRQVLAAKERHCGELKRRLGLSTLGELKQNLSRSWHDVQVSSAYVKTSEKLGEWNEKVTQSDLYKKTQETLSQAGQKTSAALSTVGSAISRKLGDMSLRLWVTERTAVTTSLPQRGVVTSPCRIPHLSKPVVASPAAEHTQPSLSITAAALFSGAASQGG

SEQ ID NO: 93974 - protein, 152 aa, Homo sapiens
  Payload ID: 18754
  Gene Name: tumor protein D52-like 2
  ENSP ID: ENSP00000482370
MDSAGQDINLNSPNKGLLSDSMTDVPVDTGVAARTPAVEGLTEAEEEELRAELTKVEEEIVTLRQVLAAKERHCGELKRRLGLSTLGELKQNLSRSWHDVQVSSANSATFKSFEDRVGTIKSKVVGDRENGSDNLPSSAGSGDKPLSDPAPF

SEQ ID NO: 93975 - protein, 136 aa, Homo sapiens
  Payload ID: 18755
  Gene Name: tumor protein D52-like 3
  Uniprot ID: Q96J77
  ENSP ID: ENSP00000318665
MPHARTETSVGTYESHSTSELEDLTEPEQRELKTKLTKLEAEIVTLRHVLAAKERRCGELKRKLGLTALVGLRQNLSKSWLDVQVSNTYVKQKTSAALSTMGTLICRKLGGVKKSATFRSFEGLIFNKYTLNQGRN

SEQ ID NO: 93976 - protein, 140 aa, Homo sapiens
  Payload ID: 18755
  Gene Name: tumor protein D52-like 3
  Uniprot ID: Q96J77
  ENSP ID: ENSP00000341677
MPHARTETSVGTYESHSTSELEDLTEPEQRELKTKLTKLEAEIVTLRHVLAAKERRCGELKRKLGLTALVGLRQNLSKSWLDVQVSNTYVKQKTSAALSTMGTLICRKLGGVKKSATFRSFEGLMGTIKSKVSGGKRAWP

SEQ ID NO: 93977 - protein, 132 aa, Homo sapiens
  Payload ID: 18755
  Gene Name: tumor protein D52-like 3
  Uniprot ID: Q96J77
  ENSP ID: ENSP00000370836
MPHARTETSVGTYESHSTSELEDLTEPEQRELKTKLTKLEAEIVTLRHVLAAKERRCGELKRKLGLTALVGLRQNLSKSWLDVQVSNTYVKQKTSAALSTMGTLICRKLGGVKKSATFRSFEGNPKGEGSRI

SEQ ID NO: 93978 - protein, 393 aa, Homo sapiens [sequence omitted]

SEQ ID NO: 93979 - protein, 343 aa, Homo sapiens
  Payload ID: 18756
  Gene Name: tumor protein p53
  ENSP ID: ENSP00000352610
MEEPQSDPSVEPPLSQETFSDLWKLLPENNVLSPLPSQAMDDLMLSPDDIEQWFTEDPGPDEAPRMPEAAPPVAPAPAAPTPAAPAPAPSWPLSSSVPSQKTYQGSYGFRLGFLHSGTAKSVTCTYSPALNKMFCQLAKTCPVQLWVDSTPPPGTRVRAMAIYKQSQHMTEVVRRCPHHERCSDSDGLAPPQHLIRVEGNLRVEYLDDRNTFRHSVVVPYEPPEVGSDCTTIHYNYMCNSSCMGGMNRRPILTIITLEDSSGNLLGRNSFEVRVCACPGRDRRTEEENLRKKGEPHHELPPGSTKRALPNNTSSSPQPKKKPLDGEYFTLQKTFPARHGGSHL

SEQ ID NO: 93980 - protein, 341 aa, Homo sapiens
  Payload ID: 18756
  Gene Name: tumor protein p53
  Uniprot ID: P04637
  ENSP ID: ENSP00000391127
MEEPQSDPSVEPPLSQETFSDLWKLLPENNVLSPLPSQAMDDLMLSPDDIEQWFTEDPGPDEAPRMPEAAPPVAPAPAAPTPAAPAPAPSWPLSSSVPSQKTYQGSYGFRLGFLHSGTAKSVTCTYSPALNKMFCQLAKTCPVQLWVDSTPPPGTRVRAMAIYKQSQHMTEVVRRCPHHERCSDSDGLAPPQHLIRVEGNLRVEYLDDRNTFRHSVVVPYEPPEVGSDCTTIHYNYMCNSSCMGGMNRRPILTIITLEDSSGNLLGRNSFEVRVCACPGRDRRTEEENLRKKGEPHHELPPGSTKRALPNNTSSSPQPKKKPLDGEYFTLQDQTSFQKENC

SEQ ID NO: 93981 - protein, 393 aa, Homo sapiens [sequence omitted]

SEQ ID NO: 93982 - protein, 346 aa, Homo sapiens
  Payload ID: 18756
  Gene Name: tumor protein p53
  Uniprot ID: P04637
  ENSP ID: ENSP00000398846
MEEPQSDPSVEPPLSQETFSDLWKLLPENNVLSPLPSQAMDDLMLSPDDIEQWFTEDPGPDEAPRMPEAAPPVAPAPAAPTPAAPAPAPSWPLSSSVPSQKTYQGSYGFRLGFLHSGTAKSVTCTYSPALNKMFCQLAKTCPVQLWVDSTPPPGTRVRAMAIYKQSQHMTEVVRRCPHHERCSDSDGLAPPQHLIRVEGNLRVEYLDDRNTFRHSVVVPYEPPEVGSDCTTIHYNYMCNSSCMGGMNRRPILTIITLEDSSGNLLGRNSFEVRVCACPGRDRRTEEENLRKKGEPHHELPPGSTKRALPNNTSSSPQPKKKPLDGEYFTLQMLLDLRWCYFLINSS

SEQ ID NO: 93983 - protein, 285 aa, Homo sapiens
  Payload ID: 18756
  Gene Name: tumor protein p53
  ENSP ID: ENSP00000410739
MEEPQSDPSVEPPLSQETFSDLWKLLPENNVLSPLPSQAMDDLMLSPDDIEQWFTEDPGPDEAPRMPEAAPPVAPAPAAPTPAAPAPAPSWPLSSSVPSQKTYQGSYGFRLGFLHSGTAKSVTCTYSPALNKMFCQLAKTCPVQLWVDSTPPPGTRVRAMAIYKQSQHMTEVVRRCPHHERCSDSDGLAPPQHLIRVEGNLRVEYLDDRNTFRHSVVVPYEPPEVGSDCTTIHYNYMCNSSCMGGMNRRPILTIITLEDSRPRQVDHLRSGVQDSLANIAKSHLY

SEQ ID NO: 93984 - protein, 155 aa, Homo sapiens
  Payload ID: 18756
  Gene Name: tumor protein p53
  ENSP ID: ENSP00000423862
MEEPQSDPSVEPPLSQETFSDLWKLLPENNVLYSPALNKMFCQLAKTCPVQLWVDSTPPPGTRVRAMAIYKQSQHMTEVVRRCPHHERCSDSDGLAPPQHLIRVEGNLRVEYLDDRNTFRHSVVVPYEPPEVGSDCTTIHYNYMCNSSCMGGMNR

SEQ ID NO: 93985 - protein, 165 aa, Homo sapiens
  Payload ID: 18756
  Gene Name: tumor protein p53
  ENSP ID: ENSP00000424104
MEEPQSDPSVEPPLSQETFSDLWKLLPENNVLSPLPSQAMDDLMLSPDDIEQWFTEDPGPDEAPRMPEAAPPVAPAPAAPTPAAPAPAPSWPLSSSVPSQKTYQGSYGFRLGFLHSGTAKSVTCTYSPALNKMFCQLAKTCPVQLWVDSTPPPGTRVRAMAIYKQ

SEQ ID NO: 93986 - protein, 199 aa, Homo sapiens
  Payload ID: 18756
  Gene Name: tumor protein p53
  ENSP ID: ENSP00000425104
MFCQLAKTCPVQLWVDSTPPPGTRVRAMAIYKQSQHMTEVVRRCPHHERCSDSDGLAPPQHLIRVEGNLRVEYLDDRNTFRHSVVVPYEPPEVGSDCTTIHYNYMCNSSCMGGMNRRPILTIITLEDSSGNLLGRNSFEVRVCACPGRDRRTEEENLRKKGEPHHELPPGSTKRALPNNTSSSPQPKKKPLDGEYFTLQ

SEQ ID NO: 93987 - protein, 127 aa, Homo sapiens
  Payload ID: 18756
  Gene Name: tumor protein p53
  ENSP ID: ENSP00000426252
MEEPQSDPSVEPPLSQETFSDLWKLLPENNVLSPLPSQAMDDLMLSPDDIEQWFTEDPGPDEAPRMPEAAPPVAPAPAAPTPAAPAPAPSWPLSSSVPSQKTYQGSYGFRLGFLHSGTAKSVTCTYS

SEQ ID NO: 93988 - protein, 31 aa, Homo sapiens
  Payload ID: 18756
  Gene Name: tumor protein p53
  ENSP ID: ENSP00000458393
  MOD_RES (1)..(1): Any amino acid
XSPQPKKKPLDGEYFTLQPPEVQKGSVYLPP

SEQ ID NO: 93989 - protein, 143 aa, Homo sapiens
  Payload ID: 18756
  Gene Name: tumor protein p53
  ENSP ID: ENSP00000473895
MEEPQSDPSVEPPLSQETFSDLWKLLPENNVLSPLPSQAMDDLMLSPDDIEQWFTEDPGPDEAPRMPEAAPPVAPAPAAPTPAAPAPAPSWPLSSSVPSQKTYQGSYGFRLGFLHSGTAKSVTCTMFCQLAKTCPVQLWVDST

SEQ ID NO: 93990 - protein, 187 aa, Homo sapiens
  Payload ID: 18756
  Gene Name: tumor protein p53
  ENSP ID: ENSP00000477531
MAIYKQSQHMTEVVRRCPHHERCSDSDGLAPPQHLIRVEGNLRVEYLDDRNTFRHSVVVPYEPPEVGSDCTTIHYNYMCNSSCMGGMNRRPILTIITLEDSSGNLLGRNSFEVRVCACPGRDRRTEEENLRKKGEPHHELPPGSTKRALPNNTSSSPQPKKKPLDGEYFTLQMLLDLRWCYFLINSS

SEQ ID NO: 93991 - protein, 354 aa, Homo sapiens
  Payload ID: 18756
  Gene Name: tumor protein p53
  Uniprot ID: P04637
  ENSP ID: ENSP00000478219
MDDLMLSPDDIEQWFTEDPGPDEAPRMPEAAPPVAPAPAAPTPAAPAPAPSWPLSSSVPSQKTYQGSYGFRLGFLHSGTAKSVTCTYSPALNKMFCQLAKTCPVQLWVDSTPPPGTRVRAMAIYKQSQHMTEVVRRCPHHERCSDSDGLAPPQHLIRVEGNLRVEYLDDRNTFRHSVVVPYEPPEVGSDCTTIHYNYMCNSSCMGGMNRRPILTIITLEDSSGNLLGRNSFEVRVCACPGRDRRTEEENLRKKGEPHHELPPGSTKRALPNNTSSSPQPKKKPLDGEYFTLQIRGRERFEMFRELNEALELKDAQAGKEPGGSRAHSSHLKSKKGQSTSRHKKLMFKTEGPDSD

SEQ ID NO: 93992 - protein, 209 aa, Homo sapiens
  Payload ID: 18756
  Gene Name: tumor protein p53
  Uniprot ID: P04637
  ENSP ID: ENSP00000478499
MFCQLAKTCPVQLWVDSTPPPGTRVRAMAIYKQSQHMTEVVRRCPHHERCSDSDGLAPPQHLIRVEGNLRVEYLDDRNTFRHSVVVPYEPPEVGSDCTTIHYNYMCNSSCMGGMNRRPILTIITLEDSSGNLLGRNSFEVRVCACPGRDRRTEEENLRKKGEPHHELPPGSTKRALPNNTSSSPQPKKKPLDGEYFTLQDQTSFQKENC

SEQ ID NO: 93993 - protein, 307 aa, Homo sapiens
  Payload ID: 18756
  Gene Name: tumor protein p53
  Uniprot ID: P04637
  ENSP ID: ENSP00000480868
MDDLMLSPDDIEQWFTEDPGPDEAPRMPEAAPPVAPAPAAPTPAAPAPAPSWPLSSSVPSQKTYQGSYGFRLGFLHSGTAKSVTCTYSPALNKMFCQLAKTCPVQLWVDSTPPPGTRVRAMAIYKQSQHMTEVVRRCPHHERCSDSDGLAPPQHLIRVEGNLRVEYLDDRNTFRHSVVVPYEPPEVGSDCTTIHYNYMCNSSCMGGMNRRPILTIITLEDSSGNLLGRNSFEVRVCACPGRDRRTEEENLRKKGEPHHELPPGSTKRALPNNTSSSPQPKKKPLDGEYFTLQMLLDLRWCYFLINSS

SEQ ID NO: 93994 - protein, 261 aa, Homo sapiens
  Payload ID: 18756
  Gene Name: tumor protein p53
  Uniprot ID: P04637
  ENSP ID: ENSP00000481179
MFCQLAKTCPVQLWVDSTPPPGTRVRAMAIYKQSQHMTEVVRRCPHHERCSDSDGLAPPQHLIRVEGNLRVEYLDDRNTFRHSVVVPYEPPEVGSDCTTIHYNYMCNSSCMGGMNRRPILTIITLEDSSGNLLGRNSFEVRVCACPGRDRRTEEENLRKKGEPHHELPPGSTKRALPNNTSSSPQPKKKPLDGEYFTLQIRGRERFEMFRELNEALELKDAQAGKEPGGSRAHSSHLKSKKGQSTSRHKKLMFKTEGPDSD

SEQ ID NO: 93995 - protein, 182 aa, Homo sapiens
  Payload ID: 18756
  Gene Name: tumor protein p53
  ENSP ID: ENSP00000481401
MAIYKQSQHMTEVVRRCPHHERCSDSDGLAPPQHLIRVEGNLRVEYLDDRNTFRHSVVVPYEPPEVGSDCTTIHYNYMCNSSCMGGMNRRPILTIITLEDSSGNLLGRNSFEVRVCACPGRDRRTEEENLRKKGEPHHELPPGSTKRALPNNTSSSPQPKKKPLDGEYFTLQDQTSFQKENC

SEQ ID NO: 93996 - protein, 354 aa, Homo sapiens; identical to SEQ ID NO: 93991
  Payload ID: 18756
  Gene Name: tumor protein p53
  Uniprot ID: P04637
  ENSP ID: ENSP00000481638

SEQ ID NO: 93997 - protein, 302 aa, Homo sapiens
  Payload ID: 18756
  Gene Name: tumor protein p53
  Uniprot ID: P04637
  ENSP ID: ENSP00000482222
MDDLMLSPDDIEQWFTEDPGPDEAPRMPEAAPPVAPAPAAPTPAAPAPAPSWPLSSSVPSQKTYQGSYGFRLGFLHSGTAKSVTCTYSPALNKMFCQLAKTCPVQLWVDSTPPPGTRVRAMAIYKQSQHMTEVVRRCPHHERCSDSDGLAPPQHLIRVEGNLRVEYLDDRNTFRHSVVVPYEPPEVGSDCTTIHYNYMCNSSCMGGMNRRPILTIITLEDSSGNLLGRNSFEVRVCACPGRDRRTEEENLRKKGEPHHELPPGSTKRALPNNTSSSPQPKKKPLDGEYFTLQDQTSFQKENC

SEQ ID NO: 93998 - protein, 341 aa, Homo sapiens; identical to SEQ ID NO: 93980
  Payload ID: 18756
  Gene Name: tumor protein p53
  Uniprot ID: P04637
  ENSP ID: ENSP00000482258

SEQ ID NO: 93999 - protein, 354 aa, Homo sapiens; identical to SEQ ID NO: 93991
  Payload ID: 18756
  Gene Name: tumor protein p53
  Uniprot ID: P04637
  ENSP ID: ENSP00000482537

SEQ ID NO: 94000 - protein, 382 aa, Homo sapiens
  Payload ID: 18756
  Gene Name: tumor protein p53
  ENSP ID: ENSP00000482903
MEEPQSDPSVEPPLSQETFSDLWKLLPENNVLSPLPSQAMDDLMLSPDDIEQWFTEDPGPDEAPRMPEAAPPVAPAPAAPTPAAPAPAPSWPLSSSVPSQKTYQGSYGFRLSCKYSPALNKMFCQLAKTCPVQLWVDSTPPPGTRVRAMAIYKQSQHMTEVVRRCPHHERCSDSDGLAPPQHLIRVEGNLRVEYLDDRNTFRHSVVVPYEPPEVGSDCTTIHYNYMCNSSCMGGMNRRPILTIITLEDSSGNLLGRNSFEVRVCACPGRDRRTEEENLRKKGEPHHELPPGSTKRALPNNTSSSPQPKKKPLDGEYFTLQIRGRERFEMFRELNEALELKDAQAGKEPGGSRAHSSHLKSKKGQSTSRHKKLMFKTEGPDSD

SEQ ID NO: 94001 - protein, 234 aa, Homo sapiens
  Payload ID: 18756
  Gene Name: tumor protein p53
  ENSP ID: ENSP00000484375
MAIYKQSQHMTEVVRRCPHHERCSDSDGLAPPQHLIRVEGNLRVEYLDDRNTFRHSVVVPYEPPEVGSDCTTIHYNYMCNSSCMGGMNRRPILTIITLEDSSGNLLGRNSFEVRVCACPGRDRRTEEENLRKKGEPHHELPPGSTKRALPNNTSSSPQPKKKPLDGEYFTLQIRGRERFEMFRELNEALELKDAQAGKEPGGSRAHSSHLKSKKGQSTSRHKKLMFKTEGPDSD

SEQ ID NO: 94002 - protein, 214 aa, Homo sapiens
  Payload ID: 18756
  Gene Name: tumor protein p53
  Uniprot ID: P04637
  ENSP ID: ENSP00000484409
MFCQLAKTCPVQLWVDSTPPPGTRVRAMAIYKQSQHMTEVVRRCPHHERCSDSDGLAPPQHLIRVEGNLRVEYLDDRNTFRHSVVVPYEPPEVGSDCTTIHYNYMCNSSCMGGMNRRPILTIITLEDSSGNLLGRNSFEVRVCACPGRDRRTEEENLRKKGEPHHELPPGSTKRALPNNTSSSPQPKKKPLDGEYFTLQMLLDLRWCYFLINSS

SEQ ID NO: 94003 - protein, 410 aa, Homo sapiens
  Payload ID: 18756
  Gene Name: tumor protein p53
  ENSP ID: ENSP00000488924
MDDLMLSPDDIEQWFTEDPGPDEAPRMPEAAPPVAPAPAAPTPAAPAPAPSWPLSSSVPSQKTYQGSYGFRLGFLHSGTAKSVTCTYSPALNKMFCQLAKTCPVQLWVDSTPPPGTRVRAMAIYKQSQHMTEVVRRCPHHERCSDSDGLAPPQHLIRVEGNLRVEYLDDRNTFRHSVVVPYEPPEVGSDCTTIHYNYMCNSSCMGGMNRRPILTIITLEDSSGNLLGRNSFEVRVCACPGRDRRTEEENLRKKGEPHHELPPGSTKRALPNNTSSSPQPKKKPLDGEYFTLQIRGRERFEMFRELNEALELKDAQAGKEPGGSRAHSRECQTLSPGDPDPPLSETFNLNICPYPAGKLELLKLSPCPCLCRQVTLMSFLFFFLIFFYFRLYWGIIDPPKLHTFKVCSVMI

SEQ ID NO: 94004 - protein, 1972 aa, Homo sapiens
  Payload ID: 18757
  Gene Name: tumor protein p53 binding protein 1
  Uniprot ID: Q12888
  ENSP ID: ENSP00000263801
MDPTGSQLDSDFSQQDTPCLIIEDSQPESQVLEDDSGSHFSMLSRHLPNLQTHKENPVLDVVSNPEQTAGEERGDGNSGFNEHLKENKVADPVDSSNLDTCGSISQVIEQLPQPNRTSSVLGMSVESAPAVEEEKGEELEQKEKEKEEDTSGNTTHSLGAEDTASSQLGFGVLELSQSQDVEENTVPYEVDKEQLQSVTTNSGYTRLSDVDANTAIKHEEQSNEDIPIAEQSSKDIPVTAQPSKDVHVVKEQNPPPARSEDMPFSPKASVAAMEAKEQLSAQELMESGLQIQKSPEPEVLSTQEDLFDQSNKTVSSDGCSTPSREEGGCSLASTPATTLHLLQLSGQRSLVQDSLSTNSSDLVAPSPDAFRSTPFIVPSSPTEQEGRQDKPMDTSVLSEEGGEPFQKKLQSGEPVELENPPLLPESTVSPQASTPISQSTPVFPPGSLPIPSQPQFSHDIFIPSPSLEEQSNDGKKDGDMHSSSLTVECSKTSEIEPKNSPEDLGLSLTGDSCKLMLSTSEYSQSPKMESLSSHRIDEDGENTQIEDTEPMSPVLNSKFVPAENDSILMNPAQDGEVQLSQNDDKTKGDDTDTRDDISILATGCKGREETVAEDVCIDLTCDSGSQAVPSPATRSEALSSVLDQEEAMEIKEHHPEEGSSGSEVEEIPETPCESQGEELKEENMESVPLHLSLTETQSQGLCLQKEMPKKECSEAMEVETSVISIDSPQKLAILDQELEHKEQEAWEEATSEDSSVVIVDVKEPSPRVDVSCEPLEGVEKCSDSQSWEDIAPEIEPCAENRLDTKEEKSVEYEGDLKSGTAETEPVEQDSSQPSLPLVRADDPLRLDQELQQPQTQEKTSNSLTEDSKMANAKQLSSDAEAQKLGKPSAHASQSFCESSSETPFHFTLPKEGDIIPPLTGATPPLIGHLKLEPKRHSTPIGISNYPESTIATSDVMSESMVETHDPILGSGKGDSGAAPDVDDKLCLRMKLVSPETEASEESLQFNLEKPATGERKNGSTAVAESVASPQKTMSVLSCICEARQENEARSEDPPTTPIRGNLLHFPSSQGEEEKEKLEGDHTIRQSQQPMKPISPVKDPVSPASQKMVIQGPSSPQGEAMVTDVLEDQKEGRSTNKENPSKALIERPSQNNIGIQTMECSLRVPETVSAATQTIKNVCEQGTSTVDQNFGKQDATVQTERGSGEKPVSAPGDDTESLHSQGEEEFDMPQPPHGHVLHRHMRTIREVRTLVTRVITDVYYVDGTEVERKVTEETEEPIVECQECETEVSPSQTGGSSGDLGDISSFSSKASSLHRTSSGTSLSAMHSSGSSGKGAGPLRGKTSGTEPADFALPSSRGGPGKLSPRKGVSQTGTPVCEEDGDAGLGIRQGGKAPVTPRGRGRRGRPPSRTTGTRETAVPGPLGIEDISPNLSPDDKSFSRVVPRVPDSTRRTDVGAGALRRSDSPEIPFQAAAGPSDGLDASSPGNSFVGLRVVAKWSSNGYFYSGKITRDVGAGKYKLLFDDGYECDVLGKDILLCDPIPLDTEVTALSEDEYFSAGVVKGHRKESGELYYSIEKEGQRKWYKRMAVILSLEQGNRLREQYGLGPYEAVTPLTKAADISLDNLVEGKRKRRSNVSSPATPTASSSSSTTPTRKITESPRASMGVLSGKRKLITSEEERSPAKRGRKSATVKPGAVGAGEFVSPCESGDNTGEPSALEEQRGPLPLNKTLFLGYAFLLTMATTSDKLASRSKLPDGPTGSSEEEEEFLEIPPFNKQYTESQLRAGAGYILEDFNEAQCNTAYQCLLIADQHCRTRKYFLCLASGIPCVSHVWVHDSCHANQLQNYRNYLLPAGYSLEEQRILDWQPRENPFQNLKVLLVSDQQQNFLELWSEILMTGGAASVKQHHSSAHNKDIALGVFDVVVTDPSCPASVLKCAEALQLPVVSQEWVIQCLIVGERIGFKQHPKYKHDYVSH

SEQ ID NO: 94005 - protein, 1927 aa, Homo sapiens
  Payload ID: 18757
  Gene Name: tumor protein p53 binding protein 1
  ENSP ID: ENSP00000371470
MPGEQMDPTGSQLDSDFSQQDTPCLIIEDSQPESQVLEDDSGSHFSMLSRHLPNLQTHKENPVLDVVSNPEQTAGEERGDGNSGFNEHLKENKVADPVDSSNLDTCGSISQVIEQLPQPNRTSSVLGMSVESAPAVEEEKGEELEQKEKEKEEDTSGNTTHSLGAEDTASSQLGFGVLELSQSQDVEENTVPYEVDKEQLQSVTTNSGYTRLSDVDANTAIKHEEQSNEDIPIAEQSSKDIPVTAQPSKDVHVVKEQNPPPARSEDMPFSPKASVAAMEAKEQLSAQELMESGLQIQKSPEPEVLSTQEDLFDQSNKTVSSDGCSTPSREEGGCSLASTPATTLHLLQLSGQRSLVQDSLSTNSSDLVAPSPDAFRSTPFIVPSSPTEQEGRQDKPMDTSVLSEEGGEPFQKKLQSGEPVELENPPLLPESTVSPQASTPISQSTPVFPPGSLPIPSQPQFSHDIFIPSPSLEEQSNDGKKDGDMHSSSLTVECSKTSEIEPKNSPEDLGLSLTGDSCKLMLSTSEYSQSPKMESLSSHRIDEDGENTQIEDTEPMSPVLNSKFVPAENDSILMNPAQDGEVQLSQNDDKTKGDDTDTRDDISILATGCKGREETVAEDVCIDLTCDSGSQAVPSPATRSEALSSVLDQEEAMEIKEHHPEEGSSGSEVEEIPETPCESQGEELKEENMESVPLHLSLTETQSQGLCLQKEMPKKECSEAMEVETSVISIDSPQKLAILDQELEHKEQEAWEEATSEDSSVVIVDVKEPSPRVDVSCEPLEGVEKCSDSQSWEDIAPEIEPCAENRLDTKEEKSVEYEGDLKSGTAETEPVEQDSSQPSLPLVRADDPLRLDQELQQPQTQEKTSNSLTEDSKMANAKQLSSDAEAQKLGKPSAHASQSFCESSSETPFHFTLPKEGDIIPPLTGATPPLIGHLKLEPKRHSTPIGISNYPESTIATSDVMSESMVETHDPILGSGKGDSGAAPDVDDKLCLRMKLVSPETEASEESLQFNLEKPATGERKNGSTAVAESVASPQKTMSVLSCICEARQENEARSEDPPTTPIRGNLLHFPSSQGEEEKEKLEGDHTIRQSQQPMKPISPVKDPVSPASQKMVIQGPSSPQGEAMVTDVLEDQKEGRSTNKENPSKALIERPSQNNIGIQTMECSLRVPETVSAATQTIKNVCEQGTSTVDQNFGKQDATVQTERGSGEKPVSAPGDDTESLHSQGEEEFDMPQPPHGHVLHRHMRTIREVRTLVTRVITDVYYVDGTEVERKVTEETEEPIVECQECETEVSPSQTGGSSGDLGDISSFSSKASSLHRTSSGTSLSAMHSSGSSGKGAGPLRGKTSGTEPADFALPSSRGGPGKLRETAVPGPLGIEDISPNLSPDDKSFSRVVPRVPDSTRRTDVGAGALRRSDSPEIPFQAAAGPSDGLDASSPGNSFVGLRVVAKWSSNGYFYSGKITRDVGAGKYKLLFDDGYECDVLGKDILLCDPIPLDTEVTALSEDEYFSAGVVKGHRKESGELYYSIEKEGQRKWYKRMAVILSLEQGNRLREQYGLGPYEAVTPLTKAADISLDNLVEGKRKRRSNVSSPATPTASSSSSTTPTRKITESPRASMGVLSGKRKLITSEEERSPAKRGRKSATVKPGAVGAGEFVSPCESGDNTGEPSALEEQRGPLPLNKTLFLGYAFLLTMATTSDKLASRSKLPDGPTGSSEEEEEFLEIPPFNKQYTESQLRAGAGYILEDFNEAQCNTAYQCLLIADQHCRTRKYFLCLASGIPCVSHVWVHDSCHANQLQNYRNYLLPAGYSLEEQRILDWQPRENPFQNLKVLLVSDQQQNFLELWSEILMTGGAASVKQHHSSAHNKDIALGVFDVVVTDPSCPASVLKCAEALQLPVVSQEWVIQCLIVGERIGFKQHPKYKHDYVSH

SEQ ID NO: 94006 - protein, 1977 aa, Homo sapiens
  Payload ID: 18757
  Gene Name: tumor protein p53 binding protein 1
  Uniprot ID: Q12888
  ENSP ID: ENSP00000371475
MPGEQMDPTGSQLDSDFSQQDTPCLIIEDSQPESQVLEDDSGSHFSMLSRHLPNLQTHKENPVLDVVSNPEQTAGEERGDGNSGFNEHLKENKVADPVDSSNLDTCGSISQVIEQLPQPNRTSSVLGMSVESAPAVEEEKGEELEQKEKEKEEDTSGNTTHSLGAEDTASSQLGFGVLELSQSQDVEENTVPYEVDKEQLQSVTTNSGYTRLSDVDANTAIKHEEQSNEDIPIAEQSSKDIPVTAQPSKDVHVVKEQNPPPARSEDMPFSPKASVAAMEAKEQLSAQELMESGLQIQKSPEPEVLSTQEDLFDQSNKTVSSDGCSTPSREEGGCSLASTPATTLHLLQLSGQRSLVQDSLSTNSSDLVAPSPDAFRSTPFIVPSSPTEQEGRQDKPMDTSVLSEEGGEPFQKKLQSGEPVELENPPLLPESTVSPQASTPISQSTPVFPPGSLPIPSQPQFSHDIFIPSPSLEEQSNDGKKDGDMHSSSLTVECSKTSEIEPKNSPEDLGLSLTGDSCKLMLSTSEYSQSPKMESLSSHRIDEDGENTQIEDTEPMSPVLNSKFVPAENDSILMNPAQDGEVQLSQNDDKTKGDDTDTRDDISILATGCKGREETVAEDVCIDLTCDSGSQAVPSPATRSEALSSVLDQEEAMEIKEHHPEEGSSGSEVEEIPETPCESQGEELKEENMESVPLHLSLTETQSQGLCLQKEMPKKECSEAMEVETSVISIDSPQKLAILDQELEHKEQEAWEEATSEDSSVVIVDVKEPSPRVDVSCEPLEGVEKCSDSQSWEDIAPEIEPCAENRLDTKEEKSVEYEGDLKSGTAETEPVEQDSSQPSLPLVRADDPLRLDQELQQPQTQEKTSNSLTEDSKMANAKQLSSDAEAQKLGKPSAHASQSFCESSSETPFHFTLPKEGDIIPPLTGATPPLIGHLKLEPKRHSTPIGISNYPESTIATSDVMSESMVETHDPILGSGKGDSGAAPDVDDKLCLRMKLVSPETEASEESLQFNLEKPATGERKNGSTAVAESVASPQKTMSVLSCICEARQENEARSEDPPTTPIRGNLLHFPSSQGEEEKEKLEGDHTIRQSQQPMKPISPVKDPVSPASQKMVIQGPSSPQGEAMVTDVLEDQKEGRSTNKENPSKALIERPSQNNIGIQTMECSLRVPETVSAATQTIKNVCEQGTSTVDQNFGKQDATVQTERGSGEKPVSAPGDDTESLHSQGEEEFDMPQPPHGHVLHRHMRTIREVRTLVTRVITDVYYVDGTEVERKVTEETEEPIVECQECETEVSPSQTGGSSGDLGDISSFSSKASSLHRTSSGTSLSAMHSSGSSGKGAGPLRGKTSGTEPADFALPSSRGGPGKLSPRKGVSQTGTPVCEEDGDAGLGIRQGGKAPVTPRGRGRRGRPPSRTTGTRETAVPGPLGIEDISPNLSPDDKSFSRVVPRVPDSTRRTDVGAGALRRSDSPEIPFQAAAGPSDGLDASSPGNSFVGLRVVAKWSSNGYFYSGKITRDVGAGKYKLLFDDGYECDVLGKDILLCDPIPLDTEVTALSEDEYFSAGVVKGHRKESGELYYSIEKEGQRKWYKRMAVILSLEQGNRLREQYGLGPYEAVTPLTKAADISLDNLVEGKRKRRSNVSSPATPTASSSSSTTPTRKITESPRASMGVLSGKRKLITSEEERSPAKRGRKSATVKPGAVGAGEFVSPCESGDNTGEPSALEEQRGPLPLNKTLFLGYAFLLTMATTSDKLASRSKLPDGPTGSSEEEEEFLEIPPFNKQYTESQLRAGAGYILEDFNEAQCNTAYQCLLIADQHCRTRKYFLCLASGIPCVSHVWVHDSCHANQLQNYRNYLLPAGYSLEEQRILDWQPRENPFQNLKVLLVSDQQQNFLELWSEILMTGGAASVKQHHSSAHNKDIALGVFDVVVTDPSCPASVLKCAEALQLPVVSQEWVIQCLIVGERIGFKQHPKYKHDYVSH

SEQ ID NO: 94007 - protein, 1033 aa, Homo sapiens
  Payload ID: 18757
  Gene Name: tumor protein p53 binding protein 1
  ENSP ID: ENSP00000388028
MPGEQMDPTGSQLDSDFSQQDTPCLIIEDSQPESQVLEDDSGSHFSMLSRHLPNLQTHKENPVLDVVSNPEQTAGEERGDGNSGFNEHLKENKVADPVDSSNLDTCGSISQVIEQLPQPNRTSSVLGMSVESAPAVEEEKGEELEQKEKEKEEDTSGNTTHSLGAEDTASSQLGFGVLELSQSQDVEENTVPYEVDKEQLQSVTTNSGYTRLSDVDANTAIKHEEQSNEDIPIAEQSSKDIPVTAQPSKDVHVVKEQNPPPARSEDMPFSPKASVAAMEAKEQLSAQELMESGLQIQKSPEPEVLSTQEDLFDQSNKTVSSDGCSTPSREEGGCSLASTPATTLHLLQLSGQRSLVQDSLSTNSSDLVAPSPDAFRSTPFIVPSSPTEQEGRQDKPMDTSVLSEEGGEPFQKKLQSGEPVELENPPLLPESTVSPQASTPISQSTPVFPPGSLPIPSQPQFSHDIFIPSPSLEEQSNDGKKDGDMHSSSLTVECSKTSEIEPKNSPEDLGLSLTGDSCKLMLSTSEYSQSPKMESLSSHRIDEDGENTQIEDTEPMSPVLNSKFVPAENDSILMNPAQDGEVQLSQNDDKTKGDDTDTRDDISILATGCKGREETVAEDVCIDLTCDSGSQAVPSPATRSEALSSVLDQEEAMEIKEHHPEEGSSGSEVEEIPETPCESQGEELKEENMESVPLHLSLTETQSQGLCLQKEMPKKECSEAMEVETSVISIDSPQKLAILDQELEHKEQEAWEEATSEDSSVVIVDVKEPSPRVDVSCEPLEGVEKCSDSQSWEDIAPEIEPCAENRLDTKEEKSVEYEGDLKSGTAETEPVEQDSSQPSLPLVRADDPLRLDQELQQPQTQEKTSNSLTEDSKMANAKQLSSDAEAQKLGKPSAHASQSFCESSSGISNYPESTIATSDVMSESMVETHDPILGSGKGDSGAAPDVDDKLCLRMKLVSPETEASEESLQFNLEKPATGERKNGSTAVAESVASPQKTMSVLSCICEARQENEARSEDPPTTPIRGNLLHFPSS

SEQ ID NO: 94008 - protein, 163 aa, Homo sapiens
  Payload ID: 18757
  Gene Name: tumor protein p53 binding protein 1
  ENSP ID: ENSP00000392048
LLCDPIPLDTEVTALSEDEYFSAGVVKGHRKESGELYYSIEKEGQRKWYKRMAVILSLEQGNRLREQYGLGPYEAVTPLTKAADISLDNLVEGKRKRRSNVSSPATPTASSSSSTTPTRKITESPRASMGVLSGKRKLITSEEERSPAKRGRKSATVKPGRHA

SEQ ID NO: 94009 - protein, 1975 aa, Homo sapiens
  Payload ID: 18757
  Gene Name: tumor protein p53 binding protein 1
  Uniprot ID: Q12888
  ENSP ID: ENSP00000393497
MPGEQMDPTGSQLDSDFSQQDTPCLIIEDSQPESQVLEDDSGSHFSMLSRHLPNLQTHKENPVLDVVSNPEQTAGEERGDGNSGFNEHLKENKVADPVDSSNLDTCGSISQVIEQLPQPNRTSSVLGMSVESAPAVEEEKGEELEQKEKEKEEDTSGNTTHSLGAEDTASSQLGFGVLELSQSQDVEENTVPYEVDKEQLQSVTTNSGYTRLSDVDANTAIKHEEQSNEDIPIAEQSSKDIPVTAQPSKDVHVVKEQNPPPARSEDMPFSPKASVAAMEAKEQLSAQELMESGLQIQKSPEPEVLSTQEDLFDQSNKTVSSDGCSTPSREEGGCSLASTPATTLHLLQLSGQRSLVQDSLSTNSSDLVAPSPDAFRSTPFIVPSSPTEQEGRQDKPMDTSVLSEEGGEPFQKKLQSGEPVELENPPLLPESTVSPQASTPISQSTPVFPPGSLPIPSQPQFSHDIFIPSPSLEEQSNDGKKDGDMHSSSLTVECSKTSEIEPKNSPEDLGLSLTGDSCKLMLSTSEYSQSPKMESLSSHRIDEDGENTQIEDTEPMSPVLNSKFVPAENDSILMNPAQDGEVQLSQNDDKTKGDDTDTRDDISILATGCKGREETVAEDVCIDLTCDSGSQAVPSPATRSEALSSVLDQEEAMEIKEHHPEEGSSGSEVEEIPETPCESQGEELKEENMESVPLHLSLTETQSQGLCLQKEMPKKECSEAMEVETSVISIDSPQKLAILDQELEHKEQEAWEEATSEDSSVVIVDVKEPSPRVDVSCEPLEGVEKCSDSQSWEDIAPEIEPCAENRLDTKEEKSVEYEGDLKSGTAETEPVEQDSSQPSLPLVRADDPLRLDQELQQPQTQEKTSNSLTEDSKMANAKQLSSDAEAQKLGKPSAHASQSFCESSSETPFHFTLPKEGDIIPPLTGATPPLIGHLKLEPKRHSTPIGISNYPESTIATSDVMSESMVETHDPILGSGKGDSGAAPDVDDKLCLRMKLVSPETEASEESLQFNLEKPATGERKNGSTAVAESVASPQKTMSVLSCICEARQENEARSEDPPTTPIRGNLLHFPSSQGEEEKEKLEGDHTIRQSQQPMKPISPVKDPVSPASQKMVIQGPSSPQGEAMVTDVLEDQKEGRSTNKENPSKALIERPSQNNIGIQTMECSLRVPETVSAATQTIKNVCEQGTSTVDQNFGKQDATVQTERGSGEKPVSAPGDDTESLHSQGEEEFDMPQPPHGHVLHRHMRTIREVRTLVTRVITDVYYVDGTEVERKVTEETEEPIVECQECETEVSPSQTGGSSGDLGDISSFSSKASSLHRTSSGTSLSAMHSSGSSGKGAGPLRGKTSGTEPADFALPSSRGGPGKLSPRKGVSQTGTPVCEEDGDAGLGIRQGGKAPVTPRGRGRRGRPPSRTTGTRETAVPGPLGIEDISPNLSPDDKSFSRVVPRVPDSTRRTDVGAGALRRSDSPEIPFQAAAGPSDGLDASSPGNSFVGLRVVAKWSSNGYFYSGKITRDVGAGKYKLLFDDGYECDVLGKDILLCDPIPLDTEVTALSEDEYFSAGVVKGHRKESGELYYSIEKEGQRKWYKRMAVILSLEQGNRLREQYGLGPYEAVTPLTKAADISLDNLVEGKRKRRSNVSSPATPTASSSSSTTPTRKITESPRASMGVLSGKRKLITSEEERSPAKRGRKSATVKPVGAGEFVSPCESGDNTGEPSALEEQRGPLPLNKTLFLGYAFLLTMATTSDKLASRSKLPDGPTGSSEEEEEFLEIPPFNKQYTESQLRAGAGYILEDFNEAQCNTAYQCLLIADQHCRTRKYFLCLASGIPCVSHVWVHDSCHANQLQNYRNYLLPAGYSLEEQRILDWQPRENPFQNLKVLLVSDQQQNFLELWSEILMTGGAASVKQHHSSAHNKDIALGVFDVVVTDPSCPASVLKCAEALQLPVVSQEWVIQCLIVGERIGFKQHPKYKHDYVSH

SEQ ID NO: 94010 - protein, 48 aa, Homo sapiens
  Payload ID: 18757
  Gene Name: tumor protein p53 binding protein 1
  ENSP ID: ENSP00000398508
  MOD_RES (1)..(1): Any amino acid
XTMSVLSCICEARQENEARSEDPPTTPIREKKSLICLSLHMAMSYIVT

SEQ ID NO: 94011 - protein, 192 aa, Homo sapiens
  Payload ID: 18757
  Gene Name: tumor protein p53 binding protein 1
  ENSP ID: ENSP00000413010
  MOD_RES (1)..(1): Any amino acid
XSVVIVDVKEPSPRVDVSCEPLEGVEKCSDSQSWEDIAPEIEPCAENRLDTKEEKSVEYEGDLKSGTAETEPVEQDSSQPSLPLVRADDPLRLDQELQQPQTQEKTSNSLTEDSKMANAKQLSSDAEAQKLGKPSAHASQSFCESSSETPFHFTLPKEGDIIPPLTGATPPLIGHLKLEPKRHSTPIVSAGR

SEQ ID NO: 94012 - protein, 149 aa, Homo sapiens
  Payload ID: 18757
  Gene Name: tumor protein p53 binding protein 1
  ENSP ID: ENSP00000416212
  MOD_RES (1)..(1): Any amino acid
XTGEPSALEEQRGPLPLNKTLFLGYAFLLTMATTSDKLASRSKLPDGPTGSSEEEEAYCNHPSQSGLNALPSSPFAFYGHLLEQTHVEEFLEIPPFNKQYTESQLRAGAGYILEDFNEAQCNTAYQCLLIADQHCRTRKYFLCLASGIP

SEQ ID NO: 94013 - protein, 144 aa, Homo sapiens
  Payload ID: 18757
  Gene Name: tumor protein p53 binding protein 1
  ENSP ID: ENSP00000471624
  MOD_RES (1)..(1): Any amino acid
XHMRTIREVRTLVTRVITDVYYVDGTEVERKVTEETEEPIVECQECETEVSPSQTGGSSGDLGDISSFSSKASSLHRTSSGTSLSAMHSSGSSGKGAGPLRGKTSGTEPADFALPSSRGGPGKLRCRQGLQRERATAGAGLLTF

SEQ ID NO: 94014 - protein, 1134 aa, Homo sapiens
  Payload ID: 18758
  Gene Name: tumor protein p53 binding protein 2
  Uniprot ID: Q13625
  ENSP ID: ENSP00000341957
MRFGSKMMPMFLTVYLSNNEQHFTEVPVTPETICRDVVDLCKEPGESDCHLAEVWCGSERPVADNERMFDVLQRFGSQRNEVRFFLRHERPPGRDIVSGPRSQDPSLKRNGVKVPGEYRRKENGVNSPRMDLTLAELQEMASRQQQQIEAQQQLLATKEQRLKFLKQQDQRQQQQVAEQEKLKRLKEIAENQEAKLKKVRALKGHVEQKRLSNGKLVEEIEQMNNLFQQKQRELVLAVSKVEELTRQLEMLKNGRIDSHHDNQSAVAELDRLYKELQLRNKLNQEQNAKLQQQRECLNKRNSEVAVMDKRVNELRDRLWKKKAALQQKENLPVSSDGNLPQQAASAPSRVAAVGPYIQSSTMPRMPSRPELLVKPALPDGSLVIQASEGPMKIQTLPNMRSGAASQTKGSKIHPVGPDWSPSNADLFPSQGSASVPQSTGNALDQVDDGEVPLREKEKKVRPFSMFDAVDQSNAPPSFGTLRKNQSSEDILRDAQVANKNVAKVPPPVPTKPKQINLPYFGQTNQPPSDIKPDGSSQQLSTVVPSMGTKPKPAGQQPRVLLSPSIPSVGQDQTLSPGSKQESPPAAAVRPFTPQPSKDTLLPPFRKPQTVAASSIYSMYTQQQAPGKNFQQAVQSALTKTHTRGPHFSSVYGKPVIAAAQNQQQHPENIYSNSQGKPGSPEPETEPVSSVQENHENERIPRPLSPTKLLPFLSNPYRNQSDADLEALRKKLSNAPRPLKKRSSITEPEGPNGPNIQKLLYQRTTIAAMETISVPSYPSKSASVTASSESPVEIQNPYLHVEPEKEVVSLVPESLSPEDVGNASTENSDMPAPSPGLDYEPEGVPDNSPNLQNNPEEPNPEAPHVLDVYLEEYPPYPPPPYPSGEPEGPGEDSVSMRPPEITGQVSLPPGKRTNLRKTGSERIAHGMRVKFNPLALLLDSSLEGEFDLVQRIIYEVDDPSLPNDEGITALHNAVCAGHTEIVKFLVQFGVNVNAADSDGWTPLHCAASCNNVQVCKFLVESGAAVFAMTYSDMQTAADKCEEMEEGYTQCSQFLYGVQEKMGIMNKGVIYALWDYEPQNDDELPMKEGDCMTIIHREDEDEIEWWWARLNDKEGYVPRNLLGLYPRIKPRQRSLA

SEQ ID NO: 94015 - protein, 1005 aa, Homo sapiens
  Payload ID: 18758
  Gene Name: tumor protein p53 binding protein 2
  Uniprot ID: Q13625
  ENSP ID: ENSP00000375750
MDLTLAELQEMASRQQQQIEAQQQLLATKEQRLKFLKQQDQRQQQQVAEQEKLKRLKEIAENQEAKLKKVRALKGHVEQKRLSNGKLVEEIEQMNNLFQQKQRELVLAVSKVEELTRQLEMLKNGRIDSHHDNQSAVAELDRLYKELQLRNKLNQEQNAKLQQQRECLNKRNSEVAVMDKRVNELRDRLWKKKAALQQKENLPVSSDGNLPQQAASAPSRVAAVGPYIQSSTMPRMPSRPELLVKPALPDGSLVIQASEGPMKIQTLPNMRSGAASQTKGSKIHPVGPDWSPSNADLFPSQGSASVPQSTGNALDQVDDGEVPLREKEKKVRPFSMFDAVDQSNAPPSFGTLRKNQSSEDILRDAQVANKNVAKVPPPVPTKPKQINLPYFGQTNQPPSDIKPDGSSQQLSTVVPSMGTKPKPAGQQPRVLLSPSIPSVGQDQTLSPGSKQESPPAAAVRPFTPQPSKDTLLPPFRKPQTVAASSIYSMYTQQQAPGKNFQQAVQSALTKTHTRGPHFSSVYGKPVIAAAQNQQQHPENIYSNSQGKPGSPEPETEPVSSVQENHENERIPRPLSPTKLLPFLSNPYRNQSDADLEALRKKLSNAPRPLKKRSSITEPEGPNGPNIQKLLYQRTTIAAMETISVPSYPSKSASVTASSESPVEIQNPYLHVEPEKEVVSLVPESLSPEDVGNASTENSDMPAPSPGLDYEPEGVPDNSPNLQNNPEEPNPEAPHVLDVYLEEYPPYPPPPYPSGEPEGPGEDSVSMRPPEITGQVSLPPGKRTNLRKTGSERIAHGMRVKFNPLALLLDSSLEGEFDLVQRIIYEVDDPSLPNDEGITALHNAVCAGHTEIVKFLVQFGVNVNAADSDGWTPLHCAASCNNVQVCKFLVESGAAVFAMTYSDMQTAADKCEEMEEGYTQCSQFLYGVQEKMGIMNKGVIYALWDYEPQNDDELPMKEGDCMTIIHREDEDEIEWWWARLNDKEGYVPRNLLGLYPRIKPRQRSLA

SEQ ID NO: 94016 - protein, 64 aa, Homo sapiens
  Payload ID: 18758
  Gene Name: tumor protein p53 binding protein 2
  ENSP ID: ENSP00000417174
  MOD_RES (1)..(1): Any amino acid
XSTGNALDQVDDGEVPLREKEKKVRPFSMFDAVDQSNAPPSFGTLRKNQSSEDILRDAQYMVSL

SEQ ID NO: 94017 - protein, 64 aa, Homo sapiens; identical to SEQ ID NO: 94016
  Payload ID: 18758
  Gene Name: tumor protein p53 binding protein 2
  ENSP ID: ENSP00000417987
  MOD_RES (1)..(1): Any amino acid

SEQ ID NO: 94018 - protein, 47 aa, Homo sapiens
  Payload ID: 18758
  Gene Name: tumor protein p53 binding protein 2
  ENSP ID: ENSP00000418252
MRFGSKMMPNVQLRIMSECLMFFNDLEVRGTKFASSFVMNAPLAGTL

SEQ ID NO: 94019 - protein, 234 aa, Homo sapiens
  Payload ID: 18758
  Gene Name: tumor protein p53 binding protein 2
  ENSP ID: ENSP00000420225
  MOD_RES (1)..(1): Any amino acid
XMFDVLQRFGSQRNEVRFFLRHERPPGRDIVSGPRSQDPSLKRNGVKVPGEYRRKENGVNSPRMDLTLAELQEMASRQQQQIEAQQQLLATKEQRLKFLKQQDQRQQQQVAEQEKLKRLKEIAENQEAKLKKVRALKGHVVSLVPESLSPEDVGNASTENSDMPAPSPGLDYEPEGVPDNSPNLQNNPEEPNPEAPHVLDVYLEEYPPYPPPPYPSGEPEGPGEDSVSMRPPEI

SEQ ID NO: 94020 - protein, 240 aa, Homo sapiens
  Payload ID: 18759
  Gene Name: tumor protein p53 inducible nuclear protein 1
  Uniprot ID: Q96A56
  ENSP ID: ENSP00000344215
MFQRLNKMFVGEVSSSSNQEPEFNEKEDDEWILVDFIDTCTGFSAEEEEEEEDISEESPTEHPSVFSCLPASLECLADTSDSCFLQFESCPMEESWFITPPPCFTAGGLTTIKVETSPMENLLIEHPSMSVYAVHNSCPGLSEATRGTDELHSPSSPRVEAQNEMGQHIHCYVAALAAHTTFLEQPKSFRPSQWIKEHSERQPLNRNSLRRQNLTRDCHPRQVKHNGWVVHQPCPRQYNY

SEQ ID NO: 94021 - protein, 164 aa, Homo sapiens
  Payload ID: 18759
  Gene Name: tumor protein p53 inducible nuclear protein 1
  Uniprot ID: Q96A56
  ENSP ID: ENSP00000390063
MFQRLNKMFVGEVSSSSNQEPEFNEKEDDEWILVDFIDTCTGFSAEEEEEEEDISEESPTEHPSVFSCLPASLECLADTSDSCFLQFESCPMEESWFITPPPCFTAGGLTTIKVETSPMENLLIEHPSMSVYAVHNSCPGLSEATRGTDELHSPSSPRARKSCL

SEQ ID NO: 94022 - protein, 220 aa, Homo sapiens
  Payload ID: 18760
  Gene Name: tumor protein p53 inducible nuclear protein 2
  Uniprot ID: Q8IXH6
  ENSP ID: ENSP00000363942
MFQRLSSLFFSTPSPPEDPDCPRAFVSEEDEVDGWLIIDLPDSYAAPPSPGAAPAPAGRPPPAPSLMDESWFVTPPACFTAEGPGLGPARLQSSPLEDLLIEHPSMSVYVTGSTIVLEPGSPSPLPDAALPDGDLSEGELTPARREPRAARHAAPLPARAALLEKAGQVRRLQRARQRAERHALSAKAVQRQNRARESRPRRSKNQSSFIYQPCQRQFNY

SEQ ID NO: 94023 - protein, 220 aa, Homo sapiens; identical to SEQ ID NO: 94022
  Payload ID: 18760
  Gene Name: tumor protein p53 inducible nuclear protein 2
  Uniprot ID: Q8IXH6
  ENSP ID: ENSP00000363943

SEQ ID NO: 94024 - protein, 88 aa, Homo sapiens
  Payload ID: 18760
  Gene Name: tumor protein p53 inducible nuclear protein 2
  ENSP ID: ENSP00000395784
MFQRLSSLFFSTPSPPEDPDCPRAFVSEEDEVDGWLIIDLPEGPGLGPARLQSSPLEDLLIEHPSMSVYVTGSTIVLEPGSPSPLPDA

SEQ ID NO: 94025 - protein, 77 aa, Homo sapiens
  Payload ID: 18760
  Gene Name: tumor protein p53 inducible nuclear protein 2
  ENSP ID: ENSP00000404410
MFQRLSSLFFSTPSPPEDPDCPRAFVSEEDEVDGWLIIDLPDSYAAPPSPGAAPAPAGRPPPAPSLMDESWFVTPPA

SEQ ID NO: 94026 - protein, 189 aa, Homo sapiens
  Payload ID: 18761
  Gene Name: tumor protein p53 inducible protein 11
  Uniprot ID: O14683
  ENSP ID: ENSP00000309532
MAAKQPPPLMKKHSQTDLVSRLKTRKILGVGGEDDDGEVHRSKISQVLGNEIKFTIREPLGLRVWQFVSAVLFSGIAIMALAFPDQLYDAVFDGAQVTSKTPIRLYGGALLSISLIMWNALYTAEKVIIRWTLLTEACYFGVQFLVVTATLAETGLMSLGILLLLVSRLLFVVISIYYYYQVGRRPKKA

SEQ ID NO: 94027 - protein, 236 aa, Homo sapiens
  Payload ID: 18761
  Gene Name: tumor protein p53 inducible protein 11
  ENSP ID: ENSP00000346564
MAAKQPPPLMKKHSQTDLVSRLKTRKILGVGGEDDDGEVHRSKISQVLGNEIKFTIREPLGLRVWQFVSAVLFSGIAIMALAFPDQLYDAVFDGAQVTSKTPIRLYGGALLKVETESDRGEVTCLRSQLVSGEAKIGTQAIQLGRTKDGVSETSPASALLLAFSLIQTWLQPLGWDWPPYLPFNPVLPCCQKELSRKHMSPQPSLAGTQPLQETKLPPTDHRTSKTHHRHLLLFLP

SEQ ID NO: 94028 - protein, 189 aa, Homo sapiens; identical to SEQ ID NO: 94026
  Payload ID: 18761
  Gene Name: tumor protein p53 inducible protein 11
  Uniprot ID: O14683
  ENSP ID: ENSP00000379009

SEQ ID NO: 94029 - protein, 73 aa, Homo sapiens
  Payload ID: 18761
  Gene Name: tumor protein p53 inducible protein 11
  ENSP ID: ENSP00000431556
MAAKQPPPLMKKHSQTDLVSRLKTRKILGVGGEDDDGEVHRSKISQVLGNEIKFTIREPLGLRVWQFVSAVLF

SEQ ID NO: 94030 - protein, 79 aa, Homo sapiens
  Payload ID: 18761
  Gene Name: tumor protein p53 inducible protein 11
  ENSP ID: ENSP00000432089
MAAKQPPPLMKKHSQTDLVSRLKTRKILGVGGEDDDGEVHRSKISQVLGNEIKFTIREPLGLRVWQFVSAVLFSGIAIM

SEQ ID NO: 94031 - protein, 62 aa, Homo sapiens
  Payload ID: 18761
  Gene Name: tumor protein p53 inducible protein 11
  ENSP ID: ENSP00000432926
MAAKQPPPLMKKHSQTDLVSRLKTRKILGVGGEDDDGEVHRSKISQVLGNEIKFTIREPLGL

SEQ ID NO: 94032 - protein, 158 aa, Homo sapiens
  Payload ID: 18761
  Gene Name: tumor protein p53 inducible protein 11
  ENSP ID: ENSP00000433454
MAAKQPPPLMKKHSQTDLVSRLKTRKILGVGGEDDDGEVHRSKISQVLGNEIKFTIREPLGLRVWQFVSAVLFSGIAIMALAFPDQLYDAVFDGAQVTSKTPIRLYGGALLSISLIMWNALYTAEKVIIRWTLLTEACYFGVQFLVVTATLAETGLMS

SEQ ID NO: 94033 - protein, 189 aa, Homo sapiens; identical to SEQ ID NO: 94026
  Payload ID: 18761
  Gene Name: tumor protein p53 inducible protein 11
  Uniprot ID: O14683
  ENSP ID: ENSP00000433474

SEQ ID NO: 94034 - protein, 98 aa, Homo sapiens
  Payload ID: 18761
  Gene Name: tumor protein p53 inducible protein 11
  ENSP ID: ENSP00000434461
MAAKQPPPLMKKHSQTDLVSRLKTRKILGVGGEDDDGEVHRSKISQVLGNEIKFTIREPLGLRVWQFVSAVLFSGIAIMALAFPDQLYDAVFDGAQVT

SEQ ID NO: 94035 - protein, 123 aa, Homo sapiens
  Payload ID: 18761
  Gene Name: tumor protein p53 inducible protein 11
  ENSP ID: ENSP00000435739
MPPSCHLLCPDLSPSSAHPSAEAGLEEKMAAKQPPPLMKKHSQTDLVSRLKTRKILGVGGEDDDGEVHRSKISQVLGNEIKFTIREPLGLRVWQFVSAVLFSGIAIMALAFPDQLYDAVFDGA

SEQ ID NO: 94036 - protein, 126 aa, Homo sapiens
  Payload ID: 18761
  Gene Name: tumor protein p53 inducible protein 11
  ENSP ID: ENSP00000435800
MAAKQPPPLMKKHSQTDLVSRLKTRKILGVGGEDDDGEVHRSKISQVLGNEIKFTIREPLGLRVWQFVSAVLFSGIAIMVSPHPQPLRSGPVWLPQPFSGSPEVPPPSWPLVQGPICQALGLPPRT

SEQ ID NO: 94037 - protein, 189 aa, Homo sapiens; identical to SEQ ID NO: 94026
  Payload ID: 18761
  Gene Name: tumor protein p53 inducible protein 11
  Uniprot ID: O14683
  ENSP ID: ENSP00000436152

SEQ ID NO: 94038 - protein, 64 aa, Homo sapiens
  Payload ID: 18761
  Gene Name: tumor protein p53 inducible protein 11
  ENSP ID: ENSP00000437243
MAAKQPPPLMKKHSQTDLVSRLKTRKILGVGGEDDDGEVHRSKGLAVRLCCALLRHCHHGACLP

SEQ ID NO: 94039 - protein, 91 aa, Homo sapiens
  Payload ID: 18761
  Gene Name: tumor protein p53 inducible protein 11
  ENSP ID: ENSP00000437258
MAAKQPPPLMKKHSQTDLVSRLKTRKILGVGGEDDDGEVHRSKGLAVRLCCALLRHCHHGISLIMWNALYTAEKVIIRWTLLTEACYFGVQ

SEQ ID NO: 94040 - protein, 93 aa, Homo sapiens
  Payload ID: 18761
  Gene Name: tumor protein p53 inducible protein 11
  ENSP ID: ENSP00000437284
MAAKQPPPLMKKHSQTDLVSRLKTRKILGVGGEDDDGEVHRSKISQVLGNEIKFTIREPLGLRVWQFVSAVLFSGIAIMALAFPDQLYDAVFD

SEQ ID NO: 94041 - protein, 154 aa, Homo sapiens
  Payload ID: 18761
  Gene Name: tumor protein p53 inducible protein 11
  ENSP ID: ENSP00000475501
MAAKQPPPLMKKHSQTDLVSRLKTRKILGVGGEDDDGEVHRSKISQVLGNEIKFTIREPLGLRVWQFVSAVLFSGIAIMALAFPDQLYDAVFDGAQVTSKTPIRLYGGALLNAAPTPRPLMKLSAGDVLPSCGHWWNTPSGLELAVATICKERS

SEQ ID NO: 94042 - protein, 189 aa, Homo sapiens; identical to SEQ ID NO: 94026
  Payload ID: 18761
  Gene Name: tumor protein p53 inducible protein 11
  Uniprot ID: O14683
  ENSP ID: ENSP00000481456

SEQ ID NO: 94043 - protein, 64 aa, Homo sapiens; identical to SEQ ID NO: 94038
  Payload ID: 18761
  Gene Name: tumor protein p53 inducible protein 11
  ENSP ID: ENSP00000486799

SEQ ID NO: 94044 - protein, 393 aa, Homo sapiens
  Payload ID: 18762
  Gene Name: tumor protein p53 inducible protein 13
  Uniprot ID: Q8NBR0
  ENSP ID: ENSP00000301057
MAPPPPSPQLLLLAALARLLGPSEVMAGPAEEAGAHCPESLWPLPPQVSPRVTYTRVSPGQAEDVTFLYHPCAHPWLKLQLALLAYACMANPSLTPDFSLTQDRPLVLTAWGLALEMAWVEPAWAAHWLMRRRRRKQRKKKAWIYCESLSGPAPSEPTPGRGRLCRRGCVQALALAFALRSWRPPGTEVTSQGPRQPSSSGAKRRRLRAALGPQPTRSALRFPSASPGSLKAKQSMAGIPGRESNAPSVPTVSLLPGAPGGNASSRTEAQVPNGQGSPGGCVCSSQASPAPRAAAPPRAARGPTPRTEEAAWAAMALTFLLVLLTLATLCTRLHRNFRRGESIYWGPTADSQDTVAAVLKRRLLQPSRRVKRSRRRPLLPPTPDSGPEGESSE

SEQ ID NO: 94045 - protein, 112 aa, Homo sapiens
  Payload ID: 18762
  Gene Name: tumor protein p53 inducible protein 13
  ENSP ID: ENSP00000368095
EAQVPNGQGSPGGCVCSSQASPAPRAAAPPRAARGPTPRTEEAAWAAMALTFLLVLLTLATLCTRLHRNFRRGESIYWGPRPLPRGPRAGRSLVAMARHWPSTAGAFLLVGC

SEQ ID NO: 94046 - protein, 92 aa, Homo sapiens
  Payload ID: 18762
  Gene Name: tumor protein p53 inducible protein 13
  ENSP ID: ENSP00000462026
  MOD_RES (1)..(1): Any amino acid
XLTFPASGLRRVMAGPAEEAGAHCPESLWPLPPQVSPRVTYTRVSPGQAEDVTFLYHPCAHPWLKLQLALLAYACMANPSLTPDFSLTQDRL

SEQ ID NO: 94047 - protein, 156 aa, Homo sapiens
  Payload ID: 18762
  Gene Name: tumor protein p53 inducible protein 13
  ENSP ID: ENSP00000462693
MAGPAEEAGAHCPESLWPLPPQVSPRVTYTRVSPGQAEDVTFLYHPCAHPWLKLQLALLAYACMANPSLTPDFSLTQDRPLVLTAWGLALEMAWVEPAWAAHWLMRRRRRKQRKKKAWIYCESLSGPAPSEPTPGRGRLCRRGCVQALALAFALRS

SEQ ID NO: 94048 - protein, 175 aa, Homo sapiens
  Payload ID: 18762
  Gene Name: tumor protein p53 inducible protein 13
  ENSP ID: ENSP00000465112
MAGPAEEAGAHCPESLWPLPPQVSPRVTYTRVSPGQAEDVTFLYHPCAHPWLKLQLALLAYACMANPSLTPDFSLTQDRPLVLTAWGLALEMAWVEPAWAAHWLMRRRRRKQRKKKAWIYCESLSGPAPSEPTPGRGRLCRRGCVQALALAFALRSWRPPGTEVTSQGPRQPSSS

SEQ ID NO: 94049 - protein, 73 aa, Homo sapiens
  Payload ID: 18762
  Gene Name: tumor protein p53 inducible protein 13
  ENSP ID: ENSP00000465824
MAGPAEEAGAHCPESLWPLPPQVSPRVTYTRVSPGQAEDVTFLYHPCAHPWLKLQLALLAYACMANPSLTPDF

SEQ ID NO: 94050 - protein, 185 aa, Homo sapiens
  Payload ID: 18762
  Gene Name: tumor protein p53 inducible protein 13
  ENSP ID: ENSP00000466027
MAGPAEEAGAHCPESLWPLPPQVSPRVTYTRVSPGQAEDVTFLYHPCAHPWLKLQLALLAYACMANPSLTPDFSLTQDRPLVLTAWGLALEMAWVEPAWAAHWLMRRRRRKQRKKKAWIYCESLSGPAPSEPTPGRGRLCRRGCVQALALAFALRSWRPPGTEVTSQGPRQPSSSGAKRRRLRAA

SEQ ID NO: 94051 - protein, 195 aa, Homo sapiens
  Payload ID: 18762
  Gene Name: tumor protein p53 inducible protein 13
  ENSP ID: ENSP00000468265
MAGPAEEAGAHCPESLWPLPPQVSPRVTYTRVSPGQAEDVTFLYHPCAHPWLKLQLALLAYACMANPSLTPDFSLTQDRPLVLTAWGLALEMAWVEPAWAAHWLMRRRRRKQRKKKAWIYCESLSGPAPSEPTPGRGRLCRRGCVQALALAFALRSWRPPGTEVTSQGPRQPSSSGAKRRRLRAALGPQPTRSAL

SEQ ID NO: 94052 - protein, 332 aa, Homo sapiens
  Payload ID: 18763
  Gene Name: tumor protein p53 inducible protein 3
  Uniprot ID: Q53FA7
  ENSP ID: ENSP00000238721
MLAVHFDKPGGPENLYVKEVAKPSPGEGEVLLKVAASALNRADLMQRQGQYDPPPGASNILGLEASGHVAELGPGCQGHWKIGDTAMALLPGGGQAQYVTVPEGLLMPIPEGLTLTQAAAIPEAWLTAFQLLHLVGNVQAGDYVLIHAGLSGVGTAAIQLTRMAGAIPLVTAGSQKKLQMAEKLGAAAGFNYKKEDFSEATLKFTKGAGVNLILDCIGGSYWEKNVNCLALDGRWVLYGLMGGGDINGPLFSKLLFKRGSLITSLLRSRDNKYKQMLVNAFTEQILPHFSTEGPQRLLPVLDRIYPVTEIQEAHKYMEANKNIGKIVLELPQ

SEQ ID NO: 94053 - protein, 332 aa, Homo sapiens; identical to SEQ ID NO: 94052
  Payload ID: 18763
  Gene Name: tumor protein p53 inducible protein 3
  Uniprot ID: Q53FA7
  ENSP ID: ENSP00000337834

SEQ ID NO: 94054 - protein, 248 aa, Homo sapiens
  Payload ID: 18763
  Gene Name: tumor protein p53 inducible protein 3
  Uniprot ID: Q53FA7
  ENSP ID: ENSP00000384414
MLAVHFDKPGGPENLYVKEVAKPSPGEGEVLLKVAASALNRADLMQRQGQYDPPPGASNILGLEASGHVAELGPGCQGHWKIGDTAMALLPGGGQAQYVTVPEGLLMPIPEGLTLTQAAAIPEAWLTAFQLLHLVGNVQAGDYVLIHAGLSGVGTAAIQLTRMAGAIPLVTAGSQKKLQMAEKLGAAAGFNYKKEDFSEATLKFTKVQANAGECFHGANSASLLHGGPPTSAAGSGQNLPSDRNPGGP

SEQ ID NO: 94055 - protein, 216 aa, Homo sapiens
  Payload ID: 18763
  Gene Name: tumor protein p53 inducible protein 3
  ENSP ID: ENSP00000389620
FDKPGGPENLYVKEVAKPSPGEGEVLLKVAASALNRADLMQRQGQYDPPPGASNILGLEASGHVAELGPGCQGHWKIGDTAMALLPGGGQAQYVTVPEGLLMPIPEGLTLTQAAAIPEAWLTAFQLLHLVGNVQAGDYVLIHAGLSGVGTAAIQLTRMAGAIPLVTAGSQKKLQMAEKLGAAAGFNYKKEDFSEATLKFTKGKQLLLQFSRNLRDD

SEQ ID NO: 94056 - protein, 86 aa, Homo sapiens
  Payload ID: 18764
  Gene Name: tumor protein p53 regulated apoptosis inducing protein 1
  Uniprot ID: Q9HCN2
  ENSP ID: ENSP00000390694
MGSSSEASFRSAQASCSGARRQGLGRGDQNLSVMPPNGRAQTHTPGWVSDPLVLGAQVHGGCRGIEALSVSSGSWSSATVWILTVQ

SEQ ID NO: 94057 - protein, 124 aa, Homo sapiens
  Payload ID: 18764
  Gene Name: tumor protein p53 regulated apoptosis inducing protein 1
  Uniprot ID: Q9HCN2
  ENSP ID: ENSP00000432743
MGSSSEASFRSAQASCSGARRQGLGRGDQNLSVMPPNGRAQTHTPGWVSDPLVLGAQVHGGCRGIEALSVSSGSWSSATVWILTGLGLGLSRPFLPGATVLRDRPLGSAFELSYDQKKAPLRLQ

SEQ ID NO: 94058 - protein, 120 aa, Homo sapiens
  Payload ID: 18764
  Gene Name: tumor protein p53 regulated apoptosis inducing protein 1
  Uniprot ID: Q9HCN2
  ENSP ID: ENSP00000432908
MGSSSEASFRSAQASCSGARRQGLGRGDQNLSVMPPNGRAQTHTPGWVSDPLVLGAQVHGGCRGIEALSVSSGSWSSATVWILTGLSRPFLPGATVLRDRPLGSAFELSYDQKKAPLRLQ

SEQ ID NO: 94059 - protein, 108 aa, Homo sapiens
  Payload ID: 18764
  Gene Name: tumor protein p53 regulated apoptosis inducing protein 1
  Uniprot ID: Q9HCN2
  ENSP ID: ENSP00000435175
MGSSSEASFRSAQASCSGARRQGLGRGDQNLSVMPPNGRAQTHTPGWVSPCSENRDGLLPATAPGRLCSHRGADIPSFQTHQDPVTASGSSELHADCPQFRALDRAGN

SEQ ID NO: 94060 - protein, 108 aa, Homo sapiens; identical to SEQ ID NO: 94059
  Payload ID: 18764
  Gene Name: tumor protein p53 regulated apoptosis inducing protein 1
  Uniprot ID: Q9HCN2
  ENSP ID: ENSP00000473353

SEQ ID NO: 94061 - protein, 86 aa, Homo sapiens; identical to SEQ ID NO: 94056
  Payload ID: 18764
  Gene Name: tumor protein p53 regulated apoptosis inducing protein 1
  Uniprot ID: Q9HCN2
  ENSP ID: ENSP00000479350

SEQ ID NO: 94062 - protein, 680 aa, Homo sapiens
  Payload ID: 18765
  Gene Name: tumor protein p63
  Uniprot ID: Q9H3D4
  ENSP ID: ENSP00000264731
MNFETSRCATLQYCPDPYIQRFVETPAHFSWKESYYRSTMSQSTQTNEFLSPEVFQHIWDFLEQPICSVQPIDLNFVDEPSEDGATNKIEISMDCIRMQDSDLSDPMWPQYTNLGLLNSMDQQIQNGSSSTSPYNTDHAQNSVTAPSPYAQPSSTFDALSPSPAIPSNTDYPGPHSFDVSFQQSSTAKSATWTYSTELKKLYCQIAKTCPIQIKVMTPPPQGAVIRAMPVYKKAEHVTEVVKRCPNHELSREFNEGQIAPPSHLIRVEGNSHAQYVEDPITGRQSVLVPYEPPQVGTEFTTVLYNFMCNSSCVGGMNRRPILIIVTLETRDGQVLGRRCFEARICACPGRDRKADEDSIRKQQVSDSTKNGDGTKRPFRQNTHGIQMTSIKKRRSPDDELLYLPVRGRETYEMLLKIKESLELMQYLPQHTIETYRQQQQQQHQHLLQKQTSIQSPSSYGNSSPPLNKMNSMNKLPSVSQLINPQQRNALTPTTIPDGMGANIPMMGTHMPMAGDMNGLSPTQALPPPLSMPSTSHCTPPPPYPTDCSIVSFLARLGCSSCLDYFTTQGLTTIYQIEHYSMDDLASLKIPEQFRHAIWKGILDHRQLHEFSSPSHLLRTPSSASTVSVGSSETRGERVIDAVRFTLRQTISFPPRDEWNDFNFDMDARRNKQQRIKEEGE

SEQ ID NO: 94063 - protein, 510 aa, Homo sapiens
  Payload ID: 18765
  Gene Name: tumor protein p63
  Uniprot ID: Q9H3D4
  ENSP ID: ENSP00000317510
MNFETSRCATLQYCPDPYIQRFVETPAHFSWKESYYRSTMSQSTQTNEFLSPEVFQHIWDFLEQPICSVQPIDLNFVDEPSEDGATNKIEISMDCIRMQDSDLSDPMWPQYTNLGLLNSMDQQIQNGSSSTSPYNTDHAQNSVTAPSPYAQPSSTFDALSPSPAIPSNTDYPGPHSFDVSFQQSSTAKSATWTYSTELKKLYCQIAKTCPIQIKVMTPPPQGAVIRAMPVYKKAEHVTEVVKRCPNHELSREFNEGQIAPPSHLIRVEGNSHAQYVEDPITGRQSVLVPYEPPQVGTEFTTVLYNFMCNSSCVGGMNRRPILIIVTLETRDGQVLGRRCFEARICACPGRDRKADEDSIRKQQVSDSTKNGDGTKRPFRQNTHGIQMTSIKKRRSPDDELLYLPVRGRETYEMLLKIKESLELMQYLPQHTIETYRQQQQQQHQHLLQKQTSIQSPSSYGNSSPPLNKMNSMNKLPSVSQLINPQQRNALTPTTIPDGMGANRSGKSENP

SEQ ID NO: 94064 - protein, 586 aa, Homo sapiens
  Payload ID: 18765
  Gene Name: tumor protein p63
  Uniprot ID: Q9H3D4
  ENSP ID: ENSP00000346614
MLYLENNAQTQFSEPQYTNLGLLNSMDQQIQNGSSSTSPYNTDHAQNSVTAPSPYAQPSSTFDALSPSPAIPSNTDYPGPHSFDVSFQQSSTAKSATWTYSTELKKLYCQIAKTCPIQIKVMTPPPQGAVIRAMPVYKKAEHVTEVVKRCPNHELSREFNEGQIAPPSHLIRVEGNSHAQYVEDPITGRQSVLVPYEPPQVGTEFTTVLYNFMCNSSCVGGMNRRPILIIVTLETRDGQVLGRRCFEARICACPGRDRKADEDSIRKQQVSDSTKNGDGTKRPFRQNTHGIQMTSIKKRRSPDDELLYLPVRGRETYEMLLKIKESLELMQYLPQHTIETYRQQQQQQHQHLLQKQTSIQSPSSYGNSSPPLNKMNSMNKLPSVSQLINPQQRNALTPTTIPDGMGANIPMMGTHMPMAGDMNGLSPTQALPPPLSMPSTSHCTPPPPYPTDCSIVSFLARLGCSSCLDYFTTQGLTTIYQIEHYSMDDLASLKIPEQFRHAIWKGILDHRQLHEFSSPSHLLRTPSSASTVSVGSSETRGERVIDAVRFTLRQTISFPPRDEWNDFNFDMDARRNKQQRIKEEGE

SEQ ID NO: 94065 - protein, 555 aa, Homo sapiens
  Payload ID: 18765
  Gene Name: tumor protein p63
  Uniprot ID: Q9H3D4
  ENSP ID: ENSP00000376253
MNFETSRCATLQYCPDPYIQRFVETPAHFSWKESYYRSTMSQSTQTNEFLSPEVFQHIWDFLEQPICSVQPIDLNFVDEPSEDGATNKIEISMDCIRMQDSDLSDPMWPQYTNLGLLNSMDQQIQNGSSSTSPYNTDHAQNSVTAPSPYAQPSSTFDALSPSPAIPSNTDYPGPHSFDVSFQQSSTAKSATWTYSTELKKLYCQIAKTCPIQIKVMTPPPQGAVIRAMPVYKKAEHVTEVVKRCPNHELSREFNEGQIAPPSHLIRVEGNSHAQYVEDPITGRQSVLVPYEPPQVGTEFTTVLYNFMCNSSCVGGMNRRPILIIVTLETRDGQVLGRRCFEARICACPGRDRKADEDSIRKQQVSDSTKNGDGTKRPFRQNTHGIQMTSIKKRRSPDDELLYLPVRGRETYEMLLKIKESLELMQYLPQHTIETYRQQQQQQHQHLLQKQTSIQSPSSYGNSSPPLNKMNSMNKLPSVSQLINPQQRNALTPTTIPDGMGANIPMMGTHMPMAGDMNGLSPTQALPPPLSMPSTSHCTPPPPYPTDCSIVRIWQV

SEQ ID NO: 94066 - protein, 416 aa, Homo sapiens
  Payload ID: 18765
  Gene Name: tumor protein p63
  Uniprot ID: Q9H3D4
  ENSP ID: ENSP00000376254
MLYLENNAQTQFSEPQYTNLGLLNSMDQQIQNGSSSTSPYNTDHAQNSVTAPSPYAQPSSTFDALSPSPAIPSNTDYPGPHSFDVSFQQSSTAKSATWTYSTELKKLYCQIAKTCPIQIKVMTPPPQGAVIRAMPVYKKAEHVTEVVKRCPNHELSREFNEGQIAPPSHLIRVEGNSHAQYVEDPITGRQSVLVPYEPPQVGTEFTTVLYNFMCNSSCVGGMNRRPILIIVTLETRDGQVLGRRCFEARICACPGRDRKADEDSIRKQQVSDSTKNGDGTKRPFRQNTHGIQMTSIKKRRSPDDELLYLPVRGRETYEMLLKIKESLELMQYLPQHTIETYRQQQQQQHQHLLQKQTSIQSPSSYGNSSPPLNKMNSMNKLPSVSQLINPQQRNALTPTTIPDGMGANRSGKSENP

SEQ ID NO: 94067 - protein, 461 aa, Homo sapiens
  Payload ID: 18765
  Gene Name: tumor protein p63
  Uniprot ID: Q9H3D4
  ENSP ID: ENSP00000376256
MLYLENNAQTQFSEPQYTNLGLLNSMDQQIQNGSSSTSPYNTDHAQNSVTAPSPYAQPSSTFDALSPSPAIPSNTDYPGPHSFDVSFQQSSTAKSATWTYSTELKKLYCQIAKTCPIQIKVMTPPPQGAVIRAMPVYKKAEHVTEVVKRCPNHELSREFNEGQIAPPSHLIRVEGNSHAQYVEDPITGRQSVLVPYEPPQVGTEFTTVLYNFMCNSSCVGGMNRRPILIIVTLETRDGQVLGRRCFEARICACPGRDRKADEDSIRKQQVSDSTKNGDGTKRPFRQNTHGIQMTSIKKRRSPDDELLYLPVRGRETYEMLLKIKESLELMQYLPQHTIETYRQQQQQQHQHLLQKQTSIQSPSSYGNSSPPLNKMNSMNKLPSVSQLINPQQRNALTPTTIPDGMGANIPMMGTHMPMAGDMNGLSPTQALPPPLSMPSTSHCTPPPPYPTDCSIVRIWQV

SEQ ID NO: 94068 - protein, 501 aa, Homo sapiens
  Payload ID: 18765
  Gene Name: tumor protein p63
  Uniprot ID: Q9H3D4
  ENSP ID: ENSP00000387839
MLYLENNAQTQFSEYSTELKKLYCQIAKTCPIQIKVMTPPPQGAVIRAMPVYKKAEHVTEVVKRCPNHELSREFNEGQIAPPSHLIRVEGNSHAQYVEDPITGRQSVLVPYEPPQVGTEFTTVLYNFMCNSSCVGGMNRRPILIIVTLETRDGQVLGRRCFEARICACPGRDRKADEDSIRKQQVSDSTKNGDGTKRPFRQNTHGIQMTSIKKRRSPDDELLYLPVRGRETYEMLLKIKESLELMQYLPQHTIETYRQQQQQQHQHLLQKQTSIQSPSSYGNSSPPLNKMNSMNKLPSVSQLINPQQRNALTPTTIPDGMGANIPMMGTHMPMAGDMNGLSPTQALPPPLSMPSTSHCTPPPPYPTDCSIVSFLARLGCSSCLDYFTTQGLTTIYQIEHYSMDDLASLKIPEQFRHAIWKGILDHRQLHEFSSPSHLLRTPSSASTVSVGSSETRGERVIDAVRFTLRQTISFPPRDEWNDFNFDMDARRNKQQRIKEEGE

SEQ ID NO: 94069 - protein, 582 aa, Homo sapiens
  Payload ID: 18765
  Gene Name: tumor protein p63
  Uniprot ID: Q9H3D4
  ENSP ID: ENSP00000389485
MLYLENNAQTQFSEPQYTNLGLLNSMDQQIQNGSSSTSPYNTDHAQNSVTAPSPYAQPSSTFDALSPSPAIPSNTDYPGPHSFDVSFQQSSTAKSATWTYSTELKKLYCQIAKTCPIQIKVMTPPPQGAVIRAMPVYKKAEHVTEVVKRCPNHELSREFNEGQIAPPSHLIRVEGNSHAQYVEDPITGRQSVLVPYEPPQVGTEFTTVLYNFMCNSSCVGGMNRRPILIIVTLETRDGQVLGRRCFEARICACPGRDRKADEDSIRKQQVSDSTKNGDAFRQNTHGIQMTSIKKRRSPDDELLYLPVRGRETYEMLLKIKESLELMQYLPQHTIETYRQQQQQQHQHLLQKQTSIQSPSSYGNSSPPLNKMNSMNKLPSVSQLINPQQRNALTPTTIPDGMGANIPMMGTHMPMAGDMNGLSPTQALPPPLSMPSTSHCTPPPPYPTDCSIVSFLARLGCSSCLDYFTTQGLTTIYQIEHYSMDDLASLKIPEQFRHAIWKGILDHRQLHEFSSPSHLLRTPSSASTVSVGSSETRGERVIDAVRFTLRQTISFPPRDEWNDFNFDMDARRNKQQRIKEEGE

SEQ ID NO: 94070 - protein, 393 aa, Homo sapiens
  Payload ID: 18765
  Gene Name: tumor protein p63
  Uniprot ID: Q9H3D4
  ENSP ID: ENSP00000392488
MLYLENNAQTQFSEPQYTNLGLLNSMDQQIQNGSSSTSPYNTDHAQNSVTAPSPYAQPSSTFDALSPSPAIPSNTDYPGPHSFDVSFQQSSTAKSATWTYSTELKKLYCQIAKTCPIQIKVMTPPPQGAVIRAMPVYKKAEHVTEVVKRCPNHELSREFNEGQIAPPSHLIRVEGNSHAQYVEDPITGRQSVLVPYEPPQVGTEFTTVLYNFMCNSSCVGGMNRRPILIIVTLETRDGQVLGRRCFEARICACPGRDRKADEDSIRKQQVSDSTKNGDGTKRPFRQNTHGIQMTSIKKRRSPDDELLYLPVRGRETYEMLLKIKESLELMQYLPQHTIETYRQQQQQQHQHLLQKHLLSACFRNELVEPRRETPKQSDVFFRHSKPPNRSVYP

SEQ ID NO: 94071 - protein, 676 aa, Homo sapiens
  Payload ID: 18765
  Gene Name: tumor protein p63
  Uniprot ID: Q9H3D4
  ENSP ID: ENSP00000394337
MNFETSRCATLQYCPDPYIQRFVETPAHFSWKESYYRSTMSQSTQTNEFLSPEVFQHIWDFLEQPICSVQPIDLNFVDEPSEDGATNKIEISMDCIRMQDSDLSDPMWPQYTNLGLLNSMDQQIQNGSSSTSPYNTDHAQNSVTAPSPYAQPSSTFDALSPSPAIPSNTDYPGPHSFDVSFQQSSTAKSATWTYSTELKKLYCQIAKTCPIQIKVMTPPPQGAVIRAMPVYKKAEHVTEVVKRCPNHELSREFNEGQIAPPSHLIRVEGNSHAQYVEDPITGRQSVLVPYEPPQVGTEFTTVLYNFMCNSSCVGGMNRRPILIIVTLETRDGQVLGRRCFEARICACPGRDRKADEDSIRKQQVSDSTKNGDAFRQNTHGIQMTSIKKRRSPDDELLYLPVRGRETYEMLLKIKESLELMQYLPQHTIETYRQQQQQQHQHLLQKQTSIQSPSSYGNSSPPLNKMNSMNKLPSVSQLINPQQRNALTPTTIPDGMGANIPMMGTHMPMAGDMNGLSPTQALPPPLSMPSTSHCTPPPPYPTDCSIVSFLARLGCSSCLDYFTTQGLTTIYQIEHYSMDDLASLKIPEQFRHAIWKGILDHRQLHEFSSPSHLLRTPSSASTVSVGSSETRGERVIDAVRFTLRQTISFPPRDEWNDFNFDMDARRNKQQRIKEEGE

SEQ ID NO: 94072 - protein, 183 aa, Homo sapiens
  Payload ID: 18765
  Gene Name: tumor protein p63
  ENSP ID: ENSP00000401661
MLYLENNAQTQFSEPQYTNLGLLNSMDQQIQNGSSSTSPYNTDHAQNSVTAPSPYAQPSSTFDALSPSPAIPSNTDYPGPHSFDVSFQQSSTAKSATWTSLALSPRLECNGMISAHCNLHLLGSSGSPFSASQVGGITGTRHHAQLIFGTTSAHCNLRLLDSSDSPFSASQYSTELKKLYCQI

SEQ ID NO: 94073 - protein, 487 aa, Homo sapiens
  Payload ID: 18765
  Gene Name: tumor protein p63
  Uniprot ID: Q9H3D4
  ENSP ID: ENSP00000407144
MNFETSRCATLQYCPDPYIQRFVETPAHFSWKESYYRSTMSQSTQTNEFLSPEVFQHIWDFLEQPICSVQPIDLNFVDEPSEDGATNKIEISMDCIRMQDSDLSDPMWPQYTNLGLLNSMDQQIQNGSSSTSPYNTDHAQNSVTAPSPYAQPSSTFDALSPSPAIPSNTDYPGPHSFDVSFQQSSTAKSATWTYSTELKKLYCQIAKTCPIQIKVMTPPPQGAVIRAMPVYKKAEHVTEVVKRCPNHELSREFNEGQIAPPSHLIRVEGNSHAQYVEDPITGRQSVLVPYEPPQVGTEFTTVLYNFMCNSSCVGGMNRRPILIIVTLETRDGQVLGRRCFEARICACPGRDRKADEDSIRKQQVSDSTKNGDGTKRPFRQNTHGIQMTSIKKRRSPDDELLYLPVRGRETYEMLLKIKESLELMQYLPQHTIETYRQQQQQQHQHLLQKHLLSACFRNELVEPRRETPKQSDVFFRHSKPPNRSVYP

SEQ ID NO: 94074 - protein, 275 aa, Homo sapiens
  Payload ID: 18766
  Gene Name: tumor protein p63 regulated 1
  Uniprot ID: Q6ZUI0
  ENSP ID: ENSP00000341031
MSTIGSFEGFQAVSLKQEGDDQPSETDHLSMEEEDPMPRQISRQSSVTESTLYPNPYHQPYISRKYFATRPGAIETAMEDLKGHVAETSGETIQGFWLLTKIDHWNNEKERILLVTDKTLLICKYDFIMLSCVQLQRIPLSAVYRICLGKFTFPGMSLDKRQGEGLRIYWGSPEEQSLLSRWNPWSTEVPYATFTEHPMKYTSEKFLEICKLSGFMSKLVPAIQNAHKNSTGSGRGKKLMVLTEPILIETYTGLMSFIGNRNKLGYSLARGSIGF

SEQ ID NO: 94075 - protein, 133 aa, Homo sapiens
  Payload ID: 18766
  Gene Name: tumor protein p63 regulated 1
  ENSP ID: ENSP00000399133
MSTIGSFEGFQAVSLKQEGDDQPSETDHLSMEEEDPMPRQISRQSSVTESTLYPNPYHQPYISRKYFATRPGAIETAMEDLKGHVAETSGETIQGFWLLTKTDPLSQHQGEHLDTLWNFKKYDMMAIKWLFSR

SEQ ID NO: 94076 - protein, 150 aa, Homo sapiens
  Payload ID: 18766
  Gene Name: tumor protein p63 regulated 1
  ENSP ID: ENSP00000400171
  MOD_RES (1)..(1): Any amino acid
XIETAMEDLKGHVAETSGETIQGFWLLTKIDHWNNEKERILLVTDKTLLICKYDFIMLSCVQLQRIPLSAVYRICLGKFTFPGMSLDKRQGEGLRIYWGSPEEQSLLSRWNPWSTEVPYATFTEHPMKYTSEKFLEICKYAETTAGKDEY

SEQ ID NO: 94077 - protein, 275 aa, Homo sapiens; identical to SEQ ID NO: 94074
  Payload ID: 18766
  Gene Name: tumor protein p63 regulated 1
  Uniprot ID: Q6ZUI0
  ENSP ID: ENSP00000412547

SEQ ID NO: 94078 - protein, 100 aa, Homo sapiens
  Payload ID: 18766
  Gene Name: tumor protein p63 regulated 1
  ENSP ID: ENSP00000415413
MSTIGSFEGFQAVSLKQEGDDQPSETDHLSMEEEDPMPRQISRQSSVTESTLYPNPYHQPYISRKYFATRPGAIETAMEDLKGHVAETSGETIQGFWLLT

SEQ ID NO: 94079 - protein, 213 aa, Homo sapiens
  Payload ID: 18767
  Gene Name: tumor protein p63 regulated 1-like
  Uniprot ID: Q5T0D9
  ENSP ID: ENSP00000339714
MLQLRDSVDSAGTSPTAVLAAGEEVGAGGGPGGGRPGAGTPLRQTLWPLSIHDPTRRARVKEYFVFRPGSIEQAVEEIRVVVRPVEDGEIQGVWLLTEREGFGIRIQWDKQSRPSFINRWNPWSTNVPYATFTEHPMAGADEKTASLCQLESFKALLIQAVKKAQKESPLPGQANGVLILERPLLIETYVGLMSFINNEAKLGYSMTRGKIGF

SEQ ID NO: 94080 - protein, 272 aa, Homo sapiens
  Payload ID: 18767
  Gene Name: tumor protein p63 regulated 1-like
  Uniprot ID: Q5T0D9
  ENSP ID: ENSP00000367595
MLQLRDSVDSAGTSPTAVLAAGEEVGAGGGPGGGRPGAGTPLRQTLWPLSIHDPTRRARVKEYFVFRPGSIEQAVEEIRVVVRPVEDGEIQGVWLLTEVDHWNNEKERLVLVTEQSLLICKYDFISLQCQQVVRIALNAVDTISYGEFQFPPKSLNKREGFGIRIQWDKQSRPSFINRWNPWSTNVPYATFTEHPMAGADEKTASLCQLESFKALLIQAVKKAQKESPLPGQANGVLILERPLLIETYVGLMSFINNEAKLGYSMTRGKIGF

SEQ ID NO: 94081 - protein, 540 aa, Homo sapiens
  Payload ID: 18768
  Gene Name: tumor protein p73
  Uniprot ID: O15350
  ENSP ID: ENSP00000340740
MAQSTATSPDGGTTFEHLWSSLEPDSTYFDLPQSSRGNNEVVGGTDSSMDVFHLEGMTTSVMAQFNLLSSTMDQMSSRAASASPYTPEHAASVPTHSPYAQPSSTFDTMSPAPVIPSNTDYPGPHHFEVTFQQSSTAKSATWTYSPLLKKLYCQIAKTCPIQIKVSTPPPPGTAIRAMPVYKKAEHVTDVVKRCPNHELGRDFNEGQSAPASHLIRVEGNNLSQYVDDPVTGRQSVVVPYEPPQVGTEFTTILYNFMCNSSCVGGMNRRPILIIITLEMRDGQVLGRRSFEGRICACPGRDRKADEDHYREQQALNESSAKNGAASKRAFKQSPPAVPALGAGVKKRRHGDEDTYYLQVRGRENFEILMKLKESLELMELVPQPLVDSYRQQQQLLQRPFLTGLGCPNCIEYFTSQGLQSIYHLQNLTIEDLGALKIPEQYRMTIWRGLQDLKQGHDYSTAQQLLRSSNAATISIGGSGELQRQRVMEAVHFRVRHTITIPNRGGPGGGPDEWADFGFDLPDCKARKQPIKEEFTEAEIH

SEQ ID NO: 94082 - protein, 499 aa, Homo sapiens
  Payload ID: 18768
  Gene Name: tumor protein p73
  Uniprot ID: O15350
  ENSP ID: ENSP00000346423
MAQSTATSPDGGTTFEHLWSSLEPDSTYFDLPQSSRGNNEVVGGTDSSMDVFHLEGMTTSVMAQFNLLSSTMDQMSSRAASASPYTPEHAASVPTHSPYAQPSSTFDTMSPAPVIPSNTDYPGPHHFEVTFQQSSTAKSATWTYSPLLKKLYCQIAKTCPIQIKVSTPPPPGTAIRAMPVYKKAEHVTDVVKRCPNHELGRDFNEGQSAPASHLIRVEGNNLSQYVDDPVTGRQSVVVPYEPPQVGTEFTTILYNFMCNSSCVGGMNRRPILIIITLEMRDGQVLGRRSFEGRICACPGRDRKADEDHYREQQALNESSAKNGAASKRAFKQSPPAVPALGAGVKKRRHGDEDTYYLQVRGRENFEILMKLKESLELMELVPQPLVDSYRQQQQLLQRPSHLQPPSYGPVLSPMNKVHGGMNKLPSVNQLVGQPPPHSSAATPNLGPVGPGMLNNHGHAVPANGEMSSSHSAQSMVSGSHCTPPPPYHADPSLVRTWGP

SEQ ID NO: 94083 - protein, 555 aa, Homo sapiens
  Payload ID: 18768
  Gene Name: tumor protein p73
  Uniprot ID: O15350
  ENSP ID: ENSP00000350366
MAQSTATSPDGGTTFEHLWSSLEPDSTYFDLPQSSRGNNEVVGGTDSSMDVFHLEGMTTSVMAQFNLLSSTMDQMSSRAASASPYTPEHAASVPTHSPYAQPSSTFDTMSPAPVIPSNTDYPGPHHFEVTFQQSSTAKSATWTYSPLLKKLYCQIAKTCPIQIKVSTPPPPGTAIRAMPVYKKAEHVTDVVKRCPNHELGRDFNEGQSAPASHLIRVEGNNLSQYVDDPVTGRQSVVVPYEPPQVGTEFTTILYNFMCNSSCVGGMNRRPILIIITLEMRDGQVLGRRSFEGRICACPGRDRKADEDHYREQQALNESSAKNGAASKRAFKQSPPAVPALGAGVKKRRHGDEDTYYLQVRGRENFEILMKLKESLELMELVPQPLVDSYRQQQQLLQRPPRDAQQPWPRSASQRRDEQQPQRPVHGLGVPLHSATPLPRRPQPRQDLGALKIPEQYRMTIWRGLQDLKQGHDYSTAQQLLRSSNAATISIGGSGELQRQRVMEAVHFRVRHTITIPNRGGPGGGPDEWADFGFDLPDCKARKQPIKEEFTEAEIH

SEQ ID NO: 94084 - protein, 426 aa, Homo sapiens
  Payload ID: 18768
  Gene Name: tumor protein p73
  ENSP ID: ENSP00000367529
MLYVGDPARHLATAQFNLLSSTMDQMSSRAASASPYTPEHAASVPTHSPYAQPSSTFDTMSPAPVIPSNTDYPGPHHFEVTFQQSSTAKSATWTYSPLLKKLYCQIAKTCPIQIKVSTPPPPGTAIRAMPVYKKAEHVTDVVKRCPNHELGRDFNEGQSAPASHLIRVEGNNLSQYVDDPVTGRQSVVVPYEPPQVGTEFTTILYNFMCNSSCVGGMNRRPILIIITLEMRDGQVLGRRSFEGRICACPGRDRKADEDHYREQQALNESSAKNGAASKRAFKQSPPAVPALGAGVKKRRHGDEDTYYLQVRGRENFEILMKLKESLELMELVPQPLVDSYRQQQQLLQRPPRDAQQPWPRSASQRRDEQQPQRPVHGLGVPLHSATPLPRRPQPRQFFNRIGVSKLHRVFHLPRVTEHLPPAEPDH

SEQ ID NO: 94085 - protein, 450 aa, Homo sapiens
  Payload ID: 18768
  Gene Name: tumor protein p73
  Uniprot ID: O15350
  ENSP ID: ENSP00000367534
MLYVGDPARHLATAQFNLLSSTMDQMSSRAASASPYTPEHAASVPTHSPYAQPSSTFDTMSPAPVIPSNTDYPGPHHFEVTFQQSSTAKSATWTYSPLLKKLYCQIAKTCPIQIKVSTPPPPGTAIRAMPVYKKAEHVTDVVKRCPNHELGRDFNEGQSAPASHLIRVEGNNLSQYVDDPVTGRQSVVVPYEPPQVGTEFTTILYNFMCNSSCVGGMNRRPILIIITLEMRDGQVLGRRSFEGRICACPGRDRKADEDHYREQQALNESSAKNGAASKRAFKQSPPAVPALGAGVKKRRHGDEDTYYLQVRGRENFEILMKLKESLELMELVPQPLVDSYRQQQQLLQRPSHLQPPSYGPVLSPMNKVHGGMNKLPSVNQLVGQPPPHSSAATPNLGPVGPGMLNNHGHAVPANGEMSSSHSAQSMVSGSHCTPPPPYHADPSLVRTWGP

SEQ ID NO: 94086 - protein, 587 aa, Homo sapiens
  Payload ID: 18768
  Gene Name: tumor protein p73
  Uniprot ID: O15350
  ENSP ID: ENSP00000367537
MLYVGDPARHLATAQFNLLSSTMDQMSSRAASASPYTPEHAASVPTHSPYAQPSSTFDTMSPAPVIPSNTDYPGPHHFEVTFQQSSTAKSATWTYSPLLKKLYCQIAKTCPIQIKVSTPPPPGTAIRAMPVYKKAEHVTDVVKRCPNHELGRDFNEGQSAPASHLIRVEGNNLSQYVDDPVTGRQSVVVPYEPPQVGTEFTTILYNFMCNSSCVGGMNRRPILIIITLEMRDGQVLGRRSFEGRICACPGRDRKADEDHYREQQALNESSAKNGAASKRAFKQSPPAVPALGAGVKKRRHGDEDTYYLQVRGRENFEILMKLKESLELMELVPQPLVDSYRQQQQLLQRPSHLQPPSYGPVLSPMNKVHGGMNKLPSVNQLVGQPPPHSSAATPNLGPVGPGMLNNHGHAVPANGEMSSSHSAQSMVSGSHCTPPPPYHADPSLVSFLTGLGCPNCIEYFTSQGLQSIYHLQNLTIEDLGALKIPEQYRMTIWRGLQDLKQGHDYSTAQQLLRSSNAATISIGGSGELQRQRVMEAVHFRVRHTITIPNRGGPGGGPDEWADFGFDLPDCKARKQPIKEEFTEAEIH

SEQ ID NO: 94087 - protein, 565 aa, Homo sapiens
  Payload ID: 18768
  Gene Name: tumor protein p73
  Uniprot ID: O15350
  ENSP ID: ENSP00000367539
MDQMSSRAASASPYTPEHAASVPTHSPYAQPSSTFDTMSPAPVIPSNTDYPGPHHFEVTFQQSSTAKSATWTYSPLLKKLYCQIAKTCPIQIKVSTPPPPGTAIRAMPVYKKAEHVTDVVKRCPNHELGRDFNEGQSAPASHLIRVEGNNLSQYVDDPVTGRQSVVVPYEPPQVGTEFTTILYNFMCNSSCVGGMNRRPILIIITLEMRDGQVLGRRSFEGRICACPGRDRKADEDHYREQQALNESSAKNGAASKRAFKQSPPAVPALGAGVKKRRHGDEDTYYLQVRGRENFEILMKLKESLELMELVPQPLVDSYRQQQQLLQRPSHLQPPSYGPVLSPMNKVHGGMNKLPSVNQLVGQPPPHSSAATPNLGPVGPGMLNNHGHAVPANGEMSSSHSAQSMVSGSHCTPPPPYHADPSLVSFLTGLGCPNCIEYFTSQGLQSIYHLQNLTIEDLGALKIPEQYRMTIWRGLQDLKQGHDYSTAQQLLRSSNAATISIGGSGELQRQRVMEAVHFRVRHTITIPNRGGPGGGPDEWADFGFDLPDCKARKQPIKEEFTEAEIH

SEQ ID NO: 94088 - protein, 636 aa, Homo sapiens
  Payload ID: 18768
  Gene Name: tumor protein p73
  Uniprot ID: O15350
  ENSP ID: ENSP00000367545
MAQSTATSPDGGTTFEHLWSSLEPDSTYFDLPQSSRGNNEVVGGTDSSMDVFHLEGMTTSVMAQFNLLSSTMDQMSSRAASASPYTPEHAASVPTHSPYAQPSSTFDTMSPAPVIPSNTDYPGPHHFEVTFQQSSTAKSATWTYSPLLKKLYCQIAKTCPIQIKVSTPPPPGTAIRAMPVYKKAEHVTDVVKRCPNHELGRDFNEGQSAPASHLIRVEGNNLSQYVDDPVTGRQSVVVPYEPPQVGTEFTTILYNFMCNSSCVGGMNRRPILIIITLEMRDGQVLGRRSFEGRICACPGRDRKADEDHYREQQALNESSAKNGAASKRAFKQSPPAVPALGAGVKKRRHGDEDTYYLQVRGRENFEILMKLKESLELMELVPQPLVDSYRQQQQLLQRPSHLQPPSYGPVLSPMNKVHGGMNKLPSVNQLVGQPPPHSSAATPNLGPVGPGMLNNHGHAVPANGEMSSSHSAQSMVSGSHCTPPPPYHADPSLVSFLTGLGCPNCIEYFTSQGLQSIYHLQNLTIEDLGALKIPEQYRMTIWRGLQDLKQGHDYSTAQQLLRSSNAATISIGGSGELQRQRVMEAVHFRVRHTITIPNRGGPGGGPDEWADFGFDLPDCKARKQPIKEEFTEAEIH

SEQ ID NO: 94089 - protein, 540 aa, Homo sapiens; identical to SEQ ID NO: 94081
  Payload ID: 18768
  Gene Name: tumor protein p73
  Uniprot ID: O15350
  ENSP ID: ENSP00000474322

SEQ ID NO: 94090 - protein, 555 aa, Homo sapiens; identical to SEQ ID NO: 94083
  Payload ID: 18768
  Gene Name: tumor protein p73
  Uniprot ID: O15350
  ENSP ID: ENSP00000474626

SEQ ID NO: 94091 - protein, 403 aa, Homo sapiens
  Payload ID: 18768
  Gene Name: tumor protein p73
  Uniprot ID: O15350
  ENSP ID: ENSP00000475143
MAQSTATSPDGGTTFEHLWSSLEPDSTYFDLPQSSRGNNEVVGGTDSSMDVFHLEGMTTSVMAQFNLLSSTMDQMSSRAASASPYTPEHAASVPTHSPYAQPSSTFDTMSPAPVIPSNTDYPGPHHFEVTFQQSSTAKSATWTYSPLLKKLYCQIAKTCPIQIKVSTPPPPGTAIRAMPVYKKAEHVTDVVKRCPNHELGRDFNEGQSAPASHLIRVEGNNLSQYVDDPVTGRQSVVVPYEPPQVGTEFTTILYNFMCNSSCVGGMNRRPILIIITLEMRDGQVLGRRSFEGRICACPGRDRKADEDHYREQQALNESSAKNGAASKRAFKQSPPAVPALGAGVKKRRHGDEDTYYLQVRGRENFEILMKLKESLELMELVPQPLVDSYRQQQQLLQRPTWGP

SEQ ID NO: 94092 - protein, 188 aa, Homo sapiens
  Payload ID: 18769
  Gene Name: tumor protein, translationally-controlled 1
  ENSP ID: ENSP00000339051
MIIYRDLISHDEMFSDIYKIREIADGLCLEVEGKMVSRTEGNIDDSLIGGNASAEGPEGEGTESTVITGVDIVMNHHLQETSFTKEAYKKYIKDYMKSIKGKLEEQRPERVKPFMTGAAEQIKHILANFKNYQFFIGENMNPDGMVALLDYREDGVTPYMIFFKDGLEMEKCVSTRKWVKINNVKKTF

SEQ ID NO: 94093 - protein, 138 aa, Homo sapiens
  Payload ID: 18769
  Gene Name: tumor protein, translationally-controlled 1
  Uniprot ID: P13693
  ENSP ID: ENSP00000368344
MVSRTEGNIDDSLIGGNASAEGPEGEGTESTVITGVDIVMNHHLQETSFTKEAYKKYIKDYMKSIKGKLEEQRPERVKPFMTGAAEQIKHILANFKNYQFFIGENMNPDGMVALLDYREDGVTPYMIFFKDGLEMEKC

SEQ ID NO: 94094 - protein, 138 aa, Homo sapiens; identical to SEQ ID NO: 94093
  Payload ID: 18769
  Gene Name: tumor protein, translationally-controlled 1
  Uniprot ID: P13693
  ENSP ID: ENSP00000368345

SEQ ID NO: 94095 - protein, 160 aa, Homo sapiens
  Payload ID: 18769
  Gene Name: tumor protein, translationally-controlled 1
  ENSP ID: ENSP00000368350
MFSDIYKIREIADGLCLEVEGKMVSRTEGNIDDSLIGGNASAEGPEGEGTESTVITGVDIVMNHHLQETSFTKEAYKKYIKDYMKSIKGKLEEQRPERVKPFMTGAAEQIKHILANFKNYQFFIGENMNPDGMVALLDYREDGVTPYMIFFKDGLEMEKC

SEQ ID NO: 94096 - protein, 172 aa, Homo sapiens
  Payload ID: 18769
  Gene Name: tumor protein, translationally-controlled 1
  Uniprot ID: P13693
  ENSP ID: ENSP00000431872
MIIYRDLISHDEMFSDIYKIREIADGLCLEVEGKMVSRTEGNIDDSLIGGNASAEGPEGEGTESTVITGVDIVMNHHLQETSFTKEAYKKYIKDYMKSIKGKLEEQRPERVKPFMTGAAEQIKHILANFKNYQFFIGENMNPDGMVALLDYREDGVTPYMIFFKDGLEMEKC

SEQ ID NO: 94097 - protein, 77 aa, Homo sapiens
  Payload ID: 18769
  Gene Name: tumor protein, translationally-controlled 1
  ENSP ID: ENSP00000432457
  MOD_RES (1)..(1): Any amino acid
XIKHILANFKNYQFFIGENMNPDGMVALLDYREDGVTPYMIFFKDGLEMEKCDAKERNPCAFCLSLWRPRLNWGIHL

SEQ ID NO: 94098 - protein, 77 aa, Homo sapiens; identical to SEQ ID NO: 94097
  Payload ID: 18769
  Gene Name: tumor protein, translationally-controlled 1
  ENSP ID: ENSP00000433091
  MOD_RES (1)..(1): Any amino acid

SEQ ID NO: 94099 - protein, 162 aa, Homo sapiens
  Payload ID: 18769
  Gene Name: tumor protein, translationally-controlled 1
  ENSP ID: ENSP00000433738
MGGSVYPADDEMFSDIYKIREIADGLCLEVEGKMVSRTEGNIDDSLIGGNASAEGPEGEGTESTVITGVDIVMNHHLQETSFTKEAYKKYIKDYMKSIKGKLEEQRPERVKPFMTGAAEQIKHILANFKNYQFFIGENMNPDGMVALLDYREDGVTPYMIFF

SEQ ID NO: 94100 - protein, 197 aa, Homo sapiens
  Payload ID: 18769
  Gene Name: tumor protein, translationally-controlled 1
  ENSP ID: ENSP00000477781
MIIYRDLISHDEMFSDIYKIREIADGLCLEVEGKMVSRTEGNIDDSLIGGNASAEGPEGEGTESTVITGVDIVMNHHLQETSFTKEAYKKYIKDYMKSIKGKLEEQRPERVKPFMTGAAEQIKHILANFKNYQFFIGENMNPDGMVALLDYREDGVTPYMIFFKDGLEMEKCDAKERNPCAFCLSLWRPRLNWGIHL

SEQ ID NO: 94101 - protein, 387 aa, Homo sapiens
  Payload ID: 18770
  Gene Name: tumor suppressing subtransferable candidate 1
  Uniprot ID: Q53HC9
  ENSP ID: ENSP00000371559
MEDDAPVIYGLEFQARALTPQTAETDAIRFLVGTQSLKYDNQIHIIDFDDENNIINKNVLLHQAGEIWHISASPADRGVLTTCYNRTSDSKVLTCAAVWRMPKELESGSHESPDDSSSTAQTLELLCHLDNTAHGNMACVVWEPMGDGKKIISLADNHILLWDLQESSSQAVLASSASLEGKGQLKFTSGRWSPHHNCTQVATANDTTLRGWDTRSMSQIYCIENAHGQLVRDLDFNPNKQYYLASCGDDCKVKFWDTRNVTEPVKTLEEHSHWVWNVRYNHSHDQLVLTGSSDSRVILSNMVSISSEPFGHLVDDDDISDQEDHRSEEKSKEPLQDNVIATYEEHEDSVYAVDWSSADPWLFASLSYDGRLVINRVPRALKYHILL

SEQ ID NO: 94102 - protein, 414 aa, Homo sapiens
  Payload ID: 18770
  Gene Name: tumor suppressing subtransferable candidate 1
  ENSP ID: ENSP00000381652
MEDDAPVIYGLEFQARALTPQTAETDAIRFLVGTQSLKYDNQIHIIDFDDENNIINKNVLLHQAGEIWHISASPADRGVLTTCYNRTFCCVLSLDSFGALGKSAAQLFIALATSSDSKVLTCAAVWRMPKELESGSHESPDDSSSTAQTLELLCHLDNTAHGNMACVVWEPMGDGKKIISLADNHILLWDLQESSSQAVLASSASLEGKGQLKFTSGRWSPHHNCTQVATANDTTLRGWDTRSMSQIYCIENAHGQLVRDLDFNPNKQYYLASCGDDCKVKFWDTRNVTEPVKTLEEHSHWVWNVRYNHSHDQLVLTGSSDSRVILSNMVSISSEPFGHLVDDDDISDQEDHRSEEKSKEPLQDNVIATYEEHEDSVYAVDWSSADPWLFASLSYDGRLVINRVPRALKYHILL

SEQ ID NO: 94103 - protein, 87 aa, Homo sapiens
  Payload ID: 18770
  Gene Name: tumor suppressing subtransferable candidate 1
  ENSP ID: ENSP00000385756
MEDDAPVIYGLEFQARALTPQTAETDAIRFLVGTQSLKYDNQNKDWKEIGQKGLKIEPRVIFRCFSQGMCSKTTQRMPGNLDPYHRF

SEQ ID NO: 94104 - protein, 314 aa, Homo sapiens
  Payload ID: 18770
  Gene Name: tumor suppressing subtransferable candidate 1
  ENSP ID: ENSP00000389080
MEDDAPVIYGLEFQARALTPQTAETDAIRFLVGTQSLKYDNQIHIIDFDDENNIINKNVLLHQAGEIWHISASPADRGVLTTCYNRTSDSKVLTCAAVWRMPKELESGSHESPDDSSSTAQTLELLCHLDNTAHGNMACVVWEPMGDGKKIISLADNHILLWDLQESSSQAVREESEHSEGACTDPVCAIIPRLEALWGRGTLESGNRDGPRHLHLPRASLTEGGPATSLTQGRRTRHGPHSQKDPPRASRMEEGPAECFLGELGLSYDCKKSAICQAYQNAMAKFIQQTLSELTLERVIRTFPNKWSFLTIFK

SEQ ID NO: 94105 - protein, 58 aa, Homo sapiens
  Payload ID: 18770
  Gene Name: tumor suppressing subtransferable candidate 1
  ENSP ID: ENSP00000389228
MEDDAPVIYGLEFQARALTPQTAETDAIRFLVGTQSLKYDNQCRVGANGRWEENHFLG

SEQ ID NO: 94106 - protein, 178 aa, Homo sapiens
  Payload ID: 18770
  Gene Name: tumor suppressing subtransferable candidate 1
  ENSP ID: ENSP00000393350
MEDDAPVIYGLEFQESSSQAVLASSASLEGKGQLKFTSGRWSPHHNCTQVATANDTTLRGWDTRSMSQIYCIENAHGQLVRDLDFNPNKQYYLASCGDDCKVKFWDTRNVTEPVKTLEEHSHWVWNVRYNHSHDQLVLTGSSDSRVILSNMVSISSEPFGHLVDDDDISDQEDHRSEE

SEQ ID NO: 94107 - protein, 155 aa, Homo sapiens
  Payload ID: 18770
  Gene Name: tumor suppressing subtransferable candidate 1
  ENSP ID: ENSP00000400214
MEDDAPVIYGLEFQARALTPQTAETDAIRFLVGTQSLKYDNQIHIIDFDDENNIINKNVLLHQAGEIWHISASPADRGVLTTCYNRRDIIESFGILPVAQSPTIVFVNTLHQVFFRGQVAASDSKVLTCAAVWRMPKELESGSHESPDDSSSTAQ

SEQ ID NO: 94108 - protein, 132 aa, Homo sapiens
  Payload ID: 18770
  Gene Name: tumor suppressing subtransferable candidate 1
  ENSP ID: ENSP00000403043
MEDDAPVIYGLEFQARALTPQTAETDAIRFLVGTQSLKYDNQIHIIDFDDENNIINKNVLLHQAGEIWHISASPADRGVLTTCYNRMSCGSQWEMGRKSFPWLITISCCGIYRKARARLCWPAQRPWKGRDN

SEQ ID NO: 94109 - protein, 329 aa, Homo sapiens
  Payload ID: 18771
  Gene Name: tumor suppressing subtransferable candidate 4
  Uniprot ID: Q9Y5U2
  ENSP ID: ENSP00000331087
MAEAGTGEPSPSVEGEHGTEYDTLPSDTVSLSDSDSDLSLPGGAEVEALSPMGLPGEEDSGPDEPPSPPSGLLPATVQPFHLRGMSSTFSQRSRDIFDCLEGAARRAPSSVAHTSMSDNGGFKRPLAPSGRSPVEGLGRAHRSPASPRVPPVPDYVAHPERWTKYSLEDVTEVSEQSNQATALAFLGSQSLAAPTDCVSSFNQDPSSCGEGRVIFTKPVRGVEARHERKRVLGKVGEPGRGGLGNPATDRGEGPVELAHLAGPGSPEAEEWGSHHGGLQEVEALSGSVHSGSVPGLPPVETVGFHGSRKRSRDHFRNKSSSPEDPGAEV

SEQ ID NO: 94110 - protein, 127 aa, Homo sapiens
  Payload ID: 18771
  Gene Name: tumor suppressing subtransferable candidate 4
  ENSP ID: ENSP00000370380
MAEAGTGLLPATVQPFHLRGMSSTFSQRSRDIFDCLEGAARRAPSSVAHTSMSDNGGFKRPLAPSGRSPVEGLGRAHRSPASPRVPPVPDYVAHPERWTKYSLEDVTEEAESRPLPEQEQQPRGPRC

SEQ ID NO: 94111 - protein, 265 aa, Homo sapiens
  Payload ID: 18771
  Gene Name: tumor suppressing subtransferable candidate 4
  Uniprot ID: Q9Y5U2
  ENSP ID: ENSP00000370384
MAEAGTGLLPATVQPFHLRGMSSTFSQRSRDIFDCLEGAARRAPSSVAHTSMSDNGGFKRPLAPSGRSPVEGLGRAHRSPASPRVPPVPDYVAHPERWTKYSLEDVTEVSEQSNQATALAFLGSQSLAAPTDCVSSFNQDPSSCGEGRVIFTKPVRGVEARHERKRVLGKVGEPGRGGLGNPATDRGEGPVELAHLAGPGSPEAEEWGSHHGGLQEVEALSGSVHSGSVPGLPPVETVGFHGSRKRSRDHFRNKSSSPEDPGAEV

SEQ ID NO: 94112 - protein, 203 aa, Homo sapiens
  Payload ID: 18771
  Gene Name: tumor suppressing subtransferable candidate 4
  ENSP ID: ENSP00000396925
MAEAGTGEPSPSVEGEHGTEYDTLPSDTVSLSDSDSDLSLPGGAEVEALSPMGLPGEEDSGPDEPPSPPSGLLPATVQPFHLRGMSSTFSQRSRDIFDCLEGAARRAPSSVAHTSMSDNGGFKRPLAPSGRSPVEGLGRAHRSPASPRVPPVPDYVAHPERWTKYSLEDVTEVSEQSNQATALAFLGSQSLAAPTDCVSSFNQ

SEQ ID NO: 94113 - protein, 112 aa, Homo sapiens
  Payload ID: 18771
  Gene Name: tumor suppressing subtransferable candidate 4
  ENSP ID: ENSP00000403475
MAEAGTGEPSPSVEGEHGTEYDTLPSDTVSLSDSDSDLSLPGGAEVEALSPMGLPGEEDSGPDEPPSPPSGLLPATVQPFHLRGMSSTFSQRSRDIFDCLEGAARRAPSSVA

SEQ ID NO: 94114 - protein, 329 aa, Homo sapiens; identical to SEQ ID NO: 94109
  Payload ID: 18771
  Gene Name: tumor suppressing subtransferable candidate 4
  Uniprot ID: Q9Y5U2
  ENSP ID: ENSP00000411224

SEQ ID NO: 94115 - protein, 207 aa, Homo sapiens
  Payload ID: 18771
  Gene Name: tumor suppressing subtransferable candidate 4
  ENSP ID: ENSP00000416937
MAEAGTGLLPATVQPFHLRGMSSTFSQRSRDIFDCLEGAARRAPSSVAHTSMSDNGGFKRPLAPSGRSPVEGLGRAHRSPASPRVPPVPDYVAHPERWTKYSLEDVTEVSEQSNQATALAFLGSQSLAAPTDCVSSFNQDPSSCGEGRVIFTKPVRGVEARHERKRVLGKVGEPGRGGLGNPATDRGEGPVELAHLAGPGSPEAEEW

SEQ ID NO: 94116 - protein, 110 aa, Homo sapiens
  Payload ID: 18771
  Gene Name: tumor suppressing subtransferable candidate 4
  ENSP ID: ENSP00000431430
MAEAGTGEPSPSVEGEHGTEYDTLPSDTVSLSDSDSDLSLPGGAEVEALSPMGLPGEEDSGPDEPPSPPSGLLPATVQPFHLRGMSSTFSQRSRDIFDCLEGAARRAPSS

SEQ ID NO: 94117 - protein, 191 aa, Homo sapiens
  Payload ID: 18771
  Gene Name: tumor suppressing subtransferable candidate 4
  ENSP ID: ENSP00000435013
MAEAGTGEPSPSVEGEHGTEYDTLPSDTVSLSDSDSDLSLPGGAEVEALSPMGLPGEEDSGPDEPPSPPSGLLPATVQPFHLRGMSSTFSQRSRDIFDCLEGAARRAPSSVAHTSMSDNGGFKRPLAPSGRSPVEGLGRAHRSPASPRVPPVPDYVAHPERWTKYSLEDVTEVSEQSNQATALAFLGSQSL

SEQ ID NO: 94118 - protein, 212 aa, Homo sapiens
  Payload ID: 18772
  Gene Name: tumor suppressor candidate 1
  Uniprot ID: Q2TAM9
  ENSP ID: ENSP00000350716
MGPMWRMRGGATRRGSCCGGDGAADGRGPGRSGRARGGGSPSGGGGGVGWRGRADGARQQLEERFADLAASHLEAIRARDEWDRQNARLRQENARLRLENRRLKRENRSLFRQALRLPGEGGNGTPAEARRVPEEASTNRRARDSGREDEPGSPRALRARLEKLEAMYRRALLQLHLEQRGPRPSGDKEEQPLQEPDSGLRSRDSEPSGPWL

SEQ ID NO: 94119 - protein, 110 aa, Homo sapiens
  Payload ID: 18773
  Gene Name: tumor suppressor candidate 2
  Uniprot ID: O75896
  ENSP ID: ENSP00000232496
MGASGSKARGLWPFASAAGGGGSEAAGAEQALVRPRGRAVPPFVFTRRGSMFYDEDGDLAHEFYEETIVTKNGQKRAKLRRVHKNLIPQGIVKLDHPRIHVDFPVILYEV

SEQ ID NO: 94120 - protein, 57 aa, Homo sapiens
  Payload ID: 18773
  Gene Name: tumor suppressor candidate 2
  ENSP ID: ENSP00000394844
MGASGSKARGLWPFASAAGGGGSEAAGAEQALVRPRGRAVPPFVFTRRGLGFCYFSL

SEQ ID NO: 94121 - protein, 65 aa, Homo sapiens
  Payload ID: 18773
  Gene Name: tumor suppressor candidate 2
  ENSP ID: ENSP00000399199
MGASGSKARGLWPFASAAGGGGSEAAGAEQALVRPRGRAVPPFVFTRRGLLLFQSLTLGQQHLLE

SEQ ID NO: 94122 - protein, 65 aa, Homo sapiens; identical to SEQ ID NO: 94121
  Payload ID: 18773
  Gene Name: tumor suppressor candidate 2
  ENSP ID: ENSP00000409488

SEQ ID NO: 94123 - protein, 347 aa, Homo sapiens
  Payload ID: 18774
  Gene Name: tumor suppressor candidate 3
  Uniprot ID: Q13454
  ENSP ID: ENSP00000371450
MGARGAPSRRRQAGRRLRYLPTGSFPFLLLLLLLCIQLGGGQKKKENLLAEKVEQLMEWSSRRSIFRMNGDKFRKFIKAPPRNYSMIVMFTALQPQRQCSVCRQANEEYQILANSWRYSSAFCNKLFFSMVDYDEGTDVFQQLNMNSAPTFMHFPPKGRPKRADTFDLQRIGFAAEQLAKWIADRTDVHIRVFRPPNYSGTIALALLVSLVGGLLYLRRNNLEFIYNKTGWAMVSLCIVFAMTSGQMWNHIRGPPYAHKNPHNGQVSYIHGSSQAQFVAESHIILVLNAAITMGMVLLNEAATSKGDVGKRRIICLVGLGLVVFFFSFLLSIFRSKYHGYPYSFLIK

SEQ ID NO: 94124 - protein, 276 aa, Homo sapiens
  Payload ID: 18774
  Gene Name: tumor suppressor candidate 3
  ENSP ID: ENSP00000420829
MGARGAPSRRRQAGRRLRYLPTGSFPFLLLLLLLCIQLGGGQKKKENLLAEKVEQLMEWSSRRSIFRMNGDKFRKFIKAPPRNYSMIVMFTALQPQRQCSVCRQANEEYQILANSWRYSSAFCNKLFFSMVDYDEGTDVFQQLNMNSAPTFMHFPPKGRPKRADTFDLQRIGFAAEQLAKWIADRTDVHIRVFRPPNYSGTIALALLVSLVGGLLYLRRNNLEFIYNKTGWAMVSLCIVFAMTSGQMWNHIRGPPYAHKNPHNGQVMPLSPWGWFF

SEQ ID NO: 94125 - protein, 289 aa, Homo sapiens
  Payload ID: 18774
  Gene Name: tumor suppressor candidate 3
  ENSP ID: ENSP00000423426
MGARGAPSRRRQAGRRLRYLPTGSFPFLLLLLLLCIQLGGGQKKKENLLAEKVEQLMEWSSRRSIFRMNGDKFRKFIKAPPRNYSMIVMFTALQPQRQCSVCRQANEEYQILANSWRYSSAFCNKLFFSMVDYDEGTDVFQQLNMNSAPTFMHFPPKGRPKRADTFDLQRIGFAAEQLAKWIADRTDVHIRVFRPPNYSGTIALALLVSLVGGLLYLRRNNLEFIYNKTGWAMVSLCIVFAMTSGQMWNHIRGPPYAHKNPHNGQVSYIHGSSQAQFVAESHIILVLTS

SEQ ID NO: 94126 - protein, 348 aa, Homo sapiens
  Payload ID: 18774
  Gene Name: tumor suppressor candidate 3
  Uniprot ID: Q13454
  ENSP ID: ENSP00000424544
MGARGAPSRRRQAGRRLRYLPTGSFPFLLLLLLLCIQLGGGQKKKENLLAEKVEQLMEWSSRRSIFRMNGDKFRKFIKAPPRNYSMIVMFTALQPQRQCSVCRQANEEYQILANSWRYSSAFCNKLFFSMVDYDEGTDVFQQLNMNSAPTFMHFPPKGRPKRADTFDLQRIGFAAEQLAKWIADRTDVHIRVFRPPNYSGTIALALLVSLVGGLLYLRRNNLEFIYNKTGWAMVSLCIVFAMTSGQMWNHIRGPPYAHKNPHNGQVSYIHGSSQAQFVAESHIILVLNAAITMGMVLLNEAATSKGDVGKRRIICLVGLGLVVFFFSFLLSIFRSKYHGYPYSDLDFE

SEQ ID NO: 94127 - protein, 314 aa, Homo sapiens
  Payload ID: 18774
  Gene Name: tumor suppressor candidate 3
  ENSP ID: ENSP00000425777
MGARGAPSRRRQAGRRLRYLPTGSFPFLLLLLLLCIQLGGGQKKKENLLAEKVEQLMEWSSRRSIFRMNGDKFRKFIKAPPRNYSMIVMFTALQPQRQCSVCRQANEEYQILANSWRYSSAFCNKLFFSMVDYDEGTDVFQQLNMNSAPTFMHFPPKGRPKRADTFDLQRIGFAAEQLAKWIADRTDVHIRVFRPPNYSGTIALALLVSLVGGLLYLRRNNLEFIYNKTGWAMVSLCIVFAMTSGQMWNHIRGPPYAHKNPHNGQVSYIHGSSQAQFVAESHIILVLNAAITMGMVLLNEAATSKGDVGKRRTF

SEQ ID NO: 94128 - protein, 302 aa, Homo sapiens
  Payload ID: 18774
  Gene Name: tumor suppressor candidate 3
  ENSP ID: ENSP00000426880
NLLAEKVEQLMEWSSRRSIFRMNGDKFRKFIKAPPRNYSMIVMFTALQPQRQCSVCRQANEEYQILANSWRYSSAFCNKLFFSMVDYDEGTDVFQQLNMNSAPTFMHFPPKGRPKRADTFDLQRIGFAAEQLAKWIADRTDVHIRVFRPPNYSGTIALALLVSLVGGLLYLRRNNLEFIYNKTGWAMVSLCIVFAMTSGQMWNHIRGPPYAHKNPHNGQVSYIHGSSQAQFVAESHIILVLNAAITMGMVLLNEAATSKGDVGKRRIICLVGLGLVVFFFSFLLSIFRSKYHGYPYSDLDFE

SEQ ID NO: 94129 - protein, 276 aa, Homo sapiens; identical to SEQ ID NO: 94124
  Payload ID: 18774
  Gene Name: tumor suppressor candidate 3
  ENSP ID: ENSP00000426973

SEQ ID NO: 94130 - protein, 177 aa, Homo sapiens
  Payload ID: 18775
  Gene Name: tumor suppressor candidate 5
  Uniprot ID: Q8IXB3
  ENSP ID: ENSP00000329548
MAHPVQSEFPSAQEPGSAAFLDLPEMEILLTKAENKDDKTLNLSKTLSGPLDLEQNSQGLPFKAISEGHLEAPLPRSPSRASSRRASSIATTSYAQDQEAPRDYLILAVVACFCPVWPLNLIPLIISIMSRSSMQQGNVDGARRLGRLARLLSITLIIMGIVIIMVAVTVNFTVQKK

SEQ ID NO: 94131 - protein, 4 aa, Homo sapiens
  Payload ID: 18775
  Gene Name: tumor suppressor candidate 5
  ENSP ID: ENSP00000486005
  MOD_RES (1)..(1): Any amino acid
XQKK

SEQ ID NO: 94132 - protein, 390 aa, Homo sapiens
  Payload ID: 18776
  Gene Name: tumor susceptibility 101
  Uniprot ID: Q99816
  ENSP ID: ENSP00000251968
MAVSESQLKKMVSKYKYRDLTVRETVNVITLYKDLKPVLDSYVFNDGSSRELMNLTGTIPVPYRGNTYNIPICLWLLDTYPYNPPICFVKPTSSMTIKTGKHVDANGKIYLPYLHEWKHPQSDLLGLIQVMIVVFGDEPPVFSRPISASYPPYQATGPPNTSYMPGMPGGISPYPSGYPPNPSGYPGCPYPPGGPYPATTSSQYPSQPPVTTVGPSRDGTISEDTIRASLISAVSDKLRWRMKEEMDRAQAELNALKRTEEDLKKGHQKLEEMVTRLDQEVAEVDKNIELLKKKDEELSSALEKMENQSENNDIDEVIIPTAPLYKQILNLYAEENAIEDTIFYLGEALRRGVIDLDVFLKHVRLLSRKQFQLRALMQKARKTAGLSDLY

SEQ ID NO: 94133 - protein, 365 aa, Homo sapiens
  Payload ID: 18776
  Gene Name: tumor susceptibility 101
  ENSP ID: ENSP00000438471
MAVSESQLKKMVSKYKYRDLTVRETVNVITLYKDLKPVLDSYVFNDGSSRELMNLTGTIPVPYRGNTYNIPICLWLLDTYPYNPPICFVKPTSSMTIKTGKHVDANGKIYLPYLHEWKHPQSDLLGLIQVMIVVFGDEPPVFSRPISASYPPYQATGPPNTSYMPGMPGGISPYPSGYPPNPSGYPGCPYPPGGPYPATTSSQYPSQPPVTTVGPSRDGTISEDTIRASLISAVSDKLRWRMKEEMDRAQAELNALKRTEEDLKKGHQKLEEMVTRLDQEVAEVDKNIELLKKKDEELSSALEKMENQSENNDIDEVIIPTAPLYKQILNLYAEENAIEDTIFYLGEALRRGVIDLDVFLKTSVP

SEQ ID NO: 94134 - protein, 77 aa, Homo sapiens
  Payload ID: 18776
  Gene Name: tumor susceptibility 101
  ENSP ID: ENSP00000463213
  MOD_RES (1)..(1): Any amino acid
XDEVIIPTAPLYKQILNLYAEENAIEDTIFYLGEALRRGVIDLDVFLKHVRLLSRKQFQLRALMQKARKTAGLSDLY

SEQ ID NO: 94135 - protein, 63 aa, Homo sapiens
  Payload ID: 18776
  Gene Name: tumor susceptibility 101
  ENSP ID: ENSP00000464386
ILNLYAEENAIEDTIFYLGEALRRGVIDLDVFLKHVRLLSRKQFQLRALMQKARKTAGLSDLY

SEQ ID NO: 94136 - protein, 323 aa, Homo sapiens
  Payload ID: 18777
  Gene Name: tumor-associated calcium signal transducer 2
  Uniprot ID: P09758
  ENSP ID: ENSP00000360269
MARGPGLAPPPLRLPLLLLVLAAVTGHTAAQDNCTCPTNKMTVCSPDGPGGRCQCRALGSGMAVDCSTLTSKCLLLKARMSAPKNARTLVRPSEHALVDNDGLYDPDCDPEGRFKARQCNQTSVCWCVNSVGVRRTDKGDLSLRCDELVRTHHILIDLRHRPTAGAFNHSDLDAELRRLFRERYRLHPKFVAAVHYEQPTIQIELRQNTSQKAAGDVDIGDAAYYFERDIKGESLFQGRGGLDLRVRGEPLQVERTLIYYLDEIPPKFSMKRLTAGLIAVIVVVVVALVAGMAVLVITNRRKSGKYKKVEIKELGELRKEPSL

SEQ ID NO: 94137 - protein, 37 aa, Homo sapiens; identical to SEQ ID NO: 90263
  Payload ID: 18778
  Gene Name: TVP23C-CDRT4 readthrough
  ENSP ID: ENSP00000423249

SEQ ID NO: 94138 - protein, 164 aa, Homo sapiens
  Payload ID: 18778
  Gene Name: TVP23C-CDRT4 readthrough
  ENSP ID: ENSP00000429865
MLQQDSNDDTEDVSLFDAEEETTNRPRKAKIRHPVASFFHLFFRVSAIIVCLLCELLSSSFITCMVTIILLLSCDFWAVKNVTGRLMVGLRWWNHIDEDGKSHWVFESRKESSQENKTVSEAESRIFWLGLIACSVLWVIFAFSALFSFTVKWLESEPVMLRNQ

SEQ ID NO: 94139 - protein, 53 aa, Homo sapiens; identical to SEQ ID NO: 90273
  Payload ID: 18778
  Gene Name: TVP23C-CDRT4 readthrough
  ENSP ID: ENSP00000430143

SEQ ID NO: 94140 - protein, 37 aa, Homo sapiens; identical to SEQ ID NO: 90263
  Payload ID: 18778
  Gene Name: TVP23C-CDRT4 readthrough
  ENSP ID: ENSP00000450826

SEQ ID NO: 94141 - protein, 451 aa, Homo sapiens
  Payload ID: 18779
  Gene Name: tweety family member 1
  Uniprot ID: Q9H313
  ENSP ID: ENSP00000301194
MGAPPGYRPSAWVHLLHQLPRADFQLRPVPSVFAPQEQEYQQALLLVAALAGLGLGLSLIFIAVYLIRFCCCRPPEPPGSKIPSPGGGCVTWSCIVALLAGCTGIGIGFYGNSETSDGVSQLSSALLHANHTLSTIDHLVLETVERLGEAVRTELTTLEEVLEPRTELVAAARGARRQAEAAAQQLQGLAFWQGVPLSPLQVAENVSFVEEYRWLAYVLLLLLELLVCLFTLLGLAKQSKWLVIVMTVMSLLVLVLSWGSMGLEAATAVGLSDFCSNPDPYVLNLTQEETGLSSDILSYYLLCNRAVSNPFQQRLTLSQRALANIHSQLLGLEREAVPQFPSAQKPLLSLEETLNVTEGNFHQLVALLHCRSLHKDYGAALRGLCEDALEGLLFLLLFSLLSAGALATALCSLPRAWALFPPSDDYDDTDDDDPFNPQQESKRFVQWQSSI

SEQ ID NO: 94142 - protein, 450 aa, Homo sapiens
  Payload ID: 18779
  Gene Name: tweety family member 1
  Uniprot ID: Q9H313
  ENSP ID: ENSP00000365713
MGAPPGYRPSAWVHLLHQLPRADFQLRPVPSVFAPQEQEYQQALLLVAALAGLGLGLSLIFIAVYLIRFCCCRPPEPPGSKIPSPGGGCVTWSCIVALLAGCTGIGIGFYGNSETSDGVSQLSSALLHANHTLSTIDHLVLETVERLGEAVRTELTTLEEVLEPRTELVAAARGARRQAEAAAQQLQGLAFWQGVPLSPLQVAENVSFVEEYRWLAYVLLLLLELLVCLFTLLGLAKQSKWLVIVMTVMSLLVLVLSWGSMGLEAATAVGLSDFCSNPDPYVLNLTQEETGLSSDILSYYLLCNRAVSNPFQQRLTLSQRALANIHSQLLGLEREAVPQFPSAQKPLLSLEETLNVTEGNFHQLVALLHCRSLHKDYGAALRGLCEDALEGLLFLLLFSLLSAGALATALCSLPRAWALFPPSDDYDDTDDDDPFNPQESKRFVQWQSSI

SEQ ID NO: 94143 - protein, 460 aa, Homo sapiens
  Payload ID: 18779
  Gene Name: tweety family member 1
  Uniprot ID: Q9H313
  ENSP ID: ENSP00000365714
MGAPPGYRPSAWVHLLHQLPRADFQLRPVPSVFAPQEQEYQQALLLVAALAGLGLGLSLIFIAVYLIRFCCCRPPEPPGSKIPSPGGGCVTWSCIVALLAGCTGIGIGFYGNSETSDGVSQLSSALLHANHTLSTIDHLVLETVERLGEAVRTELTTLEEVLEPRTELVAAARGARRQAEAAAQQLQGLAFWQGVPLSPLQVAENVSFVEEYRWLAYVLLLLLELLVCLFTLLGLAKQSKWLVIVMTVMSLLVLVLSWGSMGLEAATAVGLSDFCSNPDPYVLNLTQEETGLSSDILSYYLLCNRAVSNPFQQRLTLSQRALANIHSQLLGLEREAVPQFPSAQKPLLSLEETLNVTEGNFHQLVALLHCRSLHKDYGAALRGLCEDALEGLLFLLLFSLLSAGALATALCSLPRAWALFPPRNPSALCSGSRLSEPLLPAGLEPGSPLRSFPGCRRRPH

SEQ ID NO: 94144 - protein, 38 aa, Homo sapiens
  Payload ID: 18779
  Gene Name: tweety family member 1
  ENSP ID: ENSP00000375619
  MOD_RES (1)..(1): Any amino acid
XLIRFCCCRPPEPPGSKIPSPGGGCVTWSCIVALLAGW

SEQ ID NO: 94145 - protein, 157 aa, Homo sapiens
  Payload ID: 18779
  Gene Name: tweety family member 1
  ENSP ID: ENSP00000391282
MPPTPAARYLRGQQLPRADFQLRPVPSVFAPQEQEYQQALLLVAALAGLGLGLSLIFIAVYLIRFCCCRPPEPPGSKIPSPGGGCVTWSCIVALLAGCTGIGIGFYGNSETSDGVSQLSSALLHANHTLSTIDHLVLETVERLGEAVRTELTTLEEV

SEQ ID NO: 94146 - protein, 280 aa, Homo sapiens
  Payload ID: 18779
  Gene Name: tweety family member 1
  ENSP ID: ENSP00000393592
MGAPPGYRPSAWVHLLHQLPRADFQLRPVPSVFAPQEQEYQQDQSSLAVTQRPPPTTPLHRLRPRPRLTPALARRPPEAARGDPRPQSPPEALLLVAALAGLGLGLSLIFIAVYLIRFCCCRPPEPPGSKIPSPGGGCVTWSCIVALLAGCTGIGIGFYGNSETSDGVSQLSSALLHANHTLSTIDHLVLETVERLGEAVRTELTTLEEVLEPRTELVAAARGARRQAEAAAQQLQGLAFWQGVPLSPLQVAENVSFVEEYRWLAYVLLLLLELLVCLFT

SEQ ID NO: 94147 - protein, 113 aa, Homo sapiens
  Payload ID: 18779
  Gene Name: tweety family member 1
  ENSP ID: ENSP00000402817
MGAPPGYRPSAWVHLLHQLPRADFQLRPVPSVFAPQEQEYQQALLLVAALAGLGLGLSLIFIAVYLIRFCCCRPPEPPGSKIPSPGGGCVTWSCIVALLAGWCWRRWRGWARR

SEQ ID NO: 94148 - protein, 451 aa, Homo sapiens; identical to SEQ ID NO: 94141
  Payload ID: 18779
  Gene Name: tweety family member 1
  Uniprot ID: Q9H313
  ENSP ID: ENSP00000479779

SEQ ID NO: 94149 - protein, 451 aa, Homo sapiens; identical to SEQ ID NO: 94141
  Payload ID: 18779
  Gene Name: tweety family member 1
  Uniprot ID: Q9H313
  ENSP ID: ENSP00000480177

SEQ ID NO: 94150 - protein, 450 aa, Homo sapiens; identical to SEQ ID NO: 94142
  Payload ID: 18779
  Gene Name: tweety family member 1
  Uniprot ID: Q9H313
  ENSP ID: ENSP00000480769

SEQ ID NO: 94151 - protein, 450 aa, Homo sapiens; identical to SEQ ID NO: 94142
  Payload ID: 18779
  Gene Name: tweety family member 1
  Uniprot ID: Q9H313
  ENSP ID: ENSP00000481138

SEQ ID NO: 94152 - protein, 105 aa, Homo sapiens
  Payload ID: 18779
  Gene Name: tweety family member 1
  ENSP ID: ENSP00000481274
MGAPPGYRPSAWVHLLHQLPRADFQLRPVPSVFAPQEQEYQQVGPASRLHNGHLQQRRSTGSGLGPDSRPLWPGDLPKPHAGIRGPSHRQRPCCWWRPWRAWAWA

SEQ ID NO: 94153 - protein, 451 aa, Homo sapiens; identical to SEQ ID NO: 94141
  Payload ID: 18779
  Gene Name: tweety family member 1
  Uniprot ID: Q9H313
  ENSP ID: ENSP00000481601

SEQ ID NO: 94154 - protein, 46 aa, Homo sapiens
  Payload ID: 18779
  Gene Name: tweety family member 1
  ENSP ID: ENSP00000482140
MGAPPGYRPSAWVHLLHQLPRADFQLRPVPSVFAPQEQEYQQDQSR

SEQ ID NO: 94155 - protein, 239 aa, Homo sapiens
  Payload ID: 18779
  Gene Name: tweety family member 1
  Uniprot ID: Q9H313
  ENSP ID: ENSP00000482372
MWLAYVLLLLLELLVCLFTLLGLAKQSKWLVIVMTVMSLLVLVLSWGSMGLEAATAVGLSDFCSNPDPYVLNLTQEETGLSSDILSYYLLCNRAVSNPFQQRLTLSQRALANIHSQLLGLEREAVPQFPSAQKPLLSLEETLNVTEGNFHQLVALLHCRSLHKDYGAALRGLCEDALEGLLFLLLFSLLSAGALATALCSLPRAWALFPPSDDYDDTDDDDPFNPQQESKRFVQWQSSI

SEQ ID NO: 94156 - protein, 320 aa, Homo sapiens
  Payload ID: 18779
  Gene Name: tweety family member 1
  Uniprot ID: Q9H313
  ENSP ID: ENSP00000483288
MEKVRLWRGSESRAAICTGIGIGFYGNSETSDGVSQLSSALLHANHTLSTIDHLTVERLGEAVRTELTTLEEVLEPRTELVAAARGARRQAEAAAQQLQGLAFWQGVPLSPLQVAENVSFVEEYRWLAYVLLLLLELLVCLFTLLGLAKQSKWLVIVMTVMSLLVLVLSWGSMGLEAATAVGLSDFCSNPDPYVLNLTQEETGLSSDILSYYLLCNRAVSNPFQQRLTLSQRALANIHSQLLGLEREAVPQFPSAQKPLLSLEETLNVTEGNFHQLVALLHCRSLHKVKPLPSQFLLPRGASVSTHRTTSSFSLDPCHCA

SEQ ID NO: 94157 - protein, 323 aa, Homo sapiens
  Payload ID: 18779
  Gene Name: tweety family member 1
  ENSP ID: ENSP00000483823
MEKVRLWRGSESRAAICTGIGIGFYGNSETSDGVSQLSSALLHANHTLSTIDHLVLETVERLGEAVRTELTTLEEVLEPRTELVAAARGARRQAEAAAQQLQGLAFWQGVPLSPLQVAENVSFVEEYRWLAYVLLLLLELLVCLFTLLGLAKQSKWLVIVMTVMSLLVLVLSWGSMGLEAATAVGLSDFCSNPDPYVLNLTQEETGLSSDILSYYLLCNRAVSNPFQQRLTLSQRALANIHSQLLGLEREAVPQFPSAQKPLLSLEETLNVTEGNFHQLVALLHCRSLHKVKPLPSQFLLPRGASVWTHRTTSSFSLDPCHCA

SEQ ID NO: 94158 - protein, 239 aa, Homo sapiens; identical to SEQ ID NO: 94155
  Payload ID: 18779
  Gene Name: tweety family member 1
  Uniprot ID: Q9H313
  ENSP ID: ENSP00000484077

SEQ ID NO: 94159 - protein, 460 aa, Homo sapiens; identical to SEQ ID NO: 94143
  Payload ID: 18779
  Gene Name: tweety family member 1
  Uniprot ID: Q9H313
  ENSP ID: ENSP00000484548

SEQ ID NO: 94160 - protein, 450 aa, Homo sapiens; identical to SEQ ID NO: 94142
  Payload ID: 18779
  Gene Name: tweety family member 1
  Uniprot ID: Q9H313
  ENSP ID: ENSP00000484774

SEQ ID NO: 94161 - protein, 460 aa, Homo sapiens; identical to SEQ ID NO: 94143
  Payload ID: 18779
  Gene Name: tweety family member 1
  Uniprot ID: Q9H313
  ENSP ID: ENSP00000484835

SEQ ID NO: 94162 - protein, 460 aa, Homo sapiens; identical to SEQ ID NO: 94143
  Payload ID: 18779
  Gene Name: tweety family member 1
  Uniprot ID: Q9H313
  ENSP ID: ENSP00000484881

SEQ ID NO: 94163 - protein, 534 aa, Homo sapiens
  Payload ID: 18780
  Gene Name: tweety family member 2
  Uniprot ID: Q9BSA4
  ENSP ID: ENSP00000269346
MQAARVDYIAPWWVVWLHSVPHVGLRLQPVNSTFSPGDESYQESLLFLGLVAAVCLGLNLIFLVAYLVCACHCRRDDAVQTKQHHSCCITWTAVVAGLICCAAVGVGFYGNSETNDGAYQLMYSLDDANHTFSGIDALVSGTTQKMKVDLEQHLARLSEIFAARGDYLQTLKFIQQMAGSVVVQLSGLPVWREVTMELTKLSDQTGYVEYYRWLSYLLLFILDLVICLIACLGLAKRSKCLLASMLCCGALSLLLSWASLAADGSAAVATSDFCVAPDTFILNVTEGQISTEVTRYYLYCSQSGSSPFQQTLTTFQRALTTMQIQVAGLLQFAVPLFSTAEEDLLAIQLLLNSSESSLHQLTAMVDCRGLHKDYLDALAGICYDGLQGLLYLGLFSFLAALAFSTMICAGPRAWKHFTTRNRDYDDIDDDDPFNPQAWRMAAHSPPRGQLHSFCSYSSGLGSQTSLQPPAQTISNAPVSEYMNQAMLFGRNPRYENVPLIGRASPPPTYSPSMRATYLSVADEHLRHYGNQFPA

SEQ ID NO: 94164 - protein, 213 aa, Homo sapiens
  Payload ID: 18780
  Gene Name: tweety family member 2
  Uniprot ID: Q9BSA4
  ENSP ID: ENSP00000394576
MQIQVAGLLQFAVPLFSTAEEDLLAIQLLLNSSESSLHQLTAMVDCRGLHKDYLDALAGICYDGLQGLLYLGLFSFLAALAFSTMICAGPRAWKHFTTRNRDYDDIDDDDPFNPQAWRMAAHSPPRGQLHSFCSYSSGLGSQTSLQPPAQTISNAPVSEYMNQAMLFGRNPRYENVPLIGRASPPPTYSPSMRATYLSVADEHLRHYGNQFPA

SEQ ID NO: 94165 - protein, 513 aa, Homo sapiens
  Payload ID: 18780
  Gene Name: tweety family member 2
  ENSP ID: ENSP00000433089
MSVVGQDRKSGSGCYLRWLLFLSLLFLGLVAAVCLGLNLIFLVAYLVCACHCRRDDAVQTKQHHSCCITWTAVVAGLICCAAVGVGFYGNSETNDGAYQLMYSLDDANHTFSGIDALVSGTTQKMKVDLEQHLARLSEIFAARGDYLQTLKFIQQMAGSVVVQLSGLPVWREVTMELTKLSDQTGYVEYYRWLSYLLLFILDLVICLIACLGLAKRSKCLLASMLCCGALSLLLSWASLAADGSAAVATSDFCVAPDTFILNVTEGQISTEVTRYYLYCSQSGSSPFQQTLTTFQRALTTMQIQVAGLLQFAVPLFSTAEEDLLAIQLLLNSSESSLHQLTAMVDCRGLHKDYLDALAGICYDGLQGLLYLGLFSFLAALAFSTMICAGPRAWKHFTTRNRDYDDIDDDDPFNPQAWRMAAHSPPRGQLHSFCSYSSGLGSQTSLQPPAQTISNAPVSEYMNQAMLFGRNPRYENVPLIGRASPPPTYSPSMRATYLSVADEHLRHYGNQFPA

SEQ ID NO: 94166 - protein, 138 aa, Homo sapiens
  Payload ID: 18780
  Gene Name: tweety family member 2
  ENSP ID: ENSP00000462219
  MOD_RES (1)..(1): Any amino acid
XWLSYLLLFILDLVICLIACLGLAKRSKCLLASMLCCGALSLLLSWASLAADGSAAVATSDFCVAPDTFILNVTEGQISTEVTRYYLYCSQSGSSPFQQTLTTFQRALTTMQIQVAGLLQFAVPLFSTAETCLQSSSC

SEQ ID NO: 94167 - protein, 137 aa, Homo sapiens
  Payload ID: 18780
  Gene Name: tweety family member 2
  ENSP ID: ENSP00000462492
ALTTMQIQVAGLLQFAVPLFSTAEEDLLAIQLLLNSSESSLHQLTAMVDCRGLHKAKPVPFAPSSQGVLLLAILASASVPPSLVPHPATSSALFRASFLVPSSQIIWTLLLASATTASRACCTLASSPSWPPSPSPP

SEQ ID NO: 94168 - protein, 523 aa, Homo sapiens
  Payload ID: 18781
  Gene Name: tweety family member 3
  Uniprot ID: Q9C0H2
  ENSP ID: ENSP00000258796
MAGVSYAAPWWVSLLHRLPHFDLSWEATSSQFRPEDTDYQQALLLLGAAALACLALDLLFLLFYSFWLCCRRRKSEEHLDADCCCTAWCVIIATLVCSAGIAVGFYGNGETSDGIHRATYSLRHANRTVAGVQDRVWDTAVGLNHTAEPSLQTLERQLAGRPEPLRAVQRLQGLLETLLGYTAAIPFWRNTAVSLEVLAEQVDLYDWYRWLGYLGLLLLDVIICLLVLVGLIRSSKGILVGVCLLGVLALVISWGALGLELAVSVGSSDFCVDPDAYVTKMVEEYSVLSGDILQYYLACSPRAANPFQQKLSGSHKALVEMQDVVAELLRTVPWEQPATKDPLLRVQEVLNGTEVNLQHLTALVDCRSLHLDYVQALTGFCYDGVEGLIYLALFSFVTALMFSSIVCSVPHTWQQKRGPDEDGEEEAAPGPRQAHDSLYRVHMPSLYSCGSSYGSETSIPAAAHTVSNAPVTEYMSQNANFQNPRCENTPLIGRESPPPSYTSSMRAKYLATSQPRPDSSGSH

SEQ ID NO: 94169 - protein, 116 aa, Homo sapiens
  Payload ID: 18781
  Gene Name: tweety family member 3
  ENSP ID: ENSP00000383227
MGPLPCSPLRNTFMVSKRGFSPPQAPNFPTRPENLRTTAGVGDPARTQALLLLGAAALACLALDLLFLLFYSFWLCCRRRKSEEHLDADCCCTAWCVIIATLVCSAGIAVGFYGNG

SEQ ID NO: 94170 - protein, 352 aa, Homo sapiens
  Payload ID: 18781
  Gene Name: tweety family member 3
  Uniprot ID: Q9C0H2
  ENSP ID: ENSP00000385015
MPSGVPGCWPQLPLKGPWRPTPRPRVPVPWRTPRFACRWLGYLGLLLLDVIICLLVLVGLIRSSKGILVGVCLLGVLALVISWGALGLELAVSVGSSDFCVDPDAYVTKMVEEYSVLSGDILQYYLACSPRAANPFQQKLSGSHKALVEMQDVVAELLRTVPWEQPATKDPLLRVQEVLNGTEVNLQHLTALVDCRSLHLDYVQALTGFCYDGVEGLIYLALFSFVTALMFSSIVCSVPHTWQQKRGPDEDGEEEAAPGPRQAHDSLYRVHMPSLYSCGSSYGSETSIPAAAHTVSNAPVTEYMSQNANFQNPRCENTPLIGRESPPPSYTSSMRAKYLATSQPRPDSSGSH

SEQ ID NO: 94171 - protein, 491 aa, Homo sapiens
  Payload ID: 18781
  Gene Name: tweety family member 3
  Uniprot ID: Q9C0H2
  ENSP ID: ENSP00000385316
MAGVSYAAPWWVSLLHRLPHFDLSWEATSSQFRPEDTDYQQALLLLGAAALACLALDLLFLLFYSFWLCCRRRKSEEHLDADCCCTAWCVIIATLVCSAGIAVGFYGNGETSDGIHRATYSLRHANRTVAGVQDRVWDTAVGLNHTAEPSLQTLERQLAGRPEPLRAVQRLQGLLETLLGYTAAIPFWRNTAVSLEVLAEQVDLYDWYRVCLLGVLALVISWGALGLELAVSVGSSDFCVDPDAYVTKMVEEYSVLSGDILQYYLACSPRAANPFQQKLSGSHKALVEMQDVVAELLRTVPWEQPATKDPLLRVQEVLNGTEVNLQHLTALVDCRSLHLDYVQALTGFCYDGVEGLIYLALFSFVTALMFSSIVCSVPHTWQQKRGPDEDGEEEAAPGPRQAHDSLYRVHMPSLYSCGSSYGSETSIPAAAHTVSNAPVTEYMSQNANFQNPRCENTPLIGRESPPPSYTSSMRAKYLATSQPRPDSSGSH

SEQ ID NO: 94172 - protein, 186 aa, Homo sapiens
  Payload ID: 18781
  Gene Name: tweety family member 3
  ENSP ID: ENSP00000413757
DPLLRVQEVLNGTEVNLQHLTALVDCRSLHLDYVQALTGFCYDGVEGLIYLALFSFVTALMFSSIVCSVPHTWQQKRGPDEDGEEEAAPGPRQAHDSLYRVHMPSLYSCGSSYGSETSIPAAAHTVSNAPVTEYMSQNANFQNPRCENTPLIGRESPPPSRYLAALDSGSHAGWQFKPMDSARTLW

SEQ ID NO: 94173 - protein, 350 aa, Homo sapiens
  Payload ID: 18782
  Gene Name: twinfilin actin binding protein 1
  Uniprot ID: Q12792
  ENSP ID: ENSP00000378886
MSHQTGIQASEDVKEIFARARNGKYRLLKISIENEQLVIGSYSQPSDSWDKDYDSFVLPLLEDKQPCYILFRLDSQNAQGYEWIFIAWSPDHSHVRQKMLYAATRATLKKEFGGGHIKDEVFGTVKEDVSLHGYKKYLLSQSSPAPLTAAEEELRQIKINEVQTDVGVDTKHQTLQGVAFPISREAFQALEKLNNRQLNYVQLEIDIKNEIIILANTTNTELKDLPKRIPKDSARYHFFLYKHSHEGDYLESIVFIYSMPGYTCSIRERMLYSSCKSRLLEIVERQLQMDVIRKIEIDNGDELTADFLYEEVHPKQHAHKQSFAKPKGPAGKRGIRRLIRGPAETEATTD

SEQ ID NO: 94174 - protein, 119 aa, Homo sapiens
  Payload ID: 18782
  Gene Name: twinfilin actin binding protein 1
  ENSP ID: ENSP00000446665
MSHQTGIQGNSARRDSQGRGFRESRESREGCRTGRAGVGPGAPEVGLAGRAGPRRLSALLLPGRCRPASSSSPVPAAVTLQIDPKFGGAKEIGFRGGLVEGGVPSTVPDSRPTFPLLVT

SEQ ID NO: 94175 - protein, 113 aa, Homo sapiens
  Payload ID: 18782
  Gene Name: twinfilin actin binding protein 1
  ENSP ID: ENSP00000446696
MSHQTGIQEQLVIGSYSQPSDSWDKDYDSFVLPLLEDKQPCYILFRLDSQNAQGYEWIFIAWSPDHSHVRQKMLYAATRATLKKEFGGGHIKDEVFGTVKEDVSLHGYKKYLL

SEQ ID NO: 94176 - protein, 291 aa, Homo sapiens
  Payload ID: 18782
  Gene Name: twinfilin actin binding protein 1
  ENSP ID: ENSP00000448221
MSHQTGIQDTPQGKLICMVACNACRQFNMQLYLTSIISWFEIGQPAASEDVKEIFARARNGKYRLLKISIENEQLVIGSYSQPSDSWDKDYDSFVLPLLEDKQPCYILFRLDSQNAQGYEWIFIAWSPDHSHVRQKMLYAATRATLKKEFGGGHIKDEVFGTVKEDVSLHGYKKYLLSQSSPAPLTAAEEELRQIKINEVQTDVGVDTKHQTLQGVAFPISREAFQALEKLNNRQLNYVQLEIDIKNEIIILANTTNTELKDLPKRIPKDSARYHFFLYKHSHEGDYLESI

SEQ ID NO: 94177 - protein, 15 aa, Homo sapiens
  Payload ID: 18782
  Gene Name: twinfilin actin binding protein 1
  ENSP ID: ENSP00000448230
MLYAATRATLKKEFG

SEQ ID NO: 94178 - protein, 59 aa, Homo sapiens
  Payload ID: 18782
  Gene Name: twinfilin actin binding protein 1
  ENSP ID: ENSP00000448682
MSHQTGIQASEDVKEIFARARNGKYRLLKISIENVSAPQSISNVSASISGMEITKQSNL

SEQ ID NO: 94179 - protein, 252 aa, Homo sapiens
  Payload ID: 18782
  Gene Name: twinfilin actin binding protein 1
  Uniprot ID: Q12792
  ENSP ID: ENSP00000448750
MLYAATRATLKKEFGGGHIKDEVFGTVKEDVSLHGYKKYLLSQSSPAPLTAAEEELRQIKINEVQTDVGVDTKHQTLQGVAFPISREAFQALEKLNNRQLNYVQLEIDIKNEIIILANTTNTELKDLPKRIPKDSARYHFFLYKHSHEGDYLESIVFIYSMPGYTCSIRERMLYSSCKSRLLEIVERQLQMDVIRKIEIDNGDELTADFLYEEVHPKQHAHKQSFAKPKGPAGKRGIRRLIRGPAETEATTD

SEQ ID NO: 94180 - protein, 357 aa, Homo sapiens
  Payload ID: 18782
  Gene Name: twinfilin actin binding protein 1
  Uniprot ID: Q12792
  ENSP ID: ENSP00000449428
MSHQTGIQASEDVKEIFARARNGKYRLLKISIENEQLVIGSYSQPSDSWDKDYDSFVLPLLEDKQPCYILFRLDSQNAQGYEWIFIAWSPDHSHVRQKMLYAATRATLKKEFGGGHIKDEVFGTVKEDVSLHGYKKYLLSQSSPAPLTAAEEELRQIKINESPEDHIGVQTDVGVDTKHQTLQGVAFPISREAFQALEKLNNRQLNYVQLEIDIKNEIIILANTTNTELKDLPKRIPKDSARYHFFLYKHSHEGDYLESIVFIYSMPGYTCSIRERMLYSSCKSRLLEIVERQLQMDVIRKIEIDNGDELTADFLYEEVHPKQHAHKQSFAKPKGPAGKRGIRRLIRGPAETEATTD

SEQ ID NO: 94181 - protein, 349 aa, Homo sapiens
  Payload ID: 18783
  Gene Name: twinfilin actin binding protein 2
  Uniprot ID: Q6IBS0
  ENSP ID: ENSP00000303908
MAHQTGIHATEELKEFFAKARAGSVRLIKVVIEDEQLVLGASQEPVGRWDQDYDRAVLPLLDAQQPCYLLYRLDSQNAQGFEWLFLAWSPDNSPVRLKMLYAATRATVKKEFGGGHIKDELFGTVKDDLSFAGYQKHLSSCAAPAPLTSAERELQQIRINEVKTEISVESKHQTLQGLAFPLQPEAQRALQQLKQKMVNYIQMKLDLERETIELVHTEPTDVAQLPSRVPRDAARYHFFLYKHTHEGDPLESVVFIYSMPGYKCSIKERMLYSSCKSRLLDSVEQDFHLEIAKKIEIGDGAELTAEFLYDEVHPKQHAFKQAFAKPKGPGGKRGHKRLIRGPGENGDDS

SEQ ID NO: 94182 - protein, 254 aa, Homo sapiens
  Payload ID: 18783
  Gene Name: twinfilin actin binding protein 2
  ENSP ID: ENSP00000426464
MAHQTGIHATEELKEFFAKARAGSVRLIKVVIEDEQLVLGASQEPVGRWDQDYDRAVLPLLDAQQPCYLLYRLDSQNAQGFEWLFLAWSPDNSPVRLKMLYAATRATVKKEFGGGHIKDELFGTVKDDLSFAGYQKHLSSCAAPAPLTSAERELQQIRINEVKTEISVESKHQTLQGLAFPLQPEAQRALQQLKQKMVNYIQMKLDLERETIELVHTEPTDVAQLPSRVPRDAARYHFFLYKHTHEGDPLESVD

SEQ ID NO: 94183 - protein, 202 aa, Homo sapiens
  Payload ID: 18784
  Gene Name: twist family bHLH transcription factor 1
  Uniprot ID: Q15672
  ENSP ID: ENSP00000242261
MMQDVSSSPVSPADDSLSNSEEEPDRQQPPSGKRGGRKRRSSRRSAGGGAGPGGAAGGGVGGGDEPGSPAQGKRGKKSAGCGGGGGAGGGGGSSSGGGSPQSYEELQTQRVMANVRERQRTQSLNEAFAALRKIIPTLPSDKLSKIQTLKLAARYIDFLYQVLQSDELDSKMASCSYVAHERLSYAFSVWRMEGAWSMSASH

SEQ ID NO: 94184 - protein, 135 aa, Homo sapiens
  Payload ID: 18784
  Gene Name: twist family bHLH transcription factor 1
  ENSP ID: ENSP00000346582
  MOD_RES (1)..(1): Any amino acid
XPAQGKRGKKSAGCGGGGGAGGGGGSSSGGGSPQSYEELQTQRVMANVRERQRTQSLNEAFAALRKIIPTLPSDKLSKIQTLKLAARYIDFLYQVLQSDELDSKMASCSYVAHERLSYAFSVWRMEGAWSMSASH

SEQ ID NO: 94185 - protein, 70 aa, Homo sapiens
  Payload ID: 18784
  Gene Name: twist family bHLH transcription factor 1
  ENSP ID: ENSP00000416986
  MOD_RES (1)..(1): Any amino acid
XIIPTLPSDKLSKIQTLKLAARYIDFLYQVLQSDELDSKMASCSYVAHERLSYAFSVWRMEGAWSMSASH

SEQ ID NO: 94186 - protein, 160 aa, Homo sapiens
  Payload ID: 18785
  Gene Name: twist family bHLH transcription factor 2
  Uniprot ID: Q8WVJ9
  ENSP ID: ENSP00000405176
MEEGSSSPVSPVDSLGTSEEELERQPKRFGRKRRYSKKSSEDGSPTPGKRGKKGSPSAQSFEELQSQRILANVRERQRTQSLNEAFAALRKIIPTLPSDKLSKIQTLKLAARYIDFLYQVLQSDEMDNKMTSCSYVAHERLSYAFSVWRMEGAWSMSASH

SEQ ID NO: 94187 - protein, 160 aa, Homo sapiens; identical to SEQ ID NO: 94186
  Payload ID: 18785
  Gene Name: twist family bHLH transcription factor 2
  Uniprot ID: Q8WVJ9
  ENSP ID: ENSP00000482581

SEQ ID NO: 94188 - protein, 338 aa, Homo sapiens
  Payload ID: 18786
  Gene Name: TWIST neighbor
  Uniprot ID: Q3B726
  ENSP ID: ENSP00000222567
MAAGCSEAPRPAAASDGSLVGQAGVLPCLELPTYAAACALVNSRYSCLVAGPHQRHIALSPRYLNRKRTGIREQLDAELLRYSESLLGVPIAYDNIKVVGELGDIYDDQGHIHLNIEADFVIFCPEPGQKLMGIVNKVSSSHIGCLVHGCFNASIPKPEQLSAEQWQTMEINMGDELEFEVFRLDSDAAGVFCIRGKLNITSLQFKRSEVSEEVTENGTEEAAKKPKKKKKKKDPETYEVDSGTTKLADDADDTPMEESALQNTNNANGIWEEEPKKKKKKKKHQEVQDQDPVFQGSDSSGYQSDHKKKKKKRKHSEEAEFTPPLKCSPKRKGKSNFL

SEQ ID NO: 94189 - protein, 223 aa, Homo sapiens
  Payload ID: 18787
  Gene Name: twisted gastrulation BMP signaling modulator 1
  Uniprot ID: Q9GZX9
  ENSP ID: ENSP00000262120
MKLHYVAVLTLAILMFLTWLPESLSCNKALCASDVSKCLIQELCQCRPGEGNCSCCKECMLCLGALWDECCDCVGMCNPRNYSDTPPTSKSTVEELHEPIPSLFRALTEGDTQLNWNIVSFPVAEELSHHENLVSFLETVNQPHHQNVSVPSNNVHAPYSSDKEHMCTVVYFDDCMSIHQCKISCESMGASKYRWFHNACCECIGPECIDYGSKTVKCMNCMF

SEQ ID NO: 94190 - protein, 75 aa, Homo sapiens
  Payload ID: 18787
  Gene Name: twisted gastrulation BMP signaling modulator 1
  Uniprot ID: Q9GZX9
  ENSP ID: ENSP00000463331
MKLHYVAVLTLAILMFLTWLPESLSCNKALCASDVSKCLIQELCQCRPGEGNCSCCKECMLCLGALWDECCDCVD

SEQ ID NO: 94191 - protein, 184 aa, Homo sapiens
  Payload ID: 18787
  Gene Name: twisted gastrulation BMP signaling modulator 1
  ENSP ID: ENSP00000464458
MKLHYVAVLTLAILMFLTWLPESLSCNKALCASDVSKCLIQELCQCRPGEGNCSCCKECMLCLGALWDECCDCVGMCNPRNYSDTPPTSKSTVEELHEPIPSLFRALTEGDTQLNWNIVSFPVAEELSHHENLVSFLETVNQPHHQNVSVPSNNVHAPYSSDKGNCQQLTFSIPPPHVVCPCNL

SEQ ID NO: 94192 - protein, 816 aa, Homo sapiens
  Payload ID: 18788
  Gene Name: two pore segment channel 1
  Uniprot ID: Q9ULQ1
  ENSP ID: ENSP00000335300
MAVSLDDDVPLILTLDEGGSAPLAPSNGLGQEELPSKNGGSYAIHDSQAPSLSSGGESSPSSPAHNWEMNYQEAAIYLQEGENNDKFFTHPKDAKALAAYLFAHNHLFYLMELATALLLLLLSLCEAPAVPALRLGIYVHATLELFALMVVVFELCMKLRWLGLHTFIRHKRTMVKTSVLVVQFVEAIVVLVRQMSHVRVTRALRCIFLVDCRYCGGVRRNLRQIFQSLPPFMDILLLLLFFMIIFAILGFYLFSPNPSDPYFSTLENSIVSLFVLLTTANFPDVMMPSYSRNPWSCVFFIVYLSIELYFIMNLLLAVVFDTFNDIEKRKFKSLLLHKRTAIQHAYRLLISQRRPAGISYRQFEGLMRFYKPRMSARERYLTFKALNQNNTPLLSLKDFYDIYEVAALKWKAKKNREHWFDELPRTALLIFKGINILVKSKAFQYFMYLVVAVNGVWILVETFMLKGGNFFSKHVPWSYLVFLTIYGVELFLKVAGLGPVEYLSSGWNLFDFSVTVFAFLGLLALALNMEPFYFIVVLRPLQLLRLFKLKERYRNVLDTMFELLPRMASLGLTLLIFYYSFAIVGMEFFCGIVFPNCCNTSTVADAYRWRNHTVGNRTVVEEGYYYLNNFDNILNSFVTLFELTVVNNWYIIMEGVTSQTSHWSRLYFMTFYIVTMVVMTIIVAFILEAFVFRMNYSRKNQDSEVDGGITLEKEISKEELVAVLELYREARGASSDVTRLLETLSQMERYQQHSMVFLGRRSRTKSDLSLKMYQEEIQEWYEEHAREQEQQRQLSSSAAPAAQQPPGSRQRSQTVT

SEQ ID NO: 94193 - protein, 748 aa, Homo sapiens
  Payload ID: 18788
  Gene Name: two pore segment channel 1
  ENSP ID: ENSP00000376350
MNYQEAAIYLQEGENNDKFFTHPKDAKALAAYLFAHNHLFYLMELATALLLLLLSLCEAPAVPALRLGIYVHATLELFALMVVVFELCMKLRWLGLHTFIRHKRTMVKTSVLVVQFVEAIVVLVRQMSHVRVTRALRCIFLVDCRYCGGVRRNLRQIFQSLPPFMDILLLLLFFMIIFAILGFYLFSPNPSDPYFSTLENSIVSLFVLLTTANFPDVMMPSYSRNPWSCVFFIVYLSIELYFIMNLLLAVVFDTFNDIEKRKFKSLLLHKRTAIQHAYRLLISQRRPAGISYRQFEGLMRFYKPRMSARERYLTFKALNQNNTPLLSLKDFYDIYEVAALKWKAKKNREHWFDELPRTALLIFKGINILVKSKAFQYFMYLVVAVNGVWILVETFMLKGGNFFSKHVPWSYLVFLTIYGVELFLKVAGLGPVEYLSSGWNLFDFSVTVFAFLGLLALALNMEPFYFIVVLRPLQLLRLFKLKERYRNVLDTMFELLPRMASLGLTLLIFYYSFAIVGMEFFCGIVFPNCCNTSTVADAYRWRNHTVGNRTVVEEGYYYLNNFDNILNSFVTLFELTVVNNWYIIMEGVTSQTSHWSRLYFMTFYIVTMVVMTIIVAFILEAFVFRMNYSRKNQDSEVDGGITLEKEISKEELVAVLELYREARGASSDVTRLLETLSQMERYQQHSMVFLGRRSRTKSDLSLKMYQEEIQEWYEEHAREQEQQRQLSSSAAPAAQQPPGSRQRSQTVT

SEQ ID NO: 94194 - protein, 888 aa, Homo sapiens
  Payload ID: 18788
  Gene Name: two pore segment channel 1
  Uniprot ID: Q9ULQ1
  ENSP ID: ENSP00000438125
MESCYIAQAGLELLGSSSSPTLTSQSAEITEDASNGGVSEQHPWPSGFERELKPETISSPGYHILRATGEENMAVSLDDDVPLILTLDEGGSAPLAPSNGLGQEELPSKNGGSYAIHDSQAPSLSSGGESSPSSPAHNWEMNYQEAAIYLQEGENNDKFFTHPKDAKALAAYLFAHNHLFYLMELATALLLLLLSLCEAPAVPALRLGIYVHATLELFALMVVVFELCMKLRWLGLHTFIRHKRTMVKTSVLVVQFVEAIVVLVRQMSHVRVTRALRCIFLVDCRYCGGVRRNLRQIFQSLPPFMDILLLLLFFMIIFAILGFYLFSPNPSDPYFSTLENSIVSLFVLLTTANFPDVMMPSYSRNPWSCVFFIVYLSIELYFIMNLLLAVVFDTFNDIEKRKFKSLLLHKRTAIQHAYRLLISQRRPAGISYRQFEGLMRFYKPRMSARERYLTFKALNQNNTPLLSLKDFYDIYEVAALKWKAKKNREHWFDELPRTALLIFKGINILVKSKAFQYFMYLVVAVNGVWILVETFMLKGGNFFSKHVPWSYLVFLTIYGVELFLKVAGLGPVEYLSSGWNLFDFSVTVFAFLGLLALALNMEPFYFIVVLRPLQLLRLFKLKERYRNVLDTMFELLPRMASLGLTLLIFYYSFAIVGMEFFCGIVFPNCCNTSTVADAYRWRNHTVGNRTVVEEGYYYLNNFDNILNSFVTLFELTVVNNWYIIMEGVTSQTSHWSRLYFMTFYIVTMVVMTIIVAFILEAFVFRMNYSRKNQDSEVDGGITLEKEISKEELVAVLELYREARGASSDVTRLLETLSQMERYQQHSMVFLGRRSRTKSDLSLKMYQEEIQEWYEEHAREQEQQRQLSSSAAPAAQQPPGSRQRSQTVT

SEQ ID NO: 94195 - protein, 120 aa, Homo sapiens
  Payload ID: 18788
  Gene Name: two pore segment channel 1
  ENSP ID: ENSP00000446767
MNYQEAAIYLQEGENNDKFFTHPKDAKALAAYLFAHNHLFYLMELATALLLLLLSLCEAPAVPALRLGIYVHATLELFALMVVVFELCMKLRWLGLHTFIRHKRTMVKTSVLVVQFVEAI

SEQ ID NO: 94196 - protein, 85 aa, Homo sapiens
  Payload ID: 18788
  Gene Name: two pore segment channel 1
  ENSP ID: ENSP00000447073
MAVSLDDDVPLILTLDEGGSAPLAPSNGLGQEELPSKNGGSYAIHDSQAPSLSSGGESSPSSPAHNWEMNYQEAAIYLQEGENND

SEQ ID NO: 94197 - protein, 99 aa, Homo sapiens
  Payload ID: 18788
  Gene Name: two pore segment channel 1
  ENSP ID: ENSP00000447181
MAVSLDDDVPLILTLDEGGSAPLAPSNGLGQEELPSKRRCCMLCSSKQKPWIPCRVISDVACKAASCFEGASGPCDISMWECYRVCKQMAAAMPSTTPR

SEQ ID NO: 94198 - protein, 124 aa, Homo sapiens
  Payload ID: 18788
  Gene Name: two pore segment channel 1
  ENSP ID: ENSP00000447263
MESCYIAQAGLELLGSSSSPTLTSQSAEITEDASNGGVSEQHPWPSGFERELKPETISSPGYHILRATGEENMAVSLDDDVPLILTLDEGGSAPLAPSNGLGQEELPSKNGGSYAIHDSQAPSL

SEQ ID NO: 94199 - protein, 215 aa, Homo sapiens
  Payload ID: 18788
  Gene Name: two pore segment channel 1
  ENSP ID: ENSP00000447569
MERLGTPSGLDSTKMESCYIAQAGLELLGSSSSPTLTSQSAEITEDASNGGVSEQHPWPSGFERELKPETISSPGYHILRATGEENMAVSLDDDVPLILTLDEGGSAPLAPSNGLGQEELPSKNGGSYAIHDSQAPSLSSGGESSPSSPAHNWEMNYQEAAIYLQEGENNDKFFTHPKDAKALAAYLFAHNHLFYLMELATALLLLLLSLCEAPA

SEQ ID NO: 94200 - protein, 126 aa, Homo sapiens
  Payload ID: 18788
  Gene Name: two pore segment channel 1
  ENSP ID: ENSP00000447806
MERLGTPSGLDSTNGGSYAIHDSQAPSLSSGGESSPSSPAHNWEMNYQEAAIYLQEGENNDKFFTHPKDAKALAAYLFAHNHLFYLMELATALLLLLLSLCEAPAVPALRLGIYVHATLELFALMV

SEQ ID NO: 94201 - protein, 104 aa, Homo sapiens
  Payload ID: 18788
  Gene Name: two pore segment channel 1
  ENSP ID: ENSP00000448010
  MOD_RES (1)..(1): Any amino acid
XGGNFFSKHVPWSYLVFLTIYGVELFLKVAGLGPVEYLSSGWNLFDFSVTVFAFLGLLALALNMEPFYFIVVLRPLQLLRLFKLKERYRNVLDTMFELLPRMAR

SEQ ID NO: 94202 - protein, 888 aa, Homo sapiens; identical to SEQ ID NO: 94194
  Payload ID: 18788
  Gene Name: two pore segment channel 1
  Uniprot ID: Q9ULQ1
  ENSP ID: ENSP00000448083

SEQ ID NO: 94203 - protein, 145 aa, Homo sapiens
  Payload ID: 18788
  Gene Name: two pore segment channel 1
  ENSP ID: ENSP00000448561
MNYQEAAIYLQEGENNDKFFTHPKDAKALAAYLFAHNHLFYLMELATALLLLLLSLCEAPAVPALRLGIYVHATLELFALMVVVFELCMKLRWLGLHTFIRHKRTMVKTSVLVVQFVEAIVVLVRQMSHVRVTRALRCIFLVDCR

SEQ ID NO: 94204 - protein, 99 aa, Homo sapiens; identical to SEQ ID NO: 94197
  Payload ID: 18788
  Gene Name: two pore segment channel 1
  ENSP ID: ENSP00000448704

SEQ ID NO: 94205 - protein, 147 aa, Homo sapiens
  Payload ID: 18788
  Gene Name: two pore segment channel 1
  ENSP ID: ENSP00000449560
MERLGTPSGLDSTKDASNGGVSEQHPWPSGFERELKPETISSPGYHILRATGEENMAVSLDDDVPLILTLDEGGSAPLAPSNGLGQEELPSKNGGSYAIHDSQAPSLSSGGESSPSSPAHNWEMNYQEAAIYLQEGENNDKFFTHPK

SEQ ID NO: 94206 - protein, 204 aa, Homo sapiens
  Payload ID: 18788
  Gene Name: two pore segment channel 1
  ENSP ID: ENSP00000449564
  MOD_RES (1)..(1): Any amino acid
XLLAVVFDTFNDIEKRKFKSLLLHKRTAIQHAYRLLISQRRPAGISYRQFEGLMRFYKPRMSARERYLTFKALNQNNTPLLSLKDFYDIYEVAALKWKAKKNREHWFDELPRTALLIFKGINILVKSKAFQYFMYLVVAVNGVWILVETFMLKVYGVELFLKVAGLGPVEYLSSGWNLFDFSVTVFAFLGLLALALNMEPFYFI

SEQ ID NO: 94207 - protein, 107 aa, Homo sapiens
  Payload ID: 18788
  Gene Name: two pore segment channel 1
  ENSP ID: ENSP00000449944
MNYQEAAIYLQEGENNDKFFTHPKDAKALAAYLFAHNHLFYLMELATALLLLLLSLCEAPAVPALRLGIYVHATLELFALMVVVFELCMKLRWLGLHTFIRHKRTMV

SEQ ID NO: 94208 - protein, 752 aa, Homo sapiens
  Payload ID: 18789
  Gene Name: two pore segment channel 2
  Uniprot ID: Q8NHX9
  ENSP ID: ENSP00000294309
MAEPQAESEPLLGGARGGGGDWPAGLTTYRSIQVGPGAAARWDLCIDQAVVFIEDAIQYRSINHRVDASSMWLYRRYYSNVCQRTLSFTIFLILFLAFIETPSSLTSTADVRYRAAPWEPPCGLTESVEVLCLLVFAADLSVKGYLFGWAHFQKNLWLLGYLVVLVVSLVDWTVSLSLVCHEPLRIRRLLRPFFLLQNSSMMKKTLKCIRWSLPEMASVGLLLAIHLCLFTMFGMLLFAGGKQDDGQDRERLTYFQNLPESLTSLLVLLTTANNPDVMIPAYSKNRAYAIFFIVFTVIGSLFLMNLLTAIIYSQFRGYLMKSLQTSLFRRRLGTRAAFEVLSSMVGEGGAFPQAVGVKPQNLLQVLQKVQLDSSHKQAMMEKVRSYGSVLLSAEEFQKLFNELDRSVVKEHPPRPEYQSPFLQSAQFLFGHYYFDYLGNLIALANLVSICVFLVLDADVLPAERDDFILGILNCVFIVYYLLEMLLKVFALGLRGYLSYPSNVFDGLLTVVLLVLEISTLAVYRLPHPGWRPEMVGLLSLWDMTRMLNMLIVFRFLRIIPSMKLMAVVASTVLGLVQNMRAFGGILVVVYYVFAIIGINLFRGVIVALPGNSSLAPANGSAPCGSFEQLEYWANNFDDFAAALVTLWNLMVVNNWQVFLDAYRRYSGPWSKIYFVLWWLVSSVIWVNLFLALILENFLHKWDPRSHLQPLAGTPEATYQMTVELLFRDILEEPGEDELTERLSQHPHLWLCR

SEQ ID NO: 94209 - protein, 570 aa, Homo sapiens
  Payload ID: 18789
  Gene Name: two pore segment channel 2
  ENSP ID: ENSP00000445551
MAEPQAESEPLLGGARGGGGDWPAGLTTYRSIQVGPGAAARWDLCIDQAVVFIEDAIQYRSINHRVDASSMWLYRRYYSNVCQRTLSFTIFLILFLAFIETPSSLTSTADVRYRAAPWEPPCGLTESVEVLCLLVFAADLSVKGYLFGWAHFQKNLWLLGYLVVLVVSLVDWTVSLSLVCHEPLRIRRLLRPFFLLQNSSMMKKTLKCIRWSLPEMASVGLLLAIHLCLFTMFGMLLFAGGKQDDGQDRERLTYFQNLPESLTSLLVLLTTANNPDVMIPAYSKNRAYAIFFIVFTVIGSLFLMNLLTAIIYSQFRGYLMKSLQTSLFRRRLGTRAAFEVLSSMVGEGGAFPQAVGVKPQNLLQVLQKVQLDSSHKQAMMEKVRSYGSVLLSAEEFQKLFNELDRSVVKEHPPRPEYQSPFLQSAQFLFGHYYFDYLGNLIALANLVSICVFLVLDADVLPAERDDFILGILNCVFIVYYLLEMLLKVFALGLRGYLSYPSNVFDGLLTVVLLNFLHKWDPRSHLQPLAGTPEATYQMTVELLFRDILEEPGEDELTERLSQHPHLWLCR

SEQ ID NO: 94210 - protein, 527 aa, Homo sapiens
  Payload ID: 18790
  Gene Name: TXK tyrosine kinase
  Uniprot ID: P42681
  ENSP ID: ENSP00000264316
MILSSYNTIQSVFCCCCCCSVQKRQMRTQISLSTDEELPEKYTQRRRPWLSQLSNKKQSNTGRVQPSKRKPLPPLPPSEVAEEKIQVKALYDFLPREPCNLALRRAEEYLILEKYNPHWWKARDRLGNEGLIPSNYVTENKITNLEIYEWYHRNITRNQAEHLLRQESKEGAFIVRDSRHLGSYTISVFMGARRSTEAAIKHYQIKKNDSGQWYVAERHAFQSIPELIWYHQHNAAGLMTRLRYPVGLMGSCLPATAGFSYEKWEIDPSELAFIKEIGSGQFGVVHLGEWRSHIQVAIKAINEGSMSEEDFIEEAKVMMKLSHSKLVQLYGVCIQRKPLYIVTEFMENGCLLNYLRENKGKLRKEMLLSVCQDICEGMEYLERNGYIHRDLAARNCLVSSTCIVKISDFGMTRYVLDDEYVSSFGAKFPIKWSPPEVFLFNKYSSKSDVWSFGVLMWEVFTEGKMPFENKSNLQVVEAISEGFRLYRPHLAPMSIYEVMYSCWHEKPEGRPTFAELLRAVTEIAETW

SEQ ID NO: 94211 - protein, 82 aa, Homo sapiens
  Payload ID: 18790
  Gene Name: TXK tyrosine kinase
  ENSP ID: ENSP00000422139
MENGCLLNYLRENKGKLRKEMLLSVCQDICEGMEYLERNGYIHRDLAARNCLVSSTCIVKISDFGMTRSFNVGSFYRRKNAF

SEQ ID NO: 94212 - protein, 138 aa, Homo sapiens
  Payload ID: 18790
  Gene Name: TXK tyrosine kinase
  ENSP ID: ENSP00000422798
MICFSDNTIQSVFCCCCCCSVQKRQMRTQISLSTDEELPEKYTQRRRPWLSQLSNKKQSNTGRVQPSKRKPLPPLPPSEVAEEKIQVKALYDFLPREPCNLALRRAEEYLILEKYNPHWWKARDRLGNEGLIPSNYVT

SEQ ID NO: 94213 - protein, 182 aa, Homo sapiens
  Payload ID: 18790
  Gene Name: TXK tyrosine kinase
  ENSP ID: ENSP00000423481
MENGCLLNYLRENKGKLRKEMLLSVCQDICEGMEYLERNGYIHRDLAARNCLVSSTCIVKISDFGMTRYVLDDEYVSSFGAKFPIKWSPPEVFLFNKYSSKSDVWSFGVLMWEVFTEGKMPFENKSNLQVVEAISEGFRLYRPHLAPMSIYEVMYSCWHEKPEGRPTFAELLRAVTEIAETW

SEQ ID NO: 94214 - protein, 48 aa, Homo sapiens
  Payload ID: 18790
  Gene Name: TXK tyrosine kinase
  ENSP ID: ENSP00000424070
MENGCLLNYLRENKGKLRKEMLLSVCQDICEGMEYLERNGYIHRDLEF

SEQ ID NO: 94215 - protein, 113 aa, Homo sapiens
  Payload ID: 18791
  Gene Name: TYRO protein tyrosine kinase binding protein
  Uniprot ID: O43914
  ENSP ID: ENSP00000262629
MGGLEPCSRLLLLPLLLAVSGLRPVQAQAQSDCSCSTVSPGVLAGIVMGDLVLTVLIALAVYFLGRLVPRGRGAAEAATRKQRITETESPYQELQGQRSDVYSDLNTQRPYYK

SEQ ID NO: 94216 - protein, 101 aa, Homo sapiens
  Payload ID: 18791
  Gene Name: TYRO protein tyrosine kinase binding protein
  ENSP ID: ENSP00000402371
MGGLEPCSRLLLLPLLLAVSDCSCSTVSPGVLAGIVMGDLVLTVLIALAVYFLGRLVPRGRGAAEATRKQRITETESPYQELQGQRSDVYSDLNTQRPYYK

SEQ ID NO: 94217 - protein, 102 aa, Homo sapiens
  Payload ID: 18791
  Gene Name: TYRO protein tyrosine kinase binding protein
  Uniprot ID: O43914
  ENSP ID: ENSP00000445332
MGGLEPCSRLLLLPLLLAVSDCSCSTVSPGVLAGIVMGDLVLTVLIALAVYFLGRLVPRGRGAAEAATRKQRITETESPYQELQGQRSDVYSDLNTQRPYYK

SEQ ID NO: 94218 - protein, 35 aa, Homo sapiens
  Payload ID: 18791
  Gene Name: TYRO protein tyrosine kinase binding protein
  ENSP ID: ENSP00000465081
MGGLEPCSRLLLLPLLLAVSVLSRPRPRAIAVALR

SEQ ID NO: 94219 - protein, 35 aa, Homo sapiens; identical to SEQ ID NO: 94218
  Payload ID: 18791
  Gene Name: TYRO protein tyrosine kinase binding protein
  ENSP ID: ENSP00000465656

SEQ ID NO: 94220 - protein, 112 aa, Homo sapiens
  Payload ID: 18791
  Gene Name: TYRO protein tyrosine kinase binding protein
  Uniprot ID: O43914
  ENSP ID: ENSP00000468447
MGGLEPCSRLLLLPLLLAVSGLRPVQAQAQSDCSCSTVSPGVLAGIVMGDLVLTVLIALAVYFLGRLVPRGRGAAEATRKQRITETESPYQELQGQRSDVYSDLNTQRPYYK

SEQ ID NO: 94221 - protein, 144 aa, Homo sapiens
  Payload ID: 18791
  Gene Name: TYRO protein tyrosine kinase binding protein
  ENSP ID: ENSP00000468608
MGGLEPCSRLLLLPLLLAVSGLRPVQAQAQSDCSCSTVSPGVLAGIVMGDLVLTVLIALAVYFLGRLVPRGRGAAEGMVMEVLIWNDKTPSTHHSACLCTPQHPSPPAATRKQRITETESPYQELQGQRSDVYSDLNTQRPYYK

SEQ ID NO: 94222 - protein, 890 aa, Homo sapiens
  Payload ID: 18792
  Gene Name: TYRO3 protein tyrosine kinase
  Uniprot ID: Q06418
  ENSP ID: ENSP00000263798
MALRRSMGRPGLPPLPLPPPPRLGLLLAALASLLLPESAAAGLKLMGAPVKLTVSQGQPVKLNCSVEGMEEPDIQWVKDGAVVQNLDQLYIPVSEQHWIGFLSLKSVERSDAGRYWCQVEDGGETEISQPVWLTVEGVPFFTVEPKDLAVPPNAPFQLSCEAVGPPEPVTIVWWRGTTKIGGPAPSPSVLNVTGVTQSTMFSCEAHNLKGLASSRTATVHLQALPAAPFNITVTKLSSSNASVAWMPGADGRALLQSCTVQVTQAPGGWEVLAVVVPVPPFTCLLRDLVPATNYSLRVRCANALGPSPYADWVPFQTKGLAPASAPQNLHAIRTDSGLILEWEEVIPEAPLEGPLGPYKLSWVQDNGTQDELTVEGTRANLTGWDPQKDLIVRVCVSNAVGCGPWSQPLVVSSHDRAGQQGPPHSRTSWVPVVLGVLTALVTAAALALILLRKRRKETRFGQAFDSVMARGEPAVHFRAARSFNRERPERIEATLDSLGISDELKEKLEDVLIPEQQFTLGRMLGKGEFGSVREAQLKQEDGSFVKVAVKMLKADIIASSDIEEFLREAACMKEFDHPHVAKLVGVSLRSRAKGRLPIPMVILPFMKHGDLHAFLLASRIGENPFNLPLQTLIRFMVDIACGMEYLSSRNFIHRDLAARNCMLAEDMTVCVADFGLSRKIYSGDYYRQGCASKLPVKWLALESLADNLYTVQSDVWAFGVTMWEIMTRGQTPYAGIENAEIYNYLIGGNRLKQPPECMEDVYDLMYQCWSADPKQRPSFTCLRMELENILGQLSVLSASQDPLYINIERAEEPTAGGSLELPGRDQPYSGAGDGSGMGAVGGTPSDCRYILTPGGLAEQPGQAEHQPESPLNETQRLLLLQQGLLPHSSC

SEQ ID NO: 94223 - protein, 21 aa, Homo sapiens
  Payload ID: 18792
  Gene Name: TYRO3 protein tyrosine kinase
  ENSP ID: ENSP00000452995
VKMLKGAHLVLFPPSPSPSPS

SEQ ID NO: 94224 - protein, 121 aa, Homo sapiens
  Payload ID: 18792
  Gene Name: TYRO3 protein tyrosine kinase
  ENSP ID: ENSP00000453835
  MOD_RES (1)..(1): Any amino acid
XWEVLAVVVPVPPFTCLLRDLVPATNYSLRVRCANALGPSPYADWVPFQTKGLAPASAPQNLHAIRTDSGLILEWEEVIPEAPLEGPLGPYKLSWVQDNGTQASRALLTAAHPGYLWSLVC

SEQ ID NO: 94225 - protein, 845 aa, Homo sapiens
  Payload ID: 18792
  Gene Name: TYRO3 protein tyrosine kinase
  ENSP ID: ENSP00000454050
MGAPVKLTVSQGQPVKLNCSVEGMEEPDIQWVKDGAVVQNLDQLYIPVSEQHWIGFLSLKSVERSDAGRYWCQVEDGGETEISQPVWLTVEGVPFFTVEPKDLAVPPNAPFQLSCEAVGPPEPVTIVWWRGTTKIGGPAPSPSVLNVTGVTQSTMFSCEAHNLKGLASSRTATVHLQALPAAPFNITVTKLSSSNASVAWMPGADGRALLQSCTVQVTQAPGGWEVLAVVVPVPPFTCLLRDLVPATNYSLRVRCANALGPSPYADWVPFQTKGLAPASAPQNLHAIRTDSGLILEWEEVIPEAPLEGPLGPYKLSWVQDNGTQDELTVEGTRANLTGWDPQKDLIVRVCVSNAVGCGPWSQPLVVSSHDRAGQQGPPHSRTSWVPVVLGVLTALVTAAALALILLRKRRKETRFGQAFDSVMARGEPAVHFRAARSFNRERPERIEATLDSLGISDELKEKLEDVLIPEQQFTLGRMLGKGEFGSVREAQLKQEDGSFVKVAVKMLKADIIASSDIEEFLREAACMKEFDHPHVAKLVGVSLRSRAKGRLPIPMVILPFMKHGDLHAFLLASRIGENPFNLPLQTLIRFMVDIACGMEYLSSRNFIHRDLAARNCMLAEDMTVCVADFGLSRKIYSGDYYRQGCASKLPVKWLALESLADNLYTVQSDVWAFGVTMWEIMTRGQTPYAGIENAEIYNYLIGGNRLKQPPECMEDVYDLMYQCWSADPKQRPSFTCLRMELENILGQLSVLSASQDPLYINIERAEEPTAGGSLELPGRDQPYSGAGDGSGMGAVGGTPSDCRYILTPGGLAEQPGQAEHQPESPLNETQRLLLLQQGLLPHSSC

SEQ ID NO: 94226 - protein, 286 aa, Homo sapiens
  Payload ID: 18792
  Gene Name: TYRO3 protein tyrosine kinase
  ENSP ID: ENSP00000455441
  MOD_RES (1)..(1): Any amino acid
XLGRMLGKGEFGSVREAQLKQEDGSFVKVAVKMLKADIIASSDIEEFLREAACMKEFDHPHVAKLVGVSLRSRAKGRLPIPMVILPFMKHGDLHAFLLASRIGENPFTLIRFMVDIACGMEYLSSRNFIHRDLAARNCMLAEDMTVCVADFGLSRKIYSGDYYRQGCASKLPVKWLALESLADNLYTVQSDVWAFGVTMWEIMTRGQTPYAGIENAEIYNYLIGGNRLKQPPECMEDVLTLPLHPSQGLPRPSDNLLYDLMYQCWSADPKQRPSFTCLRMELENIL

SEQ ID NO: 94227 - protein, 529 aa, Homo sapiens [sequence omitted]

SEQ ID NO: 94228 - protein, 247 aa, Homo sapiens
  Payload ID: 18794
  Gene Name: tyrosinase-related protein 1
  ENSP ID: ENSP00000370528
MAQVPPPASGERHAGTEDGPIRRNPAGNVARPMVQRLPEPQDVAQCLEVGLFDTPPFYSNSTNSFRNTVEGYSDPTGKYDPAVRSLHNLAHLFLNGTGGQTHLSPNDPIFVLLHTFTDAVFDEWLRRYNADISTFPLENAPIGHNRQYNMVPFWPPVTNTEMFVTAPDNLGYTYEIQWPSREFSVPEIIAIAVVGALLLVALIFGTASYLIRARRSMDEANQPLLTDQYQCYAEEYEKLQNPNQSVV

SEQ ID NO: 94229 - protein, 537 aa, Homo sapiens
  Payload ID: 18794
  Gene Name: tyrosinase-related protein 1
  Uniprot ID: P17643
  ENSP ID: ENSP00000373570
MSAPKLLSLGCIFFPLLLFQQARAQFPRQCATVEALRSGMCCPDLSPVSGPGTDRCGSSSGRGRCEAVTADSRPHSPQYPHDGRDDREVWPLRFFNRTCHCNGNFSGHNCGTCRPGWRGAACDQRVLIVRRNLLDLSKEEKNHFVRALDMAKRTTHPLFVIATRRSEEILGPDGNTPQFENISIYNYFVWTHYYSVKKTFLGVGQESFGEVDFSHEGPAFLTWHRYHLLRLEKDMQEMLQEPSFSLPYWNFATGKNVCDICTDDLMGSRSNFDSTLISPNSVFSQWRVVCDSLEDYDTLGTLCNSTEDGPIRRNPAGNVARPMVQRLPEPQDVAQCLEVGLFDTPPFYSNSTNSFRNTVEGYSDPTGKYDPAVRSLHNLAHLFLNGTGGQTHLSPNDPIFVLLHTFTDAVFDEWLRRYNADISTFPLENAPIGHNRQYNMVPFWPPVTNTEMFVTAPDNLGYTYEIQWPSREFSVPEIIAIAVVGALLLVALIFGTASYLIRARRSMDEANQPLLTDQYQCYAEEYEKLQNPNQSVV

SEQ ID NO: 94230 - protein, 102 aa, Homo sapiens
  Payload ID: 18794
  Gene Name: tyrosinase-related protein 1
  ENSP ID: ENSP00000419006
MSAPKLLSLGCIFFPLLLFQQARAQFPRQCATVEALRSGMCCPDLSPVSGPGTDRCGSSSGRGRCEAVTADSRPHSPQYPHDGRDDREVWPLRFFNRTCHCN

SEQ ID NO: 94231 - protein, 246 aa, Homo sapiens
  Payload ID: 18795
  Gene Name: tyrosine 3-monooxygenase/tryptophan 5-monooxygenase activation protein, beta
  Uniprot ID: P31946
  ENSP ID: ENSP00000300161
MTMDKSELVQKAKLAEQAERYDDMAAAMKAVTEQGHELSNEERNLLSVAYKNVVGARRSSWRVISSIEQKTERNEKKQQMGKEYREKIEAELQDICNDVLELLDKYLIPNATQPESKVFYLKMKGDYFRYLSEVASGDNKQTTVSNSQQAYQEAFEISKKEMQPTHPIRLGLALNFSVFYYEILNSPEKACSLAKTAFDEAIAELDTLNEESYKDSTLIMQLLRDNLTLWTSENQGDEGDAGEGEN

SEQ ID NO: 94232 - protein, 246 aa, Homo sapiens; identical to SEQ ID NO: 94231
  Payload ID: 18795
  Gene Name: tyrosine 3-monooxygenase/tryptophan 5-monooxygenase activation protein, beta
  Uniprot ID: P31946
  ENSP ID: ENSP00000361930

SEQ ID NO: 94233 - protein, 74 aa, Homo sapiens
  Payload ID: 18795
  Gene Name: tyrosine 3-monooxygenase/tryptophan 5-monooxygenase activation protein, beta
  ENSP ID: ENSP00000394558
MTMDKSELVQKAKLAEQAERYDDMAAAMKAVTEQGHELSNEERNLLSVAYKNVVGARRSSWRVISSIEQKTERN

SEQ ID NO: 94234 - protein, 100 aa, Homo sapiens
  Payload ID: 18795
  Gene Name: tyrosine 3-monooxygenase/tryptophan 5-monooxygenase activation protein, beta
  ENSP ID: ENSP00000394729
MTMDKSELVQKAKLAEQAERYDDMAAAMKAVTEQGHELSNEERNLLSVAYKNVVGARRSSWRVISSIEQKTERNEKKQQMGKEYREKIEAELQDICNDVL

SEQ ID NO: 94235 - protein, 149 aa, Homo sapiens
  Payload ID: 18795
  Gene Name: tyrosine 3-monooxygenase/tryptophan 5-monooxygenase activation protein, beta
  ENSP ID: ENSP00000487924
MTMDKSELVQKAKLAEQAERYDDMAAAMKAVTEQGHELSNEERNLLSVAYKNVVGARRSSWRVISSIEQKTERNEKKQQMGKEYREKIEAELQDICNDVLFFRMPHSKTTLRKYCSVYEAWTPSELLLLSCWTNILFPMLHNQKVRCST

SEQ ID NO: 94236 - protein, 81 aa, Homo sapiens
  Payload ID: 18795
  Gene Name: tyrosine 3-monooxygenase/tryptophan 5-monooxygenase activation protein, beta
  ENSP ID: ENSP00000488178
  MOD_RES (1)..(1): Any amino acid
XAMKAVTEQGHELSNEERNLLSVAYKNVVGARRSSWRVISSIEQKTERNEKKQQMGKEYREKIEAELQDICNDVLVHLVFR

SEQ ID NO: 94237 - protein, 255 aa, Homo sapiens
  Payload ID: 18796
  Gene Name: tyrosine 3-monooxygenase/tryptophan 5-monooxygenase activation protein, epsilon
  Uniprot ID: P62258
  ENSP ID: ENSP00000264335
MDDREDLVYQAKLAEQAERYDEMVESMKKVAGMDVELTVEERNLLSVAYKNVIGARRASWRIISSIEQKEENKGGEDKLKMIREYRQMVETELKLICCDILDVLDKHLIPAANTGESKVFYYKMKGDYHRYLAEFATGNDRKEAAENSLVAYKAASDIAMTELPPTHPIRLGLALNFSVFYYEILNSPDRACRLAKAAFDDAIAELDTLSEESYKDSTLIMQLLRDNLTLWTSDMQGDGEEQNKEALQDVEDENQ

SEQ ID NO: 94238 - protein, 38 aa, Homo sapiens
  Payload ID: 18796
  Gene Name: tyrosine 3-monooxygenase/tryptophan 5-monooxygenase activation protein, epsilon
  ENSP ID: ENSP00000458386
MDDREDLVYQAKLAEQAERYDGEEQNKEALQDVEDENQ

SEQ ID NO: 94239 - protein, 107 aa, Homo sapiens
  Payload ID: 18796
  Gene Name: tyrosine 3-monooxygenase/tryptophan 5-monooxygenase activation protein, epsilon
  ENSP ID: ENSP00000460712
MDDREDLVYQAKLAEQAERYDEMVESMKKVAGMDVELTVEERNLLSVAYKNVIGARRASWRIISSIEQKEENKGGEDKLKMIREYRQMVKSRIKKRCRTWKTKISET

SEQ ID NO: 94240 - protein, 233 aa, Homo sapiens
  Payload ID: 18796
  Gene Name: tyrosine 3-monooxygenase/tryptophan 5-monooxygenase activation protein, epsilon
  Uniprot ID: P62258
  ENSP ID: ENSP00000461762
MVESMKKVAGMDVELTVEERNLLSVAYKNVIGARRASWRIISSIEQKEENKGGEDKLKMIREYRQMVETELKLICCDILDVLDKHLIPAANTGESKVFYYKMKGDYHRYLAEFATGNDRKEAAENSLVAYKAASDIAMTELPPTHPIRLGLALNFSVFYYEILNSPDRACRLAKAAFDDAIAELDTLSEESYKDSTLIMQLLRDNLTLWTSDMQGDGEEQNKEALQDVEDENQ

SEQ ID NO: 94241 - protein, 94 aa, Homo sapiens
  Payload ID: 18796
  Gene Name: tyrosine 3-monooxygenase/tryptophan 5-monooxygenase activation protein, epsilon
  ENSP ID: ENSP00000461766
MDDREDLVYQAKLAEQAERYDEMVESMKKVAGMDVELTVEERNLLSVAYKNVIGARRASWRIISSIEQKEENKGGEDKLKMIREYRQMVGKSSF

SEQ ID NO: 94242 - protein, 109 aa, Homo sapiens
  Payload ID: 18796
  Gene Name: tyrosine 3-monooxygenase/tryptophan 5-monooxygenase activation protein, epsilon
  ENSP ID: ENSP00000464883
  MOD_RES (1)..(1): Any amino acid
XMVESMKKVAGMDVELTVEERNLLSVAYKNVIGARRASWRIISSIEQKEENKGGEDKLKMIREYRQMVETELKLICCDILDVLDKHLIPAANTGWQKQLLMMQLQNWIR

SEQ ID NO: 94243 - protein, 115 aa, Homo sapiens
  Payload ID: 18796
  Gene Name: tyrosine 3-monooxygenase/tryptophan 5-monooxygenase activation protein, epsilon
  ENSP ID: ENSP00000466324
GDYHRYLAEFATGNDRKEAAENSLVAYKAASDIAMTELPPTHPIRLGLALNFSVFYYEILNSPDRACRLAKAAFDDAIAELDTLSEESYKDSTLIMQLLRDNLTLWTSDMQGDDS

SEQ ID NO: 94244 - protein, 233 aa, Homo sapiens; identical to SEQ ID NO: 94240
  Payload ID: 18796
  Gene Name: tyrosine 3-monooxygenase/tryptophan 5-monooxygenase activation protein, epsilon
  Uniprot ID: P62258
  ENSP ID: ENSP00000481059

SEQ ID NO: 94245 - protein, 94 aa, Homo sapiens; identical to SEQ ID NO: 94241
  Payload ID: 18796
  Gene Name: tyrosine 3-monooxygenase/tryptophan 5-monooxygenase activation protein, epsilon
  ENSP ID: ENSP00000486352

SEQ ID NO: 94246 - protein, 38 aa, Homo sapiens; identical to SEQ ID NO: 94238
  Payload ID: 18796
  Gene Name: tyrosine 3-monooxygenase/tryptophan 5-monooxygenase activation protein, epsilon
  ENSP ID: ENSP00000486697

SEQ ID NO: 94247 - protein, 109 aa, Homo sapiens; identical to SEQ ID NO: 94242
  Payload ID: 18796
  Gene Name: tyrosine 3-monooxygenase/tryptophan 5-monooxygenase activation protein, epsilon
  ENSP ID: ENSP00000487228
  MOD_RES (1)..(1): Any amino acid

SEQ ID NO: 94248 - protein, 255 aa, Homo sapiens; identical to SEQ ID NO: 94237
  Payload ID: 18796
  Gene Name: tyrosine 3-monooxygenase/tryptophan 5-monooxygenase activation protein, epsilon
  Uniprot ID: P62258
  ENSP ID: ENSP00000487356

SEQ ID NO: 94249 - protein, 115 aa, Homo sapiens; identical to SEQ ID NO: 94243
  Payload ID: 18796
  Gene Name: tyrosine 3-monooxygenase/tryptophan 5-monooxygenase activation protein, epsilon
  ENSP ID: ENSP00000487432

SEQ ID NO: 94250 - protein, 107 aa, Homo sapiens; identical to SEQ ID NO: 94239
  Payload ID: 18796
  Gene Name: tyrosine 3-monooxygenase/tryptophan 5-monooxygenase activation protein, epsilon
  ENSP ID: ENSP00000487508

SEQ ID NO: 94251 - protein, 246 aa, Homo sapiens
  Payload ID: 18797
  Gene Name: tyrosine 3-monooxygenase/tryptophan 5-monooxygenase activation protein, eta
  Uniprot ID: Q04917
  ENSP ID: ENSP00000248975
MGDREQLLQRARLAEQAERYDDMASAMKAVTELNEPLSNEDRNLLSVAYKNVVGARRSSWRVISSIEQKTMADGNEKKLEKVKAYREKIEKELETVCNDVLSLLDKFLIKNCNDFQYESKVFYLKMKGDYYRYLAEVASGEKKNSVVEASEAAYKEAFEISKEQMQPTHPIRLGLALNFSVFYYEIQNAPEQACLLAKQAFDDAIAELDTLNEDSYKDSTLIMQLLRDNLTLWTSDQQDEEAGEGN

SEQ ID NO: 94252 - protein, 72 aa, Homo sapiens
  Payload ID: 18797
  Gene Name: tyrosine 3-monooxygenase/tryptophan 5-monooxygenase activation protein, eta
  ENSP ID: ENSP00000380629
MGDREQLLQRARLAEQAERYDDMASAMKAVAGKIPPSVQVEAACLLSQHFGAPPAPTPGCSGIPFCGGDRAE

SEQ ID NO: 94253 - protein, 162 aa, Homo sapiens
  Payload ID: 18797
  Gene Name: tyrosine 3-monooxygenase/tryptophan 5-monooxygenase activation protein, eta
  ENSP ID: ENSP00000406747
MIDVPHSTSVTWRTVLVTELNEPLSNEDRNLLSVAYKNVVGARRSSWRVISSIEQKTMADGNEKKLEKVKAYREKIEKELETVCNDVLSLLDKFLIKNCNDFQYESKVFYLKMKGDYYRYLAEVASGEKKNSVVEASEAAYKEAFEISKEQMQPTHPIRLGL

SEQ ID NO: 94254 - protein, 39 aa, Homo sapiens
  Payload ID: 18797
  Gene Name: tyrosine 3-monooxygenase/tryptophan 5-monooxygenase activation protein, eta
  ENSP ID: ENSP00000408468
MGDREQLLQRARLAEQAERYDDMASAMKAVRRICVSLHS

SEQ ID NO: 94255 - protein, 247 aa, Homo sapiens
  Payload ID: 18798
  Gene Name: tyrosine 3-monooxygenase/tryptophan 5-monooxygenase activation protein, gamma
  Uniprot ID: P61981
  ENSP ID: ENSP00000306330
MVDREQLVQKARLAEQAERYDDMAAAMKNVTELNEPLSNEERNLLSVAYKNVVGARRSSWRVISSIEQKTSADGNEKKIEMVRAYREKIEKELEAVCQDVLSLLDNYLIKNCSETQYESKVFYLKMKGDYYRYLAEVATGEKRATVVESSEKAYSEAHEISKEHMQPTHPIRLGLALNYSVFYYEIQNAPEQACHLAKTAFDDAIAELDTLNEDSYKDSTLIMQLLRDNLTLWTSDQQDDDGGEGNN

SEQ ID NO: 94256 - protein, 245 aa, Homo sapiens
  Payload ID: 18799
  Gene Name: tyrosine 3-monooxygenase/tryptophan 5-monooxygenase activation protein, theta
  Uniprot ID: P27348
  ENSP ID: ENSP00000238081
MEKTELIQKAKLAEQAERYDDMATCMKAVTEQGAELSNEERNLLSVAYKNVVGGRRSAWRVISSIEQKTDTSDKKLQLIKDYREKVESELRSICTTVLELLDKYLIANATNPESKVFYLKMKGDYFRYLAEVACGDDRKQTIDNSQGAYQEAFDISKKEMQPTHPIRLGLALNFSVFYYEILNNPELACTLAKTAFDEAIAELDTLNEDSYKDSTLIMQLLRDNLTLWTSDSAGEECDAAEGAEN

SEQ ID NO: 94257 - protein, 245 aa, Homo sapiens; identical to SEQ ID NO: 94256
  Payload ID: 18799
  Gene Name: tyrosine 3-monooxygenase/tryptophan 5-monooxygenase activation protein, theta
  Uniprot ID: P27348
  ENSP ID: ENSP00000371267

SEQ ID NO: 94258 - protein, 149 aa, Homo sapiens
  Payload ID: 18799
  Gene Name: tyrosine 3-monooxygenase/tryptophan 5-monooxygenase activation protein, theta
  ENSP ID: ENSP00000398990
MEKTELIQKAKLAEQAERYDDMATCMKAVTEQGAELSNEERNLLSVAYKNVVGGRRSAWRVISSIEQKTDTSDKKLQLIKDYREKVESELRSICTTVLELLDKYLIANATNPESKVFYLKMKGDYFRYLAEVACGDDRKQTIDNSQGAY

SEQ ID NO: 94259 - protein, 245 aa, Homo sapiens
  Payload ID: 18800
  Gene Name: tyrosine 3-monooxygenase/tryptophan 5-monooxygenase activation protein, zeta
  Uniprot ID: P63104
  ENSP ID: ENSP00000309503
MDKNELVQKAKLAEQAERYDDMAACMKSVTEQGAELSNEERNLLSVAYKNVVGARRSSWRVVSSIEQKTEGAEKKQQMAREYREKIETELRDICNDVLSLLEKFLIPNASQAESKVFYLKMKGDYYRYLAEVAAGDDKKGIVDQSQQAYQEAFEISKKEMQPTHPIRLGLALNFSVFYYEILNSPEKACSLAKTAFDEAIAELDTLSEESYKDSTLIMQLLRDNLTLWTSDTQGDEAEAGEGGEN

SEQ ID NO: 94260 - protein, 168 aa, Homo sapiens
  Payload ID: 18800
  Gene Name: tyrosine 3-monooxygenase/tryptophan 5-monooxygenase activation protein, zeta
  ENSP ID: ENSP00000379278
MAREYREKIETELRDICNDVLSLLEKFLIPNASQAESKVFYLKMKGDYYRYLAEVAAGDDKKGIVDQSQQAYQEAFEISKKEMQPTHPIRLGLALNFSVFYYEILNSPEKACSLAKTAFDEAIAELDTLSEESYKDSTLIMQLLRDNLTLWTSDTQGDEAEAGEGGEN

SEQ ID NO: 94261 - protein, 245 aa, Homo sapiens; identical to SEQ ID NO: 94259
  Payload ID: 18800
  Gene Name: tyrosine 3-monooxygenase/tryptophan 5-monooxygenase activation protein, zeta
  Uniprot ID: P63104
  ENSP ID: ENSP00000379281

SEQ ID NO: 94262 - protein, 245 aa, Homo sapiens; identical to SEQ ID NO: 94259
  Payload ID: 18800
  Gene Name: tyrosine 3-monooxygenase/tryptophan 5-monooxygenase activation protein, zeta
  Uniprot ID: P63104
  ENSP ID: ENSP00000379283

SEQ ID NO: 94263 - protein, 245 aa, Homo sapiens; identical to SEQ ID NO: 94259
  Payload ID: 18800
  Gene Name: tyrosine 3-monooxygenase/tryptophan 5-monooxygenase activation protein, zeta
  Uniprot ID: P63104
  ENSP ID: ENSP00000379286

SEQ ID NO: 94264 - protein, 245 aa, Homo sapiens; identical to SEQ ID NO: 94259
  Payload ID: 18800
  Gene Name: tyrosine 3-monooxygenase/tryptophan 5-monooxygenase activation protein, zeta
  Uniprot ID: P63104
  ENSP ID: ENSP00000379287

SEQ ID NO: 94265 - protein, 245 aa, Homo sapiens; identical to SEQ ID NO: 94259
  Payload ID: 18800
  Gene Name: tyrosine 3-monooxygenase/tryptophan 5-monooxygenase activation protein, zeta
  Uniprot ID: P63104
  ENSP ID: ENSP00000379288

SEQ ID NO: 94266 - protein, 92 aa, Homo sapiens
  Payload ID: 18800
  Gene Name: tyrosine 3-monooxygenase/tryptophan 5-monooxygenase activation protein, zeta
  ENSP ID: ENSP00000394880
MDKNELVQKAKLAEQAERYDDMAACMKSVTEQGAELSNEERNLLSVAYKNVVGARRSSWRVVSSIEQKTEGAEKKQQMAREYREKIETELRD

SEQ ID NO: 94267 - protein, 245 aa, Homo sapiens; identical to SEQ ID NO: 94259
  Payload ID: 18800
  Gene Name: tyrosine 3-monooxygenase/tryptophan 5-monooxygenase activation protein, zeta
  Uniprot ID: P63104
  ENSP ID: ENSP00000395114

SEQ ID NO: 94268 - protein, 245 aa, Homo sapiens; identical to SEQ ID NO: 94259
  Payload ID: 18800
  Gene Name: tyrosine 3-monooxygenase/tryptophan 5-monooxygenase activation protein, zeta
  Uniprot ID: P63104
  ENSP ID: ENSP00000398599

SEQ ID NO: 94269 - protein, 98 aa, Homo sapiens
  Payload ID: 18800
  Gene Name: tyrosine 3-monooxygenase/tryptophan 5-monooxygenase activation protein, zeta
  ENSP ID: ENSP00000416551
MDKNELVQKAKLAEQAERYDDMAACMKSVTEQGAELSNEERNLLSVAYKNVVGARRSSWRVVSSIEQKTEGAEKKQQMAREYREKIETELRDICNDVL

SEQ ID NO: 94270 - protein, 75 aa, Homo sapiens
  Payload ID: 18800
  Gene Name: tyrosine 3-monooxygenase/tryptophan 5-monooxygenase activation protein, zeta
  ENSP ID: ENSP00000428381
MDKNELVQKAKLAEQAERYDDMAACMKSVTEQGAELSNEERNLLSVAYKNVVGARRSSWRVVSSIEQKTEGAEKK

SEQ ID NO: 94271 - protein, 125 aa, Homo sapiens
  Payload ID: 18800
  Gene Name: tyrosine 3-monooxygenase/tryptophan 5-monooxygenase activation protein, zeta
  ENSP ID: ENSP00000428775
MKGDYYRYLAEVAAGDDKKGIVDQSQQAYQEAFEISKKEMQPTHPIRLGLALNFSVFYYEILNSPEKACSLAKTAFDEAIAELDTLSEESYKDSTLIMQLLRDNLTLWTSDTQGDEAEAGEGGEN

SEQ ID NO: 94272 - protein, 130 aa, Homo sapiens
  Payload ID: 18800
  Gene Name: tyrosine 3-monooxygenase/tryptophan 5-monooxygenase activation protein, zeta
  ENSP ID: ENSP00000428860
VFYLKMKGDYYRYLAEVAAGDDKKGIVDQSQQAYQEAFEISKKEMQPTHPIRLGLALNFSVFYYEILNSPEKACSLAKTAFDEAIAELDTLSEESYKDSTLIMQLLRDNLTLWTSDTQGDEAEAGEGGEN

SEQ ID NO: 94273 - protein, 137 aa, Homo sapiens
  Payload ID: 18800
  Gene Name: tyrosine 3-monooxygenase/tryptophan 5-monooxygenase activation protein, zeta
  ENSP ID: ENSP00000429041
MDKNELVQKAKLAEQAERYDDMAACMKSVTEQGAELSNEERNLLSVAYKNVVGARRSSWRVVSSIEQKTEGAEKKQQMAREYREKIETELRDICNDVLSLLEKFLIPNASQAESKVFYLKMKGDYYRYLAEVAAGDD

SEQ ID NO: 94274 - protein, 125 aa, Homo sapiens; identical to SEQ ID NO: 94271
  Payload ID: 18800
  Gene Name: tyrosine 3-monooxygenase/tryptophan 5-monooxygenase activation protein, zeta
  ENSP ID: ENSP00000429623

SEQ ID NO: 94275 - protein, 246 aa, Homo sapiens
  Payload ID: 18800
  Gene Name: tyrosine 3-monooxygenase/tryptophan 5-monooxygenase activation protein, zeta
  ENSP ID: ENSP00000430058
MDKNELVQKAKLAEQAERYDDMAACMKSVTEQGAELSNEERNLLSVAYKNVVGARRSSWRVVSSIEQKTEGAEKKQQMAREYREKIETELRDICNDVLSLLEKFLIPNASQAESKVFYLKMKGDYYRYLAEVAAGDDKKVRFGVSYPGIVDQSQQAYQEAFEISKKEMQPTHPIRLGLALNFSVFYYEILNSPEKACSLAKTAFDEAIAELDTLSEESYKDSTLIMQLLRDNLTLWTSDTQGDEAE

SEQ ID NO: 94276 - protein, 170 aa, Homo sapiens
  Payload ID: 18800
  Gene Name: tyrosine 3-monooxygenase/tryptophan 5-monooxygenase activation protein, zeta
  Uniprot ID: P63104
  ENSP ID: ENSP00000430072
MSQPCRKLWRHNYETSSCIEFLKSLLEKFLIPNASQAESKVFYLKMKGDYYRYLAEVAAGDDKKGIVDQSQQAYQEAFEISKKEMQPTHPIRLGLALNFSVFYYEILNSPEKACSLAKTAFDEAIAELDTLSEESYKDSTLIMQLLRDNLTLWTSDTQGDEAEAGEGGEN

SEQ ID NO: 94277 - protein, 51 aa, Homo sapiens
  Payload ID: 18800
  Gene Name: tyrosine 3-monooxygenase/tryptophan 5-monooxygenase activation protein, zeta
  ENSP ID: ENSP00000430219
MDKNELVQKAKLAEQAERYDDMAACMKSVTEQGAELSNEERNLLSVAYKNV

SEQ ID NO: 94278 - protein, 454 aa, Homo sapiens [sequence omitted]

SEQ ID NO: 94279 - protein, 44 aa, Homo sapiens
  Payload ID: 18802
  Gene Name: tyrosine hydroxylase
  ENSP ID: ENSP00000325831
MPTPDATTPQAKGFRRAVSELDAKQAEAIMGHQALGAVPSCEGV

SEQ ID NO: 94280 - protein, 497 aa, Homo sapiens
  Payload ID: 18802
  Gene Name: tyrosine hydroxylase
  Uniprot ID: P07101
  ENSP ID: ENSP00000325951
MPTPDATTPQAKGFRRAVSELDAKQAEAIMSPRFIGRRQSLIEDARKEREAAVAAAAAAVPSEPGDPLEAVAFEEKEGKAVLNLLFSPRATKPSALSRAVKVFETFEAKIHHLETRPAQRPRAGGPHLEYFVRLEVRRGDLAALLSGVRQVSEDVRSPAGPKVPWFPRKVSELDKCHHLVTKFDPDLDLDHPGFSDQVYRQRRKLIAEIAFQYRHGDPIPRVEYTAEEIATWKEVYTTLKGLYATHACGEHLEAFALLERFSGYREDNIPQLEDVSRFLKERTGFQLRPVAGLLSARDFLASLAFRVFQCTQYIRHASSPMHSPEPDCCHELLGHVPMLADRTFAQFSQDIGLASLGASDEEIEKLSTLYWFTVEFGLCKQNGEVKAYGAGLLSSYGELLHCLSEEPEIRAFDPEAAAVQPYQDQTYQSVYFVSESFSDAKDKLRSYASRIQRPFSVKFDPYTLAIDVLDSPQAVRRSLEGVQDELDTLAHALSAIG

SEQ ID NO: 94281 - protein, 403 aa, Homo sapiens
  Payload ID: 18802
  Gene Name: tyrosine hydroxylase
  Uniprot ID: P07101
  ENSP ID: ENSP00000328814
MPTPDATTPQAKGFRRAVSELDAKQAEAIMSPRFIGRRQSLIEDARKEREAAVAAAAAAVPSEPGDPLEAVAFEEKEGKAVLNLLFSPRATKPSALSRAVKVFETFEAKIHHLETRPAQRPRAGGPHLEYFVRLEVRRGDLAALLSGVRQVSEDVRSPAGPKVPWFPRKVSELDKCHHLVTKFDPDLDLDHPGFSDQVYRQRRKLIAEIAFQYRHGDPIPRVEYTAEEIATWDCCHELLGHVPMLADRTFAQFSQDIGLASLGASDEEIEKLSTLYWFTVEFGLCKQNGEVKAYGAGLLSSYGELLHCLSEEPEIRAFDPEAAAVQPYQDQTYQSVYFVSESFSDAKDKLRSYASRIQRPFSVKFDPYTLAIDVLDSPQAVRRSLEGVQDELDTLAHALSAIG

SEQ ID NO: 94282 - protein, 48 aa, Homo sapiens
  Payload ID: 18802
  Gene Name: tyrosine hydroxylase
  ENSP ID: ENSP00000370560
MPTPDATTPQAKGFRRAVSELDAKQAEAIMVRGQGHQALGAVPSCEGV

SEQ ID NO: 94283 - protein, 524 aa, Homo sapiens
  Payload ID: 18802
  Gene Name: tyrosine hydroxylase
  Uniprot ID: P07101
  ENSP ID: ENSP00000370567
MPTPDATTPQAKGFRRAVSELDAKQAEAIMGAPGPSLTGSPWPGTAAPAASYTPTPRSPRFIGRRQSLIEDARKEREAAVAAAAAAVPSEPGDPLEAVAFEEKEGKAVLNLLFSPRATKPSALSRAVKVFETFEAKIHHLETRPAQRPRAGGPHLEYFVRLEVRRGDLAALLSGVRQVSEDVRSPAGPKVPWFPRKVSELDKCHHLVTKFDPDLDLDHPGFSDQVYRQRRKLIAEIAFQYRHGDPIPRVEYTAEEIATWKEVYTTLKGLYATHACGEHLEAFALLERFSGYREDNIPQLEDVSRFLKERTGFQLRPVAGLLSARDFLASLAFRVFQCTQYIRHASSPMHSPEPDCCHELLGHVPMLADRTFAQFSQDIGLASLGASDEEIEKLSTLYWFTVEFGLCKQNGEVKAYGAGLLSSYGELLHCLSEEPEIRAFDPEAAAVQPYQDQTYQSVYFVSESFSDAKDKLRSYASRIQRPFSVKFDPYTLAIDVLDSPQAVRRSLEGVQDELDTLAHALSAIG

SEQ ID NO: 94284 - protein, 528 aa, Homo sapiens
  Payload ID: 18802
  Gene Name: tyrosine hydroxylase
  Uniprot ID: P07101
  ENSP ID: ENSP00000370571
MPTPDATTPQAKGFRRAVSELDAKQAEAIMVRGQGAPGPSLTGSPWPGTAAPAASYTPTPRSPRFIGRRQSLIEDARKEREAAVAAAAAAVPSEPGDPLEAVAFEEKEGKAVLNLLFSPRATKPSALSRAVKVFETFEAKIHHLETRPAQRPRAGGPHLEYFVRLEVRRGDLAALLSGVRQVSEDVRSPAGPKVPWFPRKVSELDKCHHLVTKFDPDLDLDHPGFSDQVYRQRRKLIAEIAFQYRHGDPIPRVEYTAEEIATWKEVYTTLKGLYATHACGEHLEAFALLERFSGYREDNIPQLEDVSRFLKERTGFQLRPVAGLLSARDFLASLAFRVFQCTQYIRHASSPMHSPEPDCCHELLGHVPMLADRTFAQFSQDIGLASLGASDEEIEKLSTLYWFTVEFGLCKQNGEVKAYGAGLLSSYGELLHCLSEEPEIRAFDPEAAAVQPYQDQTYQSVYFVSESFSDAKDKLRSYASRIQRPFSVKFDPYTLAIDVLDSPQAVRRSLEGVQDELDTLAHALSAIG

SEQ ID NO: 94285 - protein, 45 aa, Homo sapiens
  Payload ID: 18802
  Gene Name: tyrosine hydroxylase
  ENSP ID: ENSP00000403440
  MOD_RES (1)..(1): Any amino acid
XDLDHPGFSDQVYRQRRKLIAEIAFQYRHGDPIPRVEYTAEEIAT

SEQ ID NO: 94286 - protein, 116 aa, Homo sapiens
  Payload ID: 18802
  Gene Name: tyrosine hydroxylase
  ENSP ID: ENSP00000403546
  MOD_RES (1)..(1): Any amino acid
XDLDHPGFSDQVYRQRRKLIAEIAFQYRHGDPIPRVEYTAEEIATWDCCHELLGHVPMLADRTFAQFSQDIGLASLGASDEEIEKLSTLYWFTVEFGLCKQNGEVKAYGAGLLSSY

SEQ ID NO: 94287 - protein, 1187 aa, Homo sapiens
  Payload ID: 18803
  Gene Name: tyrosine kinase 2
  Uniprot ID: P29597
  ENSP ID: ENSP00000264818
MPLRHWGMARGSKPVGDGAQPMAAMGGLKVLLHWAGPGGGEPWVTFSESSLTAEEVCIHIAHKVGITPPCFNLFALFDAQAQVWLPPNHILEIPRDASLMLYFRIRFYFRNWHGMNPREPAVYRCGPPGTEASSDQTAQGMQLLDPASFEYLFEQGKHEFVNDVASLWELSTEEEIHHFKNESLGMAFLHLCHLALRHGIPLEEVAKKTSFKDCIPRSFRRHIRQHSALTRLRLRNVFRRFLRDFQPGRLSQQMVMVKYLATLERLAPRFGTERVPVCHLRLLAQAEGEPCYIRDSGVAPTDPGPESAAGPPTHEVLVTGTGGIQWWPVEEEVNKEEGSSGSSGRNPQASLFGKKAKAHKAVGQPADRPREPLWAYFCDFRDITHVVLKEHCVSIHRQDNKCLELSLPSRAAALSFVSLVDGYFRLTADSSHYLCHEVAPPRLVMSIRDGIHGPLLEPFVQAKLRPEDGLYLIHWSTSHPYRLILTVAQRSQAPDGMQSLRLRKFPIEQQDGAFVLEGWGRSFPSVRELGAALQGCLLRAGDDCFSLRRCCLPQPGETSNLIIMRGARASPRTLNLSQLSFHRVDQKEITQLSHLGQGTRTNVYEGRLRVEGSGDPEEGKMDDEDPLVPGRDRGQELRVVLKVLDPSHHDIALAFYETASLMSQVSHTHLAFVHGVCVRGPENIMVTEYVEHGPLDVWLRRERGHVPMAWKMVVAQQLASALSYLENKNLVHGNVCGRNILLARLGLAEGTSPFIKLSDPGVGLGALSREERVERIPWLAPECLPGGANSLSTAMDKWGFGATLLEICFDGEAPLQSRSPSEKEHFYQRQHRLPEPSCPQLATLTSQCLTYEPTQRPSFRTILRDLTRLQPHNLADVLTVNPDSPASDPTVFHKRYLKKIRDLGEGHFGKVSLYCYDPTNDGTGEMVAVKALKADCGPQHRSGWKQEIDILRTLYHEHIIKYKGCCEDQGEKSLQLVMEYVPLGSLRDYLPRHSIGLAQLLLFAQQICEGMAYLHAQHYIHRDLAARNVLLDNDRLVKIGDFGLAKAVPEGHEYYRVREDGDSPVFWYAPECLKEYKFYYASDVWSFGVTLYELLTHCDSSQSPPTKFLELIGIAQGQMTVLRLTELLERGERLPRPDKCPCEVYHLMKNCWETEASFRPTFENLIPILKTVHEKYQGQAPSVFSVC

SEQ ID NO: 94288 - protein, 1187 aa, Homo sapiens; identical to SEQ ID NO: 94287
  Payload ID: 18803
  Gene Name: tyrosine kinase 2
  Uniprot ID: P29597
  ENSP ID: ENSP00000431885

SEQ ID NO: 94289 - protein, 82 aa, Homo sapiens
  Payload ID: 18803
  Gene Name: tyrosine kinase 2
  ENSP ID: ENSP00000432320
  MOD_RES (1)..(1): Any amino acid
XRVEGSGDPEEGKMDDEDPLVPGRDRGQELRVVLKVLDPSHHDIALAFYETASLMSQVSHTHLAFVHGVCVRGPESSSKLLV

SEQ ID NO: 94290 - protein, 921 aa, Homo sapiens
  Payload ID: 18803
  Gene Name: tyrosine kinase 2
  ENSP ID: ENSP00000432728
MPLRHWGMARGSKPVGDGAQPMAAMGGLKVLLHWAGPGGGEPWVTFSESSLTAEEVCIHIAHKVGITPPCFNLFALFDAQAQVWLPPNHILEIPRDASLMLYFRIRFYFRNWHGMNPREPAVYRCGPPGTEASSDQTAQGMQLLDPASFEYLFEQGKHEFVNDVASLWELSTEEEIHHFKNESLGMAFLHLCHLALRHGIPLEEVAKKTSFKDCIPRSFRRHIRQHSALTRLRLRNVFRRFLRDFQPGRLSQQMVMVKYLATLERLAPRFGTERVPVCHLRLLAQAEGEPCYIRDSGVAPTDPGPESAAGPPTHEVLVTGTGGIQWWPVEEEVNKEEGSSGSSGRNPQASLFGKKAKAHKAVGQPADRPREPLWAYFCDFRDITHVVLKEHCVSIHRQDNKCLELSLPSRAAALSFVSLVDGYFRLTADSSHYLCHEVAPPRLVMSIRDGIHGPLLEPFVQAKLRPEDGLYLIHWSTSHPYRLILTVAQRSQAPDGMQSLRLRKFPIEQQDGAFVLEGWGRSFPSVRELGAALQGCLLRAGDDCFSLRRCCLPQPGETSNLIIMRGARASPRTLNLSQLSFHRVDQKEITQLSHLGQGTRTNVYEGRLRVEGSGDPEEGKMDDEDPLVPGRDRGQELRVVLKVLDPSHHDIALAFYETASLMSQVSHTHLAFVHGVCVRGPENIMVTEYVEHGPLDVWLRRERGHVPMAWKMVVAQQLASALSYLENKNLVHGNVCGRNILLARLGLAEGTSPFIKLSDPGVGLGALSREERVERIPWLAPECLPGGANSLSTAMDKWGFGATLLEICFDGEAPLQSRSPSEVCLGDPWALPAVGAPPRNPEDRIRAQSCIPSGLVTSSLSGLPAGGPLAGAQCSPSLFRSLWKSLVPGTQKASKRLDFSFRQSDQGSDGRRPGCRVGKKG

SEQ ID NO: 94291 - protein, 1002 aa, Homo sapiens
  Payload ID: 18803
  Gene Name: tyrosine kinase 2
  ENSP ID: ENSP00000433203
MAFLHLCHLALRHGIPLEEVAKKTSFKDCIPRSFRRHIRQHSALTRLRLRNVFRRFLRDFQPGRLSQQMVMVKYLATLERLAPRFGTERVPVCHLRLLAQAEGEPCYIRDSGVAPTDPGPESAAGPPTHEVLVTGTGGIQWWPVEEEVNKEEGSSGSSGRNPQASLFGKKAKAHKAVGQPADRPREPLWAYFCDFRDITHVVLKEHCVSIHRQDNKCLELSLPSRAAALSFVSLVDGYFRLTADSSHYLCHEVAPPRLVMSIRDGIHGPLLEPFVQAKLRPEDGLYLIHWSTSHPYRLILTVAQRSQAPDGMQSLRLRKFPIEQQDGAFVLEGWGRSFPSVRELGAALQGCLLRAGDDCFSLRRCCLPQPGETSNLIIMRGARASPRTLNLSQLSFHRVDQKEITQLSHLGQGTRTNVYEGRLRVEGSGDPEEGKMDDEDPLVPGRDRGQELRVVLKVLDPSHHDIALAFYETASLMSQVSHTHLAFVHGVCVRGPENIMVTEYVEHGPLDVWLRRERGHVPMAWKMVVAQQLASALSYLENKNLVHGNVCGRNILLARLGLAEGTSPFIKLSDPGVGLGALSREERVERIPWLAPECLPGGANSLSTAMDKWGFGATLLEICFDGEAPLQSRSPSEKEHFYQRQHRLPEPSCPQLATLTSQCLTYEPTQRPSFRTILRDLTRLQPHNLADVLTVNPDSPASDPTVFHKRYLKKIRDLGEGHFGKVSLYCYDPTNDGTGEMVAVKALKADCGPQHRSGWKQEIDILRTLYHEHIIKYKGCCEDQGEKSLQLVMEYVPLGSLRDYLPRHSIGLAQLLLFAQQICEGMAYLHAQHYIHRDLAARNVLLDNDRLVKIGDFGLAKAVPEGHEYYRVREDGDSPVFWYAPECLKEYKFYYASDVWSFGVTLYELLTHCDSSQSPPTKFLELIGIAQGQMTVLRLTELLERGERLPRPDKCPCEVYHLMKNCWETEASFRPTFENLIPILKTVHEKYQGQAPSVFSVC

SEQ ID NO: 94292 - protein, 64 aa, Homo sapiens
  Payload ID: 18803
  Gene Name: tyrosine kinase 2
  ENSP ID: ENSP00000434831
  MOD_RES (1)..(1): Any amino acid
XGVTLYELLTHCDSSQSPPTVYHLMKNCWETEASFRPTFENLIPILKTVHEKYQGQAPSVFSVC

SEQ ID NO: 94293 - protein, 194 aa, Homo sapiens
  Payload ID: 18803
  Gene Name: tyrosine kinase 2
  ENSP ID: ENSP00000434931
  MOD_RES (1)..(1): Any amino acid
XIRQHSALTRLRLRNVFRRFLRDFQPGRLSQQMVMVKYLATLERLAPRFGTERVPVCHLRLLAQAEGEPCYIRDSGVAPTDPGPESAAGPPTHEVLVTGTGGIQWWPVEEEVNKEEELSLPSRAAALSFVSLVDGYFRLTADSSHYLCHEVAPPRLVMSIRDGIHGPLLEPFVQAKLRPEDGLYLIHWSTSHPY

SEQ ID NO: 94294 - protein, 129 aa, Homo sapiens
  Payload ID: 18803
  Gene Name: tyrosine kinase 2
  ENSP ID: ENSP00000436155
MEYVPLGSLRDYLPRHSIGLAQLLLFAQQICEGMAYLHAQHYIHRDLAARNVLLDNDRLVKIGDFGLAKAVPEGHEYYRVREDGDSPVFWYAPECLKEYKFYYASDVWSFGVTLYELLTHCDSSQSPPT

SEQ ID NO: 94295 - protein, 118 aa, Homo sapiens
  Payload ID: 18803
  Gene Name: tyrosine kinase 2
  ENSP ID: ENSP00000436175
MPLRHWGMARGSKPVGDGAQPMAAMGGLKVLLHWAGPGGGEPWVTFSESSLTAEEVCIHIAHKVGITPPCFNLFALFDAQAQVWLPPNHILEIPRDASLMLYFRIRFYFRNWHGMNPR

SEQ ID NO: 94296 - protein, 134 aa, Homo sapiens
  Payload ID: 18803
  Gene Name: tyrosine kinase 2
  ENSP ID: ENSP00000436826
MPLRHWGMARGSKPVGDGAQPMAAMGGLKVLLHWAGPGGGEPWVTFSESSLTAEEVCIHIAHKVVETGFHHVSQDGLDLLTSWSAHLSLPKCWDYRREPLRPADRYHSSLLQSLCPLRCSGPSLVAPKPHPRDP

SEQ ID NO: 94297 - protein, 142 aa, Homo sapiens
  Payload ID: 18803
  Gene Name: tyrosine kinase 2
  ENSP ID: ENSP00000465291
SFRTILRDLTRLQPHNLADVLTVNPDSPASDPTVFHKRYLKKIRDLGEGHFGKVSLYCYDPTNDGTGEMVAVKALKADCGPQHRSGWKQEIDILRTLYHEHIIKYKGCCEDQGLSSHEELLGDRGVLSPNLREPHTHSEDSP

SEQ ID NO: 94298 - protein, 135 aa, Homo sapiens
  Payload ID: 18803
  Gene Name: tyrosine kinase 2
  ENSP ID: ENSP00000466340
  MOD_RES (1)..(1): Any amino acid
XLGEGHFGKVSLYCYDPTNDGTGEMVAVKALKADCGPQHRSGWKQEIDILRTLYHEHIIKYKGCCEDQGHGLSARAALHPPRPSRAQRAAGQRQAGQDRGLWPSQGRARRPRVLPRARGWGQPRVLVCPRVPEGV

SEQ ID NO: 94299 - protein, 103 aa, Homo sapiens
  Payload ID: 18803
  Gene Name: tyrosine kinase 2
  ENSP ID: ENSP00000467288
MYPALWPETSSAIGSILAAREAGKCSPPVRPQHGQHTHCPLPRGNVRLKLQAQVWLPPNHILEIPRDASLMLYFRIRFYFRNWHGMNPREPAVYRCGPPGTEA

SEQ ID NO: 94300 - protein, 1138 aa, Homo sapiens
  Payload ID: 18804
  Gene Name: tyrosine kinase with immunoglobulin-like and EGF-like domains 1
  Uniprot ID: P35590
  ENSP ID: ENSP00000361554
MVWRVPPFLLPILFLASHVGAAVDLTLLANLRLTDPQRFFLTCVSGEAGAGRGSDAWGPPLLLEKDDRIVRTPPGPPLRLARNGSHQVTLRGFSKPSDLVGVFSCVGGAGARRTRVIYVHNSPGAHLLPDKVTHTVNKGDTAVLSARVHKEKQTDVIWKSNGSYFYTLDWHEAQDGRFLLQLPNVQPPSSGIYSATYLEASPLGSAFFRLIVRGCGAGRWGPGCTKECPGCLHGGVCHDHDGECVCPPGFTGTRCEQACREGRFGQSCQEQCPGISGCRGLTFCLPDPYGCSCGSGWRGSQCQEACAPGHFGADCRLQCQCQNGGTCDRFSGCVCPSGWHGVHCEKSDRIPQILNMASELEFNLETMPRINCAAAGNPFPVRGSIELRKPDGTVLLSTKAIVEPEKTTAEFEVPRLVLADSGFWECRVSTSGGQDSRRFKVNVKVPPVPLAAPRLLTKQSRQLVVSPLVSFSGDGPISTVRLHYRPQDSTMDWSTIVVDPSENVTLMNLRPKTGYSVRVQLSRPGEGGEGAWGPPTLMTTDCPEPLLQPWLEGWHVEGTDRLRVSWSLPLVPGPLVGDGFLLRLWDGTRGQERRENVSSPQARTALLTGLTPGTHYQLDVQLYHCTLLGPASPPAHVLLPPSGPPAPRHLHAQALSDSEIQLTWKHPEALPGPISKYVVEVQVAGGAGDPLWIDVDRPEETSTIIRGLNASTRYLFRMRASIQGLGDWSNTVEESTLGNGLQAEGPVQESRAAEEGLDQQLILAVVGSVSATCLTILAALLTLVCIRRSCLHRRRTFTYQSGSGEETILQFSSGTLTLTRRPKLQPEPLSYPVLEWEDITFEDLIGEGNFGQVIRAMIKKDGLKMNAAIKMLKEYASENDHRDFAGELEVLCKLGHHPNIINLLGACKNRGYLYIAIEYAPYGNLLDFLRKSRVLETDPAFAREHGTASTLSSRQLLRFASDAANGMQYLSEKQFIHRDLAARNVLVGENLASKIADFGLSRGEEVYVKKTMGRLPVRWMAIESLNYSVYTTKSDVWSFGVLLWEIVSLGGTPYCGMTCAELYEKLPQGYRMEQPRNCDDEVYELMRQCWRDRPYERPPFAQIALQLGRMLEARKAYVNMSLFENFTYAGIDATAEEA

SEQ ID NO: 94301 - protein, 379 aa, Homo sapiens
  Payload ID: 18804
  Gene Name: tyrosine kinase with immunoglobulin-like and EGF-like domains 1
  Uniprot ID: P35590
  ENSP ID: ENSP00000440063
MVWRVPPFLLPILFLASHVGAAVDLTLLANLRLTDPQRFFLTCVSGEAGAGRGSDAWGPPLLLEKDDRIVRTPPGPPLRLARNGSHQVTLRGFSKPSDLVGVFSCVGGAGARRTRVIYVHNSPGAHLLPDKVTHTVNKGDTAVLSARVHKEKQTDVIWKSNGSYFYTLDWHEAQDGRFLLQLPNVQPPSSGIYSATYLEASPLGSAFFRLIVRGCGAGRWGPGCTKECPGCLHGGVCHDHDGECVCPPGFTGTRCEQACREGRFGQSCQEQCPGISGCRGLTFCLPDPYGCSCGSGWRGSQCQEACAPGHFGADCRLQCQCQNGGTCDRFSGCVCPSGWHGVHCEKSGWRDWVDTSTEKQNTDEGRFGGHVSAPVGAPG

SEQ ID NO: 94302 - protein, 661 aa, Homo sapiens
  Payload ID: 18805
  Gene Name: tyrosine kinase, non-receptor, 1
  Uniprot ID: Q13470
  ENSP ID: ENSP00000458834
MLPEAGSLWLLKLLRDIQLAQFYWPILEELNVTRPEHFDFVKPEDLDGIGMGRPAQRRLSEALKRLRSGPKSKNWVYKILGGFAPEHKEPTLPSDSPRHLPEPEGGLKCLIPEGAVCRGELLGSGCFGVVHRGLWTLPSGKSVPVAVKSLRVGPEGPMGTELGDFLREVSVMMNLEHPHVLRLHGLVLGQPLQMVMELAPLGSLHARLTAPAPTPPLLVALLCLFLRQLAGAMAYLGARGLVHRDLATRNLLLASPRTIKVADFGLVRPLGGARGRYVMGGPRPIPYAWCAPESLRHGAFSSASDVWMFGVTLWEMFSGGEEPWAGVPPYLILQRLEDRARLPRPPLCSRALYSLALRCWAPHPADRPSFSHLEGLLQEAGPSEACCVRDVTEPGALRMETGDPITVIEGSPDSTIWKGQNGRTFKVGSFPASAVTLADAGGLPATRPVHRGTPARGDQHPGSIDGDRKKANLWDAPPARGQRRNMPLERMKGISRSLESVLSLGPRPTGGGSSPPEIRQARAVPQGPPGLPPRPPLSSSSPQPSQPSRERLPWPKRKPPHNHPMGMPGARKAAALSGGLLSDPELQRKIMEVELSVHGVTHQECQTALGATGGDVVSAIRNLKVDQLFHLSSRSRADCWRILEHYQWDLSAASRYVLARP

SEQ ID NO: 94303 - protein, 666 aa, Homo sapiens
  Payload ID: 18805
  Gene Name: tyrosine kinase, non-receptor, 1
  Uniprot ID: Q13470
  ENSP ID: ENSP00000459799
MLPEAGSLWLLKLLRDIQLAQFYWPILEELNVTRPEHFDFVKPEDLDGIGMGRPAQRRLSEALKRLRSGPKSKNWVYKILGGFAPEHKEPTLPSDSPRHLPEPEGGLKCLIPEGAVCRGELLGSGCFGVVHRGLWTLPSGKSVPVAVKSLRVGPEGPMGTELGDFLREVSVMMNLEHPHVLRLHGLVLGQPLQMVMELAPLGSLHARLTAPAPTPPLLVALLCLFLRQLAGAMAYLGARGLVHRDLATRNLLLASPRTIKVADFGLVRPLGGARGRYVMGGPRPIPYAWCAPESLRHGAFSSASDVWMFGVTLWEMFSGGEEPWAGVPPYLILQRLEDRARLPRPPLCSRALYSLALRCWAPHPADRPSFSHLEGLLQEAGPSEACCVRDVTEPGALRMETGDPITVIEGSSSFHSPDSTIWKGQNGRTFKVGSFPASAVTLADAGGLPATRPVHRGTPARGDQHPGSIDGDRKKANLWDAPPARGQRRNMPLERMKGISRSLESVLSLGPRPTGGGSSPPEIRQARAVPQGPPGLPPRPPLSSSSPQPSQPSRERLPWPKRKPPHNHPMGMPGARKAAALSGGLLSDPELQRKIMEVELSVHGVTHQECQTALGATGGDVVSAIRNLKVDQLFHLSSRSRADCWRILEHYQWDLSAASRYVLARP

SEQ ID NO: 94304 - protein, 84 aa, Homo sapiens
  Payload ID: 18805
  Gene Name: tyrosine kinase, non-receptor, 1
  ENSP ID: ENSP00000460146
TPRKHRWRQKEGKSLGCAPSTGPEEEHAPGEDESSPQPSQPSRERLPWPKRKPPHNHPMGMPGARKAAALSGGLLSDPELQRKI

SEQ ID NO: 94305 - protein, 3 aa, Homo sapiens
  Payload ID: 18805
  Gene Name: tyrosine kinase, non-receptor, 1
  ENSP ID: ENSP00000466590
  MOD_RES (1)..(1): Any amino acid
XAW

SEQ ID NO: 94306 - protein, 77 aa, Homo sapiens
  Payload ID: 18805
  Gene Name: tyrosine kinase, non-receptor, 1
  ENSP ID: ENSP00000475164
MLPEAGSLWLLKLLRDIQLAQFYWPILEELNVTRPEHFDFVKPEDLDGIGMGRPALILASHSPAQTVRSSEKATFWA

SEQ ID NO: 94307 - protein, 1038 aa, Homo sapiens
  Payload ID: 18806
  Gene Name: tyrosine kinase, non-receptor, 2
  Uniprot ID: Q07912
  ENSP ID: ENSP00000329425
MQPEEGTGWLLELLSEVQLQQYFLRLRDDLNVTRLSHFEYVKNEDLEKIGMGRPGQRRLWEAVKRRKALCKRKSWMSKVFSGKRLEAEFPPHHSQSTFRKTSPAPGGPAGEGPLQSLTCLIGEKDLRLLEKLGDGSFGVVRRGEWDAPSGKTVSVAVKCLKPDVLSQPEAMDDFIREVNAMHSLDHRNLIRLYGVVLTPPMKMVTELAPLGSLLDRLRKHQGHFLLGTLSRYAVQVAEGMGYLESKRFIHRDLAARNLLLATRDLVKIGDFGLMRALPQNDDHYVMQEHRKVPFAWCAPESLKTRTFSHASDTWMFGVTLWEMFTYGQEPWIGLNGSQILHKIDKEGERLPRPEDCPQDIYNVMVQCWAHKPEDRPTFVALRDFLLEAQPTDMRALQDFEEPDKLHIQMNDVITVIEGRAENYWWRGQNTRTLCVGPFPRNVVTSVAGLSAQDISQPLQNSFIHTGHGDSDPRHCWGFPDRIDELYLGNPMDPPDLLSVELSTSRPPQHLGGVKKPTYDPVSEDQDPLSSDFKRLGLRKPGLPRGLWLAKPSARVPGTKASRGSGAEVTLIDFGEEPVVPALRPCAPSLAQLAMDACSLLDETPPQSPTRALPRPLHPTPVVDWDARPLPPPPAYDDVAQDEDDFEICSINSTLVGAGVPAGPSQGQTNYAFVPEQARPPPPLEDNLFLPPQGGGKPPSSAQTAEIFQALQQECMRQLQAPAGSPAPSPSPGGDDKPQVPPRVPIPPRPTRPHVQLSPAPPGEEETSQWPGPASPPRVPPREPLSPQGSRTPSPLVPPGSSPLPPRLSSSPGKTMPTTQSFASDPKYATPQVIQAPGPRAGPCILPIVRDGKKVSSTHYYLLPERPSYLERYQRFLREAQSPEEPTPLPVPLLLPPPSTPAPAAPTATVRPMPQAALDPKANFSTNNSNPGARPPPPRATARLPQRGCPGDGPEAGRPADKIQMAMVHGVTTEECQAALQCHGWSVQRAAQYLKVEQLFGLGLRPRGECHKVLEMFDWNLEQAGCHLLGSWGPAHHKR

SEQ ID NO: 94308 - protein, 1086 aa, Homo sapiens
  Payload ID: 18806
  Gene Name: tyrosine kinase, non-receptor, 2
  Uniprot ID: Q07912
  ENSP ID: ENSP00000371341
MLEARPPRTQGSDAAGAAAGRGLRALLLSLTAAAGIWGSMGERSAYQRLAGGEEGPQRLGGGRMQPEEGTGWLLELLSEVQLQQYFLRLRDDLNVTRLSHFEYVKNEDLEKIGMGRPGQRRLWEAVKRRKALCKRKSWMSKVFSGKRLEAEFPPHHSQSTFRKTSPAPGGPAGEGPLQSLTCLIGEKDLRLLEKLGDGSFGVVRRGEWDAPSGKTVSVAVKCLKPDVLSQPEAMDDFIREVNAMHSLDHRNLIRLYGVVLTPPMKMVTELAPLGSLLDRLRKHQGHFLLGTLSRYAVQVAEGMGYLESKRFIHRDLAARNLLLATRDLVKIGDFGLMRALPQNDDHYVMQEHRKVPFAWCAPESLKTRTFSHASDTWMFGVTLWEMFTYGQEPWIGLNGSQILHKIDKEGERLPRPEDCPQDIYNVMVQCWAHKPEDRPTFVALRDFLLEAQPTDMRALQDFEEPDKLHIQMNDVITVIEGRAENYWWRGQNTRTLCVGPFPRNVVTSVAGLSAQDISQPLQNSFIHTGHGDSDPRHCWGFPDRIDELYLGNPMDPPDLLSVELSTSRPPQHLGGVKREPPPRPPQPAFFTQKPTYDPVSEDQDPLSSDFKRLGLRKPGLPRGLWLAKPSARVPGTKASRGSGAEVTLIDFGEEPVVPALRPCAPSLAQLAMDACSLLDETPPQSPTRALPRPLHPTPVVDWDARPLPPPPAYDDVAQDEDDFEICSINSTLVGAGVPAGPSQGQTNYAFVPEQARPPPPLEDNLFLPPQGGGKPPSSAQTAEIFQALQQECMRQLQAPAGSPAPSPSPGGDDKPQVPPRVPIPPRPTRPHVQLSPAPPGEEETSQWPGPASPPRVPPREPLSPQGSRTPSPLVPPGSSPLPPRLSSSPGKTMPTTQSFASDPKYATPQVIQAPGPRAGPCILPIVRDGKKVSSTHYYLLPERPSYLERYQRFLREAQSPEEPTPLPVPLLLPPPSTPAPAAPTATVRPMPQAALDPKANFSTNNSNPGARPPPPRATARLPQRGCPGDGPEAGRPADKIQMVEQLFGLGLRPRGECHKVLEMFDWNLEQAGCHLLGSWGPAHHKR

SEQ ID NO: 94309 - protein, 143 aa, Homo sapiens
  Payload ID: 18806
  Gene Name: tyrosine kinase, non-receptor, 2
  ENSP ID: ENSP00000390088
MRSGALGPRGRGRASALGLPVPAMASRQCWARHPRVGLCWAAFEQESGPSCHRSEVKERLGGGRMQPEEGTGWLLELLSEVQLQQYFLRLRDDLNVTRLSHFEYVKNEDLEKIGMGRPGQRRLWEAVKRRKALCKRKSWMSKV

SEQ ID NO: 94310 - protein, 242 aa, Homo sapiens
  Payload ID: 18806
  Gene Name: tyrosine kinase, non-receptor, 2
  ENSP ID: ENSP00000390435
  MOD_RES (1)..(1): Any amino acid
XLWGLLPPGPPALAWNHSTCPPCLELLRRAENYWWRGQNTRTLCVGPFPRNVVTSVAGLSAQDISQPLQNSFIHTGHGDSDPRHCWGFPDRIDELYLGNPMDPPDLLSVELSTSRPPQHLGGVKKPTYDPVSEDQDPLSSDFKRLGLRKPGLPRGLWLAKPSARVPGTKASRGSGAEVTLIDFGEEPVVPALRPCAPSLAQLAMDACSLLDETPPQSPTRALPRPLHPTPVVDWDARPLPPP

SEQ ID NO: 94311 - protein, 290 aa, Homo sapiens
  Payload ID: 18806
  Gene Name: tyrosine kinase, non-receptor, 2
  ENSP ID: ENSP00000392253
  MOD_RES (1)..(1): Any amino acid
XPEEGTGWLLELLSEVQLQQYFLRLRDDLNVTRLSHFEYVKNEDLEKIGMGRPGQRRLWEAVKRRKALCKRKSWMSKVSVAVKCLKPDVLSQPEAMDDFIREVNAMHSLDHRNLIRLYGVVLTPPMKMVTELAPLGSLLDRLRKHQGHFLLGTLSRYAVQVAEGMGYLESKRFIHRDLAARNLLLATRDLVKIGDFGLMRALPQNDDHYVMQEHRKVPFAWCAPESLKTRTFSHASDTWMFGVTLWEMFTYGQEPWIGLNGSQILHKIDKEGERLPRPEDCPQDIYNVMV

SEQ ID NO: 94312 - protein, 1040 aa, Homo sapiens
  Payload ID: 18806
  Gene Name: tyrosine kinase, non-receptor, 2
  ENSP ID: ENSP00000392546
MPAARRFPGLELSFPLLARLRRRLYTRLGGGRMQPEEGTGWLLELLSEVQLQQYFLRLRDDLNVTRLSHFEYVKNEDLEKIGMGRPGQRRLWEAVKRRKALCKRKSWMSKVFSGKRLEAEFPPHHSQSTFRKTSPAPGGPAGEGPLQSLTCLIGEKDLRLLEKLGDGSFGVVRRGEWDAPSGKTVSVAVKCLKPDVLSQPEAMDDFIREVNAMHSLDHRNLIRLYGVVLTPPMKMVTELAPLGSLLDRLRKHQGHFLLGTLSRYAVQVAEGMGYLESKRFIHRDLAARNLLLATRDLVKIGDFGLMRALPQNDDHYVMQEHRKVPFAWCAPESLKTRTFSHASDTWMFGVTLWEMFTYGQEPWIGLNGSQILHKIDKEGERLPRPEDCPQDIYNVMVQCWAHKPEDRPTFVALRDFLLEAQPTDMRALQDFEEPDKLHIQMNDVITVIEGRAENYWWRGQNTRTLCVGPFPRNVVTSVAGLSAQDISQPLQNSFIHTGHGDSDPRHCWGFPDRIDELYLGNPMDPPDLLSVELSTSRPPQHLGGVKKPTYDPVSEDQDPLSSDFKRLGLRKPGLPRGLWLAKPSARVPGTKASRGSGAEVTLIDFGEEPVVPALRPCAPSLAQLAMDACSLLDETPPQSPTRALPRPLHPTPVVDWDARPLPPPPAYDDVAQDEDDFEICSINSTLVGAGVPAGPSQGQTNYAFVPEQARPPPPLEDNLFLPPQGGGKPPSSAQTAEIFQALQQECMRQLQAPAGSPAPSPSPGGDDKPQVPPRVPIPPRPTRPHVQLSPAPPGEEETSQWPGPASPPRVPPREPLSPQGSRTPSPLVPPGSSPLPPRLSSSPGKTMPTTQSFASDPKYATPQVIQAPGPRAGPCILPIVRDGKKVSSTHYYLLPERPSYLERYQRFLREAQSPEEPTPLPVPLLLPPPSTPAPAAPTATVRPMPQAALDPKANFSTNNSNPGARPPPPRATARLPQRGCPGDGPEAGRPADKIQMVEQLFGLGLRPRGECHKVLEMFDWNLEQAGCHLLGSWGPAHHKR

SEQ ID NO: 94313 - protein, 86 aa, Homo sapiens
  Payload ID: 18806
  Gene Name: tyrosine kinase, non-receptor, 2
  ENSP ID: ENSP00000393707
MQPEEGTGWLLELLSEVQLQQYFLRLRDDLNVTRLSHFEYVKNEDLEKIGMGRPGQRRLWEAVKRRKALCKRKSWMSKDEGQPTPW

SEQ ID NO: 94314 - protein, 97 aa, Homo sapiens
  Payload ID: 18806
  Gene Name: tyrosine kinase, non-receptor, 2
  ENSP ID: ENSP00000395154
MQPEEGTGWLLELLSEVQLQQYFLRLRDDLNVTRLSHFEYVKNEDLEKIGMGRPGQRRLWEAVKRRKALCKRKSWMSKVFSGKRLEAEFPPHHSQST

SEQ ID NO: 94315 - protein, 528 aa, Homo sapiens
  Payload ID: 18806
  Gene Name: tyrosine kinase, non-receptor, 2
  Uniprot ID: Q07912
  ENSP ID: ENSP00000395588
MQPEEGTGWLLELLSEVQLQQYFLRLRDDLNVTRLSHFEYVKNEDLEKIGMGRPGQRRLWEAVKRRKALCKRKSWMSKVFSGKRLEAEFPPHHSQSTFRKTSPAPGGPAGEGPLQSLTCLIGEKDLRLLEKLGDGSFGVVRRGEWDAPSGKTVSVAVKCLKPDVLSQPEAMDDFIREVNAMHSLDHRNLIRLYGVVLTPPMKMVTELAPLGSLLDRLRKHQGHFLLGTLSRYAVQVAEGMGYLESKRFIHRDLAARNLLLATRDLVKIGDFGLMRALPQNDDHYVMQEHRKVPFAWCAPESLKTRTFSHASDTWMFGVTLWEMFTYGQEPWIGLNGSQILHKIDKEGERLPRPEDCPQDIYNVMVQCWAHKPEDRPTFVALRDFLLEAQPTDMRALQDFEEPDKLHIQMNDVITVIEGRAENYWWRGQNTRTLCVGPFPRNVVTSVAGLSAQDISQPLQNSFIHTGHGDSDPRHCWGFPDRIDECPFSAFSPGHPPAETCGQVLWTGRREACASDPRLHPVSSRTKGL

SEQ ID NO: 94316 - protein, 607 aa, Homo sapiens
  Payload ID: 18806
  Gene Name: tyrosine kinase, non-receptor, 2
  ENSP ID: ENSP00000398614
LSAQDISQPLQNSFIHTGHGDSDPRHCWGFPDRIDELYLGNPMDPPDLLSVELSTSRPPQHLGGVKREPPPRPPQPAFFTQKPTYDPVSEDQDPLSSDFKRLGLRKPGLPRGLWLAKPSARVPGTKASRGSGAEVTLIDFGEEPVVPALRPCAPSLAQLAMDACSLLDETPPQSPTRALPRPLHPTPVVDWDARPLPPPPAYDDVAQDEDDFEICSINSTLVGAGVPAGPSQGQTNYAFVPEQARPPPPLEDNLFLPPQGGGKPPSSAQTAEIFQALQQECMRQLQAPAGSPAPSPSPGGDDKPQVPPRVPIPPRPTRPHVQLSPAPPGEEETSQWPGPASPPRVPPREPLSPQGSRTPSPLVPPGSSPLPPRLSSSPGKTMPTTQSFASDPKYATPQVIQAPGPRAGPCILPIVRDGKKVSSTHYYLLPERPSYLERYQRFLREAQSPEEPTPLPVPLLLPPPSTPAPAAPTATVRPMPQAALDPKANFSTNNSNPGARPPPPRATARLPQRGCPGDGPEAGRPADKIQMLQAMVHGVTTEECQAALQCHGWSVQRAAQYLKVEQLFGLGLRPRGECHKVLEMFDWNLEQAGCHLLGSWGPAHHKR

SEQ ID NO: 94317 - protein, 143 aa, Homo sapiens
  Payload ID: 18806
  Gene Name: tyrosine kinase, non-receptor, 2
  ENSP ID: ENSP00000409462
VFSGKRLEAEFPPHHSQSTFRKTSPAPGGPAGEGPLQSLTCLIGEKDLRLLEKLGDGSFGVVRRGEWDAPSGKTVSVAVKCLKPDVLSQPEAMDDFIREVNAMHSLDHRNLIRLYGVVLTPPMKMASVSQIASRERPEKLQDS

SEQ ID NO: 94318 - protein, 200 aa, Homo sapiens
  Payload ID: 18806
  Gene Name: tyrosine kinase, non-receptor, 2
  ENSP ID: ENSP00000415126
VGPSRWFPVAAAGGALGAPSPWATSPGLEPQHLPSVPGAAQESLNISMFVWLPPSPCLQADGSVAENYWWRGQNTRTLCVGPFPRNVVTSVAGLSAQDISQPLQNSFIHTGHGDSDPRHCWGFPDRIDELYLGNPMDPPDLLSVELSTSRPPQHLGGVKKPTYDPVSEDQDPLSSDFKRLGLRKPGLPRGLWLAKPSARV

SEQ ID NO: 94319 - protein, 1406 aa, Homo sapiens
  Payload ID: 18807
  Gene Name: Tyrosine-protein kinase SgK223  [Source:UniProtKB/Swiss-Prot
  Acc:Q86YV5]
  Uniprot ID: Q86YV5
  ENSP ID: ENSP00000479068
MHQTLCLNPESLKMSACSDFVEHIWKPGSCKNCFCLRSDHQLVAGPPQPRAGSLPPPPRLPPRPENCRLEDEGVNSSPYSKPTIAVKPTMMSSEASDVWTEANLSAEVSQVIWRRAPGKLPLPKQEDAPVVYLGSFRGVQKPAGPSTSPDGNSRCPPAYTMVGLHNLEPRGERNIAFHPVSFPEEKAVHKEKPSFPYQDRPSTQESFRQKLAAFAGTTSGCHQGPGPLRESLPSEDDSDQRCSPSGDSEGGEYCSILDCCPGSPVAKAASQTAGSRGRHGGRDCSPTCWEQGKCSGPAEQEKRGPSFPKECCSQGPTAHPSCLGPKKLSLTSEAAISSDGLSCGSGSGSGSGASSPFVPHLESDYCSLMKEPAPEKQQDPGCPGVTPSRCLGLTGEPQPPAHPREATQPEPIYAESTKRKKAAPVPSKSQAKIEHAAAAQGQGQVCTGNAWAQKAASGWGRDSPDPTPQVSATITVMAAHPEEDHRTIYLSSPDSAVGVQWPRGPVSQNSEVGEEETSAGQGLSSRESHAHSASESKPKERPAIPPKLSKSSPVGSPVSPSAGGPPVSPLADLSDGSSGGSSIGPQPPSQGPADPAPSCRTNGVAISDPSRCPQPAASSASEQRRPRFQAGTWSRQCRIEEEEEVEQELLSHSWGRETKNGPTDHSNSTTWHRLHPTDGSSGQNSKVGTGMSKSASFAFEFPKDRSGIETFSPPPPPPKSRHLLKMNKSSSDLEKVSQGSAESLSPSFRGVHVSFTTGSTDSLASDSRTCSDGGPSSELAHSPTNSGKKLFAPVPFPSGSTEDVSPSGPQQPPPLPQKKIVSRAASSPDGFFWTQGSPKPGTASPKLNLSHSETNVHDESHFSYSLSPGNRHHPVFSSSDPLEKAFKGSGHWLPAAGLAGNRGGCGSPGLQCKGAPSASSSQLSVSSQASTGSTQLQLHGLLSNISSKEGTYAKLGGLYTQSLARLVAKCEDLFMGGQKKELHFNENNWSLFKLTCNKPCCDSGDAIYYCATCSEDPGSTYAVKICKAPEPKTVSYCSPSVPVHFNIQQDCGHFVASVPSSMLSSPDAPKDPVPALPTHPPAQEQDCVVVITREVPHQTASDFVRDSAASHQAEPEAYERRVCFLLLQLCNGLEHLKEHGIIHRDLCLENLLLVHCTLQAGPGPAPAPAPAPAPAAAAPPCSSAAPPAGGTLSPAAGPASPEGPREKQLPRLIISNFLKAKQKPGGTPNLQQKKSQARLAPEIVSASQYRKFDEFQTGILIYELLHQPNPFEVRAQLRERDYRQEDLPPLPALSLYSPGLQQLAHLLLEADPIKRIRIGEAKRVLQCLLWGPRRELVQQPGTSEEALCGTLHNWIDMKRALMMMKFAEKAVDRRRGVELEDWLCCQYLASAEPGALLQSLKLLQLL

SEQ ID NO: 94320 - protein, 1406 aa, Homo sapiens; identical to SEQ ID NO: 94319
  Payload ID: 18807
  Gene Name: Tyrosine-protein kinase SgK223  [Source:UniProtKB/Swiss-Prot
  Acc:Q86YV5]
  Uniprot ID: Q86YV5
  ENSP ID: ENSP00000481109

SEQ ID NO: 94321 - protein, 608 aa, Homo sapiens
  Payload ID: 18808
  Gene Name: tyrosyl-DNA phosphodiesterase 1
  Uniprot ID: Q9NUW8
  ENSP ID: ENSP00000337353
MSQEGDYGRWTISSSDESEEEKPKPDKPSTSSLLCARQGAANEPRYTCSEAQKAAHKRKISPVKFSNTDSVLPPKRQKSGSQEDLGWCLSSSDDELQPEMPQKQAEKVVIKKEKDISAPNDGTAQRTENHGAPACHRLKEEEDEYETSGEGQDIWDMLDKGNPFQFYLTRVSGVKPKYNSGALHIKDILSPLFGTLVSSAQFNYCFDVDWLVKQYPPEFRKKPILLVHGDKREAKAHLHAQAKPYENISLCQAKLDIAFGTHHTKMMLLLYEEGLRVVIHTSNLIHADWHQKTQGIWLSPLYPRIADGTHKSGESPTHFKADLISYLMAYNAPSLKEWIDVIHKHDLSETNVYLIGSTPGRFQGSQKDNWGHFRLKKLLKDHASSMPNAESWPVVGQFSSVGSLGADESKWLCSEFKESMLTLGKESKTPGKSSVPLYLIYPSVENVRTSLEGYPAGGSLPYSIQTAEKQNWLHSYFHKWSAETSGRSNAMPHIKTYMRPSPDFSKIAWFLVTSANLSKAAWGALEKNGTQLMIRSYELGVLFLPSAFGLDSFKVKQKFFAGSQEPMATFPVPYDLPPELYGSKDRPWIWNIPYVKAPDTHGNMWVPS

SEQ ID NO: 94322 - protein, 589 aa, Homo sapiens
  Payload ID: 18808
  Gene Name: tyrosyl-DNA phosphodiesterase 1
  ENSP ID: ENSP00000377098
MSQEGDYGRWTISSSDESEEEKPKPDKPSTSSLLCARQGAANEPRYTCSEAQKAAHKRKISPVKFSNTDSVLPPKRQKSGSQEDLGWCLSSSDDELQPEMPQKQAEKVVIKKEKDISAPNDGTAQRTENHGAPACHRLKEEEDEYETSGEGQDIWDMLDKGNPFQFYLTRVSGVKPKYNSGALHIKDILSPLFGTLVSSAQFNYCFDVDWLVKQYPPEFRKKPILLVHGDKREAKAHLHAQAKPYENISLCQAKLDIAFGTHHTKMMLLLYEEGLRVVIHTSNLIHADWHQKTQGIWLSPLYPRIADGTHKSGESPTHFKADLISYLMAYNAPSLKEWIDVIHKHDLSETNVYLIGSTPGRFQGSQKDNWGHFRLKKLLKDHASSMPNAESWPVVGQFSSVGSLGADESKWLCSEFKESMLTLGKESKTPGKSSVPLYLIYPSVENVRTSLEGYPAGGSLPYSIQTAEKQNWLHSYFHKWSAETSGRSNAMPHIKTYMRPSPDFSKIAWFLVTSANLSKAAWGALEKNGTQLMIRSYELGVLFLPSAFAPAKRIKDEVEASFSGSRQFQSETEVLRWQPGANGHLSCAI

SEQ ID NO: 94323 - protein, 608 aa, Homo sapiens; identical to SEQ ID NO: 94321
  Payload ID: 18808
  Gene Name: tyrosyl-DNA phosphodiesterase 1
  Uniprot ID: Q9NUW8
  ENSP ID: ENSP00000377099

SEQ ID NO: 94324 - protein, 298 aa, Homo sapiens
  Payload ID: 18808
  Gene Name: tyrosyl-DNA phosphodiesterase 1
  ENSP ID: ENSP00000444587
MSQEGDYGRWTISSSDESEEEKPKPDKPSTSSLLCARQGAANEPRYTCSEAQKAAHKRKISPVKFSNTDSVLPPKRQKSGSQEDLGWCLSSSDDELQPEMPQKQAEKVVIKKEKDISAPNDGTAQRTENHGAPACHRLKEEEDEYETSGEGQDIWDMLDKGNPFQFYLTRVSGVKPKYNSGALHIKDILSPLFGTLVSSAQFNYCFDVDWLVKQYPPEFRKKPILLVHGDKREAKAHLHAQAKPYENISLCQAKLDIAFGTHHTKMMLLLYEEGLRVVIHTSNLIHADWHQKTQGTHL

SEQ ID NO: 94325 - protein, 578 aa, Homo sapiens
  Payload ID: 18808
  Gene Name: tyrosyl-DNA phosphodiesterase 1
  ENSP ID: ENSP00000450628
MSQEGDYGRWTISSSDESEEEKPKPDKPSTSSLLCARQGAANEPRYTCSEAQKAAHKRKISPVKFSNTDSVLPPKRQKSGSQEDLGWCLSSSDDELQPEMPQKQAEKVVIKKEKDISAPNDGTAQRTENHGAPACHRLKEEEDEYETSGEGQDIWDMLDKGNPFQFYLTRVSGVKPKYNSGALHIKDILSPLFGTLVSSAQFNYCFDVDWLVKQYPPEFRKKPILLVHGDKREAKAHLHAQAKPYENISLCQAKLDIAFGTHHTKMMLLLYEEGLRVVIHTSNLIHADWHQKTQGIWLSPLYPRIADGTHKSGESPTHFKADLISYLMAYNAPSLKEWIDVIHKHDLSETNVYLIGSTPGRFQGSQKDNWGHFRLKKLLKDHASSMPNAESWPVVGQFSSVGSLGADESKWLCSEFKESMLTLGKESKTPGKSSVPLYLIYPSVENVRTSLEGYPAGGSLPYSIQTAEKQNWLHSYFHKWSAETSGRSNAMPHIKTYMRPSPDFSKIAWFLVTSANLSKAAWGALEKNGTQLMIRSYELGVLFLPSAFIGHGYGTFLMSKHRIRMGTCGCPPENLEAL

SEQ ID NO: 94326 - protein, 219 aa, Homo sapiens
  Payload ID: 18808
  Gene Name: tyrosyl-DNA phosphodiesterase 1
  ENSP ID: ENSP00000450708
MPQKQAEKVVIKKEKDISAPNDGTAQRTENHGAPACHRLKEEEDEYETSGEGQDIWDMLDKGNPFQFYLTRVSGVKPKYNSGALHIKDILSPLFGTLVSSAQFNYCFDVDWLVKQYPPEFRKKPILLVHGDKREAKAHLHAQAKPYENISLCQAKLDIAFGTHHTKMMLLLYEEGLRVVIHTSNLIHADWHQKTQGIWLSPLYPRIADGTHKSGESPTH

SEQ ID NO: 94327 - protein, 281 aa, Homo sapiens
  Payload ID: 18808
  Gene Name: tyrosyl-DNA phosphodiesterase 1
  ENSP ID: ENSP00000450795
  MOD_RES (1)..(1): Any amino acid
XRFQGSQKDNWGHFRLKKLLKDHASSMPNAESWPVVGQFSSVGSLGADESKWLCSEFKESMLTLGKESKTPGKSSVPLYLIYPSVENVRTSLEGYPAGGSLPYSIQTAEKQNWLHSYFHKWSAETSGRSNAMPHIKTYMRPSPDFSKIAWFLVTSANLSKAAWGALEKNGTQLMIRSYELGVLFLPSAFGLDSFKVKQKFFAGSQEPMATFPVPYDLPPELYGSKGETQIKENHGWICIRKTNRAQEKPLVSVGSWLMEPSGSSSLQRALCQPVWGLVATG

SEQ ID NO: 94328 - protein, 279 aa, Homo sapiens
  Payload ID: 18808
  Gene Name: tyrosyl-DNA phosphodiesterase 1
  ENSP ID: ENSP00000450872
MSQEGDYGRWTISSSDESEEEKPKPDKPSTSSLLCARQGAANEPRYTCSEAQKAAHKRKISPVKFSNTDSVLPPKRQKSGSQEDLGWCLSSSDDELQPEMPQKQAEKVVIKKEKDISAPNDGTAQRTENHGAPACHRLKEEEDEYETSGEGQDIWDMLDKGNPFQFYLTRVSGVKPKYNSGALHIKDILSPLFGTLVSSAQFNYCFDVDWLVKQYPPEFRKKPILLVHGDKREAKAHLHAQAKPYENISLCQAKLDIAFGTHHTKMMLLLYEEGLRVVI

SEQ ID NO: 94329 - protein, 146 aa, Homo sapiens
  Payload ID: 18808
  Gene Name: tyrosyl-DNA phosphodiesterase 1
  ENSP ID: ENSP00000451358
MSQEGDYGRWTISSSDESEEEKPKPDKPSTSSLLCARQGAANEPRYTCSEAQKAAHKRKISPVKFSNTDSVLPPKRQKSGSQEDLGWCLSSSDDELQPEMPQKQAEKVVIKKEKDISAPNDGTAQRTENHGAPACHRLKEEEDEYE

SEQ ID NO: 94330 - protein, 51 aa, Homo sapiens
  Payload ID: 18808
  Gene Name: tyrosyl-DNA phosphodiesterase 1
  ENSP ID: ENSP00000451767
AKLDIAFGTHHTKMMLLLYEEGLRVVIHTSNLIHADWHQKTQGHFVHLCLC

SEQ ID NO: 94331 - protein, 191 aa, Homo sapiens
  Payload ID: 18808
  Gene Name: tyrosyl-DNA phosphodiesterase 1
  ENSP ID: ENSP00000452042
MSQEGDYGRWTISSSDESEEEKPKPDKPSTSSLLCARQGAANEPRYTCSEAQKAAHKRKISPVKFSNTDSVLPPKRQKSGSQEDLGWCLSSSDDELQPEMPQKQAEKVVIKKEKDISAPNDGTAQRTENHGAPACHRLKEEEDEYETSGEGQDIWDMLDKGNPFQFYLTRVSGVKPKYNSGALHIKGQSYE

SEQ ID NO: 94332 - protein, 161 aa, Homo sapiens
  Payload ID: 18808
  Gene Name: tyrosyl-DNA phosphodiesterase 1
  ENSP ID: ENSP00000452183
MSQEGDYGRWTISSSDESEEEKPKPDKPSTSSLLCARQGAANEPRYTCSEAQKAAHKRKISPVKFSNTDSVLPPKRQKSGSQEDLGWCLSSSDDELQPEMPQKQAEKVVIKKEKDISAPNDGTAQRTENHGAPACHRLKEEEDEYETSGEGQDIWDMLDKG

SEQ ID NO: 94333 - protein, 151 aa, Homo sapiens
  Payload ID: 18808
  Gene Name: tyrosyl-DNA phosphodiesterase 1
  ENSP ID: ENSP00000452279
MSQEGDYGRWTISSSDESEEEKPKPDKPSTSSLLCARQGAANEPRYTCSEAQKAAHKRKISPVKFSNTDSVLPPKRQKSGSQEDLGWCLSSSDDELQPEMPQKQAEKVVIKKEKDISAPNDGTAQRTENHGAPACHRLKEEEDEYETSGEG

SEQ ID NO: 94334 - protein, 147 aa, Homo sapiens
  Payload ID: 18808
  Gene Name: tyrosyl-DNA phosphodiesterase 1
  ENSP ID: ENSP00000452333
MSQEGDYGRWTISSSDESEEEKPKPDKPSTSSLLCARQGAANEPRYTCSEAQKAAHKRKISPVKFSNTDSVLPPKRQKSGSQEDLGWCLSSSDDELQPEMPQKQAEKVVIKKEKDISAPNDGTAQRTENHGAPACHRLKEEEDEYET

SEQ ID NO: 94335 - protein, 259 aa, Homo sapiens
  Payload ID: 18808
  Gene Name: tyrosyl-DNA phosphodiesterase 1
  ENSP ID: ENSP00000452363
MSQEGDYGRWTISSSDESEEEKPKPDKPSTSSLLCARQGAANEPRYTCSEAQKAAHKRKISPVKFSNTDSVLPPKRQKSGSQEDLGWCLSSSDDELQPEMPQKQAEKVVIKKEKDISAPNDGTAQRTENHGAPACHRLKEEEDEYETSGEGQDIWDMLDKGNPFQFYLTRVSGVKPKYNSGALHIKDILSPLFGTLVSSAQFNYCFDVDWLVKQYPPEFRKKPILLVHGDKREAKAHLHAQAKPYENISLCQENDAAAL

SEQ ID NO: 94336 - protein, 304 aa, Homo sapiens
  Payload ID: 18809
  Gene Name: tyrosyl-DNA phosphodiesterase 2
  ENSP ID: ENSP00000345345
MATWKSPCFLYCLFILGPRLTGQNNSVDLTNEETTDSTTSKISPSEDTQQENGSMFSLITWNIDGLDLNNLSERARGVCSYLALYSPDVIFLQEVIPPYYSYLKKRSSNYEIITGHEEGYFTAIMLKKSRVKLKSQEIIPFPSTKMMRNLLCVHVNVSGNELCLMTSHLESTRGHAAERMNQLKMVLKKMQEAPESATVIFAGDTNLRDREVTRCGGLPNNIVDVWEFLGKPKHCQYTWDTQMNSNLGITAACKLRFDRIFFRAAAEEGHIIPRSLDLLGLEKLDCGRFPSDHWGLLCNLDIIL

SEQ ID NO: 94337 - protein, 362 aa, Homo sapiens
  Payload ID: 18809
  Gene Name: tyrosyl-DNA phosphodiesterase 2
  Uniprot ID: O95551
  ENSP ID: ENSP00000367440
MELGSCLEGGREAAEEEGEPEVKKRRLLCVEFASVASCDAAVAQCFLAENDWEMERALNSYFEPPVEESALERRPETISEPKTYVDLTNEETTDSTTSKISPSEDTQQENGSMFSLITWNIDGLDLNNLSERARGVCSYLALYSPDVIFLQEVIPPYYSYLKKRSSNYEIITGHEEGYFTAIMLKKSRVKLKSQEIIPFPSTKMMRNLLCVHVNVSGNELCLMTSHLESTRGHAAERMNQLKMVLKKMQEAPESATVIFAGDTNLRDREVTRCGGLPNNIVDVWEFLGKPKHCQYTWDTQMNSNLGITAACKLRFDRIFFRAAAEEGHIIPRSLDLLGLEKLDCGRFPSDHWGLLCNLDIIL

SEQ ID NO: 94338 - protein, 370 aa, Homo sapiens
  Payload ID: 18810
  Gene Name: tyrosylprotein sulfotransferase 1
  Uniprot ID: O60507
  ENSP ID: ENSP00000302413
MVGKLKQNLLLACLVISSVTVFYLGQHAMECHHRIEERSQPVKLESTRTTVRTGLDLKANKTFAYHKDMPLIFIGGVPRSGTTLMRAMLDAHPDIRCGEETRVIPRILALKQMWSRSSKEKIRLDEAGVTDEVLDSAMQAFLLEIIVKHGEPAPYLCNKDPFALKSLTYLSRLFPNAKFLLMVRDGRASVHSMISRKVTIAGFDLNSYRDCLTKWNRAIETMYNQCMEVGYKKCMLVHYEQLVLHPERWMRTLLKFLQIPWNHSVLHHEEMIGKAGGVSLSKVERSTDQVIKPVNVGALSKWVGKIPPDVLQDMAVIAPMLAKLGYDPYANPPNYGKPDPKIIENTRRVYKGEFQLPDFLKEKPQTEQVE

SEQ ID NO: 94339 - protein, 140 aa, Homo sapiens
  Payload ID: 18810
  Gene Name: tyrosylprotein sulfotransferase 1
  ENSP ID: ENSP00000391338
MVGKLKQNLLLACLVISSVTVFYLGQHAMECHHRIEERSQPVKLESTRTTVRTGLDLKANKTFAYHKDMPLIFIGGVPRSGTTLMRAMLDAHPDIRCGEETRVIPRILALKQMWSRSSKEKIRLDEAGVTDEVLDSAMQA

SEQ ID NO: 94340 - protein, 41 aa, Homo sapiens
  Payload ID: 18810
  Gene Name: tyrosylprotein sulfotransferase 1
  ENSP ID: ENSP00000399642
MVGKLKQNLLLACLVISSVTVFYLGQHAMECHHRIEERSQP

SEQ ID NO: 94341 - protein, 377 aa, Homo sapiens
  Payload ID: 18811
  Gene Name: tyrosylprotein sulfotransferase 2
  Uniprot ID: O60704
  ENSP ID: ENSP00000339813
MRLSVRRVLLAAGCALVLVLAVQLGQQVLECRAVLAGLRSPRGAMRPEQEELVMVGTNHVEYRYGKAMPLIFVGGVPRSGTTLMRAMLDAHPEVRCGEETRIIPRVLAMRQAWSKSGREKLRLDEAGVTDEVLDAAMQAFILEVIAKHGEPARVLCNKDPFTLKSSVYLSRLFPNSKFLLMVRDGRASVHSMITRKVTIAGFDLSSYRDCLTKWNKAIEVMYAQCMEVGKEKCLPVYYEQLVLHPRRSLKLILDFLGIAWSDAVLHHEDLIGKPGGVSLSKIERSTDQVIKPVNLEALSKWTGHIPGDVVRDMAQIAPMLAQLGYDPYANPPNYGNPDPFVINNTQRVLKGDYKTPANLKGYFQVNQNSTSSHLGSS

SEQ ID NO: 94342 - protein, 377 aa, Homo sapiens; identical to SEQ ID NO: 94341
  Payload ID: 18811
  Gene Name: tyrosylprotein sulfotransferase 2
  Uniprot ID: O60704
  ENSP ID: ENSP00000381180

SEQ ID NO: 94343 - protein, 377 aa, Homo sapiens; identical to SEQ ID NO: 94341
  Payload ID: 18811
  Gene Name: tyrosylprotein sulfotransferase 2
  Uniprot ID: O60704
  ENSP ID: ENSP00000385192

SEQ ID NO: 94344 - protein, 120 aa, Homo sapiens
  Payload ID: 18811
  Gene Name: tyrosylprotein sulfotransferase 2
  ENSP ID: ENSP00000400357
MRLSVRRVLLAAGCALVLVLAVQLGQQVLECRAVLAGLRSPRGAMRPEQEELVMVGTNHVEYRYGKAMPLIFVGGVPRSGTTLMRAMLDAHPEVRCGEETRIIPRVLAMRQAWSKSGREK

SEQ ID NO: 94345 - protein, 48 aa, Homo sapiens
  Payload ID: 18811
  Gene Name: tyrosylprotein sulfotransferase 2
  ENSP ID: ENSP00000401134
MRLSVRRVLLAAGCALVLVLAVQLGQQVLECRAVLAGLRSPRGAMRPE

SEQ ID NO: 94346 - protein, 168 aa, Homo sapiens
  Payload ID: 18811
  Gene Name: tyrosylprotein sulfotransferase 2
  ENSP ID: ENSP00000403758
DFLGIAWSDAVLHHEDLIGKPGGVSLSKIERSTDQVIKPVNLEALSKWTGHIPGDVVRDMAQIAPMLAQLGYDPYANPPNYGNPDPFVINNTQRVSVHLYLWKCTLGDMGLLQMWKLQPPEEMFSLSIPGHLICSCLMDTVNYMIACISILLGLQGSSKPTGSLSLIL

SEQ ID NO: 94347 - protein, 141 aa, Homo sapiens
  Payload ID: 18811
  Gene Name: tyrosylprotein sulfotransferase 2
  ENSP ID: ENSP00000403875
MRLSVRRVLLAAGCALVLVLAVQLGQQVLECRAVLAGLRSPRGAMRPEQEELVMVGTNHVEYRYGKAMPLIFVGGVPRSGTTLMRAMLDAHPEVRCGEETRIIPRVLAMRQAWSKSGREKLRLDEAGVTDEVLDAAMQAFI

SEQ ID NO: 94348 - protein, 47 aa, Homo sapiens
  Payload ID: 18811
  Gene Name: tyrosylprotein sulfotransferase 2
  ENSP ID: ENSP00000414809
MRLSVRRVLLAAGCALVLVLAVQLGQQVLECRAVLAGLRSPRGAMRP

SEQ ID NO: 94349 - protein, 64 aa, Homo sapiens
  Payload ID: 18811
  Gene Name: tyrosylprotein sulfotransferase 2
  ENSP ID: ENSP00000416791
MRLSVRRVLLAAGCALVLVLAVQLGQQVLECRAVLAGLRSPRGAMRPEQEELVMVGTNHVEYRY

SEQ ID NO: 94350 - protein, 528 aa, Homo sapiens
  Payload ID: 18812
  Gene Name: tyrosyl-tRNA synthetase
  Uniprot ID: P54577
  ENSP ID: ENSP00000362576
MGDAPSPEEKLHLITRNLQEVLGEEKLKEILKERELKIYWGTATTGKPHVAYFVPMSKIADFLKAGCEVTILFADLHAYLDNMKAPWELLELRVSYYENVIKAMLESIGVPLEKLKFIKGTDYQLSKEYTLDVYRLSSVVTQHDSKKAGAEVVKQVEHPLLSGLLYPGLQALDEEYLKVDAQFGGIDQRKIFTFAEKYLPALGYSKRVHLMNPMVPGLTGSKMSSSEEESKIDLLDRKEDVKKKLKKAFCEPGNVENNGVLSFIKHVLFPLKSEFVILRDEKWGGNKTYTAYVDLEKDFAAEVVHPGDLKNSVEVALNKLLDPIREKFNTPALKKLASAAYPDPSKQKPMAKGPAKNSEPEEVIPSRLDIRVGKIITVEKHPDADSLYVEKIDVGEAEPRTVVSGLVQFVPKEELQDRLVVVLCNLKPQKMRGVESQGMLLCASIEGINRQVEPLDPPAGSAPGEHVFVKGYEKGQPDEELKPKKKVFEKLQADFKISEECIAQWKQTNFMTKLGSISCKSLKGGNIS

SEQ ID NO: 94351 - protein, 388 aa, Homo sapiens
  Payload ID: 18812
  Gene Name: tyrosyl-tRNA synthetase
  ENSP ID: ENSP00000484192
MGDAPSPEEKLHLITRNLQEVLGEEKLKEILKERELKIYWGTATTGKPHVAYFVPMSKIADFLKAGCEVTILFADLHAYLDNMKAPWELLELRVSYYENVIKAMLESIGVPLEKLKFIKGTDYQLSKEYTLDVYRLSSVVTQHDSKKAGAEVVKQVEHPLLSGLLYPGLQALDEEYLKVDAQFGGIDQRKIFTFAEKYLPALGYSKRVHLMNPMVPGLTGSKMSSSEEESKIDLLDRKEDVKKKLKKAFCEPGNVENNGVLSFIKHVLFPLKSEFVILRDEKWGGNKTYTAYVDLEKDFAAEVVHPGDLKNSVEVALNKLLDPIREKFNTPALKKLASAAYPDPSKQKPMAKGLPRIQNQRRSSHPGWISVWGKSSLWRSTQMQTACM

SEQ ID NO: 94352 - protein, 477 aa, Homo sapiens
  Payload ID: 18813
  Gene Name: tyrosyl-tRNA synthetase 2, mitochondrial
  Uniprot ID: Q9Y2Z4
  ENSP ID: ENSP00000320658
MAAPILRSFSWGRWSGTLNLSVLLPLGLRKAHSGAQGLLAAQKARGLFKDFFPETGTKIELPELFDRGTASFPQTIYCGFDPTADSLHVGHLLALLGLFHLQRAGHNVIALVGGATARLGDPSGRTKEREALETERVRANARALRLGLEALAANHQQLFTDGRSWGSFTVLDNSAWYQKQHLVDFLAAVGGHFRMGTLLSRQSVQLRLKSPEGMSLAEFFYQVLQAYDFYYLFQRYGCRVQLGGSDQLGNIMSGYEFINKLTGEDVFGITVPLITSTTGAKLGKSAGNAVWLNRDKTSPFELYQFFVRQPDDSVERYLKLFTFLPLPEIDHIMQLHVKEPERRGPQKRLAAEVTKLVHGREGLDSAKRCTQALYHSSIDALEVMSDQELKELFKEAPFSEFFLDPGTSVLDTCRKANAIPDGPRGYRMITEGGVSINHQQVTNPESVLIVGQHILKNGLSLLKIGKRNFYIIKWLQL

SEQ ID NO: 94353 - protein, 291 aa, Homo sapiens
  Payload ID: 18813
  Gene Name: tyrosyl-tRNA synthetase 2, mitochondrial
  ENSP ID: ENSP00000447710
GLRKAHSGAQGLLAAQKARGLFKDFFPETGTKIELPELFDRGTASFPQTIYCGFDPTADSLHVGHLLALLGLFHLQRAGHNVIALVGGATARLGDPSGRTKEREALETERVRANARALRLGLEALAANHQQLFTDGRSWGSFTVLDNSAWYQKQHLVDFLAAVGGHFRMGTLLSRQSVQLRLKSPEGMSLAEFFYQVLQAYDFYYLFQRYGCRVQLGGSDQLGNIMSGYEFINKLTGEDVFGITVPLITSTTGAKLGKSAGNAVWLNRDKTSPFELYQFFVRQPDDSVERD

SEQ ID NO: 94354 - protein, 240 aa, Homo sapiens
  Payload ID: 18814
  Gene Name: U2 small nuclear RNA auxiliary factor 1
  Uniprot ID: Q01081
  ENSP ID: ENSP00000291552
MAEYLASIFGTEKDKVNCSFYFKIGACRHGDRCSRLHNKPTFSQTIALLNIYRNPQNSSQSADGLRCAVSDVEMQEHYDEFFEEVFTEMEEKYGEVEEMNVCDNLGDHLVGNVYVKFRREEDAEKAVIDLNNRWFNGQPIHAELSPVTDFREACCRQYEMGECTRGGFCNFMHLKPISRELRRELYGRRRKKHRSRSRSRERRSRSRDRGRGGGGGGGGGGGGRERDRRRSRDRERSGRF

SEQ ID NO: 94355 - protein, 240 aa, Homo sapiens
  Payload ID: 18814
  Gene Name: U2 small nuclear RNA auxiliary factor 1
  Uniprot ID: Q01081
  ENSP ID: ENSP00000369629
MAEYLASIFGTEKDKVNCSFYFKIGACRHGDRCSRLHNKPTFSQTILIQNIYRNPQNSAQTADGSHCAVSDVEMQEHYDEFFEEVFTEMEEKYGEVEEMNVCDNLGDHLVGNVYVKFRREEDAEKAVIDLNNRWFNGQPIHAELSPVTDFREACCRQYEMGECTRGGFCNFMHLKPISRELRRELYGRRRKKHRSRSRSRERRSRSRDRGRGGGGGGGGGGGGRERDRRRSRDRERSGRF

SEQ ID NO: 94356 - protein, 167 aa, Homo sapiens
  Payload ID: 18814
  Gene Name: U2 small nuclear RNA auxiliary factor 1
  Uniprot ID: Q01081
  ENSP ID: ENSP00000381205
MQEHYDEFFEEVFTEMEEKYGEVEEMNVCDNLGDHLVGNVYVKFRREEDAEKAVIDLNNRWFNGQPIHAELSPVTDFREACCRQYEMGECTRGGFCNFMHLKPISRELRRELYGRRRKKHRSRSRSRERRSRSRDRGRGGGGGGGGGGGGRERDRRRSRDRERSGRF

SEQ ID NO: 94357 - protein, 167 aa, Homo sapiens; identical to SEQ ID NO: 94356
  Payload ID: 18814
  Gene Name: U2 small nuclear RNA auxiliary factor 1
  Uniprot ID: Q01081
  ENSP ID: ENSP00000418705

SEQ ID NO: 94358 - protein, 75 aa, Homo sapiens
  Payload ID: 18814
  Gene Name: U2 small nuclear RNA auxiliary factor 1
  Uniprot ID: Q01081
  ENSP ID: ENSP00000420672
MAEYLASIFGTEKDKVNCSFYFKIGACRHGDRCSRLHNKPTFSQTILIQNIYRNPQNSAQTADGSHYHCPLEHLP

SEQ ID NO: 94359 - protein, 202 aa, Homo sapiens
  Payload ID: 18815
  Gene Name: U2 small nuclear RNA auxiliary factor 1-like 4
  Uniprot ID: Q8WU68
  ENSP ID: ENSP00000292879
MAEYLASIFGTEKDKVNCSFYFKIGVCRHGDRCSRLHNKPTFSQEVFTELQEKYGEIEEMNVCDNLGDHLVGNVYVKFRREEDGERAVAELSNRWFNGQAVHGNVPEVASATSCICGPFPRTSRGSSMGGDPGAGHPRGSILATIPERGTIGVPLITGMAASEALAPLPFTPNRDRCSWQDLSSKPPSLSCPILPRLPGSIM

SEQ ID NO: 94360 - protein, 181 aa, Homo sapiens
  Payload ID: 18815
  Gene Name: U2 small nuclear RNA auxiliary factor 1-like 4
  Uniprot ID: Q8WU68
  ENSP ID: ENSP00000368258
MAEYLASIFGTEKDKVNCSFYFKIGVCRHGDRCSRLHNKPTFSQEVFTELQEKYGEIEEMNVCDNLGDHLVGNVYVKFRREEDGERAVAELSNRWFNGQAVHGELSPVTDFRESCCRQYEMGECTRGGFCNFMHLRPISQNLQRQLYGRGPRRRSPPRFHTGHHPRERNHRCSPDHWHGRF

SEQ ID NO: 94361 - protein, 220 aa, Homo sapiens
  Payload ID: 18815
  Gene Name: U2 small nuclear RNA auxiliary factor 1-like 4
  Uniprot ID: Q8WU68
  ENSP ID: ENSP00000397645
MAEYLASIFGTEKDKVNCSFYFKIGVCRHGDRCSRLHNKPTFSQTIVLLNLYRNPQNTAQTADGSHCHVSDVEVQEHYDSFFEEVFTELQEKYGEIEEMNVCDNLGDHLVGNVYVKFRREEDGERAVAELSNRWFNGQAVHGELSPVTDFRESCCRQYEMGECTRGGFCNFMHLRPISQNLQRQLYGRGPRRRSPPRFHTGHHPRERNHRCSPDHWHGRF

SEQ ID NO: 94362 - protein, 39 aa, Homo sapiens
  Payload ID: 18815
  Gene Name: U2 small nuclear RNA auxiliary factor 1-like 4
  ENSP ID: ENSP00000465170
MAEYLASIFGTEKDKSGSAGTGTGAPGFTTSRHSASPAL

SEQ ID NO: 94363 - protein, 51 aa, Homo sapiens
  Payload ID: 18815
  Gene Name: U2 small nuclear RNA auxiliary factor 1-like 4
  ENSP ID: ENSP00000465242
MAEYLASIFGTEKDKSGSAGTGTGAPGFTTSRHSARRCSQNCRRSMGRLKR

SEQ ID NO: 94364 - protein, 10 aa, Homo sapiens
  Payload ID: 18815
  Gene Name: U2 small nuclear RNA auxiliary factor 1-like 4
  ENSP ID: ENSP00000467441
MNVCDNLGDH

SEQ ID NO: 94365 - protein, 66 aa, Homo sapiens
  Payload ID: 18815
  Gene Name: U2 small nuclear RNA auxiliary factor 1-like 4
  ENSP ID: ENSP00000469891
MAEYLASIFGTEKDKVNCSFYFKIGVCRHGDRCSRLHNKPTFSQTIVLLNLYRNPQNTAQTADGSH

SEQ ID NO: 94366 - protein, 33 aa, Homo sapiens
  Payload ID: 18815
  Gene Name: U2 small nuclear RNA auxiliary factor 1-like 4
  ENSP ID: ENSP00000471804
SRLHNKPTFSQTIVLLNLYRNPQNTAQTADGSH

SEQ ID NO: 94367 - protein, 36 aa, Homo sapiens
  Payload ID: 18815
  Gene Name: U2 small nuclear RNA auxiliary factor 1-like 4
  ENSP ID: ENSP00000473940
SAAQPVPESTEHSPNCRRITLRCSQNCRRSMGRLKR

SEQ ID NO: 94368 - protein, 71 aa, Homo sapiens
  Payload ID: 18815
  Gene Name: U2 small nuclear RNA auxiliary factor 1-like 4
  ENSP ID: ENSP00000474493
  MOD_RES (1)..(1): Any amino acid
XRHGDRCSRLHNKPTFSQPCPLSSGPAPFKFCADHSAAQPVPESTEHSPNCRRITLRCSQNCRRSMGRLKR

SEQ ID NO: 94369 - protein, 40 aa, Homo sapiens
  Payload ID: 18815
  Gene Name: U2 small nuclear RNA auxiliary factor 1-like 4
  ENSP ID: ENSP00000475046
CADHSAAQPVPESTEHSPNCRRITLRCSQNCRRSMGRLKR

SEQ ID NO: 94370 - protein, 75 aa, Homo sapiens; identical to SEQ ID NO: 94358
  Payload ID: 18816
  Gene Name: U2 small nuclear RNA auxiliary factor 1-like 5
  ENSP ID: ENSP00000480611

SEQ ID NO: 94371 - protein, 240 aa, Homo sapiens; identical to SEQ ID NO: 94355
  Payload ID: 18816
  Gene Name: U2 small nuclear RNA auxiliary factor 1-like 5
  ENSP ID: ENSP00000482964

SEQ ID NO: 94372 - protein, 240 aa, Homo sapiens; identical to SEQ ID NO: 94354
  Payload ID: 18816
  Gene Name: U2 small nuclear RNA auxiliary factor 1-like 5
  ENSP ID: ENSP00000485022

SEQ ID NO: 94373 - protein, 167 aa, Homo sapiens; identical to SEQ ID NO: 94356
  Payload ID: 18816
  Gene Name: U2 small nuclear RNA auxiliary factor 1-like 5
  ENSP ID: ENSP00000485382

SEQ ID NO: 94374 - protein, 475 aa, Homo sapiens
  Payload ID: 18817
  Gene Name: U2 small nuclear RNA auxiliary factor 2
  Uniprot ID: P26368
  ENSP ID: ENSP00000307863
MSDFDEFERQLNENKQERDKENRHRKRSHSRSRSRDRKRRSRSRDRRNRDQRSASRDRRRRSKPLTRGAKEEHGGLIRSPRHEKKKKVRKYWDVPPPGFEHITPMQYKAMQAAGQIPATALLPTMTPDGLAVTPTPVPVVGSQMTRQARRLYVGNIPFGITEEAMMDFFNAQMRLGGLTQAPGNPVLAVQINQDKNFAFLEFRSVDETTQAMAFDGIIFQGQSLKIRRPHDYQPLPGMSENPSVYVPGVVSTVVPDSAHKLFIGGLPNYLNDDQVKELLTSFGPLKAFNLVKDSATGLSKGYAFCEYVDINVTDQAIAGLNGMQLGDKKLLVQRASVGAKNATLVSPPSTINQTPVTLQVPGLMSSQVQMGGHPTEVLCLMNMVLPEELLDDEEYEEIVEDVRDECSKYGLVKSIEIPRPVDGVEVPGCGKIFVEFTSVFDCQKAMQGLTGRKFANRVVVTKYCDPDSYHRRDFW

SEQ ID NO: 94375 - protein, 471 aa, Homo sapiens
  Payload ID: 18817
  Gene Name: U2 small nuclear RNA auxiliary factor 2
  Uniprot ID: P26368
  ENSP ID: ENSP00000388475
MSDFDEFERQLNENKQERDKENRHRKRSHSRSRSRDRKRRSRSRDRRNRDQRSASRDRRRRSKPLTRGAKEEHGGLIRSPRHEKKKKVRKYWDVPPPGFEHITPMQYKAMQAAGQIPATALLPTMTPDGLAVTPTPVPVVGSQMTRQARRLYVGNIPFGITEEAMMDFFNAQMRLGGLTQAPGNPVLAVQINQDKNFAFLEFRSVDETTQAMAFDGIIFQGQSLKIRRPHDYQPLPGMSENPSVYVPGVVSTVVPDSAHKLFIGGLPNYLNDDQVKELLTSFGPLKAFNLVKDSATGLSKGYAFCEYVDINVTDQAIAGLNGMQLGDKKLLVQRASVGAKNATLSTINQTPVTLQVPGLMSSQVQMGGHPTEVLCLMNMVLPEELLDDEEYEEIVEDVRDECSKYGLVKSIEIPRPVDGVEVPGCGKIFVEFTSVFDCQKAMQGLTGRKFANRVVVTKYCDPDSYHRRDFW

SEQ ID NO: 94376 - protein, 86 aa, Homo sapiens
  Payload ID: 18817
  Gene Name: U2 small nuclear RNA auxiliary factor 2
  ENSP ID: ENSP00000466167
  MOD_RES (1)..(1): Any amino acid
XRSPRHEKKKKVRKYWDVPPPGFEHITPMQYKAMQAAGQIPATALLPTMTPDGLAVTPTPVPVVGSQMTRQARRLYVGNIPFGITE

SEQ ID NO: 94377 - protein, 307 aa, Homo sapiens
  Payload ID: 18817
  Gene Name: U2 small nuclear RNA auxiliary factor 2
  ENSP ID: ENSP00000466935
MMDFFNAQMRLGGLTQAPGNPVLAVQINQDKNFAFLEFRSVDETTQAMAFDGIIFQGQSLKIRRPHDYQPLPGMSENPSVYVPGVVSTVVPDSAHKLFIGGLPNYLNDDQVKELLTSFGPLKAFNLVKDSATGLSKGYAFCEYVDINVTDQAIAGLNGMQLGDKKLLVQRASVGAKNATLSTINQTPVTLQVPGLMSSQVQMGGHPTEVLCLMNMVLPEELLDDEEYEEIVEDVRDECSKYGLVKSIEIPRPVDGVEVPGCGKIFVEFTSVFDCQKAMQGLTGRKFANRVVVTKYCDPDSYHRRDFW

SEQ ID NO: 94378 - protein, 51 aa, Homo sapiens
  Payload ID: 18817
  Gene Name: U2 small nuclear RNA auxiliary factor 2
  ENSP ID: ENSP00000470020
  MOD_RES (1)..(1): Any amino acid
XDFDEFERQLNENKQASSPAPLRDDPGVRPLSPRGGPGASLLCLLWLPSSS

SEQ ID NO: 94379 - protein, 290 aa, Homo sapiens
  Payload ID: 18818
  Gene Name: U2 snRNP-associated SURP domain containing
  ENSP ID: ENSP00000418220
  MOD_RES (1)..(1): Any amino acid
XIEEKETEDVPDDLDGAPIEEELDGAPLEDVDGIPIDATPIDDLDGVPIKSLDDDLDGVPLDATEDSKKNEPIFKVAPSKWEAVDESELEAQAVTTSKWELFDQHEESEEEENQNQEEESEDEEDTQSSKSEEHHLYSNPIKEEMTESKFSKYSEMSEEKRAKLREIELKVMKFQDELESGKRPKKPGQSFQEQVEHYRDKLLQREKEKELERERERDKKDKEKLESRSKDKKEKDECTPTRKERSPSGSRTPKRSRRSRSRSPKKSGKKSRSQSRSPHRSHKKSKKNKH

SEQ ID NO: 94380 - protein, 161 aa, Homo sapiens
  Payload ID: 18818
  Gene Name: U2 snRNP-associated SURP domain containing
  ENSP ID: ENSP00000418465
MADKTPGGSQKASSKTRSSDVHSSGSSDAHMDASGPSDSDMPSRTRPKSPRKHNYRNESARESLCDSPHQNLSRPLLENKLKAFSIGKMSTAKRTLSKKEQEELKKKEDEKAAAEIYEEFLAAFEGSDGNKVKTFVRGGVVNAAKEEHETDEKRGKIYKPS

SEQ ID NO: 94381 - protein, 1029 aa, Homo sapiens
  Payload ID: 18818
  Gene Name: U2 snRNP-associated SURP domain containing
  Uniprot ID: O15042
  ENSP ID: ENSP00000418563
MADKTPGGSQKASSKTRSSDVHSSGSSDAHMDASGPSDSDMPSRTRPKSPRKHNYRNESARESLCDSPHQNLSRPLLENKLKAFSIGKMSTAKRTLSKKEQEELKKKEDEKAAAEIYEEFLAAFEGSDGNKVKTFVRGGVVNAAKEEHETDEKRGKIYKPSSRFADQKNPPNQSSNERPPSLLVIETKKPPLKKGEKEKKKSNLELFKEELKQIQEERDERHKTKGRLSRFEPPQSDSDGQRRSMDAPSRRNRSSGVLDDYAPGSHDVGDPSTTNLYLGNINPQMNEEMLCQEFGRFGPLASVKIMWPRTDEERARERNCGFVAFMNRRDAERALKNLNGKMIMSFEMKLGWGKAVPIPPHPIYIPPSMMEHTLPPPPSGLPFNAQPRERLKNPNAPMLPPPKNKEDFEKTLSQAIVKVVIPTERNLLALIHRMIEFVVREGPMFEAMIMNREINNPMFRFLFENQTPAHVYYRWKLYSILQGDSPTKWRTEDFRMFKNGSFWRPPPLNPYLHGMSEEQETEAFVEEPSKKGALKEEQRDKLEEILRGLTPRKNDIGDAMVFCLNNAEAAEEIVDCITESLSILKTPLPKKIARLYLVSDVLYNSSAKVANASYYRKFFETKLCQIFSDLNATYRTIQGHLQSENFKQRVMTCFRAWEDWAIYPEPFLIKLQNIFLGLVNIIEEKETEDVPDDLDGAPIEEELDGAPLEDVDGIPIDATPIDDLDGVPIKSLDDDLDGVPLDATEDSKKNEPIFKVAPSKWEAVDESELEAQAVTTSKWELFDQHEESEEEENQNQEEESEDEEDTQSSKSEEHHLYSNPIKEEMTESKFSKYSEMSEEKRAKLREIELKVMKFQDELESGKRPKKPGQSFQEQVEHYRDKLLQREKEKELERERERDKKDKEKLESRSKDKKEKDECTPTRKERKRRHSTSPSPSRSSSGRRVKSPSPKSERSERSERSHKESSRSRSSHKDSPRDVSKKAKRSPSGSRTPKRSRRSRSRSPKKSGKKSRSQSRSPHRSHKKSKKNKH

SEQ ID NO: 94382 - protein, 439 aa, Homo sapiens
  Payload ID: 18818
  Gene Name: U2 snRNP-associated SURP domain containing
  ENSP ID: ENSP00000420210
LKMADKTPGGSQKASSKTRSSDVHSSGSSDAHMDASGPSDSDMPSRTRPKSPRKHNYRNESARESLCDSPHQNLSRPLLENKLKAFSIGKMSTAKRTLSKKEQEELKKKEDEKAAAEIYEEFLAAFEGSDGNKVKTFVRGGVVNAAKEEHETDEKRGKIYKPSSRFADQKNPPNQSSNERPPSLLVIETKKPPLKKGEKEKKKSNLELFKEELKQIQEERDERHKTKGRLSRFEPPQSDSDGQRRSMDAPSRRNRSSGVLDDYAPGSHDVGDPSTTNLYLGNINPQMNEEMLCQEFGRFGPLASVKIMWPRTDEERARERNCGFVAFMNRRDAERALKNLNGKMIMSFEMKLGWGKAVPIPPHPIYIPPSMMEHTLPPPPSGLPFNAQPRERLKNPNAPMLPPPKNKEDFEKTLSQAIVKVVIPTERRNSYYCHEHWTY

SEQ ID NO: 94383 - protein, 130 aa, Homo sapiens
  Payload ID: 18818
  Gene Name: U2 snRNP-associated SURP domain containing
  ENSP ID: ENSP00000420575
MDASGPSDSDMPSRTRPKSPRKHNYRNESARESLCDSPHQNLSRPLLENKLKAFSIGKMSTAKRTLSKKEQEELKKKEDEKAAAEIYEEFLAAFEGSDGNKVKTFVRGGVVNAAKEEHETDEKRGKIYKP

SEQ ID NO: 94384 - protein, 1028 aa, Homo sapiens
  Payload ID: 18818
  Gene Name: U2 snRNP-associated SURP domain containing
  ENSP ID: ENSP00000422011
MADKTPGGSQKASSKTRSSDVHSSGSSDAHMDASGPSDSDMPSRTRPKSPRKHNYRNESARESLCDSPHQNLSRPLLENKLKAFSIGKMSTAKRTLSKKEQEELKKKEDEKAAAEIYEEFLAAFEGSDGNKVKTFVRGGVVNAAKEEHETDEKRGKIYKPSSRFADQKNPPNQSSNERPPSLLVIETKKPPLKKGEKEKKKSNLELFKEELKQIQEERDERHKTKGRLSRFEPPQSDSDGQRRSMDAPSRRNRSSVLDDYAPGSHDVGDPSTTNLYLGNINPQMNEEMLCQEFGRFGPLASVKIMWPRTDEERARERNCGFVAFMNRRDAERALKNLNGKMIMSFEMKLGWGKAVPIPPHPIYIPPSMMEHTLPPPPSGLPFNAQPRERLKNPNAPMLPPPKNKEDFEKTLSQAIVKVVIPTERNLLALIHRMIEFVVREGPMFEAMIMNREINNPMFRFLFENQTPAHVYYRWKLYSILQANSPTKWRTEDFRMFKNGSFWRPPPLNPYLHGMSEEQETEAFVEEPSKKGALKEEQRDKLEEILRGLTPRKNDIGDAMVFCLNNAEAAEEIVDCITESLSILKTPLPKKIARLYLVSDVLYNSSAKVANASYYRKFFETKLCQIFSDLNATYRTIQGHLQSENFKQRVMTCFRAWEDWAIYPEPFLIKLQNIFLGLVNIIEEKETEDVPDDLDGAPIEEELDGAPLEDVDGIPIDATPIDDLDGVPIKSLDDDLDGVPLDATEDSKKNEPIFKVAPSKWEAVDESELEAQAVTTSKWELFDQHEESEEEENQNQEEESEDEEDTQSSKSEEHHLYSNPIKEEMTESKFSKYSEMSEEKRAKLREIELKVMKFQDELESGKRPKKPGQSFQEQVEHYRDKLLQREKEKELERERERDKKDKEKLESRSKDKKEKDECTPTRKERKRRHSTSPSPSRSSSGRRVKSPSPKSERSERSERSHKESSRSRSSHKDSPRDVSKKAKRSPSGSRTPKRSRRSRSRSPKKSGKKSRSQSRSPHRSHKKSKKNKH

SEQ ID NO: 94385 - protein, 425 aa, Homo sapiens
  Payload ID: 18818
  Gene Name: U2 snRNP-associated SURP domain containing
  ENSP ID: ENSP00000430816
MADKTPGGSQKASSKTRSSDVHSSGSSDAHMDASGPSDSDMPSRTRPKSPRKHNYRNESARESLCDSPHQNLSRPLLENKLKAFSIGKMSTAKRTLSKKEQEELKKKEDEKAAAEIYEEFLAAFEGSDGNKVKTFVRGGVVNAAKEEHETDEKRGKIYKPSSRFADQKNPPNQSSNERPPSLLVIETKKPPLKKGEKEKKKSNLELFKEELKQIQEERDERHKTKGRLSRFEPPQSDSDGQRRSMDAPSRRNRSSGVLDDYAPGSHDVGDPSTTNLYLGNINPQMNEEMLCQEFGRFGPLASVKIMWPRTDEERARERNCGFVAFMNRRDAERALKNLNGKMIMSFEMKLGWGKAVPIPPHPIYIPPSMMEHTLPPPPSGLPFNAQPRERLKNPNAPMLPPPKNKEDFEKEFARPDTSNDRVCCT

SEQ ID NO: 94386 - protein, 125 aa, Homo sapiens
  Payload ID: 18818
  Gene Name: U2 snRNP-associated SURP domain containing
  ENSP ID: ENSP00000475195
MAWFYCNCKKMDASGPSDSDMPSRTRPKSPRKHNYRNESARESLCDSPHQNLSRPLLENKLKAFSIGKMSTAKRTLSKKEQEELKKKEDEKAAAEIYEEFLAAFEGSDGNKVKTFVRGGVVNAAK

SEQ ID NO: 94387 - protein, 419 aa, Homo sapiens
  Payload ID: 18819
  Gene Name: U2AF homology motif (UHM) kinase 1
  Uniprot ID: Q8TAS1
  ENSP ID: ENSP00000420270
MAGSGCAWGAEPPRFLEAFGRLWQVQSRLGSGSSASVYRVRCCGNPGSPPGALKQFLPPGTTGAAASAAEYGFRKERAALEQLQGHRNIVTLYGVFTIHFSPNVPSRCLLLELLDVSVSELLLYSSHQGCSMWMIQHCARDVLEALAFLHHEGYVHADLKPRNILWSAENECFKLIDFGLSFKEGNQDVKYIQTDGYRAPEAELQNCLAQAGLQSDTECTSAVDLWSLGIILLEMFSGMKLKHTVRSQEWKANSSAIIDHIFASKAVVNAAIPAYHLRDLIKSMLHDDPSRRIPAEMALCSPFFSIPFAPHIEDLVMLPTPVLRLLNVLDDDYLENEEEYEDVVEDVKEECQKYGPVVSLLVPKENPGRGQVFVEYANAGDSKAAQKLLTGRMFDGKFVVATFYPLSAYKRGYLYQTLL

SEQ ID NO: 94388 - protein, 345 aa, Homo sapiens
  Payload ID: 18819
  Gene Name: U2AF homology motif (UHM) kinase 1
  Uniprot ID: Q8TAS1
  ENSP ID: ENSP00000441226
MFLTRPKVCVDLNRRVTLYGVFTIHFSPNVPSRCLLLELLDVSVSELLLYSSHQGCSMWMIQHCARDVLEALAFLHHEGYVHADLKPRNILWSAENECFKLIDFGLSFKEGNQDVKYIQTDGYRAPEAELQNCLAQAGLQSDTECTSAVDLWSLGIILLEMFSGMKLKHTVRSQEWKANSSAIIDHIFASKAVVNAAIPAYHLRDLIKSMLHDDPSRRIPAEMALCSPFFSIPFAPHIEDLVMLPTPVLRLLNVLDDDYLENEEEYEDVVEDVKEECQKYGPVVSLLVPKENPGRGQVFVEYANAGDSKAAQKLLTGRMFDGKFVVATFYPLSAYKRGYLYQTLL

SEQ ID NO: 94389 - protein, 344 aa, Homo sapiens
  Payload ID: 18819
  Gene Name: U2AF homology motif (UHM) kinase 1
  Uniprot ID: Q8TAS1
  ENSP ID: ENSP00000446416
MAGSGCAWGAEPPRFLEAFGRLWQVQSRLGSGSSASVYRVRCCGNPGSPPGALKQFLPPGTTGAAASAAEYGFRKERAALEQLQGHRNIVTLYGVFTIHFSPNVPSRCLLLELLDVSVSELLLYSSHQGCSMWMIQHCARDVLEALAFLHHEGYVHADLKPRNILWSAENECFKLIDFGLSFKEGNQDVKYIQTDGYRAPEAELQNCLAQAGLQSDTECTSAVDLWSLGIILLEMFSGMKLKHTVRSQEWKANSSAIIDHIFASKAVVNAAIPAYHLRDLIKSMLHDDPSRRIPAEMALCSPFFSIPFAPHIEDLVMLPTPVLRLLNVLDDDYLENEEEYEGLC

SEQ ID NO: 94390 - protein, 177 aa, Homo sapiens [sequence omitted]

SEQ ID NO: 94391 - protein, 265 aa, Homo sapiens
  Payload ID: 18821
  Gene Name: U6 snRNA biogenesis 1
  Uniprot ID: Q9BQ65
  ENSP ID: ENSP00000219281
MSAAPLVGYSSSGSEDESEDGMRTRPGDGSHRRGQSPLPRQRFPVPDSVLNMFPGTEEGPEDDSTKHGGRVRTFPHERGNWATHVYVPYEAKEEFLDLLDVLLPHAQTYVPRLVRMKVFHLSLSQSVVLRHHWILPFVQALKARMTSFHRFFFTANQVKIYTNQEKTRTFIGLEVTSGHAQFLDLVSEVDRVMEEFNLTTFYQDPSFHLSLAWCVGDARLQLEGQCLQELQAIVDGFEDAEVLLRVHTEQVRCKSGNKFFSMPLK

SEQ ID NO: 94392 - protein, 186 aa, Homo sapiens
  Payload ID: 18821
  Gene Name: U6 snRNA biogenesis 1
  Uniprot ID: Q9BQ65
  ENSP ID: ENSP00000409792
MSAAPLVGYSSSGSEDESEDGMRTRPGDGSHRRGQSPLPRQRFPVPDSVLNMFPGTEEGPEDDSTKHGGRVRTFPHERGNWATHVYVPYEAKEEFLDLLDVLLPHAQTYVPRLVRMKVFHLSLSQSVVLRHHWILPFVQALKARMTSFHSPHPGPHCLIGTKDAPVTQEIPKDLGALRQEPGSQTR

SEQ ID NO: 94393 - protein, 247 aa, Homo sapiens
  Payload ID: 18821
  Gene Name: U6 snRNA biogenesis 1
  Uniprot ID: Q9BQ65
  ENSP ID: ENSP00000446143
MSAAPLVGYSSSGSEDESEDGMRTRPGDGSHRRGQSPLPRQRFPVPDSVLNMFPGTEEGPEDDSTKHGGRVRTFPHERGNWATHVYVPYEAKEEFLDLLDVLLPHAQTYVPRLVRMKVFHLSLSQSVVLRHHWILPFVQALKARMTSFHRTFIGLEVTSGHAQFLDLVSEVDRVMEEFNLTTFYQDPSFHLSLAWCVGDARLQLEGQCLQELQAIVDGFEDAEVLLRVHTEQVRCKSGNKFFSMPLK

SEQ ID NO: 94394 - protein, 163 aa, Homo sapiens
  Payload ID: 18821
  Gene Name: U6 snRNA biogenesis 1
  ENSP ID: ENSP00000454692
MSAAPLVGYSSSGSEDESEDGMRTRPGDGSHRRGQSPLPRQRFPVPDSVLNMFPGTEEGPEDDSTKHGGRVRTFPHERGNWATHVYVPYEAKEEFLDLLDVLLPHAQTYVPRLVRMKVFHLSLSQSVVLRHHWILPFVQALKARMTSFHRCQKPMPEAQPKVA

SEQ ID NO: 94395 - protein, 214 aa, Homo sapiens
  Payload ID: 18821
  Gene Name: U6 snRNA biogenesis 1
  ENSP ID: ENSP00000454928
MFPGTEEGPEDDSTKHGGRVRTFPHERGNWATHVYVPYEAKEEFLDLLDVLLPHAQTYVPRLVRMKVFHLSLSQSVVLRHHWILPFVQALKARMTSFHRFFFTANQVKIYTNQEKTRTFIGLEVTSGHAQFLDLVSEVDRVMEEFNLTTFYQDPSFHLSLAWCVGDARLQLEGQCLQELQAIVDGFEDAEVLLRVHTEQVRCKSGNKFFSMPLK

SEQ ID NO: 94396 - protein, 95 aa, Homo sapiens
  Payload ID: 18821
  Gene Name: U6 snRNA biogenesis 1
  ENSP ID: ENSP00000457302
MSAAPLVGYSSSGSEDESEDGMRTRPGDGSHRRGQSPLPRQRFPVPDSVLNMFPGTEEGPEDDSTKHGGRMKPRRSSWICLMCCCPMPRHMSPGW

SEQ ID NO: 94397 - protein, 182 aa, Homo sapiens
  Payload ID: 18821
  Gene Name: U6 snRNA biogenesis 1
  ENSP ID: ENSP00000457322
MSPRTGCGPGRGMGATVGEDGQSPLPRQRFPVPDSVLNMFPGTEEGPEDDSTKHGGRVRTFPHERGNWATHVYVPYEAKEEFLDLLDVLLPHAQTYVPRLVRMKVFHLSLSQSVVLRHHWILPFVQALKARMTSFHRFFFTANQVKIYTNQEKTRTFIGLEVTSGHAQFLDLVSEVDRVMEE

SEQ ID NO: 94398 - protein, 369 aa, Homo sapiens
  Payload ID: 18822
  Gene Name: U82695.5
  ENSP ID: ENSP00000488404
MALAMLRDWCRWMGANAERSLLILGIPDDCKEHEFQEAVRAALSPLGRREQPGCEEESFESWVEHAKDMLQLWCHASEREKKRWLLESLGGPALEVVSGLLEEDTNLSALDCLAALGQVFRNQDTRMTSRLKFLTCTQGPQEGLFAFVVRLEGLLQRAVEKGAVCPALANYLRLQQVLSWARPSEALQDTLRGMQLEKRPPGFLGLLRLIREMEAWAAFPARSQQGVAWAAAPVESEDPAAAQASPAQGNASEAGPGAEDAAEAASATKEAARGAPAAGEGESAPAGPEGLGQARPIEVPWGSSPARMSSAVWVFPRGLSWGPEGLIQVRGQEARKPPLEGLQTILEEPENEDEDGAGDEGQPKSSQGK

SEQ ID NO: 94399 - protein, 647 aa, Homo sapiens
  Payload ID: 18822
  Gene Name: U82695.5
  ENSP ID: ENSP00000488500
MALAMLRDWCRWMGANAERSLLILGIPDDCKEHEFQEAVRAALSPLGRYRVLTKHFRKELGAKAALVEFAEYLNRSLIPHQIPGNGGPWKVIFLPQVPVIEFQDMPSFPAQPQGQAVAKAAGEGGGAGEAGGVGEVGAAGEAGGTGEAGATGEAGAAGEAGGAGEAGGVGEAGAAGEAGGAGEAGAAGEGGAAGEAGGAGEAGGVGEAGAAGEAGGAGEAGGVGEAGAAGEAGGAGEAGAAGEAGGAGEGRAAGEAGAAGEAGAVGEAGAAGEAGAVGEAGAAGEAGAVGEAGGTNVTKAWVQPWRCTLQPVLENRAYRELRPFSRREQPGCEEESFESWVEHAKDMLQLWCHASEREKKRWLLESLGGPALEVVSGLLEEDTNLSALDCLAALGQVFRNQDTRMTSRLKFLTCTQGPQEGLFAFVVRLEGLLQRAVEKGAVCPALANYLRLQQVLSWARPSEALQDTLRGMQLEKRPPGFLGLLRLIREMEAWAAFPARSQQGVAWAAAPVESEDPAAAQASPAQGNASEAGPGAEDAAEAASATKEAARGAPAAGEGESAPAGPEGLGQARPIEVPWGSSPARMSSAVWVFPRGLSWGPEGLIQVRGQEARKPPLEGLQTILEEPENEDEDGAGDEGQPKSSQGK

SEQ ID NO: 94400 - protein, 405 aa, Homo sapiens
  Payload ID: 18823
  Gene Name: UBA domain containing 1
  Uniprot ID: Q9BSL1
  ENSP ID: ENSP00000360821
MFVQEEKIFAGKVLRLHICASDGAEWLEEATEDTSVEKLKERCLKHCAHGSLEDPKSITHHKLIHAASERVLSDARTILEENIQDQDVLLLIKKRAPSPLPKMADVSAEEKKKQDQKAPDKEAILRATANLPSYNMDRAAVQTNMRDFQTELRKILVSLIEVAQKLLALNPDAVELFKKANAMLDEDEDERVDEAALRQLTEMGFPENRATKALQLNHMSVPQAMEWLIEHAEDPTIDTPLPGQAPPEAEGATAAASEAAAGASATDEEARDELTEIFKKIRRKREFRADARAVISLMEMGFDEKEVIDALRVNNNQQNAACEWLLGDRKPSPEELDKGIDPDSPLFQAILDNPVVQLGLTNPKTLLAFEDMLENPLNSTQWMNDPETGPVMLQISRIFQTLNRT

SEQ ID NO: 94401 - protein, 204 aa, Homo sapiens
  Payload ID: 18824
  Gene Name: UBA domain containing 2
  ENSP ID: ENSP00000347928
MFTSTGSSGLYKAPLSKSLLLVPSALSLLLALLLPHCQKLFVYDLHAVKNDFQMSGLCYDSKMFQVHQVLCIPSWMAKFFSWTLEPIFSSSEPTSEARIGMGATLDIQRQQRMELLDRQLMFSQFAQGRRQRQQQGGMINWNRLFPPLRQRQNVNYQGGRQSEPAAPPLEVSEEQVARLMEMGFSRGDALEALRASNNDLNVAT

SEQ ID NO: 94402 - protein, 309 aa, Homo sapiens
  Payload ID: 18824
  Gene Name: UBA domain containing 2
  Uniprot ID: Q8NBM4
  ENSP ID: ENSP00000365623
MCFFFSLQEEFLDKHTLMRVLSSGGKLGSRGEGAQLCCWMLLFSWRVSGGQQTRRLCRRAFCWSPVPSPSCSPSSCLTARSSLCMTFTQSRTTSSLAPVFALFVPFYCSIPRVQVAQILGPLSITNKTLIYILGLQLFTSGSYIWIVAISGLMSGLCYDSKMFQVHQVLCIPSWMAKFFSWTLEPIFSSSEPTSEARIGMGATLDIQRQQRMELLDRQLMFSQFAQGRRQRQQQGGMINWNRLFPPLRQRQNVNYQGGRQSEPAAPPLEVSEEQVARLMEMGFSRGDALEALRASNNDLNVATNFLLQH

SEQ ID NO: 94403 - protein, 344 aa, Homo sapiens
  Payload ID: 18824
  Gene Name: UBA domain containing 2
  Uniprot ID: Q8NBM4
  ENSP ID: ENSP00000383911
MFTSTGSSGLYKAPLSKSLLLVPSALSLLLALLLPHCQKLFVYDLHAVKNDFQIWRLICGRIICLDLKDTFCSSLLIYNFRIFERRYGSRKFASFLLGSWVLSALFDFLLIEAMQYFFGITAASNLPSGFLAPVFALFVPFYCSIPRVQVAQILGPLSITNKTLIYILGLQLFTSGSYIWIVAISGLMSGLCYDSKMFQVHQVLCIPSWMAKFFSWTLEPIFSSSEPTSEARIGMGATLDIQRQQRMELLDRQLMFSQFAQGRRQRQQQGGMINWNRLFPPLRQRQNVNYQGGRQSEPAAPPLEVSEEQVARLMEMGFSRGDALEALRASNNDLNVATNFLLQH

SEQ ID NO: 94404 - protein, 135 aa, Homo sapiens
  Payload ID: 18824
  Gene Name: UBA domain containing 2
  ENSP ID: ENSP00000402249
MGTKPRRPPRPHLVSPDKAPLSKSLLLVPSALSLLLALLLPHCQKLFVYDLHAVKNDFQIWRLICGRIICLDLKDTFCSSLLIYNFRIFERRYGSRKFASFLLGSWVLSALFDFLLIEAMQYFFGITAASNLPSG

SEQ ID NO: 94405 - protein, 43 aa, Homo sapiens
  Payload ID: 18824
  Gene Name: UBA domain containing 2
  ENSP ID: ENSP00000481260
GGMINWNRLFPPLRQRQNVNYQGGRQSEPAAPPLEVSEEQTNE

SEQ ID NO: 94406 - protein, 177 aa, Homo sapiens
  Payload ID: 18825
  Gene Name: UBA-like domain containing 1
  Uniprot ID: Q8TB05
  ENSP ID: ENSP00000283474
MSVNMDELKHQVMINQFVLTAGCAADQAKQLLQAAHWQFETALSAFFQETNIPYSHHHHQMMCTPANTPATPPNFPDALTMFSRLKASESFHSGGSGSPMAATATSPPPHFPHAATSSSAASSWPTAASPPGGPQHHQPQPPLWTPTPPSPASDWPPLAPQQATSEPRAHPAMEAER

SEQ ID NO: 94407 - protein, 117 aa, Homo sapiens
  Payload ID: 18825
  Gene Name: UBA-like domain containing 1
  ENSP ID: ENSP00000464725
MMCTPANTPATPPNFPDALTMFSRLKASESFHSGGSGSPMAATATSPPPHFPHAATSSSAASSWPTAASPPGGPQHHQPQPPLWTPTPPSPASDWPPLAPQQATSEPRAHPAMEAER

SEQ ID NO: 94408 - protein, 67 aa, Homo sapiens
  Payload ID: 18825
  Gene Name: UBA-like domain containing 1
  ENSP ID: ENSP00000465041
MSVNMDELKHQRCCSLQRKGLWETPGLFPPPPSACLLGLPACLPCTWGYPHPLPFPLLTKEKNEFQT

SEQ ID NO: 94409 - protein, 212 aa, Homo sapiens
  Payload ID: 18825
  Gene Name: UBA-like domain containing 1
  Uniprot ID: Q8TB05
  ENSP ID: ENSP00000465706
MKLLTLQPPGMLWLMERGGLGKPRGPRHRGLLRVRLGRFISRLLLWEPLGGGQAWGSGEGTQSLPRMGQPRISPWEAVGAPPGRGAHPISPLFPSQMCTPANTPATPPNFPDALTMFSRLKASESFHSGGSGSPMAATATSPPPHFPHAATSSSAASSWPTAASPPGGPQHHQPQPPLWTPTPPSPASDWPPLAPQQATSEPRAHPAMEAER

SEQ ID NO: 94410 - protein, 122 aa, Homo sapiens
  Payload ID: 18825
  Gene Name: UBA-like domain containing 1
  ENSP ID: ENSP00000465745
MSVNMDELKHQVMINQFVLTAGCAADQAKQLLQAAHWQFEVRGAGAGRGPGPRAECVPRGRRAGADGVDACRLCAPSGPQTRPAFPTAVPGVRIPRARGGRRQPSAPFSRRPTSPTATITTR

SEQ ID NO: 94411 - protein, 52 aa, Homo sapiens
  Payload ID: 18825
  Gene Name: UBA-like domain containing 1
  ENSP ID: ENSP00000465847
MMCTPANTPATPPNFPDALTMFSRLKASESFHSGGSGSPMAATATSPPPHFP

SEQ ID NO: 94412 - protein, 94 aa, Homo sapiens
  Payload ID: 18825
  Gene Name: UBA-like domain containing 1
  ENSP ID: ENSP00000466361
MSVNMDELKHQVMINQFVLTAGCAADQAKQLLQAAHWQFESSQGHPQPQRSLGTRAAAGPAGAWRVSRGLSSCRQPSAPFSRRPTSPTATITTR

SEQ ID NO: 94413 - protein, 152 aa, Homo sapiens
  Payload ID: 18825
  Gene Name: UBA-like domain containing 1
  ENSP ID: ENSP00000466404
MSVNMDELKHQVMINQFVLTAGCAADQAKQLLQAAHWQFETALSAFFQETNIPYSHHHHQMASESFHSGGSGSPMAATATSPPPHFPHAATSSSAASSWPTAASPPGGPQHHQPQPPLWTPTPPSPASDWPPLAPQQATSEPRAHPAMEAER

SEQ ID NO: 94414 - protein, 156 aa, Homo sapiens
  Payload ID: 18825
  Gene Name: UBA-like domain containing 1
  ENSP ID: ENSP00000467671
MSVNMDELKHQVMINQFVLTAGCAADQAKQLLQAAHWQFEMCTPANTPATPPNFPDALTMFSRLKASESFHSGGSGSPMAATATSPPPHFPHAATSSSAASSWPTAASPPGGPQHHQPQPPLWTPTPPSPASDWPPLAPQQATSEPRAHPAMEAER

SEQ ID NO: 94415 - protein, 164 aa, Homo sapiens
  Payload ID: 18826
  Gene Name: UBA-like domain containing 2
  Uniprot ID: Q8IYN6
  ENSP ID: ENSP00000331298
MSVNMDELRHQVMINQFVLAAGCAADQAKQLLQAAHWQFETALSTFFQETNIPNSHHHHQMMCTPSNTPATPPNFPDALAMFSKLRASEGLQSSNSPMTAAACSPPANFSPFWASSPPSHQAPWIPPSSPTTFHHLHRPQPTWPPGAQQGGAQQKAMAAMDGQR

SEQ ID NO: 94416 - protein, 104 aa, Homo sapiens
  Payload ID: 18826
  Gene Name: UBA-like domain containing 2
  ENSP ID: ENSP00000466518
MMCTPSNTPATPPNFPDALAMFSKLRASEGLQSSNSPMTAAACSPPANFSPFWASSPPSHQAPWIPPSSPTTFHHLHRPQPTWPPGAQQGGAQQKAMAAMDGQR

SEQ ID NO: 94417 - protein, 64 aa, Homo sapiens
  Payload ID: 18826
  Gene Name: UBA-like domain containing 2
  ENSP ID: ENSP00000468297
MMCTPSNTPATPPNFPDALAMFSKLRASEGLQSSNSPMTAAACSPPANFSPFWASSPPSHQAPW

SEQ ID NO: 94418 - protein, 131 aa, Homo sapiens
  Payload ID: 18827
  Gene Name: UBE2F-SCLY readthrough (NMD candidate)
  ENSP ID: ENSP00000456827
MLTLASKLKRDDGLKGSRTAATASDSTRRVSVRDKLLVKEVAELEANLPCTCKVHFPDPNKLHCFQLTVTPDEGYYQGGKFQFETEVPDAYNMVDLLNFDDPLNIEAAEHHLRDKEDFRNKVDDYIKRYAR

SEQ ID NO: 94419 - protein, 73 aa, Homo sapiens
  Payload ID: 18827
  Gene Name: UBE2F-SCLY readthrough (NMD candidate)
  ENSP ID: ENSP00000457658
MLTLASKLKRDDGLKGSRTAATASDSTRRVSVRDKLLVKEVAELEANLPCTCKVHFPDPNKLHCFQLTVTPVY

SEQ ID NO: 94420 - protein, 179 aa, Homo sapiens
  Payload ID: 18828
  Gene Name: UbiA prenyltransferase domain containing 1
  Uniprot ID: Q9Y5Z9
  ENSP ID: ENSP00000366000
MAASQVLGEKINILSGETVKAGDRDPLGNDCPEQDRLPQRSWRQKCASYVLALRPWSFSASLTPVALGSALAYRSHGVLDPRLLVGCAVAVLAVHGAGNLVNTYYDFSKGIDHKKSDDRTLVDRILEPQDVVRFGVFLYTLGCVCAACLYYLSPLKLEHLALIYFGGLSGSFLYTGVLI

SEQ ID NO: 94421 - protein, 338 aa, Homo sapiens
  Payload ID: 18828
  Gene Name: UbiA prenyltransferase domain containing 1
  Uniprot ID: Q9Y5Z9
  ENSP ID: ENSP00000366006
MAASQVLGEKINILSGETVKAGDRDPLGNDCPEQDRLPQRSWRQKCASYVLALRPWSFSASLTPVALGSALAYRSHGVLDPRLLVGCAVAVLAVHGAGNLVNTYYDFSKGIDHKKSDDRTLVDRILEPQDVVRFGVFLYTLGCVCAACLYYLSPLKLEHLALIYFGGLSGSFLYTGGIGFKYVALGDLIILITFGPLAVMFAYAIQVGSLAIFPLVYAIPLALSTEAILHSNNTRDMESDREAGIVTLAILIGPTFSYILYNTLLFLPYLVFSILATHCTISLALPLLTIPMAFSLERQFRSQAFNKLPQRTAKLNLLLGLFYVFGIILAPAGSLPKI

SEQ ID NO: 94422 - protein, 77 aa, Homo sapiens
  Payload ID: 18828
  Gene Name: UbiA prenyltransferase domain containing 1
  ENSP ID: ENSP00000473453
GVFLYTLGCVCAACLYYLSPLKLEHLALIYFGGLSGSFLYTGGIGFKYVALGDLIILITFGPLAVMFAYAIQSSSSH

SEQ ID NO: 94423 - protein, 118 aa, Homo sapiens
  Payload ID: 18828
  Gene Name: UbiA prenyltransferase domain containing 1
  ENSP ID: ENSP00000473612
TLVDRILEPQDVVRFGVFLYTLGCVCAACLYYLSPLKLEHLALIYFGGLSGSFLYTGGIGFKYVALGDLIILITFGPLAVMFAYAIQAGVQWCNLSSLQPLPPGFKRFSCLSLLSSWD

SEQ ID NO: 94424 - protein, 1134 aa, Homo sapiens
  Payload ID: 18829
  Gene Name: ubinuclein 1
  Uniprot ID: Q9NPG3
  ENSP ID: ENSP00000262376
MSEPHRVQFTSLPGSLNPAFLKKSRKEEAGAGEQHQDCEPAAAAVRITLTLFEPDHKRCPEFFYPELVKNIRGKVKGLQPGDKKKDLSDPFNDEEKERHKVEALARKFEEKYGGKKRRKDRIQDLIDMGYGYDESDSFIDNSEAYDELVPASLTTKYGGFYINSGTLQFRQASESEDDFIKEKKKKSPKKRKLKEGGEKIKKKKKDDTYDKEKKSKKSKFSKAGFTALNASKEKKKKKYSGALSVKEMLKKFQKEKEAQKKREEEHKPVAVPSAEAQGLRELEGASDPLLSLFGSTSDNDLLQAATAMDSLTDLDLEHLLSESPEGSPFRDMDDGSDSLGVGLDQEFRQPSSLPEGLPAPLEKRVKELAQAARAAEGESRQKFFTQDINGILLDIEAQTRELSSQVRSGVYAYLASFLPCSKDALLKRARKLHLYEQGGRLKEPLQKLKEAIGRAMPEQMAKYQDECQAHTQAKVAKMLEEEKDKEQRDRICSDEEEDEEKGGRRIMGPRKKFQWNDEIRELLCQVVKIKLESQDLERNNKAQAWEDCVKGFLDAEVKPLWPKGWMQARTLFKESRRGHGHLTSILAKKKVMAPSKIKVKESSTKPDKKVSVPSGQIGGPIALPSDHQTGGLSIGASSRELPSQASGGLANPPPVNLEDSLDEDLIRNPASSVEAVSKELAALNSRAAGNSEFTLPAPSKAPAEKVGGVLCTEEKRNFAKPSPSAPPPASSLQSPLNFLAEQALALGQSSQEKKPESSGYKELSCQAPLNKGLPEVHQSKAKHHSLPRTSHGPQVAVPVPGPQVKVFHAGTQQQKNFTPPSPFANKLQGPKASPTQCHRSLLQLVKTAAKGQGFHPSAPATSGGLSASSSSSHKTPASSSSALSHPAKPHSVSSAGSSYKNNPFASSISKHGVSSGSSSSGGTPVQSSVSGSLVPGIQPPSVGQATSRPVPSSAGKKMPVSQKLTLVAPPGGPNGDSSGGTQGVAKLLTSPSLKPSAVSSVTSSTSLSKGASGTVLLAGSSLMASPYKSSSPKLSGAMSSNSLGIITPVPIPVHVLSFSADSSAKAGVSKDAIVTGPAPGSFHHGLGHSLLAGLHSSPPHAAPLPHAAVPTHIPQSLPGASQLHGKGPAVPRKL

SEQ ID NO: 94425 - protein, 1134 aa, Homo sapiens; identical to SEQ ID NO: 94424
  Payload ID: 18829
  Gene Name: ubinuclein 1
  Uniprot ID: Q9NPG3
  ENSP ID: ENSP00000379894

SEQ ID NO: 94426 - protein, 312 aa, Homo sapiens
  Payload ID: 18829
  Gene Name: ubinuclein 1
  ENSP ID: ENSP00000465309
  MOD_RES (1)..(1): Any amino acid
XSDEEEDEEKGGRRIMGPRKKFQWNDEIRTLFKESRRGHGHLTSILAKKKVMAPSKIKVKESSTKPDKKVSVPSGQIGGPIALPSDHQTGGLSIGASSRELPSQASGGLANPPPVNLEDSLDEDLIRNPASSVEAVSKELAALNSRAAGNSEFTLPAPSKAPAEKVGGVLCTEEKRNFAKPSPSAPPPASSLQSPLNFLAEQALALGQSSQEKKPESSGYKELSCQAPLNKGLPEVHQSKAKHHSLPRTSHGPQVAVPVPGPQVKVFHAGTQQQKNFTPPSPFANKLQGPKASPTQCHRSLLQLVKTAAKGQ

SEQ ID NO: 94427 - protein, 179 aa, Homo sapiens
  Payload ID: 18829
  Gene Name: ubinuclein 1
  ENSP ID: ENSP00000467942
MSEPHRVQFTSLPGSLNPAFLKKSRKEEAGAGEQHQDCEPAAAAVRITLTLFEPDHKRCPEFFYPELVKNIRGKVKGLQPGDKKKDLSDPFNDEEKERHKVEALARKFEEKYGGKKRRKDRIQDLIDMGYGYDESDSFIDNSEAYDELVPASLTTKYGGFYINSGTLQFRQASESEDDF

SEQ ID NO: 94428 - protein, 71 aa, Homo sapiens
  Payload ID: 18829
  Gene Name: ubinuclein 1
  ENSP ID: ENSP00000468143
KKRRKDRIQDLIDMGYGYDESDSFIDNSEALRHSCLTRGCFSMLLEVAEEHSHISLETHFAPSDCRSRTWS

SEQ ID NO: 94429 - protein, 1104 aa, Homo sapiens
  Payload ID: 18829
  Gene Name: ubinuclein 1
  Uniprot ID: Q9NPG3
  ENSP ID: ENSP00000468740
MSEPHRVQFTSLPGSLNPAFLKKSRKEEAGAGEQHQDCEPAAAAVRITLTLFEPDHKRCPEFFYPELVKNIRGKVKGLQPGDKKKDLSDPFNDEEKERHKVEALARKFEEKYGGKKRRKDRIQDLIDMGYGYDESDSFIDNSEAYDELVPASLTTKYGGFYINSGTLQFRQASESEDDFIKEKKKKSPKKRKLKEGGEKIKKKKKDDTYDKEKKSKKSKFSKAGFTALNASKEKKKKKYSGALSVKEMLKKFQKEKEAQKKREEEHKPVAVPSAEAQGLRELEGASDPLLSLFGSTSDNDLLQAATAMDSLTDLDLEHLLSESPEGSPFRDMDDGSDSLGVGLDQEFRQPSSLPEGLPAPLEKRVKELAQAARAAEGESRQKFFTQDINGILLDIEAQTRELSSQVRSGVYAYLASFLPCSKDALLKRARKLHLYEQGGRLKEPLQKLKEAIGRAMPEQMAKYQDECQAHTQAKVAKMLEEEKDKEQRDRICSDEEEDEEKGGRRIMGPRKKFQWNDEIRELLCQVVKIKLESQDLERNNKAQAWEDCVKGFLDAEVKPLWPKGWMQARTLFKESRRGHGHLTSILAKKKVMAPSKIKVKESSTKPDKKVSVPSGQIGGPIALPSDHQTGGLSIGASSRELPSQASGGLANPPPVNLEDSLDEDLIRNPASSVEAVSKELAALNSRAAGNSEFTLPAPSKAPAEKVGGVLCTEEKRNFAKPSPSAPPPASSLQSPLNFLAEQALALGQSSQEKKPESSGYKELSCQAPLNKGLPEVHQSKAKHHSLPRTSHGPQVAVPVPGPQVKVFHAGTQQQKNFTPPSPFANKLQGPKASPTQCHRSLLQLVKTAAKGQGFHPSAPATSGGLSASSSSSHKTPASSSSALSHPAKPHSVSSAGSSYKNNPFASSISKHGVSSGSSSSGGTPVQSSVSGSLVPGIQPPSVGQATSRPVPSSAGKKMPVSQKLTLVAPPGGPNGDSSGGTQGVAKLLTSPSLKPSAVSSVTSSTSLSKGASGTVLLAGSSLMASPYKSSSPKLSGAMSSNSLGIITPVPIPVHVLSFSADSSAKAGVSKDAIVTGPAPGSFHHGLGHSASQLHGKGPAVPRKL

SEQ ID NO: 94430 - protein, 56 aa, Homo sapiens
  Payload ID: 18829
  Gene Name: ubinuclein 1
  ENSP ID: ENSP00000468776
  MOD_RES (1)..(1): Any amino acid
XGKKMPVSQKLTLVAPPGGPNGDSSGGTQGVAKLLTSPSLKPSAVSSVTSSTSLSR

SEQ ID NO: 94431 - protein, 444 aa, Homo sapiens
  Payload ID: 18830
  Gene Name: ubinuclein 2
  ENSP ID: ENSP00000417846
  MOD_RES (1)..(1): Any amino acid
XKYGGFYINTGTLQFRQASDTEEDDITDNQKHKPPKVPKIKEDDIEMKKRKRKEEGEKEKKPRKKVPKQLGVVALNSHKSEKKKKRYKDSLSLAAMIRKFQKEKDALKKESNPKVPVTLSTPSLNKPPCAAAALGNDVPDLNLSSGDPDLPIFVSTNEHELFQEAENALEMLDDFDFDRLLDAASDGSPLSESGGENGTTTQPTYTSQVMPKVVPTLPEGLPVLLEKRIEDLRVAAKLFDEEGRKKFFTQDMNNILLDIELQLQELGPVIRSGVYSHLEAFVPCNKETLVKRLKKLHLNVQDDRLREPLQKLKLAVSNVMPEQLFKYQEDCQARSQAKCAKLQTDEEREKNGSEEDDDEKPGKRVIGPRKKFHWDDTIRTLLCNLVEIKLGCYELEPNKSQSAEDYLKSFMETEVKPLWPKGWMQARMLFKESRSVHNHLTSAP

SEQ ID NO: 94432 - protein, 137 aa, Homo sapiens
  Payload ID: 18830
  Gene Name: ubinuclein 2
  ENSP ID: ENSP00000417849
MLAKKFEMKYGGKPRKHRKDRLQDLIDIGFGYDETDPFIDNSEAYDELVPASLTTKYGGFYINTGTLQFRQASDTEEDDITDNQKHKPPKVPKIKEDDIEMKKRKRKEEGEKEKKPRKKVPKQLGVVALNSHKSEKK

SEQ ID NO: 94433 - protein, 1347 aa, Homo sapiens
  Payload ID: 18830
  Gene Name: ubinuclein 2
  Uniprot ID: Q6ZU65
  ENSP ID: ENSP00000418648
MAEPRRVAFISLSPVRRREAEYPGPEREPEYPREPPRLEPQPYREPARAEPPAPREPAPRSDAQPPSREKPLPQREVSRAEPPMSLQREPPRPEPPPPFPPLPLQPPPPRESASRAEQPPRPPRETVRLELVLKDPTDESCVEFSYPELLLCGEQRKKLIHTEDPFNDEHQERQEVEMLAKKFEMKYGGKPRKHRKDRLQDLIDIGFGYDETDPFIDNSEAYDELVPASLTTKYGGFYINTGTLQFRQASDTEEDDITDNQKHKPPKVPKIKEDDIEMKKRKRKEEGEKEKKPRKKVPKQLGVVALNSHKSEKKKKRYKDSLSLAAMIRKFQKEKDALKKESNPKVPVTLSTPSLNKPPCAAAALGNDVPDLNLSSGDPDLPIFVSTNEHELFQEAENALEMLDDFDFDRLLDAASDGSPLSESGGENGTTTQPTYTSQVMPKVVPTLPEGLPVLLEKRIEDLRVAAKLFDEEGRKKFFTQDMNNILLDIELQLQELGPVIRSGVYSHLEAFVPCNKETLVKRLKKLHLNVQDDRLREPLQKLKLAVSNVMPEQLFKYQEDCQARSQAKCAKLQTDEEREKNGSEEDDDEKPGKRVIGPRKKFHWDDTIRTLLCNLVEIKLGCYELEPNKSQSAEDYLKSFMETEVKPLWPKGWMQARMLFKESRSVHNHLTSAPAKKKVIPAPKPKVKEVMVKTLPLHSFPTMLKECSPKKDQKTPTSLVASVSGPPTSSSTAAIAAASSSSAPAQETICLDDSLDEDLSFHSPSLDLVSEALAVINNGNKGPPVGSRISMPTTKPRPGLREEKLASIMSKLPLATPKKLDSTQTTHSSSLIAGHTGPVPKKPQDLAHTGISSGLIAGSSIQNPKVSLEPLPARLLQQGLQRSSQIHTSSSSQTHVSSSSQAQIAASSHALGTSEAQDASSLTQVTKVHQHSAVQQNYVSPLQATISKSQTNPVVKLSNNPQLSCSSSLIKTSDKPLMYRLPLSTPSPGNGSQGSHPLVSRTVPSTTTSSNYLAKAMVSQISTQGFKSPFSMAASPKLAASPKPATSPKPLPSPKPSASPKPSLSAKPSVSTKLISKSNPTPKPTVSPSSSSPNALVAQGSHSSTNSPVHKQPSGMNISRQSPTLNLLPSSRTSGLPPTKNLQAPSKLTNSSSTGTVGKNSLSGIAMNVPASRGSNLNSSGANRTSLSGGTGSGTQGATKPLSTPHRPSTASGSSVVTASVQSTAGASLLANASPLTLMTSPLSVTNQNVTPFGMLGGLVPVTMPFQFPLEIFGFGTDTAGVTTTSGSTSAAFHHSLTQNLLKGLQPGGAQHAATLSHSPLPAHLQQAFHDGGQSKGDTKLPRKSQ

SEQ ID NO: 94434 - protein, 561 aa, Homo sapiens
  Payload ID: 18831
  Gene Name: ubiquilin 1
  Uniprot ID: Q9UMX0
  ENSP ID: ENSP00000257468
MAESGESGGPPGSQDSAAGAEGAGAPAAAASAEPKIMKVTVKTPKEKEEFAVPENSSVQQFKEEISKRFKSHTDQLVLIFAGKILKDQDTLSQHGIHDGLTVHLVIKTQNRPQDHSAQQTNTAGSNVTTSSTPNSNSTSGSATSNPFGLGGLGGLAGLSSLGLNTTNFSELQSQMQRQLLSNPEMMVQIMENPFVQSMLSNPDLMRQLIMANPQMQQLIQRNPEISHMLNNPDIMRQTLELARNPAMMQEMMRNQDRALSNLESIPGGYNALRRMYTDIQEPMLSAAQEQFGGNPFASLVSNTSSGEGSQPSRTENRDPLPNPWAPQTSQSSSASSGTASTVGGTTGSTASGTSGQSTTAPNLVPGVGASMFNTPGMQSLLQQITENPQLMQNMLSAPYMRSMMQSLSQNPDLAAQMQNPDTLSAMSNPRAMQALLQIQQGLQTLATEAPGLIPGFTPGLGALGSTGGSSGTNGSNATPSENTSPTAGTTEPGHQQFIQQMLQALAGVNPQLQNPEVRFQQQLEQLSAMGFLNREANLQALIATGGDINAAIERLLGSQPS

SEQ ID NO: 94435 - protein, 589 aa, Homo sapiens
  Payload ID: 18831
  Gene Name: ubiquilin 1
  Uniprot ID: Q9UMX0
  ENSP ID: ENSP00000365576
MAESGESGGPPGSQDSAAGAEGAGAPAAAASAEPKIMKVTVKTPKEKEEFAVPENSSVQQFKEEISKRFKSHTDQLVLIFAGKILKDQDTLSQHGIHDGLTVHLVIKTQNRPQDHSAQQTNTAGSNVTTSSTPNSNSTSGSATSNPFGLGGLGGLAGLSSLGLNTTNFSELQSQMQRQLLSNPEMMVQIMENPFVQSMLSNPDLMRQLIMANPQMQQLIQRNPEISHMLNNPDIMRQTLELARNPAMMQEMMRNQDRALSNLESIPGGYNALRRMYTDIQEPMLSAAQEQFGGNPFASLVSNTSSGEGSQPSRTENRDPLPNPWAPQTSQSSSASSGTASTVGGTTGSTASGTSGQSTTAPNLVPGVGASMFNTPGMQSLLQQITENPQLMQNMLSAPYMRSMMQSLSQNPDLAAQMMLNNPLFAGNPQLQEQMRQQLPTFLQQMQNPDTLSAMSNPRAMQALLQIQQGLQTLATEAPGLIPGFTPGLGALGSTGGSSGTNGSNATPSENTSPTAGTTEPGHQQFIQQMLQALAGVNPQLQNPEVRFQQQLEQLSAMGFLNREANLQALIATGGDINAAIERLLGSQPS

SEQ ID NO: 94436 - protein, 157 aa, Homo sapiens
  Payload ID: 18831
  Gene Name: ubiquilin 1
  ENSP ID: ENSP00000434194
AAAASAEPKIMKVTVKTPKEKEEFAVPENSSVQQTLELARNPAMMQEMMRNQDRALSNLESIPGGYNALRRMYTDIQEPMLSAAQEQFGGNPFASLVSNTSSGEGSQPSRTENRDPLPNPWAPQTSQSSSASSGTASTVGGTTGSTASGTSGQSTTA

SEQ ID NO: 94437 - protein, 158 aa, Homo sapiens
  Payload ID: 18831
  Gene Name: ubiquilin 1
  ENSP ID: ENSP00000436912
  MOD_RES (1)..(1): Any amino acid
XQQITENPQLMQNMLSAPYMRSMMQSLSQNPDLAAQLQEQMRQQLPTFLQQMQNPDTLSAMSNPRAMQALLQIQQGLQTLATEAPGLIPGFTPGLGALGSTGGSSGTNGSNATPSENTSPTAGTTEPGHQQFIQQMLQALAGVNPQLQNPEVRFQQQL

SEQ ID NO: 94438 - protein, 624 aa, Homo sapiens
  Payload ID: 18832
  Gene Name: ubiquilin 2
  Uniprot ID: Q9UHD9
  ENSP ID: ENSP00000345195
MAENGESSGPPRPSRGPAAAQGSAAAPAEPKIIKVTVKTPKEKEEFAVPENSSVQQFKEAISKRFKSQTDQLVLIFAGKILKDQDTLIQHGIHDGLTVHLVIKSQNRPQGQSTQPSNAAGTNTTSASTPRSNSTPISTNSNPFGLGSLGGLAGLSSLGLSSTNFSELQSQMQQQLMASPEMMIQIMENPFVQSMLSNPDLMRQLIMANPQMQQLIQRNPEISHLLNNPDIMRQTLEIARNPAMMQEMMRNQDLALSNLESIPGGYNALRRMYTDIQEPMLNAAQEQFGGNPFASVGSSSSSGEGTQPSRTENRDPLPNPWAPPPATQSSATTSTTTSTGSGSGNSSSNATGNTVAAANYVASIFSTPGMQSLLQQITENPQLIQNMLSAPYMRSMMQSLSQNPDLAAQMMLNSPLFTANPQLQEQMRPQLPAFLQQMQNPDTLSAMSNPRAMQALMQIQQGLQTLATEAPGLIPSFTPGVGVGVLGTAIGPVGPVTPIGPIGPIVPFTPIGPIGPIGPTGPAAPPGSTGSGGPTGPTVSSAAPSETTSPTSESGPNQQFIQQMVQALAGANAPQLPNPEVRFQQQLEQLNAMGFLNREANLQALIATGGDINAAIERLLGSQPS

SEQ ID NO: 94439 - protein, 655 aa, Homo sapiens
  Payload ID: 18833
  Gene Name: ubiquilin 3
  Uniprot ID: Q9H347
  ENSP ID: ENSP00000347997
MAKGGEALPQGSPAPVQDPHLIKVTVKTPKDKEDFSVTDTCTIQQLKEEISQRFKAHPDQLVLIFAGKILKDPDSLAQCGVRDGLTVHLVIKRQHRAMGNECPAASVPTQGPSPGSLPQPSSIYPADGPPAFSLGLLTGLSRLGLAYRGFPDQPSSLMRQHVSVPEFVTQLIDDPFIPGLLSNTGLVRQLVLDNPHMQQLIQHNPEIGHILNNPEIMRQTLEFLRNPAMMQEMIRSQDRVLSNLESIPGGYNVLCTMYTDIMDPMLNAVQEQFGGNPFATATTDNATTTTSQPSRMENCDPLPNPWTSTHGGSGSRQGRQDGDQDAPDIRNRFPNFLGIIRLYDYLQQLHENPQSLGTYLQGTASALSQSQEPPPSVNRVPPSSPSSQEPGSGQPLPEESVAIKGRSSCPAFLRYPTENSTGQGGDQDGAGKSSTGHSTNLPDLVSGLGDSANRVPFAPLSFSPTAAIPGIPEPPWLPSPAYPRSLRPDGMNPAPQLQDEIQPQLPLLMHLQAAMANPRALQALRQIEQGLQVLATEAPRLLLWFMPCLAGTGSVAGGIESREDPLMSEDPLPNPPPEVFPALDSAELGFLSPPFLHMLQDLVSTNPQQLQPEAHFQVQLEQLRSMGFLNREANLQALIATGGDVDAAVEKLRQS

SEQ ID NO: 94440 - protein, 221 aa, Homo sapiens
  Payload ID: 18833
  Gene Name: ubiquilin 3
  ENSP ID: ENSP00000412561
MAKGGEALPQGSPAPVQDPHLIKVTVKTPKDKEDFSVTDTCTIQQLKEEISQRFKAHPDQLVLIFAGKILKDPDSLAQCGVRDGLTVHLVIKRQHRAMGNECPAASVPTQGPSPGSLPQPSSIYPADGPPAFSLGLLTGLSRLGLAYRGFPDQPSSLMRQHVSVPEFVTQLIDDPFIPGLLSNTGLVRQLVLDNPHMQQLIQHNPEIGHILNNPEIMRQTL

SEQ ID NO: 94441 - protein, 601 aa, Homo sapiens
  Payload ID: 18834
  Gene Name: ubiquilin 4
  Uniprot ID: Q9NRR5
  ENSP ID: ENSP00000357292
MAEPSGAETRPPIRVTVKTPKDKEEIVICDRASVKEFKEEISRRFKAQQDQLVLIFAGKILKDGDTLNQHGIKDGLTVHLVIKTPQKAQDPAAATASSPSTPDPASAPSTTPASPATPAQPSTSGSASSDAGSGSRRSSGGGPSPGAGEGSPSATASILSGFGGILGLGSLGLGSANFMELQQQMQRQLMSNPEMLSQIMENPLVQDMMSNPDLMRHMIMANPQMQQLMERNPEISHMLNNPELMRQTMELARNPAMMQEMMRNQDRALSNLESIPGGYNALRRMYTDIQEPMFSAAREQFGNNPFSSLAGNSDSSSSQPLRTENREPLPNPWSPSPPTSQAPGSGGEGTGGSGTSQVHPTVSNPFGINAASLGSGMFNSPEMQALLQQISENPQLMQNVISAPYMRSMMQTLAQNPDFAAQMMVNVPLFAGNPQLQEQLRLQLPVFLQQMQNPESLSILTNPRAMQALLQIQQGLQTLQTEAPGLVPSLGSFGISRTPAPSAGSNAGSTPEAPTSSPATPATSSPTGASSAQQQLMQQMIQLLAGSGNSQVQTPEVRFQQQLEQLNSMGFINREANLQALIATGGDINAAIERLLGSQLS

SEQ ID NO: 94442 - protein, 475 aa, Homo sapiens
  Payload ID: 18835
  Gene Name: ubiquilin-like
  Uniprot ID: Q8IYU4
  ENSP ID: ENSP00000369531
MWHAISRTSRMSQSGCPSGLLADKNISSSATRVIVKTAGNQKDFMVADDISVRQFKEMLLAHFQCQMDQLVLVFMGCLLKDHDTLSQRGIMDGHTIYLVIKSKQGSRSLAHSFRDLPTNDPCHRDRNTKGNSSRVHQPTGMNQAPVELAHFVGSDAPKVHTQNLEVSHPECKAQMLENPSIQRLLSNMEFMWQFISEHLDTQQLMQQNPEVSRLLLDNSEILLQTLELARNLAMIQEIMQIQQPSQNLEYPLNPQPYLGLETMPGGNNALGQNYADINDQMLNSMQDPFGGNPFTALLAGQVLEQVQSSPPPPPPSQEQQDQLTQHPATRVIYNSSGGFSSNTSANDTLNKVNHTSKANTAMISTKGQSHICATRQPAWIPALPSIELTQQLQEEYKDATVSLSSSRQTLKGDLQLSDEQSSSQITGGMMQLLMNNPYLAAQIMLFTSMPQLSEQWRQQLPTFLQQTQISDLLSA

SEQ ID NO: 94443 - protein, 111 aa, Homo sapiens
  Payload ID: 18836
  Gene Name: ubiquinol-cytochrome c reductase binding protein
  Uniprot ID: P14927
  ENSP ID: ENSP00000287022
MAGKQAVSASGKWLDGIRKWYYNAAGFNKLGLMRDDTIYEDEDVKEAIRRLPENLYNDRMFRIKRALDLNLKHQILPKEQWTKYEEENFYLEPYLKEVIRERKEREEWAKK

SEQ ID NO: 94444 - protein, 161 aa, Homo sapiens
  Payload ID: 18836
  Gene Name: ubiquinol-cytochrome c reductase binding protein
  ENSP ID: ENSP00000427862
MAGKQAVSASGKWLDGIRKWYYNAAGFNKLGLMRDDTIYEDEDVKEAIRRLPENLYNDRMFRIKRALDLNLKHQILPKEQWTKYEEVFAVPALHSASYLDEKISPLSVPPDPKKSFCEANSHPLNCIETRQRPVDIHFFFFPKRLPPHNLSKQLITPSPQI

SEQ ID NO: 94445 - protein, 76 aa, Homo sapiens
  Payload ID: 18836
  Gene Name: ubiquinol-cytochrome c reductase binding protein
  ENSP ID: ENSP00000429787
MRDDTIYEDEDVKEAIRRLPENLYNDRMFRIKRALDLNLKHQILPKEQWTKYEEKKTTLSLTCEMILLKLLSKSLI

SEQ ID NO: 94446 - protein, 140 aa, Homo sapiens
  Payload ID: 18836
  Gene Name: ubiquinol-cytochrome c reductase binding protein
  Uniprot ID: P14927
  ENSP ID: ENSP00000430494
MAGKQAVSASGKWLDGIRKWYYNAAGFNKLGLMRDDTIYEDEDVKEAIRRLPENLYNDRMFRIKRALDLNLKHQILPKEQWTKYEEVFAVPALHSASYLDEKISPLSVPPDPKKSFCEANSHPLNCIETRQRKISTLNRI

SEQ ID NO: 94447 - protein, 161 aa, Homo sapiens; identical to SEQ ID NO: 94444
  Payload ID: 18836
  Gene Name: ubiquinol-cytochrome c reductase binding protein
  ENSP ID: ENSP00000430560

SEQ ID NO: 94448 - protein, 26 aa, Homo sapiens
  Payload ID: 18836
  Gene Name: ubiquinol-cytochrome c reductase binding protein
  ENSP ID: ENSP00000430672
MAGKQADIEGVLLNSRHCFCACLGTT

SEQ ID NO: 94449 - protein, 272 aa, Homo sapiens
  Payload ID: 18837
  Gene Name: ubiquinol-cytochrome c reductase complex assembly factor 1
  Uniprot ID: Q9NVA1
  ENSP ID: ENSP00000335364
MALLVRVLRNQTSISQWVPVCSRLIPVSPTQGQGDRALSRTSQWPQMSQSRACGGSEQIPGIDIQLNRKYHTTRKLSTTKDSPQPVEEKVGAFTKIIEAMGFTGPLKYRCQMPDTFNSWFLITLLHVWMCLVRMKQEGRSGKYMCRIIVHFMWEDVQQRGRVMGVNPYILKKNMILMTNHFYAAILGYDEGILSDDHGLAAALWRTFFNRKCEDPRHLELLVEYVRKQIQYLDSMNGEDLLLTGEVSWRPLVEKNPQSILKPHSPTYNDEGL

SEQ ID NO: 94450 - protein, 219 aa, Homo sapiens
  Payload ID: 18837
  Gene Name: ubiquinol-cytochrome c reductase complex assembly factor 1
  ENSP ID: ENSP00000352161
MALLVRVLRNQTSISQWVPVCSRLIPVSPTQGQGDRALSRTSQWPQMSQSRACGGSEQIPGIDIQLNRKYHTTRKLSTTKDSPQPVEEKVGAFTKIIEAMGFTGPLKYSKWVNPYILKKNMILMTNHFYAAILGYDEGILSDDHGLAAALWRTFFNRKCEDPRHLELLVEYVRKQIQYLDSMNGEDLLLTGEVSWRPLVEKNPQSILKPHSPTYNDEGL

SEQ ID NO: 94451 - protein, 231 aa, Homo sapiens
  Payload ID: 18837
  Gene Name: ubiquinol-cytochrome c reductase complex assembly factor 1
  Uniprot ID: Q9NVA1
  ENSP ID: ENSP00000363501
MALLVRVLRNQTSISQWVPVCSRLIPVSPTQGQGDRALSRTSQKIKIAALRMYTSCVEKTDFEEFFLRCQMPDTFNSWFLITLLHVWMCLVRMKQEGRSGKYMCRIIVHFMWEDVQQRGRVMGVNPYILKKNMILMTNHFYAAILGYDEGILSDDHGLAAALWRTFFNRKCEDPRHLELLVEYVRKQIQYLDSMNGEDLLLTGEVSWRPLVEKNPQSILKPHSPTYNDEGL

SEQ ID NO: 94452 - protein, 273 aa, Homo sapiens
  Payload ID: 18837
  Gene Name: ubiquinol-cytochrome c reductase complex assembly factor 1
  Uniprot ID: Q9NVA1
  ENSP ID: ENSP00000363505
MALLVRVLRNQTSISQWVPVCSRLIPVSPTQGQGDRALSRTSQWPQMSQSRACGGSEQIPGIDIQLNRKYHTTRKLSTTKDSPQPVEEKVGAFTKIIEAMGFTGPLKYSKWKIKIAALRMYTSCVEKTDFEEFFLRCQMPDTFNSWFLITLLHVWMCLVRMKQEGRSGKYMCRIIVHFMWEDVQQRGRVMGGILSDDHGLAAALWRTFFNRKCEDPRHLELLVEYVRKQIQYLDSMNGEDLLLTGEVSWRPLVEKNPQSILKPHSPTYNDEGL

SEQ ID NO: 94453 - protein, 299 aa, Homo sapiens
  Payload ID: 18837
  Gene Name: ubiquinol-cytochrome c reductase complex assembly factor 1
  Uniprot ID: Q9NVA1
  ENSP ID: ENSP00000363506
MALLVRVLRNQTSISQWVPVCSRLIPVSPTQGQGDRALSRTSQWPQMSQSRACGGSEQIPGIDIQLNRKYHTTRKLSTTKDSPQPVEEKVGAFTKIIEAMGFTGPLKYSKWKIKIAALRMYTSCVEKTDFEEFFLRCQMPDTFNSWFLITLLHVWMCLVRMKQEGRSGKYMCRIIVHFMWEDVQQRGRVMGVNPYILKKNMILMTNHFYAAILGYDEGILSDDHGLAAALWRTFFNRKCEDPRHLELLVEYVRKQIQYLDSMNGEDLLLTGEVSWRPLVEKNPQSILKPHSPTYNDEGL

SEQ ID NO: 94454 - protein, 22 aa, Homo sapiens
  Payload ID: 18837
  Gene Name: ubiquinol-cytochrome c reductase complex assembly factor 1
  ENSP ID: ENSP00000363515
MALLVRVLTEFCSCCASWSAMA

SEQ ID NO: 94455 - protein, 49 aa, Homo sapiens
  Payload ID: 18837
  Gene Name: ubiquinol-cytochrome c reductase complex assembly factor 1
  ENSP ID: ENSP00000380685
MALLVRVLRNQTSISQWVPVCSRLIPVSPTQGQGDRALSRTSQTGSCSC

SEQ ID NO: 94456 - protein, 221 aa, Homo sapiens
  Payload ID: 18837
  Gene Name: ubiquinol-cytochrome c reductase complex assembly factor 1
  ENSP ID: ENSP00000380686
MALLVRVLRNQTSISQWVPVCSRLIPVSPTQGQGDRALSRTSQWPQMSQSRACGGSEQIPGIDIQLNRKYHTTRKLSTTKDSPQPVEEKVGAFTKIIEAMGFTGPLKYSKWKIKIAALRMYTSCVEKTDFEEFFLRCQMPDTFNSWFLITLLHVWMCLVRMKQEGRSGKYMCRIIVHFMWEDVQQRGRVMGVSECCQMLVLDNSREGFEFGVLSVVKWPCF

SEQ ID NO: 94457 - protein, 226 aa, Homo sapiens
  Payload ID: 18837
  Gene Name: ubiquinol-cytochrome c reductase complex assembly factor 1
  ENSP ID: ENSP00000380688
MSQSRACGGSEQIPGIDIQLNRKYHTTRKLSTTKDSPQPVEEKVGAFTKIIEAMGFTGPLKYRCQMPDTFNSWFLITLLHVWMCLVRMKQEGRSGKYMCRIIVHFMWEDVQQRGRVMGVNPYILKKNMILMTNHFYAAILGYDEGILSDDHGLAAALWRTFFNRKCEDPRHLELLVEYVRKQIQYLDSMNGEDLLLTGEVSWRPLVEKNPQSILKPHSPTYNDEGL

SEQ ID NO: 94458 - protein, 126 aa, Homo sapiens
  Payload ID: 18837
  Gene Name: ubiquinol-cytochrome c reductase complex assembly factor 1
  ENSP ID: ENSP00000390334
ALLVRVLRNQTSISQWVPVCSRLIPVSPTQGQGDRALSRTSQWPQMSQSRACGGSEQIPGIDIQLNRKYHTTRKLSTTKDSPQPVEEKRSWDMMRGSFQMIMGWPLPSGEPSSTGNVKTLDILNCW

SEQ ID NO: 94459 - protein, 243 aa, Homo sapiens
  Payload ID: 18837
  Gene Name: ubiquinol-cytochrome c reductase complex assembly factor 1
  ENSP ID: ENSP00000398531
MALLVRVLRNQTSISQWVPVCSRLIPVSPTQGQGDRALSRTSQVPWLETSASEWHPQWPQMSQSRACGGSEQIPGIDIQLNRKYHTTRKLSTTKDSPQPVEEKVGAFTKIIEAMGFTGPLKYSKWKIKIAALRMYTSCVEKTDFEEFFLRCQMPDTFNSWFLITLLHVWMCLVRMKQEGRSGKYMCRIIVHFMWEDVQQRGRVMGVNPYILKKNMILMTNHFYAAILGYDEGILSDDHGLAAA

SEQ ID NO: 94460 - protein, 249 aa, Homo sapiens
  Payload ID: 18837
  Gene Name: ubiquinol-cytochrome c reductase complex assembly factor 1
  ENSP ID: ENSP00000399713
MALLVRVLRNQTSISQWVPVCSRLIPVSPTQGQGDRALSRTSQLSTTKDSPQPVEEKVGAFTKIIEAMGFTGPLKYSKWKIKIAALRMYTSCVEKTDFEEFFLRCQMPDTFNSWFLITLLHVWMCLVRMKQEGRSGKYMCRIIVHFMWEDVQQRGRVMGVNPYILKKNMILMTNHFYAAILGYDEGILSDDHGLAAALWRTFFNRKCEDPRHLELLVEYVRKQIQYLDSMNGEDLLLTGEVSWRPLVEK

SEQ ID NO: 94461 - protein, 55 aa, Homo sapiens
  Payload ID: 18837
  Gene Name: ubiquinol-cytochrome c reductase complex assembly factor 1
  ENSP ID: ENSP00000411024
  MOD_RES (1)..(1): Any amino acid
XLLVRVLRNQTSISQWVPVCSRLIPVSPTQGQGDRALSRTSQGVRCLIHSIHGFL

SEQ ID NO: 94462 - protein, 124 aa, Homo sapiens
  Payload ID: 18837
  Gene Name: ubiquinol-cytochrome c reductase complex assembly factor 1
  ENSP ID: ENSP00000416246
MALLVRVLRNQTSISQWVPVCSRLIPVSPTQGQGDRALSRTSQWPQMSQSRACGGSEQIPGIDIQLNRKYHTTRKLSTTKDSPQPVEEKVGAFTKIIEAMGFTGPLKYSKWGVRCLIHSIHGFL

SEQ ID NO: 94463 - protein, 44 aa, Homo sapiens
  Payload ID: 18837
  Gene Name: ubiquinol-cytochrome c reductase complex assembly factor 1
  ENSP ID: ENSP00000420584
MALLVRVLRNQTSISQWVPVCSRLIPVSPTQGQGDRALSRTSQG

SEQ ID NO: 94464 - protein, 101 aa, Homo sapiens
  Payload ID: 18838
  Gene Name: ubiquinol-cytochrome c reductase complex assembly factor 2
  ENSP ID: ENSP00000363331
MAASRYRRFLKLCEEWPVDETKRGRDLGAYLRQRVAQAFREGENTQYPRPRDTSFSGLSLEEYKLILSTDTLEELKEIDKGMWKKLQEKFAPKGPEEDHKA

SEQ ID NO: 94465 - protein, 126 aa, Homo sapiens
  Payload ID: 18838
  Gene Name: ubiquinol-cytochrome c reductase complex assembly factor 2
  ENSP ID: ENSP00000363348
  MOD_RES (1)..(1): Any amino acid
XAASRYRRFLKLCEEWPVDETKRGRDLGAYLRQRVAQAFREGENTQVAEPEACDQMYESLARLHSNYYKHKYPRPRDTSFSGLSLEEYKLILSTDTLEELKEIDKGMWKKLQEKFAPKGPEEDHKA

SEQ ID NO: 94466 - protein, 126 aa, Homo sapiens
  Payload ID: 18838
  Gene Name: ubiquinol-cytochrome c reductase complex assembly factor 2
  Uniprot ID: Q9BRT2
  ENSP ID: ENSP00000476140
MAASRYRRFLKLCEEWPVDETKRGRDLGAYLRQRVAQAFREGENTQVAEPEACDQMYESLARLHSNYYKHKYPRPRDTSFSGLSLEEYKLILSTDTLEELKEIDKGMWKKLQEKFAPKGPEEDHKA

SEQ ID NO: 94467 - protein, 93 aa, Homo sapiens
  Payload ID: 18839
  Gene Name: ubiquinol-cytochrome c reductase complex assembly factor 3
  Uniprot ID: Q6UW78
  ENSP ID: ENSP00000367189
MDSLRKMLISVAMLGAGAGVGYALLVIVTPGERRKQEMLKEMPLQDPRSREEAARTQQLLLATLQEAATTQENVAWRKNWMVGGEGGAGGRSP

SEQ ID NO: 94468 - protein, 93 aa, Homo sapiens; identical to SEQ ID NO: 94467
  Payload ID: 18839
  Gene Name: ubiquinol-cytochrome c reductase complex assembly factor 3
  Uniprot ID: Q6UW78
  ENSP ID: ENSP00000432692

SEQ ID NO: 94469 - protein, 480 aa, Homo sapiens
  Payload ID: 18840
  Gene Name: ubiquinol-cytochrome c reductase core protein I
  Uniprot ID: P31930
  ENSP ID: ENSP00000203407
MAASVVCRAATAGAQVLLRARRSPALLRTPALRSTATFAQALQFVPETQVSLLDNGLRVASEQSSQPTCTVGVWIDVGSRFETEKNNGAGYFLEHLAFKGTKNRPGSALEKEVESMGAHLNAYSTREHTAYYIKALSKDLPKAVELLGDIVQNCSLEDSQIEKERDVILREMQENDASMRDVVFNYLHATAFQGTPLAQAVEGPSENVRKLSRADLTEYLSTHYKAPRMVLAAAGGVEHQQLLDLAQKHLGGIPWTYAEDAVPTLTPCRFTGSEIRHRDDALPFAHVAIAVEGPGWASPDNVALQVANAIIGHYDCTYGGGVHLSSPLASGAVANKLCQSFQTFSICYAETGLLGAHFVCDRMKIDDMMFVLQGQWMRLCTSATESEVARGKNILRNALVSHLDGTTPVCEDIGRSLLTYGRRIPLAEWESRIAEVDASVVREICSKYIYDQCPAVAGYGPIEQLPDYNRIRSGMFWLRF

SEQ ID NO: 94470 - protein, 68 aa, Homo sapiens
  Payload ID: 18840
  Gene Name: ubiquinol-cytochrome c reductase core protein I
  ENSP ID: ENSP00000388660
MAASVVCRAATAGAQVLLRARRSVRWWRERGASGQGFGKRTAGPAADASLAEYGNLRSGAPVRAGDAG

SEQ ID NO: 94471 - protein, 121 aa, Homo sapiens
  Payload ID: 18840
  Gene Name: ubiquinol-cytochrome c reductase core protein I
  ENSP ID: ENSP00000393696
MAASVVCRAATAGAQVLLRARRSVRWECGLMLAAVLRLRRIMGQATFWSIWLSREQRIGLAVPWRRRWRAWGPILMPTAPGSTQLTTSRRCPRICRKLWSSWVTLCRTVVWKTHRLRRNVM

SEQ ID NO: 94472 - protein, 453 aa, Homo sapiens
  Payload ID: 18841
  Gene Name: ubiquinol-cytochrome c reductase core protein II
  Uniprot ID: P22695
  ENSP ID: ENSP00000268379
MKLLTRAGSFSRFYSLKVAPKVKATAAPAGAPPQPQDLEFTKLPNGLVIASLENYSPVSRIGLFIKAGSRYEDFSNLGTTHLLRLTSSLTTKGASSFKITRGIEAVGGKLSVTATRENMAYTVECLRGDVDILMEFLLNVTTAPEFRRWEVADLQPQLKIDKAVAFQNPQTHVIENLHAAAYRNALANPLYCPDYRIGKVTSEELHYFVQNHFTSARMALIGLGVSHPVLKQVAEQFLNMRGGLGLSGAKANYRGGEIREQNGDSLVHAAFVAESAVAGSAEANAFSVLQHVLGAGPHVKRGSNTTSHLHQAVAKATQQPFDVSAFNASYSDSGLFGIYTISQATAAGDVIKAAYNQVKTIAQGNLSNTDVQAAKNKLKAGYLMSVESSECFLEEVGSQALVAGSYMPPSTVLQQIDSVANADIINAAKKFVSGQKSMAASGNLGHTPFVDEL

SEQ ID NO: 94473 - protein, 176 aa, Homo sapiens
  Payload ID: 18841
  Gene Name: ubiquinol-cytochrome c reductase core protein II
  ENSP ID: ENSP00000455088
MKLLTRAGSFSFTKLPNGLVIASLENYSPVSRIGLFIKAGSRYEDFSNLGTTHLLRLTSSLTTKGASSFKITRGIEAVGGKLSVTATRENMAYTVECLRGDVDILMEFLLNVTTAPEFRRWEVADLQPQLKIDKAVAFQNPQTHVIENLHAAAYRNALANPLYCPDYRIGKVTSEE

SEQ ID NO: 94474 - protein, 412 aa, Homo sapiens
  Payload ID: 18841
  Gene Name: ubiquinol-cytochrome c reductase core protein II
  ENSP ID: ENSP00000456232
MKLLTRAGSFSRFYSLKVAPKVKATAAPAGAPPQPQDLEFTKLPNGLVIASLENYSPVSRIGLFIKAGSRYEDFSNLGTTHLLRLTSSLTTKGASSFKITRGIEAVGGKLSVTATRENMAYTVECLRGDVDILMEFLLNVTTAPEFRRWEVADLQPQLKIDKAVAFQNPQTHVIENLHAAAYRNALANPLYCPDYRIGKVTSEELHYFVQNHFTSARMALIGLGVSHPVLKQVAEQFLNMRGGLGLSGAKANYRGGEIREQNGDSLVHAAFVAESAVAGSAEANAFSVLQHVLGAGPHVKRGSNTTSHLHQAVAKATQQPFDVSAFNASYSDSGLFGIYTISQATAAGDVIKAAYNQVKTIAQGNLSNTDVQAAKRQRSLFLARSQWQQVEIWDIHLLLMSCNTDAHITGES

SEQ ID NO: 94475 - protein, 336 aa, Homo sapiens
  Payload ID: 18841
  Gene Name: ubiquinol-cytochrome c reductase core protein II
  ENSP ID: ENSP00000456738
MKLLTRAGSFSRFYSLKVAPKVKATAAPAGAPPQPQDLEFTKLPNGLVIASLENYSPVSRIGLFIKAGSRYEDFSNLGTTHLLRLTSSLTTKGASSFKITRGIEAVGGKLSVTATRENMAYTVECLRGDVDILMEFLLNVTTAPEFRRWEVADLQPQLKIDKAVAFQNPQTHVIENLHAAAYRNALANPLYCPDYRIGKVTSEELHYFVQNHFTSARMALIGLGVSHPVLKQVAEQFLNMRGGLGLSGAKANYRGGEIREQNGDSLVHAAFVAESAVAGSAEANAFSVLQHVLGAGPHVKRGSNTTSHLHQAVAKATQQPFDEQAESWIPNVSGVF

SEQ ID NO: 94476 - protein, 116 aa, Homo sapiens
  Payload ID: 18841
  Gene Name: ubiquinol-cytochrome c reductase core protein II
  ENSP ID: ENSP00000457600
MKLLTRAGSFSRFYSLKVAPKVKATAAPAGAPPQPQDLEFTKLPNGLVIASLENYSPVSRIGLFIKAGSRYEDFSNLGTTHLLRLTSSLTTKGASSFKITRGIEAVGGKLREMGKV

SEQ ID NO: 94477 - protein, 132 aa, Homo sapiens
  Payload ID: 18841
  Gene Name: ubiquinol-cytochrome c reductase core protein II
  ENSP ID: ENSP00000457662
MKLLTRAGSFSRFYSLKVAPKVKATAAPAGAPPQPQDLEFTKLPNGLVIASLENYSPVSRIGLFIKAGSRYEDFSNLGTTHLLRLTSSLTTKGASSFKITRGIEAVGGKLSVHSIFNQEQILSQETTLFAHP

SEQ ID NO: 94478 - protein, 70 aa, Homo sapiens
  Payload ID: 18841
  Gene Name: ubiquinol-cytochrome c reductase core protein II
  ENSP ID: ENSP00000479799
  MOD_RES (1)..(1): Any amino acid
XFIKAGSRYEDFSNLGTTHLLRLTSSLTTKGASSFKITRGIEAVGGKLSVHSIFNQEQILSQETTLFAHP

SEQ ID NO: 94479 - protein, 132 aa, Homo sapiens; identical to SEQ ID NO: 94477
  Payload ID: 18841
  Gene Name: ubiquinol-cytochrome c reductase core protein II
  ENSP ID: ENSP00000485966

SEQ ID NO: 94480 - protein, 91 aa, Homo sapiens
  Payload ID: 18842
  Gene Name: ubiquinol-cytochrome c reductase hinge protein
  Uniprot ID: P07919
  ENSP ID: ENSP00000309565
MGLEDEQKMLTESGDPEEEEEEEEELVDPLTTVREQCEQLEKCVKARERLELCDERVSSRSHTEEDCTEELFDFLHARDHCVAHKLFNNLK

SEQ ID NO: 94481 - protein, 102 aa, Homo sapiens
  Payload ID: 18842
  Gene Name: ubiquinol-cytochrome c reductase hinge protein
  ENSP ID: ENSP00000477826
MGLEDEQKMLTESGDPEEEEEEEEELVIGLRLSVHTGNLGRQECETFPYYLASELNGRPHSAISGGSVALPAGLLHGSPNNSERAMRAVGEMCKGPGAARAL

SEQ ID NO: 94482 - protein, 58 aa, Homo sapiens
  Payload ID: 18842
  Gene Name: ubiquinol-cytochrome c reductase hinge protein
  ENSP ID: ENSP00000484857
MGLEDEQKMLTESGDPEEEEEEEEELVVRTVSGSPNNSERAMRAVGEMCKGPGAARAL

SEQ ID NO: 94483 - protein, 91 aa, Homo sapiens
  Payload ID: 18843
  Gene Name: ubiquinol-cytochrome c reductase hinge protein like
  ENSP ID: ENSP00000485401
MGLEDEQKMLTESGDPEEEEEEEEELVDPLTTVREQCEQLEKCVKARERLELYDEHVSSRSHTEEDCTEELFDFLHAKDHCVAHKLFNNLK

SEQ ID NO: 94484 - protein, 82 aa, Homo sapiens
  Payload ID: 18844
  Gene Name: ubiquinol-cytochrome c reductase, complex III subunit VII, 9.5kDa
  Uniprot ID: O14949
  ENSP ID: ENSP00000367934
MGREFGNLTRMRHVISYSLSPFEQRAYPHVFTKGIPNVLRRIRESFFRVVPQFVVFYLIYTWGTEEFERSKRKNPAAYENDK

SEQ ID NO: 94485 - protein, 82 aa, Homo sapiens; identical to SEQ ID NO: 94484
  Payload ID: 18844
  Gene Name: ubiquinol-cytochrome c reductase, complex III subunit VII, 9.5kDa
  Uniprot ID: O14949
  ENSP ID: ENSP00000367936

SEQ ID NO: 94486 - protein, 82 aa, Homo sapiens; identical to SEQ ID NO: 94484
  Payload ID: 18844
  Gene Name: ubiquinol-cytochrome c reductase, complex III subunit VII, 9.5kDa
  Uniprot ID: O14949
  ENSP ID: ENSP00000367939

SEQ ID NO: 94487 - protein, 63 aa, Homo sapiens
  Payload ID: 18845
  Gene Name: ubiquinol-cytochrome c reductase, complex III subunit X
  Uniprot ID: Q9UDW1
  ENSP ID: ENSP00000332887
MAAATLTSKLYSLLFRRTSTFALTIIVGVMFFERAFDQGADAIYDHINEGKLWKHIKHKYENK

SEQ ID NO: 94488 - protein, 62 aa, Homo sapiens
  Payload ID: 18845
  Gene Name: ubiquinol-cytochrome c reductase, complex III subunit X
  Uniprot ID: Q9UDW1
  ENSP ID: ENSP00000384962
MAAATLTSKLYSLLFRRTSTFALTIIVGVMFFERAFDQGADAIYDHINEGVRACAIPDLGPA

SEQ ID NO: 94489 - protein, 132 aa, Homo sapiens
  Payload ID: 18845
  Gene Name: ubiquinol-cytochrome c reductase, complex III subunit X
  ENSP ID: ENSP00000482098
MAAATLTSKLYSLLFRRPPPSPSPSSWASCSSSAPSIKARTLSTTTSTRGSCGNTSSTSMRTSSSLEAPIQARRTRSTQQLFAQSWSLSLKMMLKVLFMDHHSLLARNGFTYKTDSLPSAVFEVCLVSMLRK

SEQ ID NO: 94490 - protein, 56 aa, Homo sapiens; identical to SEQ ID NO: 975
  Payload ID: 18846
  Gene Name: ubiquinol-cytochrome c reductase, complex III subunit XI
  Uniprot ID: O14957
  ENSP ID: ENSP00000466420

SEQ ID NO: 94491 - protein, 56 aa, Homo sapiens; identical to SEQ ID NO: 975
  Payload ID: 18846
  Gene Name: ubiquinol-cytochrome c reductase, complex III subunit XI
  Uniprot ID: O14957
  ENSP ID: ENSP00000467262

SEQ ID NO: 94492 - protein, 56 aa, Homo sapiens; identical to SEQ ID NO: 975
  Payload ID: 18846
  Gene Name: ubiquinol-cytochrome c reductase, complex III subunit XI
  Uniprot ID: O14957
  ENSP ID: ENSP00000467555

SEQ ID NO: 94493 - protein, 274 aa, Homo sapiens
  Payload ID: 18847
  Gene Name: ubiquinol-cytochrome c reductase, Rieske iron-sulfur polypeptide 1
  Uniprot ID: P47985
  ENSP ID: ENSP00000306397
MLSVASRSGPFAPVLSATSRGVAGALRPLVQATVPATPEQPVLDLKRPFLSRESLSGQAVRRPLVASVGLNVPASVCYSHTDIKVPDFSEYRRLEVLDSTKSSRESSEARKGFSYLVTGVTTVGVAYAAKNAVTQFVSSMSASADVLALAKIEIKLSDIPEGKNMAFKWRGKPLFVRHRTQKEIEQEAAVELSQLRDPQHDLDRVKKPEWVILIGVCTHLGCVPIANAGDFGGYYCPCHGSHYDASGRIRLGPAPLNLEVPTYEFTSDDMVIVG

SEQ ID NO: 94494 - protein, 128 aa, Homo sapiens
  Payload ID: 18848
  Gene Name: ubiquitin A-52 residue ribosomal protein fusion product 1
  Uniprot ID: P62987
  ENSP ID: ENSP00000388107
MQIFVKTLTGKTITLEVEPSDTIENVKAKIQDKEGIPPDQQRLIFAGKQLEDGRTLSDYNIQKESTLHLVLRLRGGIIEPSLRQLAQKYNCDKMICRKCYARLHPRAVNCRKKKCGHTNNLRPKKKVK

SEQ ID NO: 94495 - protein, 128 aa, Homo sapiens; identical to SEQ ID NO: 94494
  Payload ID: 18848
  Gene Name: ubiquitin A-52 residue ribosomal protein fusion product 1
  Uniprot ID: P62987
  ENSP ID: ENSP00000396910

SEQ ID NO: 94496 - protein, 128 aa, Homo sapiens; identical to SEQ ID NO: 94494
  Payload ID: 18848
  Gene Name: ubiquitin A-52 residue ribosomal protein fusion product 1
  Uniprot ID: P62987
  ENSP ID: ENSP00000470419

SEQ ID NO: 94497 - protein, 128 aa, Homo sapiens; identical to SEQ ID NO: 94494
  Payload ID: 18848
  Gene Name: ubiquitin A-52 residue ribosomal protein fusion product 1
  Uniprot ID: P62987
  ENSP ID: ENSP00000470507

SEQ ID NO: 94498 - protein, 128 aa, Homo sapiens; identical to SEQ ID NO: 94494
  Payload ID: 18848
  Gene Name: ubiquitin A-52 residue ribosomal protein fusion product 1
  Uniprot ID: P62987
  ENSP ID: ENSP00000471062

SEQ ID NO: 94499 - protein, 128 aa, Homo sapiens; identical to SEQ ID NO: 94494
  Payload ID: 18848
  Gene Name: ubiquitin A-52 residue ribosomal protein fusion product 1
  Uniprot ID: P62987
  ENSP ID: ENSP00000471464

SEQ ID NO: 94500 - protein, 128 aa, Homo sapiens; identical to SEQ ID NO: 94494
  Payload ID: 18848
  Gene Name: ubiquitin A-52 residue ribosomal protein fusion product 1
  Uniprot ID: P62987
  ENSP ID: ENSP00000471622

SEQ ID NO: 94501 - protein, 114 aa, Homo sapiens
  Payload ID: 18848
  Gene Name: ubiquitin A-52 residue ribosomal protein fusion product 1
  ENSP ID: ENSP00000471991
VKAKIQDKEGIPPDQQRLIFAGKQLEDGRTLSDYNIQKESTLHLVLRLRGGIIEPSLRQLAQKYNCDKMICRKSVVTPTTCVPRRRSNKVVLSLKGSLLPRPRGPGASIKCPFH

SEQ ID NO: 94502 - protein, 63 aa, Homo sapiens
  Payload ID: 18848
  Gene Name: ubiquitin A-52 residue ribosomal protein fusion product 1
  ENSP ID: ENSP00000472137
MQIFVKTLTGKTITLEVEPSDTIENVKAKIQDKEGIPPDQQRLIFAGKQLEDGRTLSDYNIQK

SEQ ID NO: 94503 - protein, 128 aa, Homo sapiens; identical to SEQ ID NO: 94494
  Payload ID: 18848
  Gene Name: ubiquitin A-52 residue ribosomal protein fusion product 1
  Uniprot ID: P62987
  ENSP ID: ENSP00000472264

SEQ ID NO: 94504 - protein, 128 aa, Homo sapiens; identical to SEQ ID NO: 94494
  Payload ID: 18848
  Gene Name: ubiquitin A-52 residue ribosomal protein fusion product 1
  Uniprot ID: P62987
  ENSP ID: ENSP00000472545

SEQ ID NO: 94505 - protein, 138 aa, Homo sapiens
  Payload ID: 18848
  Gene Name: ubiquitin A-52 residue ribosomal protein fusion product 1
  ENSP ID: ENSP00000472768
PSDTIENVKAKIQDKEGIPPDQQRLIFAGKQLEDGRTLSDYNIQKESTLHLVLRLRGGIIEPSLRQLAQKYNCDKMICRKYVCSDAWGAVGAAGVGVCPHPPLLSLCRCYARLHPRAVNCRKKKCGHTNNLRPKKKVK

SEQ ID NO: 94506 - protein, 128 aa, Homo sapiens; identical to SEQ ID NO: 94494
  Payload ID: 18848
  Gene Name: ubiquitin A-52 residue ribosomal protein fusion product 1
  Uniprot ID: P62987
  ENSP ID: ENSP00000473048

SEQ ID NO: 94507 - protein, 623 aa, Homo sapiens
  Payload ID: 18849
  Gene Name: ubiquitin associated and SH3 domain containing A
  Uniprot ID: P57075
  ENSP ID: ENSP00000291535
MAAGETQLYAKVSNKLKSRSSPSLLEPLLAMGFPVHTALKALAATGRKTAEEALAWLHDHCNDPSLDDPIPQEYALFLCPTGPLLEKLQEFWRESKRQCAKNRAHEVFPHVTLCDFFTCEDQKVECLYEALKRAGDRLLGSFPTAVPLALHSSISYLGFFVSGSPADVIREFAMTFATEASLLADCSVKPCTKQLHLTLAHKFYPHHQRTLEQLARAIPLGHSCQWTAALYSRDMRFVHYQTLRALFQYKPQNVDELTLSPGDYIFVDPTQQDEASEGWVIGISQRTGCRGFLPENYTDRASESDTWVKHRMYTFSLATDLNSRKDGEASSRCSGEFLPQTARSLSSLQALQATVARKSVLVVRHGERVDQIFGKAWLQQCSTPDGKYYRPDLNFPCSLPRRSRGIKDFENDPPLSSCGIFQSRIAGDALLDSGIRISSVFASPALRCVQTAKLILEELKLEKKIKIRVEPGIFEWTKWEAGKTTPTLMSLEELKEANFNIDTDYRPAFPLSALMPAESYQEYMDRCTASMVQIVNTCPQDTGVILIVSHGSTLDSCTRPLLGLPPRECGDFAQLVRKIPSLGMCFCEENKEEGKWELVNPPVKTLTHGANAAFNWRNWISGN

SEQ ID NO: 94508 - protein, 661 aa, Homo sapiens
  Payload ID: 18849
  Gene Name: ubiquitin associated and SH3 domain containing A
  Uniprot ID: P57075
  ENSP ID: ENSP00000317327
MAAGETQLYAKVSNKLKSRSSPSLLEPLLAMGFPVHTALKALAATGRKTAEEALAWLHDHCNDPSLDDPIPQEYALFLCPTGPLLEKLQEFWRESKRQCAKNRAHEVFPHVTLCDFFTCEDQKVECLYEALKRAGDRLLGSFPTAVPLALHSSISYLGFFVSGSPADVIREFAMTFATEASLLAGTSVSRFWIFSQVPGHGPNLRLSNLTRASFVSHYILQKYCSVKPCTKQLHLTLAHKFYPHHQRTLEQLARAIPLGHSCQWTAALYSRDMRFVHYQTLRALFQYKPQNVDELTLSPGDYIFVDPTQQDEASEGWVIGISQRTGCRGFLPENYTDRASESDTWVKHRMYTFSLATDLNSRKDGEASSRCSGEFLPQTARSLSSLQALQATVARKSVLVVRHGERVDQIFGKAWLQQCSTPDGKYYRPDLNFPCSLPRRSRGIKDFENDPPLSSCGIFQSRIAGDALLDSGIRISSVFASPALRCVQTAKLILEELKLEKKIKIRVEPGIFEWTKWEAGKTTPTLMSLEELKEANFNIDTDYRPAFPLSALMPAESYQEYMDRCTASMVQIVNTCPQDTGVILIVSHGSTLDSCTRPLLGLPPRECGDFAQLVRKIPSLGMCFCEENKEEGKWELVNPPVKTLTHGANAAFNWRNWISGN

SEQ ID NO: 94509 - protein, 526 aa, Homo sapiens
  Payload ID: 18849
  Gene Name: ubiquitin associated and SH3 domain containing A
  Uniprot ID: P57075
  ENSP ID: ENSP00000381408
MAAGETQLYAKVSNKLKSRSSPSLLEPLLAMGFPVHTALKALAATGRKTAEEALAWLHDHCNDPSLDDPIPQEYALFLCPTGPLLEKLQEFWRESKRQCAKNRAHEVFPHVTLCDFFTCEDQKVECLYEALKRAGDRLLGSFPTAVPLALHSSISYLGFFVSGSPADVIREFAMTFATEASLLADCSVKPCTKQLHLTLAHKFYPHHQRTLEQLARAIPLGHSCQWTAALYSRDMRFVHYQTLRALFQYKPQNVDELTLSPGDYIFVDPTQQDEASEGWVIGISQRTGCRGFLPENYTDRASESDTWVKHRMYTFSLATDLNSRKDGEASSRCSGEFLPQTARSLSSLQALQATVARKSVLVVRHGERVDQIFGKAWLQQCSTPDGKYYRPDLNFPCSLPRRSRGIKDFENDPPLSSCGIFQSRIAGDALLDSGIRISSVFASPALRCVQTAKLILEELKLEKKIKIRVEPGIFEWTKWEAGKTTPTLMSLEELKEANFNIDTDYRSLPWACASVKKIKRKENGSW

SEQ ID NO: 94510 - protein, 169 aa, Homo sapiens
  Payload ID: 18849
  Gene Name: ubiquitin associated and SH3 domain containing A
  ENSP ID: ENSP00000489058
MAAGETQLYAKVSNKLKSRSSPSLLEPLLAMGFPVHTALKALAATGRKTAEEALAWLHDHCNDPSLDDPIPQEYALFLCPTGPLLEKLQEFWRESKRQCAKNRAHEVFPHVTLCDFFTCEDQKVECLYEALKRAGDRLLGSFPTAVPLALHSSISYLGFFVSGSPADVI

SEQ ID NO: 94511 - protein, 451 aa, Homo sapiens
  Payload ID: 18849
  Gene Name: ubiquitin associated and SH3 domain containing A
  ENSP ID: ENSP00000489235
MAAGETQLYAKVSNKLKSRSSPSLLEPLLAMGFPVHTALKALAATGRKTAEEALAWLHDHCNDPSLDDPIPQEYALFLCPTGPLLEKLQEFWRESKRQCAKNRAHEVFPHVTLCDFFTCEDQKVECLYEALKRAGDRLLGSFPTAVPLALHSSISYLGFFVSGSPADVIREFAMTFATEASLLADCSVKPCTKQLHLTLAHKFYPHHQRTLEQLARAIPLGHSCQWTAALYSRDMRFVHYQTLRALFQYKPQNVDELTLSPGDYIFVDPTQQDEASEGWVIGISQRTGCRGFLPENYTDRASESDTWVKHRMYTFSLATDLNSRKDGEASSRCSGEFLPQTARSLSSLQALQATVARKSVLVVRHGERVDQIFGKAWLQQCSTPDGKYYRPDLNFPCSLPRRSRGIKDFENDPPLSSCGIFQSRIAGMFEDCLVGKVTITATLIMASRHPA

SEQ ID NO: 94512 - protein, 55 aa, Homo sapiens
  Payload ID: 18849
  Gene Name: ubiquitin associated and SH3 domain containing A
  ENSP ID: ENSP00000489263
MAAGETQLYAKVSNKLKSRSSPSLLEPLLAMGFPVHTALKALAATGRKTAEEALA

SEQ ID NO: 94513 - protein, 38 aa, Homo sapiens
  Payload ID: 18849
  Gene Name: ubiquitin associated and SH3 domain containing A
  ENSP ID: ENSP00000489323
MAAGETQLYAKVSNKLKSRSSPSLLEPLLAMGFPVHTA

SEQ ID NO: 94514 - protein, 521 aa, Homo sapiens
  Payload ID: 18849
  Gene Name: ubiquitin associated and SH3 domain containing A
  ENSP ID: ENSP00000489463
MAAGETQLYAKVSNKLKSRSSPSLLEPLLAMGFPVHTALKALAATGRKTAEEALAWLHDHCNDPSLDDPIPQEYALFLCPTGPLLEKLQEFWRESKRQCAKNRAHEVFPHVTLCDFFTCEDQKVECLYEALKRAGDRLLGSFPTAVPLALHSSISYLGFFVSGSPADVIREFAMTFATEASLLADCSVKPCTKQLHLTLAHKFYPHHQRTLEQLARAIPLGHSCQWTAALYSRDMRFVHYQTLRALFQYKPQNVDELTLSPGDYIFVDPTQQDEASEGWVIGISQRTGCRGFLPENYTDRASESDTWVKHRMYTFSLATDLNSRKDGEASSRCSGEFLPQTARSLSSLQALQATVARKSVLVVRHGERVDQIFGKAWLQQCSTPDGKYYRPDLNFPCSLPRRSRGIKDFENDPPLSSCGIFQSRIAGDALLDSGIRISSVFASPALRCVQTAKLILEELKLEKKIKIRVEPGIFEWTKWEAGKTTPTLMSLEELKEANFNIDTDYSFQHKTGACLLTMSLP

SEQ ID NO: 94515 - protein, 649 aa, Homo sapiens
  Payload ID: 18850
  Gene Name: ubiquitin associated and SH3 domain containing B
  Uniprot ID: Q8TF42
  ENSP ID: ENSP00000284273
MAQYGHPSPLGMAAREELYSKVTPRRNRQQRPGTIKHGSALDVLLSMGFPRARAQKALASTGGRSVQAACDWLFSHVGDPFLDDPLPREYVLYLRPTGPLAQKLSDFWQQSKQICGKNKAHNIFPHITLCQFFMCEDSKVDALGEALQTTVSRWKCKFSAPLPLELYTSSNFIGLFVKEDSAEVLKKFAADFAAEAASKTEVHVEPHKKQLHVTLAYHFQASHLPTLEKLAQNIDVKLGCDWVATIFSRDIRFANHETLQVIYPYTPQNDDELELVPGDFIFMSPMEQTSTSEGWIYGTSLTTGCSGLLPENYITKADECSTWIFHGSYSILNTSSSNSLTFGDGVLERRPYEDQGLGETTPLTIICQPMQPLRVNSQPGPQKRCLFVCRHGERMDVVFGKYWLSQCFDAKGRYIRTNLNMPHSLPQRSGGFRDYEKDAPITVFGCMQARLVGEALLESNTIIDHVYCSPSLRCVQTAHNILKGLQQENHLKIRVEPGLFEWTKWVAGSTLPAWIPPSELAAANLSVDTTYRPHIPISKLVVSESYDTYISRSFQVTKEIISECKSKGNNILIVAHASSLEACTCQLQGLSPQNSKDFVQMVRKIPYLGFCSCEELGETGIWQLTDPPILPLTHGPTGGFNWRETLLQE

SEQ ID NO: 94516 - protein, 502 aa, Homo sapiens
  Payload ID: 18851
  Gene Name: ubiquitin associated protein 1
  Uniprot ID: Q9NZ09
  ENSP ID: ENSP00000297661
MASKKLGADFHGTFSYLDDVPFKTGDKFKTPAKVGLPIGFSLPDCLQVVREVQYDFSLEKKTIEWAEEIKKIEEAEREAECKIAEAEAKVNSKSGPEGDSKMSFSKTHSTATMPPPINPILASLQHNSILTPTRVSSSATKQKVLSPPHIKADFNLADFECEEDPFDNLELKTIDEKEELRNILVGTTGPIMAQLLDNNLPRGGSGSVLQDEEVLASLERATLDFKPLHKPNGFITLPQLGNCEKMSLSSKVSLPPIPAVSNIKSLSFPKLDSDDSNQKTAKLASTFHSTSCLRNGTFQNSLKPSTQSSASELNGHHTLGLSALNLDSGTEMPALTSSQMPSLSVLSVCTEESSPPNTGPTVTPPNFSVSQVPNMPSCPQAYSELQMLSPSERQCVETVVNMGYSYECVLRAMKKKGENIEQILDYLFAHGQLCEKGFDPLLVEEALEMHQCSEEKMMEFLQLMSKFKEMGFELKDIKEVLLLHNNDQDNALEDLMARAGAS

SEQ ID NO: 94517 - protein, 502 aa, Homo sapiens; identical to SEQ ID NO: 94516
  Payload ID: 18851
  Gene Name: ubiquitin associated protein 1
  Uniprot ID: Q9NZ09
  ENSP ID: ENSP00000352541

SEQ ID NO: 94518 - protein, 441 aa, Homo sapiens
  Payload ID: 18851
  Gene Name: ubiquitin associated protein 1
  Uniprot ID: Q9NZ09
  ENSP ID: ENSP00000368484
MASKKLGADFHGTFSYLDDVPFKTGDKFKTPAKVGLPIGFSLPDCLQVVREVQYDFSLEKKTIEWAEEIKKIEEAEREAECKIAEAEAKVNSKSGPEGDSKMSFSKTHSTATMPPPINPILASLQHNSILTPTRVSSSATKQKVLSPPHIKADFNLADFECEEDPFDNLELKTIDEKEELRNILVGTTGPIMAQLLDNNLPRGGSGSVLQDEEVLASLERATLDFKPLHKPNGFITLPQLGNCEKMSLSSKVSLPPIPAVSNIKSLSFPKLDSDDSNQKTAKLASTFHSTSCLRNGTFQNSLKPSTQSSASELNGHHTLGLSALNLDSGTEMPALTSSQMPSLSVLSVCTEESSPPNTGPTILDYLFAHGQLCEKGFDPLLVEEALEMHQCSEEKMMEFLQLMSKFKEMGFELKDIKEVLLLHNNDQDNALEDLMARAGAS

SEQ ID NO: 94519 - protein, 566 aa, Homo sapiens
  Payload ID: 18851
  Gene Name: ubiquitin associated protein 1
  Uniprot ID: Q9NZ09
  ENSP ID: ENSP00000486574
MSGAVRGRRREVGLQHGGCGTGGGYGDGLARSGQSWRWWRSLSLGAVGSSAGTEPGRPAGASTFRLLRRRQQRHSGTFSYLDDVPFKTGDKFKTPAKVGLPIGFSLPDCLQVVREVQYDFSLEKKTIEWAEEIKKIEEAEREAECKIAEAEAKVNSKSGPEGDSKMSFSKTHSTATMPPPINPILASLQHNSILTPTRVSSSATKQKVLSPPHIKADFNLADFECEEDPFDNLELKTIDEKEELRNILVGTTGPIMAQLLDNNLPRGGSGSVLQDEEVLASLERATLDFKPLHKPNGFITLPQLGNCEKMSLSSKVSLPPIPAVSNIKSLSFPKLDSDDSNQKTAKLASTFHSTSCLRNGTFQNSLKPSTQSSASELNGHHTLGLSALNLDSGTEMPALTSSQMPSLSVLSVCTEESSPPNTGPTVTPPNFSVSQVPNMPSCPQAYSELQMLSPSERQCVETVVNMGYSYECVLRAMKKKGENIEQILDYLFAHGQLCEKGFDPLLVEEALEMHQCSEEKMMEFLQLMSKFKEMGFELKDIKEVLLLHNNDQDNALEDLMARAGAS

SEQ ID NO: 94520 - protein, 528 aa, Homo sapiens
  Payload ID: 18851
  Gene Name: ubiquitin associated protein 1
  ENSP ID: ENSP00000487222
EVGLQHGGCGTGGGYGDGLARSGQSWRWWRSLSLGAVGSSAGTEPGRPAGASTFRLLRRRQQRHSGSKWLLRSWVQIFMYDFSLEKKTIEWAEEIKKIEEAEREAECKIAEAEAKVNSKSGPEGDSKMSFSKTHSTATMPPPINPILASLQHNSILTPTRVSSSATKQKVLSPPHIKADFNLADFECEEDPFDNLELKTIDEKEELRNILVGTTGPIMAQLLDNNLPRGGSGSVLQDEEVLASLERATLDFKPLHKPNGFITLPQLGNCEKMSLSSKVSLPPIPAVSNIKSLSFPKLDSDDSNQKTAKLASTFHSTSCLRNGTFQNSLKPSTQSSASELNGHHTLGLSALNLDSGTEMPALTSSQMPSLSVLSVCTEESSPPNTGPTVTPPNFSVSQVPNMPSCPQAYSELQMLSPSERQCVETVVNMGYSYECVLRAMKKKGENIEQILDYLFAHGQLCEKGFDPLLVEEALEMHQCSEEKMMEFLQLMSKFKEMGFELKDIKEVLLLHNNDQDNALEDLMARAGAS

SEQ ID NO: 94521 - protein, 381 aa, Homo sapiens
  Payload ID: 18852
  Gene Name: ubiquitin associated protein 1-like
  Uniprot ID: F5GYI3
  ENSP ID: ENSP00000440243
MNALDGVPFKLPKGFVIGTEPLPGPELSVPACGEVLLGSMHDFSLERTALFWVEAAGQGPSPYQCGDPGTASAPPAWLLLVSPEHGLAPAPTTIRDPEAGHQERPEEEGEDEAEASSGSEEEPAPSSLQPGSPASPGPGRRLCSLDVLRGVRLELAGARRRLSEGKLVSRPRALLHGLRGHRALSLCPSPAQSPRSASPPGPAPQHPAAPASPPRPSTAGAIPPLRSHKPTVASLSPYTCLPPLGGAPQPLNPHKSHPDTAADLLSALSQEEQDLIGPVVALGYPLRRAIIALQKTGRQSLSQFLSYLSACDRLLRQGYEEGLVDEAMEMFQFSESQAGEFLRLWEQFSDMGFQQDRIKEVLLVHGNRREQALEELVACAQ

SEQ ID NO: 94522 - protein, 117 aa, Homo sapiens
  Payload ID: 18852
  Gene Name: ubiquitin associated protein 1-like
  ENSP ID: ENSP00000452794
MNALDGVPFKLPKGFVIGTEPLPGPELSVPACGEVLLGSMHDFSLERTALFWVEAAGQGPSPYQCGDPGTASAPPAWLLLLRPLECLSALSAAPAAPLTLPPSLPASGPVSQLPQCL

SEQ ID NO: 94523 - protein, 381 aa, Homo sapiens; identical to SEQ ID NO: 94521
  Payload ID: 18852
  Gene Name: ubiquitin associated protein 1-like
  Uniprot ID: F5GYI3
  ENSP ID: ENSP00000454012

SEQ ID NO: 94524 - protein, 1119 aa, Homo sapiens
  Payload ID: 18853
  Gene Name: ubiquitin associated protein 2
  Uniprot ID: Q5T6F2
  ENSP ID: ENSP00000354039
MMTSVSSDHCRGAREKPQISAAQSTQPQKQVVQATAEQMRLAQVIFDKNDSDFEAKVKQLMEVTGKNQDECIVALHDCNGDVNKAINILLEGNSDTTSWETVGCKKKNFAKENSENKENREKKSEKESSRGRGNNNRKGRGGNRGREFRGEENGIDCNQVDKPSDRGKRARGRGFGRGRGRGAGRFSTQGMGTFNPADYSDSTSTDVCGTKLVVWEAAQNGADEGTELASNTHNIAQDLSNKSSYGLKGAWKNSVEEWTTEDWTEDLSETKVFTASSAPAENHILPGQSIDLVALLQKPVPHSQASEANSFETSQQQGFGQALVFTNSQHNNQMAPGTGSSTAVNSCSPQSLSSVLGSGFGELAPPKMANITSSQILDQLKAPSLGQFTTTPSTQQNSTSHPTTTTSWDLKPPTSQSSVLSHLDFKSQPEPSPVLSQLSQRQQHQSQAVTVPPPGLESFPSQAKLRESTPGDSPSTVNKLLQLPSTTIENISVSVHQPQPKHIKLAKRRIPPASKIPASAVEMPGSADVTGLNVQFGALEFGSEPSLSEFGSAPSSENSNQIPISLYSKSLSEPLNTSLSMTSAVQNSTYTTSVITSCSLTSSSLNSASPVAMSSSYDQSSVHNRIPYQSPVSSSESAPGTIMNGHGGGRSQQTLDTPKTTGPPSALPSVSSLPSTTSCTALLPSTSQHTGDLTSSPLSQLSSSLSSHQSSLSAHAALSSSTSHTHASVESASSHQSSATFSTAATSVSSSASSGASLSSSMNTANSLCLGGTPASASSSSSRAAPLVTSGKAPPNLPQGVPPLLHNQYLVGPGGLLPAYPIYGYDELQMLQSRLPVDYYGIPFAAPTALASRDGSLANNPYPGDVTKFGRGDSASPAPATTPAQPQQSQSQTHHTAQQPFVNPALPPGYSYTGLPYYTGMPSAFQYGPTMFVPPASAKQHGVNLSTPTPPFQQASGYGQHGYSTGYDDLTQGTAAGDYSKGGYAGSSQAPNKSAGSGPGKGVSVSSSTTGLPDMTGSVYNKTQTFDKQGFHAGTPPPFSLPSVLGSTGPLASGAAPGYAPPPFLHILPAHQQPHSQLLHHHLPQDAQSGSGQRSQPSSLQPKSQASKPAYGNSPYWTN

SEQ ID NO: 94525 - protein, 1119 aa, Homo sapiens; identical to SEQ ID NO: 94524
  Payload ID: 18853
  Gene Name: ubiquitin associated protein 2
  Uniprot ID: Q5T6F2
  ENSP ID: ENSP00000368540

SEQ ID NO: 94526 - protein, 358 aa, Homo sapiens
  Payload ID: 18853
  Gene Name: ubiquitin associated protein 2
  Uniprot ID: Q5T6F2
  ENSP ID: ENSP00000368541
MNTANSLCLGGTPASASSSSSRAAPLVTSGKAPPNLPQGVPPLLHNQYLVGPGGLLPAYPIYGYDELQMLQSRLPVDYYGIPFAAPTALASRDGSLANNPYPGDVTKFGRGDSASPAPATTPAQPQQSQSQTHHTAQQPFVNPALPPGYSYTGLPYYTGMPSAFQYGPTMFVPPASAKQHGVNLSTPTPPFQQASGYGQHGYSTGYDDLTQGTAAGDYSKGGYAGSSQAPNKSAGSGPGKGVSVSSSTTGLPDMTGSVYNKTQTFDKQGFHAGTPPPFSLPSVLGSTGPLASGAAPGYAPPPFLHILPAHQQPHSQLLHHHLPQDAQSGSGQRSQPSSLQPKSQASKPAYGNSPYWTN

SEQ ID NO: 94527 - protein, 278 aa, Homo sapiens
  Payload ID: 18853
  Gene Name: ubiquitin associated protein 2
  ENSP ID: ENSP00000412954
  MOD_RES (1)..(1): Any amino acid
XEKESSRGRGNNNRKGRGGNRGREFRGEENGIDCNQVDKPSDRGKRARGRGFGRGRGRGAGRFSTQGMGTFNPADYSDSTSTDVCGTKLVVWEAAQNGADEGTGAWKNSVEEWTTEDWTEDLSETKVFTASSAPAENHILPGQSIDLVALLQKPVPHSQASEANSFETSQQQGFGQALVFTNSQHNNQMAPGTGSSTAVNSCSPQSLSSVLGSGFGELAPPKMANITSSQILDQLKAPSLGQFTTTPSTQQNSTSHPTTTTSWDLKPPTSQSSVLSHL

SEQ ID NO: 94528 - protein, 412 aa, Homo sapiens
  Payload ID: 18853
  Gene Name: ubiquitin associated protein 2
  ENSP ID: ENSP00000414800
MMTSVSSDHCRGAREKPQISAAQSTQPQKQVVQATAEQMRLAQVIFDKNDSDFEAKVKQLMEVTGKNQDECIVALHDCNGDVNKAINILLEGNSDTTSWETVGCKKKNFAKENSENKENREKKSEKESSRGRGNNNRKGRGGNRGREFRGEENGIDCNQVDKPSDRGKRARGRELASNTHNIAQDLSNKSSYGLKGAWKNSVEEWTTEDWTEDLSETKVFTASSAPAENHILPGQSIDLVALLQKPVPHSQASEANSFETSQQQGFGQALVFTNSQHNNQMAPGTGSSTAVNSCSPQSLSSVLGSGFGELAPPKMANITSSQILDQLKAPSLGQFTTTPSTQQNSTSHPTTTTSWDLKPPTSQSSVLSHLDFKSQPEPSPVLSQLSQRQQHQSQAVTVPPPGLESFPSQAKL

SEQ ID NO: 94529 - protein, 117 aa, Homo sapiens
  Payload ID: 18853
  Gene Name: ubiquitin associated protein 2
  ENSP ID: ENSP00000433983
HNRIPYQSPVSSSESAPGTIMNGHGGGRSQQTLDTPKTTGPPSALPSVSSLPSTTSCTALLPSTSQHTGDLTSSPLSQLSSMPVWRAPLPTSPQPPSPRQRPPSQVPHPQAPACPVA

SEQ ID NO: 94530 - protein, 581 aa, Homo sapiens
  Payload ID: 18853
  Gene Name: ubiquitin associated protein 2
  ENSP ID: ENSP00000439329
MMTSVSSDHCRGAREKPQISAAQSTQPQKQVVQATAEQMRLAQVIFDKNDSDFEAKVKQLMEVTGKNQDECIVALHDCNGDVNKAINILLEGNSDTTSWETVGCKKKNFAKENSENKENREKKKHTGDLTSSPLSQLSSSLSSHQSSLSAHAALSSSTSHTHASVESASSHQSSATFSTAATSVSSSASSGASLSSSMNTANSLCLGGTPASASSSSSRAAPLVTSGKAPPNLPQGVPPLLHNQYLVGPGGLLPAYPIYGYDELQMLQSRLPVDYYGIPFAAPTALASRDGSLANNPYPGDVTKFGRGDSASPAPATTSSATAEPITDPPHSPAALRESCTATWSYTGLPYYTGMPSAFQYGPTMFVPPASAKQHGVNLSTPTPPFQQASGYGQHGYSTGYDDLTQGTAAGDYSKGGYAGSSQAPNKSAGSGPGKGVSVSSSTTGLPDMTGSVYNKTQTFDKQGFHAGTPPPFSLPSVLGSTGPLASGAAPGYAPPPFLHILPAHQQPHSQLLHHHLPQDAQSGSGQRSPAPCSPSLKPPNLPTLSILDKLNPEERGGLGQGLSWAGENTRARIWEPSALS

SEQ ID NO: 94531 - protein, 176 aa, Homo sapiens
  Payload ID: 18853
  Gene Name: ubiquitin associated protein 2
  ENSP ID: ENSP00000486626
MRLAQVIFDKNDSDFEAKVKQLMEVTGKNQDECIVALHDCNGDVNKAINILLEGNSDTTSWETVGCKKKNFAKENSENKENREKKSEKESSRGRGNNNRKGRGGNRGREFRGEENGIDCNQVDKPSDRGKRARGRELASNTHNIAQDLSNKSSYGLKGAWKNSVEEWTTEDWTEDH

SEQ ID NO: 94532 - protein, 1079 aa, Homo sapiens
  Payload ID: 18854
  Gene Name: ubiquitin associated protein 2-like
  ENSP ID: ENSP00000271877
MMTSVGTNRARGNWEQPQNQNQTQHKQRPQATAEQIRLAQMISDHNDADFEEKVKQLIDITGKNQDECVIALHDCNGDVNRAINVLLEGNPDTHSWEMVGKKKGVSGQKDGGQTESNEEGKENRDRDRDYSRRRGGPPRRGRGASRGRECMHGALSKPAVVRGQENGLDGTKSGGPSGRGTERGRRGRGRGRGGSGRRGGRFSAQGMGTFNPADYAEPANTDDNYGNSSGNTWNNTGHFEPDDGTSAWRTATEEWGTEDWNEDLSETKIFTASNVSSVPLPAENVTITAGQRIDLAVLLGKTPSTMENDSSNLDPSQAPSLAQPLVFSNSKQTAISQPASGNTFSHHSMVSMLGKGFGDVGEAKGGSTTGSQFLEQFKTAQALAQLAAQHSQSGSTTTSSWDMGSTTQSPSLVQYDLKNPSDSAVHSPFTKRQAFTPSSTMMEVFLQEKSPAVATSTAAPPPPSSPLPSKSTSAPQMSPGSSDNQSSSPQPAQQKLKQQKKKASLTSKIPALAVEMPGSADISGLNLQFGALQFGSEPVLSDYESTPTTSASSSQAPSSLYTSTASESSSTISSNQSQESGYQSGPIQSTTYTSQNNAQGPLYEQRSTQTRRYPSSISSSPQKDLTQAKNGFSSVQATQLQTTQSVEGATGSAVKSDSPSTSSIPPLNETVSAASLLTTTNQHSSSLGGLSHSEEIPNTTTTQHSSTLSTQQNTLSSSTSSGRTSTSTLLHTSVESEANLHSSSSTFSTTSSTVSAPPPVVSVSSSLNSGSSLGLSLGSNSTVTASTRSSVATTSGKAPPNLPPGVPPLLPNPYIMAPGLLHAYPPQVYGYDDLQMLQTRFPLDYYSIPFPTPTTPLTGRDGSLASNPYSGDLTKFGRGDASSPAPATTLAQPQQNQTQTHHTTQQTFLNPALPPGYSYTSLPYYTGVPGLPSTFQYGPAVFPVAPTSSKQHGVNVSVNASATPFQQPSGYGSHGYNTGVSVTSSNTGVPDISGSVYSKTQQSFEKQGFHSGTPAASFNLPSALGSGGPINPATAAAYPPAPFMHILTPHQQPHSQILHHHLQQDGQDILNFVDDQLGE

SEQ ID NO: 94533 - protein, 983 aa, Homo sapiens
  Payload ID: 18854
  Gene Name: ubiquitin associated protein 2-like
  Uniprot ID: Q14157
  ENSP ID: ENSP00000345308
MMTSVGTNRARGNWEQPQNQNQTQHKQRPQATAEQIRLAQMISDHNDADFEEKVKQLIDITGKNQDECVIALHDCNGDVNRAINVLLEGNPDTHSWEMVGKKKGVSGQKDGGQTESNEEGKENRDRDRDYSRRRGGPPRRGRGASRGREFRGQENGLDGTKSGGPSGRGTERGRRGRGRGRGGSGRRGGRFSAQGMGTFNPADYAEPANTDDNYGNSSGNTWNNTGHFEPDDGTSAWRTATEEWGTEDWNEDLSETKIFTASNVSSVPLPAENVTITAGQRIDLAVLLGKTPSTMENDSSNLDPSQAPSLAQPLVFSNSKQTAISQPASGNTFSHHSMVSMLGKGFGDVGEAKGGSTTGSQFLEQFKTAQALAQLAAQHSQSGSTTTSSWDMGSTTQSPSLVQYDLKNPSDSAVHSPFTKRQAFTPSSTMMEVFLQEKSPAVATSTAAPPPPSSPLPSKSTSAPQMSPGSSDNQSSSPQPAQQKLKQQKKKASLTSKIPALAVEMPGSADISGLNLQFGALQFGSEPVLSDYESTPTTSASSSQAPSSLYTSTASESSSTISSNQSQESGYQSGPIQSTTYTSQNNAQGPLYEQRSTQTRRYPSSISSSPQKDLTQAKNGFSSVQATQLQTTQSVEGATGSAVKSDSPSTSSIPPLNETVSAASLLTTTNQHSSSLGGLSHSEEIPNTTTTQHSSTLSTQQNTLSSSTSSGRTSTSTLLHTSVESEANLHSSSSTFSTTSSTVSAPPPVVSVSSSLNSGSSLGLSLGSNSTVTASTRSSVATTSGKAPPNLPPGVPPLLPNPYIMAPGLLHAYPPQVYGYDDLQMLQTRFPLDYYSIPFPTPTTPLTGRDGSLASNPYSGDLTKFGRGDASSPAPATTLAQPQQNQTQTHHTTQQTFLNPALPPGYSYTSLPYYTGVPGLPSTFQYGPAVFPVAPTSSKQHGVNVSVNASATPFQQPSGYGSHGYNTGRKYPPPYKHFWTAES

SEQ ID NO: 94534 - protein, 1087 aa, Homo sapiens
  Payload ID: 18854
  Gene Name: ubiquitin associated protein 2-like
  Uniprot ID: Q14157
  ENSP ID: ENSP00000355343
MMTSVGTNRARGNWEQPQNQNQTQHKQRPQATAEQIRLAQMISDHNDADFEEKVKQLIDITGKNQDECVIALHDCNGDVNRAINVLLEGNPDTHSWEMVGKKKGVSGQKDGGQTESNEEGKENRDRDRDYSRRRGGPPRRGRGASRGREFRGQENGLDGTKSGGPSGRGTERGRRGRGRGRGGSGRRGGRFSAQGMGTFNPADYAEPANTDDNYGNSSGNTWNNTGHFEPDDGTSAWRTATEEWGTEDWNEDLSETKIFTASNVSSVPLPAENVTITAGQRIDLAVLLGKTPSTMENDSSNLDPSQAPSLAQPLVFSNSKQTAISQPASGNTFSHHSMVSMLGKGFGDVGEAKGGSTTGSQFLEQFKTAQALAQLAAQHSQSGSTTTSSWDMGSTTQSPSLVQYDLKNPSDSAVHSPFTKRQAFTPSSTMMEVFLQEKSPAVATSTAAPPPPSSPLPSKSTSAPQMSPGSSDNQSSSPQPAQQKLKQQKKKASLTSKIPALAVEMPGSADISGLNLQFGALQFGSEPVLSDYESTPTTSASSSQAPSSLYTSTASESSSTISSNQSQESGYQSGPIQSTTYTSQNNAQGPLYEQRSTQTRRYPSSISSSPQKDLTQAKNGFSSVQATQLQTTQSVEGATGSAVKSDSPSTSSIPPLNETVSAASLLTTTNQHSSSLGGLSHSEEIPNTTTTQHSSTLSTQQNTLSSSTSSGRTSTSTLLHTSVESEANLHSSSSTFSTTSSTVSAPPPVVSVSSSLNSGSSLGLSLGSNSTVTASTRSSVATTSGKAPPNLPPGVPPLLPNPYIMAPGLLHAYPPQVYGYDDLQMLQTRFPLDYYSIPFPTPTTPLTGRDGSLASNPYSGDLTKFGRGDASSPAPATTLAQPQQNQTQTHHTTQQTFLNPALPPGYSYTSLPYYTGVPGLPSTFQYGPAVFPVAPTSSKQHGVNVSVNASATPFQQPSGYGSHGYNTGVSVTSSNTGVPDISGSVYSKTQQSFEKQGFHSGTPAASFNLPSALGSGGPINPATAAAYPPAPFMHILTPHQQPHSQILHHHLQQDGQTGSGQRSQTSSIPQKPQTNKSAYNSYSWGAN

SEQ ID NO: 94535 - protein, 350 aa, Homo sapiens
  Payload ID: 18854
  Gene Name: ubiquitin associated protein 2-like
  ENSP ID: ENSP00000357490
MMTSVGTNRARGNWEQPQNQNQTQHKQRPQATAEQIRLAQMISDHNDADFEEKVKQLIDITGKNQDECVIALHDCNGDVNRAINVLLEGNPDTHSWEMVGKKKGVSGQKDGGQTESNEEGKENRDRDRDYSRRRGGPPRRGRGASRGRECMHGALSKPAVVRGQENGLDGTKSGGPSGRGTERGRRGRGRGRGGSGRRGGRFSAQGMGTFNPADYAEPANTDDNYGNSSGNTWNNTGHFEPDDGTSAWRTATEEWGTEDWNEDLSETKIFTASNVSSVPLPAENVTITAGQRIDLAVLLGKTPSTMENDSSNLDPSQAPSLAQPLVFSNSKQTAISQPASGNTFSHHSMV

SEQ ID NO: 94536 - protein, 280 aa, Homo sapiens
  Payload ID: 18854
  Gene Name: ubiquitin associated protein 2-like
  ENSP ID: ENSP00000389052
MMTSVGTNRARGNWEQPQNQNQTQHKQRPQATAEQIRLAQMISDHNDADFEEKVKQLIDITGKNQDECVIALHDCNGDVNRAINVLLEGNPDTHSWEMVGKKKGVSGQKDGGQTESNEEGKENRDRDRDYSRRRGGPPRRGRGASRGREFRGQENGLDGTKSGGPSGRGTERGRRGRGRGRGGSGRRGGRFSAQGMGTFNPADYAEPANTDDNYGNSSGNTWNNTGHFEPDDGTSAWRTATEEWGTEDWNEDLSETKIFTASNVSSVPLPAENVTITAGQ

SEQ ID NO: 94537 - protein, 1087 aa, Homo sapiens; identical to SEQ ID NO: 94534
  Payload ID: 18854
  Gene Name: ubiquitin associated protein 2-like
  Uniprot ID: Q14157
  ENSP ID: ENSP00000389445

SEQ ID NO: 94538 - protein, 265 aa, Homo sapiens
  Payload ID: 18854
  Gene Name: ubiquitin associated protein 2-like
  ENSP ID: ENSP00000389717
MMTSVGTNRARGNWEQPQNQNQTQHKQRPQATAEQIRLAQMISDHNDADFEEKVKQLIDITGKNQDECVIALHDCNGDVNRAINVLLEGNPDTHSWEMVGKKKGVSGQKDGGQTESNEEGKENRDRDRDYSRRRGGPPRRGRVRGQENGLDGTKSGGPSGRGTERGRRGRGRGRGGSGRRGGRFSAQGMGTFNPADYAEPANTDDNYGNSSGNTWNNTGHFEPDDGTSAWRTATEEWGTEDWNEDLSETKIFTASNVSSVPLPAE

SEQ ID NO: 94539 - protein, 383 aa, Homo sapiens
  Payload ID: 18854
  Gene Name: ubiquitin associated protein 2-like
  ENSP ID: ENSP00000398609
  MOD_RES (1)..(1): Any amino acid
XVESEANLHSSSSTFSTTSSTVSAPPPVVSVSSSLNSGSSLGLSLGSNSTVTASTRSSVATTSGKAPPNLPPGVPPLLPNPYIMAPGLLHAYPPQVYGYDDLQMLQTRFPLDYYSIPFPTPTTPLTGRDGSLASNPYSGDLTKFGRGDASSPAPATTLAQPQQNQTQTHHTTQQTFLNPALPPGYSYTSLPYYTGVPGLPSTFQYGPAVFPVAPTSSKQHGVNVSVNASATPFQQPSGYGSHGYNTGVSVTSSNTGVPDISGSVYSKTQQSFEKQGFHSGTPAASFNLPSALGSGGPINPATAAAYPPAPFMHILTPHQQPHSQILHHHLQQDGQLPYLQMILCCQRQQEEQTGSGQRSQTSSIPQKPQTNKSAYNSYSWGAN

SEQ ID NO: 94540 - protein, 182 aa, Homo sapiens
  Payload ID: 18854
  Gene Name: ubiquitin associated protein 2-like
  ENSP ID: ENSP00000399920
MMTSVGTNRARGNWEQPQNQNQTQHKQRPQATAEQIRLAQMISDHNDADFEEKVKQLIDITGKNQDECVIALHDCNGDVNRAINVLLEGNPDTHSWEMVGKKKGVSGQKDGGQTESNEEGKENRDRDRDYSRRRGGPPRRGRGASRGREFRGQENGLDGTKSGGPSGRGTERGRRGRGRGRG

SEQ ID NO: 94541 - protein, 399 aa, Homo sapiens
  Payload ID: 18854
  Gene Name: ubiquitin associated protein 2-like
  ENSP ID: ENSP00000407672
  MOD_RES (1)..(1): Any amino acid
XQHSSSLGGLSHSEEIPNTTTTQHSSTLSTQQNTLSSSTSSGRTSTSTLLHTSVESEANLHSSSSTFSTTSSTVSAPPPVVSVSSSLNSGSSLGLSLGSNSTVTASTRSSVATTSGKAPPNLPPGVPPLLPNPYIMAPGLLHAYPPQVYGYDDLQMLQTRFPLDYYSIPFPTPTTPLTGRDGSLASNPYSGDLTKFGRGDASSPAPATTLAQPQQNQTQTHHTTQQTFLNPALPPGYSYTSLPYYTGVPGLPSTFQYGPAVFPVAPTSSKQHGVNVSVNASATPFQQPSGYGSHGYNTGVSVTSSNTGVPDISGSVYSKTQQSFEKQGFHSGTPAASFNLPSALGSGGPINPATAAAYPPAPFMHILTPHQQPHSQILHHHLQQDGQDILNFVDDQLGE

SEQ ID NO: 94542 - protein, 234 aa, Homo sapiens
  Payload ID: 18854
  Gene Name: ubiquitin associated protein 2-like
  ENSP ID: ENSP00000415310
MMTSVGTNRARGNWEQPQNQNQTQHKQRPQATAEQIRLAQMISDHNDADFEEKVKQLIDITGKNQDECVIALHDCNGDVNRAINVLLEGNPDTHSWEMVGKKKGVSGQKDGGQTESNEEGKENRDRDRDYSRRRGGPPRRGRGASRGREFRGQENGLDGTKSGGPSGRGTERGRRGRGRGRGGSGRRGGRFSAQGMGTFNPADYAEPANTDDNYGNSSGNTWNNTGHFEPDDGT

SEQ ID NO: 94543 - protein, 976 aa, Homo sapiens
  Payload ID: 18854
  Gene Name: ubiquitin associated protein 2-like
  Uniprot ID: Q14157
  ENSP ID: ENSP00000478447
MMTSVGTNRARGNWEQPQNQNQTQHKQRPQATAEQIRLAQMISDHNDADFEEKVKQLIDITGKNQDECVIALHDCNGDVNRAINVLLEGNPDTHSWEMVGKKKGVSGQKDGGQTESNEEGKENRDRDRDYSRRRGGPPRRGRVRGQENGLDGTKSGGPSGRGTERGRRGRGRGRGGSGRRGGRFSAQGMGTFNPADYAEPANTDDNYGNSSGNTWNNTGHFEPDDGTSAWRTATEEWGTEDWNEDLSETKIFTASNVSSVPLPAENVTITAGQRIDLAVLLGKTPSTMENDSSNLDPSQAPSLAQPLVFSNSKQTAISQPASGNTFSHHSMVSMLGKGFGDVGEAKGGSTTGSQFLEQFKTAQALAQLAAQHSQSGSTTTSSWDMGSTTQSPSLVQYDLKNPSDSAVHSPFTKRQAFTPSSTMMEVFLQEKSPAVATSTAAPPPPSSPLPSKSTSAPQMSPGSSDNQSSSPQPAQQKLKQQKKKASLTSKIPALAVEMPGSADISGLNLQFGALQFGSEPVLSDYESTPTTSASSSQAPSSLYTSTASESSSTISSNQSQESGYQSGPIQSTTYTSQNNAQGPLYEQRSTQTRRYPSSISSSPQKDLTQAKNGFSSVQATQLQTTQSVEGATGSAVKSDSPSTSSIPPLNETVSAASLLTTTNQHSSSLGGLSHSEEIPNTTTTQHSSTLSTQQNTLSSSTSSGRTSTSTLLHTSVESEANLHSSSSTFSTTSSTVSAPPPVVSVSSSLNSGSSLGLSLGSNSTVTASTRSSVATTSGKAPPNLPPGVPPLLPNPYIMAPGLLHAYPPQVYGYDDLQMLQTRFPLDYYSIPFPTPTTPLTGRDGSLASNPYSGDLTKFGRGDASSPAPATTLAQPQQNQTQTHHTTQQTFLNPALPPGYSYTSLPYYTGVPGLPSTFQYGPAVFPVAPTSSKQHGVNVSVNASATPFQQPSGYGSHGYNTGRKYPPPYKHFWTAES

SEQ ID NO: 94544 - protein, 229 aa, Homo sapiens
  Payload ID: 18855
  Gene Name: ubiquitin B
  Uniprot ID: P0CG47
  ENSP ID: ENSP00000304697
MQIFVKTLTGKTITLEVEPSDTIENVKAKIQDKEGIPPDQQRLIFAGKQLEDGRTLSDYNIQKESTLHLVLRLRGGMQIFVKTLTGKTITLEVEPSDTIENVKAKIQDKEGIPPDQQRLIFAGKQLEDGRTLSDYNIQKESTLHLVLRLRGGMQIFVKTLTGKTITLEVEPSDTIENVKAKIQDKEGIPPDQQRLIFAGKQLEDGRTLSDYNIQKESTLHLVLRLRGGC

SEQ ID NO: 94545 - protein, 229 aa, Homo sapiens; identical to SEQ ID NO: 94544
  Payload ID: 18855
  Gene Name: ubiquitin B
  Uniprot ID: P0CG47
  ENSP ID: ENSP00000379178

SEQ ID NO: 94546 - protein, 229 aa, Homo sapiens; identical to SEQ ID NO: 94544
  Payload ID: 18855
  Gene Name: ubiquitin B
  Uniprot ID: P0CG47
  ENSP ID: ENSP00000379180

SEQ ID NO: 94547 - protein, 153 aa, Homo sapiens
  Payload ID: 18855
  Gene Name: ubiquitin B
  ENSP ID: ENSP00000437475
MQIFVKTLTGKTITLEVEPSDTIENVKAKIQDKEGIPPDQQRLIFAGKQLEDGRTLSDYNIQKESTLHLVLRLRGGMQIFVKTLTGKTITLEVEPSDTIENVKAKIQDKEGIPPDQQRLIFAGKQLEDGRTLSDYNIQKESTLHLVLRLRGGC

SEQ ID NO: 94548 - protein, 206 aa, Homo sapiens
  Payload ID: 18855
  Gene Name: ubiquitin B
  ENSP ID: ENSP00000463156
MQIFVKTLTGKTITLEVEPSDTIENVKAKIQDKEGIPPDQQRLIFAGKQLEDGRTLSDYNIQKESTLHLVLRLRGGMQIFVKTLTGKTITLEVEPSDTIENVKAKIQDKEGIPPDQQRLIFAGKQLEDGRTLSDYNIQKESTLHLVLRLRGGMQIFVKTLTGKTITLEVEPSDTIENVKAKIQDKEGIPPDQQRLIFAGKQLEDGR

SEQ ID NO: 94549 - protein, 93 aa, Homo sapiens
  Payload ID: 18855
  Gene Name: ubiquitin B
  ENSP ID: ENSP00000464510
MQIFVKTLTGKTITLEVEPSDTIENVKAKIQDKEGIPPDQQRLIFAGKQLEDGRTLSDYNIQKESTLHLVLRLRGGMQIFVKTLTGKTITLEV

SEQ ID NO: 94550 - protein, 43 aa, Homo sapiens
  Payload ID: 18855
  Gene Name: ubiquitin B
  ENSP ID: ENSP00000464594
MQIFVKTLTGKTITLEVEPSDTIENVKAKIQDKEGIPPDQQRL

SEQ ID NO: 94551 - protein, 229 aa, Homo sapiens; identical to SEQ ID NO: 94544
  Payload ID: 18855
  Gene Name: ubiquitin B
  Uniprot ID: P0CG47
  ENSP ID: ENSP00000478771

SEQ ID NO: 94552 - protein, 685 aa, Homo sapiens
  Payload ID: 18856
  Gene Name: ubiquitin C
  Uniprot ID: P0CG48
  ENSP ID: ENSP00000344818
MQIFVKTLTGKTITLEVEPSDTIENVKAKIQDKEGIPPDQQRLIFAGKQLEDGRTLSDYNIQKESTLHLVLRLRGGMQIFVKTLTGKTITLEVEPSDTIENVKAKIQDKEGIPPDQQRLIFAGKQLEDGRTLSDYNIQKESTLHLVLRLRGGMQIFVKTLTGKTITLEVEPSDTIENVKAKIQDKEGIPPDQQRLIFAGKQLEDGRTLSDYNIQKESTLHLVLRLRGGMQIFVKTLTGKTITLEVEPSDTIENVKAKIQDKEGIPPDQQRLIFAGKQLEDGRTLSDYNIQKESTLHLVLRLRGGMQIFVKTLTGKTITLEVEPSDTIENVKAKIQDKEGIPPDQQRLIFAGKQLEDGRTLSDYNIQKESTLHLVLRLRGGMQIFVKTLTGKTITLEVEPSDTIENVKAKIQDKEGIPPDQQRLIFAGKQLEDGRTLSDYNIQKESTLHLVLRLRGGMQIFVKTLTGKTITLEVEPSDTIENVKAKIQDKEGIPPDQQRLIFAGKQLEDGRTLSDYNIQKESTLHLVLRLRGGMQIFVKTLTGKTITLEVEPSDTIENVKAKIQDKEGIPPDQQRLIFAGKQLEDGRTLSDYNIQKESTLHLVLRLRGGMQIFVKTLTGKTITLEVEPSDTIENVKAKIQDKEGIPPDQQRLIFAGKQLEDGRTLSDYNIQKESTLHLVLRLRGGV

SEQ ID NO: 94553 - protein, 122 aa, Homo sapiens
  Payload ID: 18856
  Gene Name: ubiquitin C
  ENSP ID: ENSP00000437452
MQIFVKTLTGKTITLEVEPSDTIENVKAKIQDKEGIPPDQQRLIFAGKQLEDGRTLSDYNIQKESTLHLVLRLRGGMQIFVKTLTGKTITLEVEPSDTIENVKAKIQDKEGIPPDQQRLIFA

SEQ ID NO: 94554 - protein, 136 aa, Homo sapiens
  Payload ID: 18856
  Gene Name: ubiquitin C
  ENSP ID: ENSP00000438289
MQIFVKTLTGKTITLEVEPSDTIENVKAKIQDKEGIPPDQQRLIFAGKQLEDGRTLSDYNIQKESTLHLVLRLRGGMQIFVKTLTGKTITLEVEPSDTIENVKAKIQDKEGIPPDQQRLIFAGKQLEDGRTLSDYN

SEQ ID NO: 94555 - protein, 229 aa, Homo sapiens
  Payload ID: 18856
  Gene Name: ubiquitin C
  ENSP ID: ENSP00000438394
MQIFVKTLTGKTITLEVEPSDTIENVKAKIQDKEGIPPDQQRLIFAGKQLEDGRTLSDYNIQKESTLHLVLRLRGGMQIFVKTLTGKTITLEVEPSDTIENVKAKIQDKEGIPPDQQRLIFAGKQLEDGRTLSDYNIQKESTLHLVLRLRGGMQIFVKTLTGKTITLEVEPSDTIENVKAKIQDKEGIPPDQQRLIFAGKQLEDGRTLSDYNIQKESTLHLVLRLRGGV

SEQ ID NO: 94556 - protein, 149 aa, Homo sapiens
  Payload ID: 18856
  Gene Name: ubiquitin C
  ENSP ID: ENSP00000439492
MQIFVKTLTGKTITLEVEPSDTIENVKAKIQDKEGIPPDQQRLIFAGKQLEDGRTLSDYNIQKESTLHLVLRLRGGMQIFVKTLTGKTITLEVEPSDTIENVKAKIQDKEGIPPDQQRLIFAGKQLEDGRTLSDYNIQKESTLHLVLRL

SEQ ID NO: 94557 - protein, 169 aa, Homo sapiens
  Payload ID: 18856
  Gene Name: ubiquitin C
  ENSP ID: ENSP00000440205
MQIFVKTLTGKTITLEVEPSDTIENVKAKIQDKEGIPPDQQRLIFAGKQLEDGRTLSDYNIQKESTLHLVLRLRGGMQIFVKTLTGKTITLEVEPSDTIENVKAKIQDKEGIPPDQQRLIFAGKQLEDGRTLSDYNIQKESTLHLVLRLRGGMQIFVKTLTGKTITLEV

SEQ ID NO: 94558 - protein, 134 aa, Homo sapiens
  Payload ID: 18856
  Gene Name: ubiquitin C
  ENSP ID: ENSP00000441238
MQIFVKTLTGKTITLEVEPSDTIENVKAKIQDKEGIPPDQQRLIFAGKQLEDGRTLSDYNIQKESTLHLVLRLRGGMQIFVKTLTGKTITLEVEPSDTIENVKAKIQDKEGIPPDQQRLIFAGKQLEDGRTLSD

SEQ ID NO: 94559 - protein, 685 aa, Homo sapiens; identical to SEQ ID NO: 94552
  Payload ID: 18856
  Gene Name: ubiquitin C
  Uniprot ID: P0CG48
  ENSP ID: ENSP00000441543

SEQ ID NO: 94560 - protein, 61 aa, Homo sapiens
  Payload ID: 18856
  Gene Name: ubiquitin C
  ENSP ID: ENSP00000441556
MQIFVKTLTGKTITLEVEPSDTIENVKAKIQDKEGIPPDQQRLIFAGKQLEDGRTLSDYNI

SEQ ID NO: 94561 - protein, 160 aa, Homo sapiens
  Payload ID: 18856
  Gene Name: ubiquitin C
  ENSP ID: ENSP00000442800
MQIFVKTLTGKTITLEVEPSDTIENVKAKIQDKEGIPPDQQRLIFAGKQLEDGRTLSDYNIQKESTLHLVLRLRGGMQIFVKTLTGKTITLEVEPSDTIENVKAKIQDKEGIPPDQQRLIFAGKQLEDGRTLSDYNIQKESTLHLVLRLRGGMQIFVKTL

SEQ ID NO: 94562 - protein, 305 aa, Homo sapiens
  Payload ID: 18856
  Gene Name: ubiquitin C
  ENSP ID: ENSP00000443053
MQIFVKTLTGKTITLEVEPSDTIENVKAKIQDKEGIPPDQQRLIFAGKQLEDGRTLSDYNIQKESTLHLVLRLRGGMQIFVKTLTGKTITLEVEPSDTIENVKAKIQDKEGIPPDQQRLIFAGKQLEDGRTLSDYNIQKESTLHLVLRLRGGMQIFVKTLTGKTITLEVEPSDTIENVKAKIQDKEGIPPDQQRLIFAGKQLEDGRTLSDYNIQKESTLHLVLRLRGGMQIFVKTLTGKTITLEVEPSDTIENVKAKIQDKEGIPPDQQRLIFAGKQLEDGRTLSDYNIQKESTLHLVLRLRGGV

SEQ ID NO: 94563 - protein, 155 aa, Homo sapiens
  Payload ID: 18856
  Gene Name: ubiquitin C
  ENSP ID: ENSP00000445337
MQIFVKTLTGKTITLEVEPSDTIENVKAKIQDKEGIPPDQQRLIFAGKQLEDGRTLSDYNIQKESTLHLVLRLRGGMQIFVKTLTGKTITLEVEPSDTIENVKAKIQDKEGIPPDQQRLIFAGKQLEDGRTLSDYNIQKESTLHLVLRLRGGMQI

SEQ ID NO: 94564 - protein, 223 aa, Homo sapiens [sequence omitted]

SEQ ID NO: 94565 - protein, 223 aa, Homo sapiens [sequence omitted]

SEQ ID NO: 94566 - protein, 156 aa, Homo sapiens
  Payload ID: 18857
  Gene Name: ubiquitin carboxyl-terminal esterase L1 (ubiquitin thiolesterase)
  ENSP ID: ENSP00000423348
MQLKPMEINPEMLNKVLSRLGVAGQWRFVDVLGLEEESLGSVPAPACALLLLFPLTAQHENFRKKQIEELKGQEVSPKVYFMKQTIGNSCGTIGLIHAVANNQDKLGFEDGSVLKQFLSETEKMSPEDRAKCFEKNEAIQAAHDAVAQEGQCRMTR

SEQ ID NO: 94567 - protein, 241 aa, Homo sapiens
  Payload ID: 18857
  Gene Name: ubiquitin carboxyl-terminal esterase L1 (ubiquitin thiolesterase)
  ENSP ID: ENSP00000423623
MQLKPMEINPEMLNKVLSRLGVAGQWRFVDVLGLEEESLGSVPAPACALLLLFPLTAQHENFRKKQIEELKGQEVSPKVYFMKQTIGNSCGTIGLIHAVANNQDKLGFEDGSVLKQFLSETEKMSPEDRAKCFEKNEAIQAAHDAVAQEGQCRVDDKVNFHFILFNNVDGHLYELDGRMPFPVNHGASSEDTLLKVIFGMHLFLMTLPRSAENSPSVSKEKSASLPWLSARQPNALWEGLC

SEQ ID NO: 94568 - protein, 69 aa, Homo sapiens
  Payload ID: 18857
  Gene Name: ubiquitin carboxyl-terminal esterase L1 (ubiquitin thiolesterase)
  ENSP ID: ENSP00000425714
MQLKPMEINPEVSARCCPGWGSPASGASWTCWGWKRSLWARCQRLPARCCCCFPSRPSMRTSGKSRLKS

SEQ ID NO: 94569 - protein, 58 aa, Homo sapiens
  Payload ID: 18857
  Gene Name: ubiquitin carboxyl-terminal esterase L1 (ubiquitin thiolesterase)
  ENSP ID: ENSP00000426634
MQLKPMEINPEMLNKVLSRLGVAGQWRFVDVLGLEEESLGSVPAPACALLLLFPLTAQ

SEQ ID NO: 94570 - protein, 207 aa, Homo sapiens
  Payload ID: 18857
  Gene Name: ubiquitin carboxyl-terminal esterase L1 (ubiquitin thiolesterase)
  ENSP ID: ENSP00000426895
MQLKPMEINPEMLNKVLSRLGVAGQWRFVDVLGLEEESLGSVPAPACALLLLFPLTAQHENFRKKQIEELKGQEVSPKVYFMKQTIGNSCGTIGLIHAVANNQDKLGFEDGSVLKQFLSETEKMSPEDRAKCFEKNEVDDKVNFHFILFNNVDGHLYELDGRMPFPVNHGASSEDTLLKDAAKVCREFTEREQGEVRFSAVALCKAA

SEQ ID NO: 94571 - protein, 230 aa, Homo sapiens
  Payload ID: 18858
  Gene Name: ubiquitin carboxyl-terminal esterase L3 (ubiquitin thiolesterase)
  Uniprot ID: P15374
  ENSP ID: ENSP00000366819
MEGQRWLPLEANPEVTNQFLKQLGLHPNWQFVDVYGMDPELLSMVPRPVCAVLLLFPITEKYEVFRTEEEEKIKSQGQDVTSSVYFMKQTISNACGTIGLIHAIANNKDKMHFESGSTLKKFLEESVSMSPEERARYLENYDAIRVTHETSAHEGQTEAPSIDEKVDLHFIALVHVDGHLYELDGRKPFPINHGETSDETLLEDAIEVCKKFMERDPDELRFNAIALSAA

SEQ ID NO: 94572 - protein, 228 aa, Homo sapiens
  Payload ID: 18858
  Gene Name: ubiquitin carboxyl-terminal esterase L3 (ubiquitin thiolesterase)
  ENSP ID: ENSP00000398189
TEEEEKIKSQGQDVTSSVYFMKQTISNACGTIGLIHAIANNKDKMHFESGSTLKKFLEESVSMSPEERARYLENYDAIRVTHETSAHEGQTESSSPSSSQPHSSHCRTKASSLCHHASLPWVKRNHVGPAKATSPSLRLRRWRPFLRLPSLGLHSVAPSIDEKVDLHFIALVHVDGHLYELDGRKPFPINHGETSDETLLEDAIEVCKKFMERDPDELRFNAIALSAA

SEQ ID NO: 94573 - protein, 194 aa, Homo sapiens
  Payload ID: 18858
  Gene Name: ubiquitin carboxyl-terminal esterase L3 (ubiquitin thiolesterase)
  ENSP ID: ENSP00000477746
MDPELLSMVPRPVCAVLLLFPITEKYEVFRTEEEEKIKSQGQDVTSSVYFMKQTISNACGTIGLIHAIANNKDKMHFESGSTLKKFLEESVSMSPEERARYLENYDAIRVTHETSAHEGQTEAPSIDEKVDLHFIALVHVDGHLYELDGRKPFPINHGETSDETLLEDAIEVCKKFMERDPDELRFNAIALSAA

SEQ ID NO: 94574 - protein, 326 aa, Homo sapiens
  Payload ID: 18859
  Gene Name: ubiquitin carboxyl-terminal hydrolase L5
  Uniprot ID: Q9Y5K5
  ENSP ID: ENSP00000356418
MTGNAGEWCLMESDPGVFTELIKGFGCRGAQVEEIWSLEPENFEKLKPVHGLIFLFKWQPGEEPAGSVVQDSRLDTIFFAKQVINNACATQAIVSVLLNCTHQDVHLGETLSEFKEFSQSFDAAMKGLALSNSDVIRQVHNSFARQQMFEFDTKTSAKEEDAFHFVSYVPVNGRLYELDGLREGPIDLGACNQDDWISAVRPVIEKRIQKYSEGEIRFNLMAIVSDRKMIYEQKIAELQRQLAEEPMDTDQGNSMLSAIQSEVAKNQMLIEEEVQKLKRYKIENIRRKHNYLPFIMELLKTLAEHQQLIPLVEKFEKHFEKTLLGK

SEQ ID NO: 94575 - protein, 316 aa, Homo sapiens
  Payload ID: 18859
  Gene Name: ubiquitin carboxyl-terminal hydrolase L5
  Uniprot ID: Q9Y5K5
  ENSP ID: ENSP00000356419
MTGNAGEWCLMESDPGVFTELIKGFGCRGAQVEEIWSLEPENFEKLKPVHGLIFLFKWQPGEEPAGSVVQDSRLDTIFFAKQVINNACATQAIVSVLLNCTHQDVHLGETLSEFKEFSQSFDAAMKGLALSNSDVIRQVHNSFARQQMFEFDTKTSAKEEDAFHFVSYVPVNGRLYELDGLREGPIDLGACNQDDWISAVRPVIEKRIQKYSEGEIRFNLMAIVSDRKMIYEQKIAELQRQLAEEPMDTDQGNSMLSAIQSEVAKNQMLIEEEVQKLKRYKIENIRRKHNYLPFIMELLKTLAEHQQLIPLVEKGK

SEQ ID NO: 94576 - protein, 368 aa, Homo sapiens
  Payload ID: 18859
  Gene Name: ubiquitin carboxyl-terminal hydrolase L5
  ENSP ID: ENSP00000356420
ARGGSGRCVARAMTGNAGEWCLMESDPGVFTELIKGFGCRGAQVEEIWSLEPENFEKLKPVHGLIFLFKWQPGEEPAGSVVQDSRLDTIFFAKQVINNACATQAIVSVLLNCTHQDVHLGETLSEFKEFSQSFDAAMKGLALSNSDVIRQVHNSFARQQMFEFDTKTSAKEEDAFHFVSYVPVNGRLYELDGLREGPIDLGACNQDDWISAVRPVIEKRIQKDGFSPCCPGWSQTPELKPSACLDLPKWYSEGEIRFNLMAIVSDRKMIYEQKIAELQRQLAEEEPMDTDQGNSMLSAIQSEVAKNQMLIEEEVQKLKRYKIENIRRKHNYLPFIMELLKTLAEHQQLIPLVEKAKEKQNAKKAQETK

SEQ ID NO: 94577 - protein, 355 aa, Homo sapiens
  Payload ID: 18859
  Gene Name: ubiquitin carboxyl-terminal hydrolase L5
  ENSP ID: ENSP00000356421
MTGNAGEWCLMESDPGVFTELIKGFGCRGAQVEEIWSLEPENFEKLKPVHGLIFLFKWQPGEEPAGSVVQDSRLDTIFFAKQVINNACATQAIVSVLLNCTHQDVHLGETLSEFKEFSQSFDAAMKGLALSNSDVIRQVHNSFARQQMFEFDTKTSAKEEDAFHFVSYVPVNGRLYELDGLREGPIDLGACNQDDWISAVRPVIEKRIQKDGFSPCCPGWSQTPELKPSACLDLPKWYSEGEIRFNLMAIVSDRKMIYEQKIAELQRQLAEEPMDTDQGNSMLSAIQSEVAKNQMLIEEEVQKLKRYKIENIRRKHNYLPFIMELLKTLAEHQQLIPLVEKAKEKQNAKKAQETK

SEQ ID NO: 94578 - protein, 328 aa, Homo sapiens
  Payload ID: 18859
  Gene Name: ubiquitin carboxyl-terminal hydrolase L5
  Uniprot ID: Q9Y5K5
  ENSP ID: ENSP00000356424
MTGNAGEWCLMESDPGVFTELIKGFGCRGAQVEEIWSLEPENFEKLKPVHGLIFLFKWQPGEEPAGSVVQDSRLDTIFFAKQVINNACATQAIVSVLLNCTHQDVHLGETLSEFKEFSQSFDAAMKGLALSNSDVIRQVHNSFARQQMFEFDTKTSAKEEDAFHFVSYVPVNGRLYELDGLREGPIDLGACNQDDWISAVRPVIEKRIQKYSEGEIRFNLMAIVSDRKMIYEQKIAELQRQLAEEPMDTDQGNSMLSAIQSEVAKNQMLIEEEVQKLKRYKIENIRRKHNYLPFIMELLKTLAEHQQLIPLVEKAKEKQNAKKAQETK

SEQ ID NO: 94579 - protein, 329 aa, Homo sapiens
  Payload ID: 18859
  Gene Name: ubiquitin carboxyl-terminal hydrolase L5
  Uniprot ID: Q9Y5K5
  ENSP ID: ENSP00000356425
MTGNAGEWCLMESDPGVFTELIKGFGCRGAQVEEIWSLEPENFEKLKPVHGLIFLFKWQPGEEPAGSVVQDSRLDTIFFAKQVINNACATQAIVSVLLNCTHQDVHLGETLSEFKEFSQSFDAAMKGLALSNSDVIRQVHNSFARQQMFEFDTKTSAKEEDAFHFVSYVPVNGRLYELDGLREGPIDLGACNQDDWISAVRPVIEKRIQKYSEGEIRFNLMAIVSDRKMIYEQKIAELQRQLAEEEPMDTDQGNSMLSAIQSEVAKNQMLIEEEVQKLKRYKIENIRRKHNYLPFIMELLKTLAEHQQLIPLVEKAKEKQNAKKAQETK

SEQ ID NO: 94580 - protein, 258 aa, Homo sapiens
  Payload ID: 18859
  Gene Name: ubiquitin carboxyl-terminal hydrolase L5
  ENSP ID: ENSP00000389563
MSLGWLERPPALSRAAGCRGAQVEEIWSLEPENFEKLKPVHGLIFLFKWQPGEEPAGSVVQDSRLDTIFFAKQVINNACATQAIVSVLLNCTHQDVHLGETLSEFKEFSQSFDAAMKGLALSNSDVIRQVHNSFARQQMFEFDTKTSAKEEDAFHFVSYVPVNGRLYELDGLREGPIDLGACNQDDWISAVRPVIEKRIQKYSEGEIRFNLMAIVSDRKMIYEQKIAELQRQLAEEPMDTDQGNSMLSAIQSEVAKNQ

SEQ ID NO: 94581 - protein, 183 aa, Homo sapiens
  Payload ID: 18859
  Gene Name: ubiquitin carboxyl-terminal hydrolase L5
  ENSP ID: ENSP00000391153
  MOD_RES (1)..(1): Any amino acid
XQQMFEFDTKTSAKEEDAFHFVSYVPVNGRLYELDGLREGPIDLGACNQDDWISAVRPVIEKRIQKYSEGEIRFNLMAIVSDRKMIYEQKIAELQRQLAEEEPMDTDQGNSMLSAIQSEVAKNQMLIEEEVQKLKRYKIENIRRKHNYLPFIMELLKTLAEHQQLIPLVEKFEKHFEKTLLGK

SEQ ID NO: 94582 - protein, 99 aa, Homo sapiens
  Payload ID: 18859
  Gene Name: ubiquitin carboxyl-terminal hydrolase L5
  ENSP ID: ENSP00000392416
  MOD_RES (1)..(1): Any amino acid
XNLMAIVSDRKMIYEQKIAELQRQLAEEPMDTDQGNSMLSAIQSEVAKNQMLIEEEVQKLKRYKIENIRRKHNYLPFIMELLKTLAEHQQLIPLVEKIF

SEQ ID NO: 94583 - protein, 115 aa, Homo sapiens
  Payload ID: 18859
  Gene Name: ubiquitin carboxyl-terminal hydrolase L5
  ENSP ID: ENSP00000402847
  MOD_RES (1)..(1): Any amino acid
XEGEIRFNLMAIVSDRKMIYEQKIAELQRQLAEEPMDTDQGNSMLSAIQSEVAKNQMLIEEEVQKLKRYKIENIRRKHNYLPFIMELLKTLAEHQQLIPLVEKFEKHFEKTLLGK

SEQ ID NO: 94584 - protein, 218 aa, Homo sapiens
  Payload ID: 18859
  Gene Name: ubiquitin carboxyl-terminal hydrolase L5
  ENSP ID: ENSP00000408720
  MOD_RES (1)..(1): Any amino acid
XLSEFKEFSQSFDAAMKGLALSNSDVIRQVHNSFARQQMFEFDTKTSAKEEDAFHFVSYVPVNGRLYELDGLREGPIDLGACNQDDWISAVRPVIEKRIQKYSEGEIRFNLMAIVSDRKMIYEQKIAELQRQLAEEEPMDTDQGNSMLSAIQSEVAKNQMLIEEEVQKLKRYKIENIRRKHNYLPFIMELLKTLAEHQQLIPLVEKFEKHFEKTLLGK

SEQ ID NO: 94585 - protein, 165 aa, Homo sapiens
  Payload ID: 18859
  Gene Name: ubiquitin carboxyl-terminal hydrolase L5
  ENSP ID: ENSP00000412265
MVRPGLARMSLPRCWFRYPGWTGAEAGRGRAIVSRRLPSLNPWDAGERHGGLVRICASLGPHKRLPAGLPQCPHLYLAADPLDPQRRQEKSCAALGNDKRRQPDGQRQPQQQQQPHCRRGFQAPALPNPLRVLQGLGRVSMSLGWLERPPALSRAAGCRGAQVEE

SEQ ID NO: 94586 - protein, 165 aa, Homo sapiens
  Payload ID: 18860
  Gene Name: ubiquitin D
  Uniprot ID: O15205
  ENSP ID: ENSP00000366249
MAPNASCLCVHVRSEEWDLMTFDANPYDSVKKIKEHVRSKTKVPVQDQVLLLGSKILKPRRSLSSYGIDKEKTIHLTLKVVKPSDEELPLFLVESGDEAKRHLLQVRRSSSVAQVKAMIETKTGIIPETQIVTCNGKRLEDGKMMADYGIRKGNLLFLACYCIGG

SEQ ID NO: 94587 - protein, 165 aa, Homo sapiens
  Payload ID: 18860
  Gene Name: ubiquitin D
  Uniprot ID: O15205
  ENSP ID: ENSP00000373039
MAPNASCLCVHVRSEEWDLMTFDANPYDSVKKIKEHVRSKTKVPVQDQVLLLGSKILKPRRSLSSYGIDKEKTIHLTLKVVKPSDEELPLFLVESGDEAKRHLLQVRRSSSVAQVKAMIETKTGIIPETQIVTCNGKRLEDGKMMADYGIRKGNLLFLASYCIGG

SEQ ID NO: 94588 - protein, 165 aa, Homo sapiens
  Payload ID: 18860
  Gene Name: ubiquitin D
  ENSP ID: ENSP00000373137
MAPNASCLCVHVRSEEWDLMTFDANPYDSVKKIKEHVRSKTKVPVQDQVLLLGSKILKPRRSLSSYGTDKEKTIHLTLKVVKPSDEELPLFLVESGDEAKRHLLQVRRSSSVAQVKAMIETKTGIIPETQIVTCNGKRLEDGKMMADYGIRKGNLLFLASYCIGG

SEQ ID NO: 94589 - protein, 165 aa, Homo sapiens; identical to SEQ ID NO: 94586
  Payload ID: 18860
  Gene Name: ubiquitin D
  Uniprot ID: O15205
  ENSP ID: ENSP00000396152

SEQ ID NO: 94590 - protein, 165 aa, Homo sapiens; identical to SEQ ID NO: 94588
  Payload ID: 18860
  Gene Name: ubiquitin D
  ENSP ID: ENSP00000396477

SEQ ID NO: 94591 - protein, 165 aa, Homo sapiens; identical to SEQ ID NO: 94588
  Payload ID: 18860
  Gene Name: ubiquitin D
  ENSP ID: ENSP00000398539

SEQ ID NO: 94592 - protein, 165 aa, Homo sapiens; identical to SEQ ID NO: 94587
  Payload ID: 18860
  Gene Name: ubiquitin D
  Uniprot ID: O15205
  ENSP ID: ENSP00000410416

SEQ ID NO: 94593 - protein, 227 aa, Homo sapiens
  Payload ID: 18861
  Gene Name: ubiquitin domain containing 1
  Uniprot ID: Q9HAC8
  ENSP ID: ENSP00000359698
MGNCVGRQRRERPAAPGHPRKRAGRNEPLKKERLKWKSDYPMTDGQLRSKRDEFWDTAPAFEGRKEIWDALKAAAYAAEANDHELAQAILDGASITLPHGTLCECYDELGNRYQLPIYCLSPPVNLLLEHTEEESLEPPEPPPSVRREFPLKVRLSTGKDVRLSASLPDTVGQLKRQLHAQEGIEPSWQRWFFSGKLLTDRTRLQETKIQKDFVIQVIINQPPPPQD

SEQ ID NO: 94594 - protein, 234 aa, Homo sapiens
  Payload ID: 18862
  Gene Name: ubiquitin domain containing 2
  Uniprot ID: Q8WUN7
  ENSP ID: ENSP00000377381
MGGCVGAQHDSSGSLNENSEGTGVALGRNQPLKKEKPKWKSDYPMTDGQLRSKRDEFWDTAPAFEGRKEIWDALKAAAHAFESNDHELAQAIIDGANITLPHGALTECYDELGNRYQLPVYCLAPPINMIEEKSDIETLDIPEPPPNSGYECQLRLRLSTGKDLKLVVRSTDTVFHMKRRLHAAEGVEPGSQRWFFSGRPLTDKMKFEELKIPKDYVVQVIVSQPVQNPTPVEN

SEQ ID NO: 94595 - protein, 309 aa, Homo sapiens
  Payload ID: 18863
  Gene Name: ubiquitin family domain containing 1
  Uniprot ID: O14562
  ENSP ID: ENSP00000379217
MAAAGAPDGMEEPGMDTEAETVATEAPARPVNCLEAEAAAGAAAEDSGAARGSLQPAPAQPPGDPAAQASVSNGEDAGGGAGRELVDLKIIWNKTKHDVKFPLDSTGSELKQKIHSITGLPPAMQKVMYKGLVPEDKTLREIKVTSGAKIMVVGSTINDVLAVNTPKDAAQQDAKAEENKKEPLCRQKQHRKVLDKGKPEDVMPSVKGAQERLPTVPLSGMYNKSGGKVRLTFKLEQDQLWIGTKERTEKLPMGSIKNVVSEPIEGHEDYHMMAFQLGPTEASYYWVYWVPTQYVDAIKDTVLGKWQYF

SEQ ID NO: 94596 - protein, 300 aa, Homo sapiens
  Payload ID: 18863
  Gene Name: ubiquitin family domain containing 1
  ENSP ID: ENSP00000456292
MEEPGMDTEAETVATEAPARPVNCLEAEAAAGAAAEDSGAARGSLQPAPAQPPGDPAAQASVSNGEDAGGGAGRELVDLKIIWNKTKHDVKFPLDSTGSELKQKIHSITGLPPAMQKVMYKGLVPEDKTLREIKVTSGAKIMVVGSTINDVLAVNTPKDAAQQDAKAEENKKEPLCRQKQHRKVLDKGKPEDVMPSVKGAQERLPTVPLSGMYNKSGGKVRLTFKLEQDQLWIGTKERTEKLPMGSIKNVVSEPIEGHEDYHMMAFQLGPTEASYYWVYWVPTQYVDAIKDTVLGKWQYF

SEQ ID NO: 94597 - protein, 190 aa, Homo sapiens
  Payload ID: 18863
  Gene Name: ubiquitin family domain containing 1
  ENSP ID: ENSP00000457713
MAAAGAPDGMEEPGMDTEAETVATEAPARPVNCLEAEAAAGAAAEDSGAARGSLQPAPAQPPGDPAAQASVSNGEDAGGGAGRELVDLKIIWNKTKHDVKFPLDSTGSELKQKIHSITGLPPAMQKVMYKGLVPEDKTLREIKVTSGAKIMVVGSTINDVLAVNTPKDAAQQDAKAEENKKEPLCRQKGP

SEQ ID NO: 94598 - protein, 307 aa, Homo sapiens
  Payload ID: 18864
  Gene Name: ubiquitin fusion degradation 1 like (yeast)
  Uniprot ID: Q92890
  ENSP ID: ENSP00000263202
MFSFNMFDHPIPRVFQNRFSTQYRCFSVSMLAGPNDRSDVEKGGKIIMPPSALDQLSRLNITYPMLFKLTNKNSDRMTHCGVLEFVADEGICYLPHWMMQNLLLEEGGLVQVESVNLQVATYSKFQPQSPDFLDITNPKAVLENALRNFACLTTGDVIAINYNEKIYELRVMETKPDKAVSIIECDMNVDFDAPLGYKEPERQVQHEESTEGEADHSGYAGELGFRAFSGSGNRLDGKKKGVEPSPSPIKPGDIKRGIPNYEFKLGKITFIRNSRPLVKKVEEDEAGGRFVAFSGEGQSLRKKGRKP

SEQ ID NO: 94599 - protein, 266 aa, Homo sapiens
  Payload ID: 18864
  Gene Name: ubiquitin fusion degradation 1 like (yeast)
  Uniprot ID: Q92890
  ENSP ID: ENSP00000382439
MFSFNMFDHPIPRVFQNRFSTQYRCFSVSMLAGPNDRSDVEKGGKIIMPPSALDQLSRLNITYPMLFKLTNKNSDRMTHCGVLEFVADEGICYLPHWMMQNLLLEEGGLVQVESVNLQVATYSKFQPQSPDFLDITNPKAVLENALRNFACLTTGDVIAINYNEKIYELRVMETKPDKAVSIIECDMNVDFDAPLGYKEPERQVQHEESTEGEADHSGYAGELGFRAFSGSGNRLDGKKKGVEPSPSPIKPGDIKRGIPNYEFKLG

SEQ ID NO: 94600 - protein, 159 aa, Homo sapiens
  Payload ID: 18864
  Gene Name: ubiquitin fusion degradation 1 like (yeast)
  ENSP ID: ENSP00000402136
MMMQNLLLEEGGLVQVESVNLQVATYSKFQPQSPDFLDITNPKAVLENALRNFACLTTGDVIAINYNEKIYELRVMETKPDKAVSIIECDMNVDFDAPLGYKEPERQVQHEESTEGEADHSGYAGELGFRAFSGSGNRLDGKKKGVEPSPSPIKPGDIK

SEQ ID NO: 94601 - protein, 190 aa, Homo sapiens
  Payload ID: 18864
  Gene Name: ubiquitin fusion degradation 1 like (yeast)
  ENSP ID: ENSP00000406680
MFSFNMFDHPIPRVFQNRFSTQYRCFSVSMLAGPNDRSDVEKGGKSRLNITYPMLFKLTNKNSDRMTHCGVLEFVADEGICYLPHWMMQNLLLEEGGLVQVESVNLQVATYSKFQPQSPDFLDITNPKAVLENALRNFACLTTGDVIAINYNEKIYELRVMETKPDKAVSIIECDMNVDFDAPLGYKEPE

SEQ ID NO: 94602 - protein, 69 aa, Homo sapiens
  Payload ID: 18864
  Gene Name: ubiquitin fusion degradation 1 like (yeast)
  ENSP ID: ENSP00000418295
MLFKLTNKNSDRMTHCGVLEFVADEGICYLPHWMMQNLLLEEGGLVQVESVNLQVATYSKFQPQSPDFL

SEQ ID NO: 94603 - protein, 135 aa, Homo sapiens
  Payload ID: 18864
  Gene Name: ubiquitin fusion degradation 1 like (yeast)
  ENSP ID: ENSP00000418390
MFDHPIPRVFQNRFSTQYRCFSVSMLAGPNDRSDVEKGGKIIMPPSALDQLSRLNITYPMLFKLTNKNSDRMTHCGVLEFVADEGICYLPHWMMQNLLLEEGGLVQVESVNLQVATYSKFQPQSPDFLDITNPKA

SEQ ID NO: 94604 - protein, 719 aa, Homo sapiens
  Payload ID: 18865
  Gene Name: ubiquitin interaction motif containing 1
  Uniprot ID: Q96RL1
  ENSP ID: ENSP00000366434
MPRRKKKVKEVSESRNLEKKDVETTSSVSVKRKRRLEDAFIVISDSDGEEPKEENGLQKTKTKQSNRAKCLAKRKIAQMTEEEQFALALKMSEQEAREVNSQEEEEEELLRKAIAESLNSCRPSDASATRSRPLATGPSSQSHQEKTTDSGLTEGIWQLVPPSLFKGSHISQGNEAEEREEPWDHTEKTEEEPVSGSSGSWDQSSQPVFENVNVKSFDRCTGHSAEHTQCGKPQESTGRGSAFLKAVQGSGDTSRHCLPTLADAKGLQDTGGTVNYFWGIPFCPDGVDPNQYTKVILCQLEVYQKSLKMAQRQLLNKKGFGEPVLPRPPSLIQNECGQGEQASEKNECISEDMGDEDKEERQESRASDWHSKTKDFQESSIKSLKEKLLLEEEPTTSHGQSSQGIVEETSEEGNSVPASQSVAALTSKRSLVLMPESSAEEITVCPETQLSSSETFDLEREVSPGSRDILDGVRIIMADKEVGNKEDAEKEVAISTFSSSNQVSCPLCDQCFPPTKIERHAMYCNGLMEEDTVLTRRQKEAKTKSDSGTAAQTSLDIDKNEKCYLCKSLVPFREYQCHVDSCLQLAKADQGDGPEGSGRACSTVEGKWQQRLKNPKEKGHSEGRLLSFLEQSEHKTSDADIKSSETGAFRVPSPGMEEAGCSREMQSSFTRRDLNESPVKSFVSISEATDCLVDFKKQVTVQPGSRTRTKAGRGRRRKF

SEQ ID NO: 94605 - protein, 719 aa, Homo sapiens; identical to SEQ ID NO: 94604
  Payload ID: 18865
  Gene Name: ubiquitin interaction motif containing 1
  Uniprot ID: Q96RL1
  ENSP ID: ENSP00000421926

SEQ ID NO: 94606 - protein, 31 aa, Homo sapiens
  Payload ID: 18865
  Gene Name: ubiquitin interaction motif containing 1
  ENSP ID: ENSP00000423534
MPRRKKKVKEVSESRNLEKKDVETTSSVSVK

SEQ ID NO: 94607 - protein, 349 aa, Homo sapiens
  Payload ID: 18865
  Gene Name: ubiquitin interaction motif containing 1
  Uniprot ID: Q96RL1
  ENSP ID: ENSP00000423717
MLPLPDLDLWPLDRLPSPIKRKPQTLGSLKSSQGIVEETSEEGNSVPASQSVAALTSKRSLVLMPESSAEEITVCPETQLSSSETFDLEREVSPGSRDILDGVRIIMADKEVGNKEDAEKEVAISTFSSSNQVSCPLCDQCFPPTKIERHAMYCNGLMEEDTVLTRRQKEAKTKSDSGTAAQTSLDIDKNEKCYLCKSLVPFREYQCHVDSCLQLAKADQGDGPEGSGRACSTVEGKWQQRLKNPKEKGHSEGRLLSFLEQSEHKTSDADIKSSETGAFRVPSPGMEEAGCSREMQSSFTRRDLNESPVKSFVSISEATDCLVDFKKQVTVQPGSRTRTKAGRGRRRKF

SEQ ID NO: 94608 - protein, 157 aa, Homo sapiens
  Payload ID: 18865
  Gene Name: ubiquitin interaction motif containing 1
  ENSP ID: ENSP00000423885
MPRRKKKVKEVSESRNLEKKDVETTSSVSVKRKRRLEDAFIVISDSDGEEPKEENGLQKTKTKQSNRAKCLAKRKIAQMTEEEQFALALKMSEQEAREVNSQEEEEEELLRKAIAESLNSCRPSDASATRSRPLATGPSSQSHQEKTTDSGLTEGIW

SEQ ID NO: 94609 - protein, 89 aa, Homo sapiens
  Payload ID: 18865
  Gene Name: ubiquitin interaction motif containing 1
  ENSP ID: ENSP00000425163
MPRRKKKVKEVSESRNLEKKDVETTSSVSVKRKRRLEDAFIVISDSDGEEPKEENGLQKTKTKQSNRAKCLAKRKIAQMTEEEQFALAL

SEQ ID NO: 94610 - protein, 166 aa, Homo sapiens
  Payload ID: 18865
  Gene Name: ubiquitin interaction motif containing 1
  ENSP ID: ENSP00000425566
MPRRKKKVKEVSESRNLEKKDVETTSSVSVKRKRRLEDAFIVISDSDGEEPKEENGLQKTKTKQSNRAKCLAKRKIAQMTEEEQFALALKMSEQEAREVNSQEEEEEELLRKAIAESLNSCRPSDASATRSRPLATGPSSQSHQEKTTDSGLTEGMHMAAGTSITV

SEQ ID NO: 94611 - protein, 553 aa, Homo sapiens
  Payload ID: 18865
  Gene Name: ubiquitin interaction motif containing 1
  Uniprot ID: Q96RL1
  ENSP ID: ENSP00000427480
MPRRKKKVKEVSESRNLEKKDVETTSSVSVKRKRRLEDAFIVISDSDGEEPKEENGLQKTKTKQSNRAKCLAKRKIAQMTEEEQFALALKMSEQEAREVNSQEEEEEELLRKAIAESLNSCRPSDASATRSRPLATGPSSQSHQEKTTDSGLTEGIWQLVPPSLFKGSHISQGNEAEEREEPWDHTEKTEEEPVSGSSGSWDQSSQPVFENVNVKSFDRCTGHSAEHTQCGKPQSSQGIVEETSEEGNSVPASQSVAALTSKRSLVLMPESSAEEITVCPETQLSSSETFDLEREVSPGSRDILDGVRIIMADKEVGNKEDAEKEVAISTFSSSNQVSCPLCDQCFPPTKIERHAMYCNGLMEEDTVLTRRQKEAKTKSDSGTAAQTSLDIDKNEKCYLCKSLVPFREYQCHVDSCLQLAKADQGDGPEGSGRACSTVEGKWQQRLKNPKEKGHSEGRLLSFLEQSEHKTSDADIKSSETGAFRVPSPGMEEAGCSREMQSSFTRRDLNESPVKSFVSISEATDCLVDFKKQVTVQPGSRTRTKAGRGRRRKF

SEQ ID NO: 94612 - protein, 1749 aa, Homo sapiens
  Payload ID: 18866
  Gene Name: ubiquitin protein ligase E3 component n-recognin 1
  Uniprot ID: Q8IWV7
  ENSP ID: ENSP00000290650
MADEEAGGTERMEISAELPQTPQRLASWWDQQVDFYTAFLHHLAQLVPEIYFAEMDPDLEKQEESVQMSIFTPLEWYLFGEDPDICLEKLKHSGAFQLCGRVFKSGETTYSCRDCAIDPTCVLCMDCFQDSVHKNHRYKMHTSTGGGFCDCGDTEAWKTGPFCVNHEPGRAGTIKENSRCPLNEEVIVQARKIFPSVIKYVVEMTIWEEEKELPPELQIREKNERYYCVLFNDEHHSYDHVIYSLQRALDCELAEAQLHTTAIDKEGRRAVKAGAYAACQEAKEDIKSHSENVSQHPLHVEVLHSEIMAHQKFALRLGSWMNKIMSYSSDFRQIFCQACLREEPDSENPCLISRLMLWDAKLYKGARKILHELIFSSFFMEMEYKKLFAMEFVKYYKQLQKEYISDDHDRSISITALSVQMFTVPTLARHLIEEQNVISVITETLLEVLPEYLDRNNKFNFQGYSQDKLGRVYAVICDLKYILISKPTIWTERLRMQFLEGFRSFLKILTCMQGMEEIRRQVGQHIEVDPDWEAAIAIQMQLKNILLMFQEWCACDEELLLVAYKECHKAVMRCSTSFISSSKTVVQSCGHSLETKSYRVSEDLVSIHLPLSRTLAGLHVRLSRLGAVSRLHEFVSFEDFQVEVLVEYPLRCLVLVAQVVAEMWRRNGLSLISQVFYYQDVKCREEMYDKDIIMLQIGASLMDPNKFLLLVLQRYELAEAFNKTISTKDQDLIKQYNTLIEEMLQVLIYIVGERYVPGVGNVTKEEVTMREIIHLLCIEPMPHSAIAKNLPENENNETGLENVINKVATFKKPGVSGHGVYELKDESLKDFNMYFYHYSKTQHSKAEHMQKKRRKQENKDEALPPPPPPEFCPAFSKVINLLNCDIMMYILRTVFERAIDTDSNLWTEGMLQMAFHILALGLLEEKQQLQKAPEEEVTFDFYHKASRLGSSAMNIQMLLEKLKGIPQLEGQKDMITWILQMFDTVKRLREKSCLIVATTSGSESIKNDEITHDKEKAERKRKAEAARLHRQKIMAQMSALQKNFIETHKLMYDNTSEMPGKEDSIMEEESTPAVSDYSRIALGPKRGPSVTEKEVLTCILCQEEQEVKIENNAMVLSACVQKSTALTQHRGKPIELSGEALDPLFMDPDLAYGTYTGSCGHVMHAVCWQKYFEAVQLSSQQRIHVDLFDLESGEYLCPLCKSLCNTVIPIIPLQPQKINSENADALAQLLTLARWIQTVLARISGYNIRHAKGENPIPIFFNQGMGDSTLEFHSILSFGVESSIKYSNSIKEMVILFATTIYRIGLKVPPDERDPRVPMLTWSTCAFTIQAIENLLGDEGKPLFGALQNRQHNGLKALMQFAVAQRITCPQVLIQKHLVRLLSVVLPNIKSEDTPCLLSIDLFHVLVGAVLAFPSLYWDDPVDLQPSSVSSSYNHLYLFHLITMAHMLQILLTVDTGLPLAQVQEDSEEAHSASSFFAEISQYTSGSIGCDIPGWYLWVSLKNGITPYLRCAALFFHYLLGVTPPEELHTNSAEGEYSALCSYLSLPTNLFLLFQEYWDTVRPLLQRWCADPALLNCLKQKNTVVRYPRKRNSLIELPDDYSCLLNQASHFRCPRSADDERKHPVLCLFCGAILCSQNICCQEIVNGEEVGACIFHALHCGAGVCIFLKIRECRVVLVEGKARGCAYPAPYLDEYGETDPGLKRGNPLHLSRERYRKLHLVWQQHCIIEEIARSQETNQMLFGFNWQLL

SEQ ID NO: 94613 - protein, 62 aa, Homo sapiens
  Payload ID: 18866
  Gene Name: ubiquitin protein ligase E3 component n-recognin 1
  ENSP ID: ENSP00000454962
MADEEAGGTERMEISAELPQTPQRLASMGSHCVAQAGVQWHDLRSLTSPSLTQAILPPQPPE

SEQ ID NO: 94614 - protein, 72 aa, Homo sapiens
  Payload ID: 18866
  Gene Name: ubiquitin protein ligase E3 component n-recognin 1
  ENSP ID: ENSP00000455759
QHPLHVEVLHSEIMAHQKFALRLGSWMNKIMSYSSDFRQIFCQACLREEPDSENPCLISRLMLWDAKLYKVL

SEQ ID NO: 94615 - protein, 148 aa, Homo sapiens
  Payload ID: 18866
  Gene Name: ubiquitin protein ligase E3 component n-recognin 1
  ENSP ID: ENSP00000456327
VAQVVAEMWRRNGLSLISQVFYYQDVKCREEMYDKDIIMLQIGASLMDPNKFLLLVLQRYELAEAFNKTISTKDQDLIKQYNTLIEEMLQVLIYIVGERYVPGVGNVTKEEVTMREIIHLLCIEPMPHSAIAKNLPENETRCIRPWSL

SEQ ID NO: 94616 - protein, 31 aa, Homo sapiens
  Payload ID: 18866
  Gene Name: ubiquitin protein ligase E3 component n-recognin 1
  ENSP ID: ENSP00000456502
MADEEAGGTERMEISAELPQTPQRLASGLCN

SEQ ID NO: 94617 - protein, 172 aa, Homo sapiens
  Payload ID: 18866
  Gene Name: ubiquitin protein ligase E3 component n-recognin 1
  ENSP ID: ENSP00000457573
  MOD_RES (1)..(1): Any amino acid
XKPGVSGHGVYELKDESLKDFNMYFYHYSKTQHSKAEHMQKKRRKQENKDEALPPPPPPEFCPAFSKVINLLNCDIMMYILRTVFERAIDTDSNLWTEGMLQMAFHILALGLLEEKQQLQKAPEEEVTFDFYHKASRLGSSAMNIQMLLEKLKGIPQLEGQKDMITWILQVN

SEQ ID NO: 94618 - protein, 71 aa, Homo sapiens
  Payload ID: 18866
  Gene Name: ubiquitin protein ligase E3 component n-recognin 1
  ENSP ID: ENSP00000457879
  MOD_RES (1)..(1): Any amino acid
XNVINKVATFKKPGVSGHGVYELKDESLKDFNMYFYHYSKTQHSKAEHMQKKRRKQENKDEGKNIAATTTS

SEQ ID NO: 94619 - protein, 1070 aa, Homo sapiens
  Payload ID: 18866
  Gene Name: ubiquitin protein ligase E3 component n-recognin 1
  ENSP ID: ENSP00000477932
MADEEAGGTERMEISAELPQTPQRLASWWDQQVDFYTAFLHHLAQLVPEIYFAEMDPDLEKQEESVQMSIFTPLEWYLFGEDPDICLEKLKHSGAFQLCGRVFKSGETTYSCRDCAIDPTCVLCMDCFQDSVHKNHRYKMHTSTGGGFCDCGDTEAWKTGPFCVNHEPGRAGTIKENSRCPLNEEVIVQARKIFPSVIKYVVEMTIWEEEKELPPELQIREKNERYYCVLFNDEHHSYDHVIYSLQRALDCELAEAQLHTTAIDKEGRRAVKAGAYAACQEAKEDIKSHSENVSQHPLHVEVLHSEIMAHQKFALRLGSWMNKIMSYSSDFRQIFCQACLREEPDSENPCLISRLMLWDAKLYKGARKILHELIFSSFFMEMEYKKLFAMEFVKYYKQLQKEYISDDHDRSISITALSVQMFTVPTLARHLIEEQNVISVITETLLEVLPEYLDRNNKFNFQGYSQDKLGRVYAVICDLKYILISKPTIWTERLRMQFLEGFRSFLKILTCMQGMEEIRRQVGQHIEVDPDWEAAIAIQMQLKNILLMFQEWCACDEELLLVAYKECHKAVMRCSTSFISSSKTVVQSCGHSLETKSYRVSEDLVSIHLPLSRTLAGLHVRLSRLGAVSRLHEFVSFEDFQVEVLVEYPLRCLVLVAQVVAEMWRRNGLSLISQVFYYQDVKCREEMYDKDIIMLQIGASLMDPNKFLLLVLQRYELAEAFNKTISTKDQDLIKQYNTLIEEMLQVLIYIVGERYVPGVGNVTKEEVTMREIIHLLCIEPMPHSAIAKNLPENENNETGLENVINKVATFKKPGVSGHGVYELKDESLKDFNMYFYHYSKTQHSKAEHMQKKRRKQENKDEALPPPPPPEFCPAFSKVINLLNCDIMMYILRTVFERAIDTDSNLWTEGMLQMAFHILALGLLEEKQQLQKAPEEEVTFDFYHKASRLGSSAMNIQMLLEKLKGIPQLEGQKDMITWILQMFDTVKRLREKSCLIVATTSGSESIKNDEITHDKEKAERKRKAEAARLHRQKIMAQMSALQKNFIETHKLMYDNTSEMPGKEDSIMEEER

SEQ ID NO: 94620 - protein, 62 aa, Homo sapiens; identical to SEQ ID NO: 94613
  Payload ID: 18866
  Gene Name: ubiquitin protein ligase E3 component n-recognin 1
  ENSP ID: ENSP00000486206

SEQ ID NO: 94621 - protein, 1755 aa, Homo sapiens
  Payload ID: 18867
  Gene Name: ubiquitin protein ligase E3 component n-recognin 2
  Uniprot ID: Q8IWV8
  ENSP ID: ENSP00000361990
MASELEPEVQAIDRSLLECSAEEIAGKWLQATDLTREVYQHLAHYVPKIYCRGPNPFPQKEDMLAQHVLLGPMEWYLCGEDPAFGFPKLEQANKPSHLCGRVFKVGEPTYSCRDCAVDPTCVLCMECFLGSIHRDHRYRMTTSGGGGFCDCGDTEAWKEGPYCQKHELNTSEIEEEEDPLVHLSEDVIARTYNIFAITFRYAVEILTWEKESELPADLEMVEKSDTYYCMLFNDEVHTYEQVIYTLQKAVNCTQKEAIGFATTVDRDGRRSVRYGDFQYCEQAKSVIVRNTSRQTKPLKVQVMHSSIVAHQNFGLKLLSWLGSIIGYSDGLRRILCQVGLQEGPDGENSSLVDRLMLSDSKLWKGARSVYHQLFMSSLLMDLKYKKLFAVRFAKNYQQLQRDFMEDDHERAVSVTALSVQFFTAPTLARMLITEENLMSIIIKTFMDHLRHRDAQGRFQFERYTALQAFKFRRVQSLILDLKYVLISKPTEWSDELRQKFLEGFDAFLELLKCMQGMDPITRQVGQHIEMEPEWEAAFTLQMKLTHVISMMQDWCASDEKVLIEAYKKCLAVLMQCHGGYTDGEQPITLSICGHSVETIRYCVSQEKVSIHLPVSRLLAGLHVLLSKSEVAYKFPELLPLSELSPPMLIEHPLRCLVLCAQVHAGMWRRNGFSLVNQIYYYHNVKCRREMFDKDVVMLQTGVSMMDPNHFLMIMLSRFELYQIFSTPDYGKRFSSEITHKDVVQQNNTLIEEMLYLIIMLVGERFSPGVGQVNATDEIKREIIHQLSIKPMAHSELVKSLPEDENKETGMESVIEAVAHFKKPGLTGRGMYELKPECAKEFNLYFYHFSRAEQSKAEEAQRKLKRQNREDTALPPPVLPPFCPLFASLVNILQSDVMLCIMGTILQWAVEHNGYAWSESMLQRVLHLIGMALQEEKQHLENVTEEHVVTFTFTQKISKPGEAPKNSPSILAMLETLQNAPYLEVHKDMIRWILKTFNAVKKMRESSPTSPVAETEGTIMEESSRDKDKAERKRKAEIARLRREKIMAQMSEMQRHFIDENKELFQQTLELDASTSAVLDHSPVASDMTLTALGPAQTQVPEQRQFVTCILCQEEQEVKVESRAMVLAAFVQRSTVLSKNRSKFIQDPEKYDPLFMHPDLSCGTHTSSCGHIMHAHCWQRYFDSVQAKEQRRQQRLRLHTSYDVENGEFLCPLCECLSNTVIPLLLPPRNIFNNRLNFSDQPNLTQWIRTISQQIKALQFLRKEESTPNNASTKNSENVDELQLPEGFRPDFRPKIPYSESIKEMLTTFGTATYKVGLKVHPNEEDPRVPIMCWGSCAYTIQSIERILSDEDKPLFGPLPCRLDDCLRSLTRFAAAHWTVASVSVVQGHFCKLFASLVPNDSHEELPCILDIDMFHLLVGLVLAFPALQCQDFSGISLGTGDLHIFHLVTMAHIIQILLTSCTEENGMDQENPPCEEESAVLALYKTLHQYTGSALKEIPSGWHLWRSVRAGIMPFLKCSALFFHYLNGVPSPPDIQVPGTSHFEHLCSYLSLPNNLICLFQENSEIMNSLIESWCRNSEVKRYLEGERDAIRYPRESNKLINLPEDYSSLINQASNFSCPKSGGDKSRAPTLCLVCGSLLCSQSYCCQTELEGEDVGACTAHTYSCGSGVGIFLRVRECQVLFLAGKTKGCFYSPPYLDDYGETDQGLRRGNPLHLCKERFKKIQKLWHQHSVTEEIGHAQEANQTLVGIDWQHL

SEQ ID NO: 94622 - protein, 1755 aa, Homo sapiens
  Payload ID: 18867
  Gene Name: ubiquitin protein ligase E3 component n-recognin 2
  Uniprot ID: Q8IWV8
  ENSP ID: ENSP00000361992
MASELEPEVQAIDRSLLECSAEEIAGKWLQATDLTREVYQHLAHYVPKIYCRGPNPFPQKEDMLAQHVLLGPMEWYLCGEDPAFGFPKLEQANKPSHLCGRVFKVGEPTYSCRDCAVDPTCVLCMECFLGSIHRDHRYRMTTSGGGGFCDCGDTEAWKEGPYCQKHELNTSEIEEEEDPLVHLSEDVIARTYNIFAITFRYAVEILTWEKESELPADLEMVEKSDTYYCMLFNDEVHTYEQVIYTLQKAVNCTQKEAIGFATTVDRDGRRSVRYGDFQYCEQAKSVIVRNTSRQTKPLKVQVMHSSIVAHQNFGLKLLSWLGSIIGYSDGLRRILCQVGLQEGPDGENSSLVDRLMLSDSKLWKGARSVYHQLFMSSLLMDLKYKKLFAVRFAKNYERLQSDYVTDDHDREFSVADLSVQIFTVPSLARMLITEENLMSIIIKTFMDHLRHRDAQGRFQFERYTALQAFKFRRVQSLILDLKYVLISKPTEWSDELRQKFLEGFDAFLELLKCMQGMDPITRQVGQHIEMEPEWEAAFTLQMKLTHVISMMQDWCASDEKVLIEAYKKCLAVLMQCHGGYTDGEQPITLSICGHSVETIRYCVSQEKVSIHLPVSRLLAGLHVLLSKSEVAYKFPELLPLSELSPPMLIEHPLRCLVLCAQVHAGMWRRNGFSLVNQIYYYHNVKCRREMFDKDVVMLQTGVSMMDPNHFLMIMLSRFELYQIFSTPDYGKRFSSEITHKDVVQQNNTLIEEMLYLIIMLVGERFSPGVGQVNATDEIKREIIHQLSIKPMAHSELVKSLPEDENKETGMESVIEAVAHFKKPGLTGRGMYELKPECAKEFNLYFYHFSRAEQSKAEEAQRKLKRQNREDTALPPPVLPPFCPLFASLVNILQSDVMLCIMGTILQWAVEHNGYAWSESMLQRVLHLIGMALQEEKQHLENVTEEHVVTFTFTQKISKPGEAPKNSPSILAMLETLQNAPYLEVHKDMIRWILKTFNAVKKMRESSPTSPVAETEGTIMEESSRDKDKAERKRKAEIARLRREKIMAQMSEMQRHFIDENKELFQQTLELDASTSAVLDHSPVASDMTLTALGPAQTQVPEQRQFVTCILCQEEQEVKVESRAMVLAAFVQRSTVLSKNRSKFIQDPEKYDPLFMHPDLSCGTHTSSCGHIMHAHCWQRYFDSVQAKEQRRQQRLRLHTSYDVENGEFLCPLCECLSNTVIPLLLPPRNIFNNRLNFSDQPNLTQWIRTISQQIKALQFLRKEESTPNNASTKNSENVDELQLPEGFRPDFRPKIPYSESIKEMLTTFGTATYKVGLKVHPNEEDPRVPIMCWGSCAYTIQSIERILSDEDKPLFGPLPCRLDDCLRSLTRFAAAHWTVASVSVVQGHFCKLFASLVPNDSHEELPCILDIDMFHLLVGLVLAFPALQCQDFSGISLGTGDLHIFHLVTMAHIIQILLTSCTEENGMDQENPPCEEESAVLALYKTLHQYTGSALKEIPSGWHLWRSVRAGIMPFLKCSALFFHYLNGVPSPPDIQVPGTSHFEHLCSYLSLPNNLICLFQENSEIMNSLIESWCRNSEVKRYLEGERDAIRYPRESNKLINLPEDYSSLINQASNFSCPKSGGDKSRAPTLCLVCGSLLCSQSYCCQTELEGEDVGACTAHTYSCGSGVGIFLRVRECQVLFLAGKTKGCFYSPPYLDDYGETDQGLRRGNPLHLCKERFKKIQKLWHQHSVTEEIGHAQEANQTLVGIDWQHL

SEQ ID NO: 94623 - protein, 439 aa, Homo sapiens
  Payload ID: 18867
  Gene Name: ubiquitin protein ligase E3 component n-recognin 2
  Uniprot ID: Q8IWV8
  ENSP ID: ENSP00000361994
MASELEPEVQAIDRSLLECSAEEIAGKWLQATDLTREVYQHLAHYVPKIYCRGPNPFPQKEDMLAQHVLLGPMEWYLCGEDPAFGFPKLEQANKPSHLCGRVFKVGEPTYSCRDCAVDPTCVLCMECFLGSIHRDHRYRMTTSGGGGFCDCGDTEAWKEGPYCQKHELNTSEIEEEEDPLVHLSEDVIARTYNIFAITFRYAVEILTWEKESELPADLEMVEKSDTYYCMLFNDEVHTYEQVIYTLQKAVNCTQKEAIGFATTVDRDGRRSVRYGDFQYCEQAKSVIVRNTSRQTKPLKVQVMHSSIVAHQNFGLKLLSWLGSIIGYSDGLRRILCQVGLQEGPDGENSSLVDRLMLSDSKLWKGARSVYHQLFMSSLLMDLKYKKLFAVRFAKNYERLQSDYVTDDHDREFSVADLSVQIFTVPSLFSISAGRSGSPL

SEQ ID NO: 94624 - protein, 1888 aa, Homo sapiens
  Payload ID: 18868
  Gene Name: ubiquitin protein ligase E3 component n-recognin 3 (putative)
  Uniprot ID: Q6ZT12
  ENSP ID: ENSP00000272793
MAAAAAAAVGGQQPSQPELPAPGLALDKAATAAHLKAALSRPDNRAGAEELQALLERVLSAERPLAAAAGGEDAAAAGGGGGPGAAEEEALEWCKCLLAGGGGYDEFCAAVRAYDPAALCGLVWTANFVAYRCRTCGISPCMSLCAECFHQGDHTGHDFNMFRSQAGGACDCGDSNVMRESGFCKRHQIKSSSNIPCVPKDLLMMSEFVLPRFIFCLIQYLREGYNEPAADGPSEKDLNKVLQLLEPQISFLEDLTKMGGAMRSVLTQVLTNQQNYKDLTSGLGENACVKKSHEKYLIALKSSGLTYPEDKLVYGVQEPSAGTSSLAVQGFIGATGTLGQVDSSDEDDQDGSQGLGKRKRVKLSSGTKDQSIMDVLKHKSFLEELLFWTIKYEFPQKMVTFLLNMLPDQEYKVAFTKTFVQHYAFIMKTLKKSHESDTMSNRIVHISVQLFSNEELARQVTEECQLLDIMVTVLLYMMESCLIKSELQDEENSLHVVVNCGEALLKNNTYWPLVSDFINILSHQSVAKRFLEDHGLLVTWMNFVSFFQGMNLNKRELNEHVEFESQTYYAAFAAELEACAQPMWGLLSHCKVRETQEYTRNVVRYCLEALQDWFDAINFVDEPAPNQVTFHLPLHRYYAMFLSKAVKCQELDLDSVLPDQEMLMKLMIHPLQIQASLAEIHSNMWVRNGLQIKGQAMTYVQSHFCNSMIDPDIYLLQVCASRLDPDYFISSVFERFKVVDLLTMASQHQNTVLDAEHERSMLEGALTFLVILLSLRLHLGMSDDEILRAEMVAQLCMNDRTHSSLLDLIPENPNPKSGIIPGSYSFESVLSAVADFKAPVFEPGGSMQQGMYTPKAEVWDQEFDPVMVILRTVYRRDVQSAMDRYTAFLKQSGKFPGNPWPPYKKRTSLHPSYKGLMRLLHCKTLHIVLFTLLYKILMDHQNLSEHVLCMVLYLIELGLENSAEEESDEEASVGGPERCHDSWFPGSNLVSNMRHFINYVRVRVPETAPEVKRDSPASTSSDNLGSLQNSGTAQVFSLVAERRKKFQEIINRSSSEANQVVRPKTSSKWSAPGSAPQLTTAILEIKESILSLLIKLHHKLSGKQNSYYPPWLDDIEILIQPEIPKYSHGDGITAVERILLKAASQSRMNKRIIEEICRKVTPPVPPKKVTAAEKKTLDKEERRQKARERQQKLLAEFASRQKSFMETAMDVDSPENDIPMEITTAEPQVSEAVYDCVICGQSGPSSEDRPTGLVVLLQASSVLGQCRDNVEPKKLPISEEEQIYPWDTCAAVHDVRLSLLQRYFKDSSCLLAVSIGWEGGVYVQTCGHTLHIDCHKSYMESLRNDQVLQGFSVDKGEFTCPLCRQFANSVLPCYPGSNVENNPWQRPSNKSIQDLIKEVEELQGRPGAFPSETNLSKEMESVMKDIKNTTQKKYRDYSKTPGSPDNDFLFMYSVARTNLELELIHRGGNLCSGGASTAGKRSCLNQLFHVLALHMRLYSIDSEYNPWRKLTQLEEMNPQLGYEEQQPEVPILYHDVTSLLLIQILMMPQPLRKDHFTCIVKVLFTLLYTQALAALSVKCSEEDRSAWKHAGALKKSTCDAEKSYEVLLSFVISELFKGKLYHEEGTQECAMVNPIAWSPESMEKCLQDFCLPFLRITSLLQHHLFGEDLPSCQEEEEFSVLASCLGLLPTFYQTEHPFISASCLDWPVPAFDIITQWCFEIKSFTERHAEQGKALLIQESKWKLPHLLQLPENYNTIFQYYHRKTCSVCTKVPKDPAVCLVCGTFVCLKGLCCKQQSYCECVLHSQNCGAGTGIFLLINASVIIIIRGHRFCLWGSVYLDAHGEEDRDLRRGKPLYICKERYKVLEQQWISHTFDHINKRWGPHYNGL

SEQ ID NO: 94625 - protein, 950 aa, Homo sapiens
  Payload ID: 18868
  Gene Name: ubiquitin protein ligase E3 component n-recognin 3 (putative)
  ENSP ID: ENSP00000376409
  MOD_RES (1)..(1): Any amino acid
XSEHVLCMVLYLIELGLENSAEEESDEEASVGGPERCHDSWFPGSNLVSNMRHFINYVRVRVPETAPEVKRDSPASTSSDNLGSLQNSGTAQVFSLVAERRKKFQEIINRSSSEANQVVRPKTSSKWSAPGSAPQLTTAILEIKESILSLLIKLHHKLSGKQNSYYPPWLDDIEILIQPEIPKYSHGDGITAVERILLKAASQSRMNKRIIEEICRKVTPPVPPKKVTAAEKKTLDKEERRQKARERQQKLLAEFASRQKSFMETAMDVDSPENDIPMEITTAEPQVSEAVYDCVICGQSGPSSEDRPTGLVVLLQASSVLGQCRDNVEPKKLPISEEEQIYPWDTCAAVHDVRLSLLQRYFKDSSCLLAVSIGWEGGVYVQTCGHTLHIDCHKSYMESLRNDQVLQGFSVDKGEFTCPLCRQFANSVLPCYPGSNVENNPWQRPSNKSIQDLIKEVEELQGRPGAFPVSISSETNLSKEMESVMKDIKNTTQKKYRDYSKTPGSPDNDFLFMYSVARTNLELELIHRGGNLCSGGASTAGKRSCLNQLFHVLALHMRLYSIDSEYNPWRKLTQLEEMNPQLGYEEQQPEVPILYHDVTSLLLIQILMMPQPLRKDHFTCIVKVLFTLLYTQALAALSVKCSEEDRSAWKHAGALKKSTCDAEKSYEVLLSFVISELFKGKLYHEEGTQECAMVNPIAWSPESMEKCLQDFCLPFLRITSLLQHHLFGEDLPSCQEEEEFSVLASCLGLLPTFYQTEHPFISASCLDWPVPAFDIITQWCFEIKSFTERHAEQGKALLIQESKWKLPHLLQLPENYNTIFQYYHRKTCSVCTKVPKDPAVCLVCGTFVCLKGLCCKQQSYCECVLHSQNCGAGTGIFLLINASVIIIIRGHRFCLWGSVYLDAHGEEDRDLRRGKPLYICKERYKVLEQQWISHTFDHINKRWGPHYNGL

SEQ ID NO: 94626 - protein, 588 aa, Homo sapiens
  Payload ID: 18868
  Gene Name: ubiquitin protein ligase E3 component n-recognin 3 (putative)
  ENSP ID: ENSP00000389097
LHIDCHKSYMESLRNDQVLQGFSVDKGEFTCPLCRQFANSVLPCYPGSNVENNPWQRPSNKSIQDLIKEVEELQGRPGAFPSETNLSKEMESVMKDIKNTTQKKYRDYSKTPGSPDNDFLFMYSVARTNLELELIHRGGNLCSGGASTAGKRSCLNFCFIIFPFTKSEIILCQYRKSHDKVYPKYQLFHVLALHMRLYSIDSEYNPWRKLTQLEEMNPQLGYEEQQPEVPILYHDVTSLLLIQILMMPQPLRKDHFTCIVKVLFTLLYTQALAALSVKCSEEDRSAWKHAGALKKSTCDAEKSYEVLLSFVISELFKGKLYHEEGTQECAMVNPIAWSPESMEKCLQDFCLPFLRITSLLQHHLFGEDLPSCQEEEEFSVLASCLGLLPTFYQTEHPFISASCLDWPVPAFDIITQWCFEIKSFTERHAEQGKALLIQESKWKLPHLLQLPENYNTIFQYYHRKTCSVCTKVPKDPAVCLVCGTFVCLKGLCCKQQSYCECVLHSQNCGAGTGIFLLINASVIIIIRGHRFCLWGSVYLDAHGEEDRDLRRGKPLYICKERYKVLEQQWISHTFDHINKRWGPHYNGL

SEQ ID NO: 94627 - protein, 1888 aa, Homo sapiens; identical to SEQ ID NO: 94624
  Payload ID: 18868
  Gene Name: ubiquitin protein ligase E3 component n-recognin 3 (putative)
  Uniprot ID: Q6ZT12
  ENSP ID: ENSP00000396068

SEQ ID NO: 94628 - protein, 77 aa, Homo sapiens
  Payload ID: 18868
  Gene Name: ubiquitin protein ligase E3 component n-recognin 3 (putative)
  ENSP ID: ENSP00000408436
MKDIKNTTQKKYRDYSKTPGSPDNDFLFMYSVARLGNRRFVKTKCIDLIYIPLMKEHMLVSARFLSTSMKSLSLLPC

SEQ ID NO: 94629 - protein, 384 aa, Homo sapiens
  Payload ID: 18868
  Gene Name: ubiquitin protein ligase E3 component n-recognin 3 (putative)
  ENSP ID: ENSP00000415982
  MOD_RES (1)..(1): Any amino acid
XPKAEVWDQEFDPVMVILRTVYRRDVQSAMDRYTAFLKQSGKFPGNPWPPYKKRTSLHPSYKGLMRLLHCKTLHIVLFTLLYKILMDHQNLSEHVLCMVLYLIELGLENSAEEESDEEASVGGPERCHDSWFPGSNLVSNMRHFINYVRVRVPETAPEVKRDSPASTSSDNLGSLQNSGTAQVFSLVAERRKKFQEIINRSSSEANQVVRPKTSSKWSAPGSAPQLTTAILEIKESILSLLIKLHHKLSGKQNSYYPPWLDDIEILIQPEIPKYSHGDGITAVERILLKAASQSRMNKRIIEEICRKVTPPVPPKKVTAAEKKTLDKEERRQKARERQQKLLAEFASRQKSFMETAMDVVRQNKNNFLRNQLSNVPRADWVVLP

SEQ ID NO: 94630 - protein, 212 aa, Homo sapiens
  Payload ID: 18869
  Gene Name: ubiquitin protein ligase E3 component n-recognin 4
  Uniprot ID: Q5T4S7
  ENSP ID: ENSP00000364366
MVRTINLYYNNRTVQAIVELKNKPARWHKAKKVQLTPGQTEVKIDLPLPIVASNLMIEFADFYENYQASTETLQCPRCSASVPANPGVCGNCGENVYQCHKCRSINYDEKDPFLCNACGFCKYARFDFMLYAKPCCAVDPIENEEDRKKAVSNINTLLDKADRVYHQLMGHRPQLENLLCKVNEAAPEKPQVVPRCKGHLDKGLGLDQKTAS

SEQ ID NO: 94631 - protein, 890 aa, Homo sapiens
  Payload ID: 18869
  Gene Name: ubiquitin protein ligase E3 component n-recognin 4
  ENSP ID: ENSP00000364372
MLEDMTTGTESETKAFMAVCIETAKRYNLDDYRTPVFIFERLCSIIYPEENEVTEFFVTLEKDPQQEDFLQGRMPGNPYSSNEPGIGPLMRDIKNKICQDCDLVALLEDDSGMELLVNNKIISLDLPVAEVYKKVWCTTNEGEPMRIVYRMRGLLGDATEEFIESLDSTTDEEEDEEEVYKMAGVMAQCGGLECMLNRLAGIRDFKQGRHLLTVLLKLFSYCVKVKVNRQQLVKLEMNTLNVMLGTLNLALVAEQESKDSGGAAVAEQVLSIMEIILDESNAEPLSEDKGNLLLTGDKDQLVMLLDQINSTFVRSNPSVLQGLLRIIPYLSFGEVEKMQILVERFKPYCNFDKYDEDHSGDDKVFLDCFCKIAAGIKNNSNGHQLKDLILQKGITQNALDYMKKHIPSAKNLDADIWKKFLSRPALPFILRLLRGLAIQHPGTQVLIGTDSIPNLHKLEQVSSDEGIGTLAENLLEALREHPDVNKKIDAARRETRAEKKRMAMAMRQKALGTLGMTTNEKGQVVTKTALLKQMEELIEEPGLTCCICREGYKFQPTKVLGIYTFTKRVALEEMENKPRKQQGYSTVSHFNIVHYDCHLAAVRLARGREEWESAALQNANTKCNGLLPVWGPHVPESAFATCLARHNTYLQECTGQREPTYQLNIHDIKLLFLRFAMEQSFSADTGGGGRESNIHLIPYIIHTVLYVLNTTRATSREEKNLQGFLEQPKEKWVESAFEVDGPYYFTVLALHILPPEQWRATRVEILRRLLVTSQARAVAPGGATRLTDKAVKDYSAYRSSLLFWALVDLIYNMFKKVPTSNTEGGWSCSLAEYIRHNDMPIYEAADKALKTFQEEFMPVETFSEFLDVAGLLSEITDPESFLKDLLNSVP

SEQ ID NO: 94632 - protein, 258 aa, Homo sapiens
  Payload ID: 18869
  Gene Name: ubiquitin protein ligase E3 component n-recognin 4
  ENSP ID: ENSP00000364373
MGPGKKGRCREEGPGRGRRAWIIRGSGSSRQGWVGSVESSKRSANVTRQRQIEQILPALAAGSCFHPAFILSCRFSSRTRATSREEKNLQGFLEQPKEKWVESAFEVDGPYYFTVLALHILPPEQWRATRVEILRRLLVTSQARAVAPGGATRLTDKAVKDYSAYRSSLLFWALVDLIYNMFKKVPTSNTEGGWSCSLAEYIRHNDMPIYEAADKALKTFQEEFMPVETFSEFLDVAGLLSEITDPESFLKDLLNSVP

SEQ ID NO: 94633 - protein, 5183 aa, Homo sapiens
  Payload ID: 18869
  Gene Name: ubiquitin protein ligase E3 component n-recognin 4
  Uniprot ID: Q5T4S7
  ENSP ID: ENSP00000364403
MATSGGEEAAAAAPAPGTPATGADTTPGWEVAVRPLLSASYSAFEMKELPQLVASVIESESEILHHEKQYEPFYSSFVALSTHYITTVCSLIPRNQLQSVAAACKVLIEFSLLRLENPDEACAVSQKHLILLIKGLCTGCSRLDRTEIITFTAMMKSAKLPQTVKTLSDVEDQKELASPVSPELRQKEVQMNFLNQLTSVFNPRTVASQPISTQTLVEGENDEQSSTDQASAIKTKNVFIAQNVASLQELGGSEKLLRVCLNLPYFLRYINRFQDAVLANSFFIMPATVADATAVRNGFHSLVIDVTMALDTLSLPVLEPLNPSRLQDVTVLSLSCLYAGVSVATCMAILHVGSAQQVRTGSTSSKEDDYESDAATIVQKCLEIYDMIGQAISSSRRAGGEHYQNFQLLGAWCLLNSLFLILNLSPTALADKGKEKDPLAALRVRDILSRTKEGVGSPKLGPGKGHQGFGVLSVILANHAIKLLTSLFQDLQVEALHKGWETDGPPAALSIMAQSTSIQRIQRLIDSVPLMNLLLTLLSTSYRKACVLQRQRKGSMSSDASASTDSNTYYEDDFSSTEEDSSQDDDSEPILGQWFEETISPSKEKAAPPPPPPPPPLESSPRVKSPSKQAPGEKGNILASRKDPELFLGLASNILNFITSSMLNSRNNFIRNYLSVSLSEHHMATLASIIKEVDKDGLKGSSDEEFAAALYHFNHSLVTSDLQSPNLQNTLLQQLGVAPFSEGPWPLYIHPQSLSVLSRLLLIWQHKASAQGDPDVPECLKVWDRFLSTMKQNALQGVVPSETEDLNVEHLQMLLLIFHNFTETGRRAILSLFVQIIQELSVNMDAQMRFVPLILARLLLIFDYLLHQYSKAPVYLFEQVQHNLLSPPFGWASGSQDSNSRRATTPLYHGFKEVEENWSKHFSSDAVPHPRFYCVLSPEASEDDLNRLDSVACDVLFSKLVKYDELYAALTALLAAGSQLDTVRRKENKNVTALEACALQYYFLILWRILGILPPSKTYINQLSMNSPEMSECDILHTLRWSSRLRISSYVNWIKDHLIKQGMKAEHASSLLELASTTKCSSVKYDVEIVEEYFARQISSFCSIDCTTILQLHEIPSLQSIYTLDAAISKVQVSLDEHFSKMAAETDPHKSSEITKNLLPATLQLIDTYASFTRAYLLQNFNEEGTTEKPSKEKLQGFAAVLAIGSSRCKANTLGPTLVQNLPSSVQTVCESWNNINTNEFPNIGSWRNAFANDTIPSESYISAVQAAHLGTLCSQSLPLAASLKHTLLSLVRLTGDLIVWSDEMNPPQVIRTLLPLLLESSTESVAEISSNSLERILGPAESDEFLARVYEKLITGCYNILANHADPNSGLDESILEECLQYLEKQLESSQARKAMEEFFSDSGELVQIMMATANENLSAKFCNRVLKFFTKLFQLTEKSPNPSLLHLCGSLAQLACVEPVRLQAWLTRMTTSPPKDSDQLDVIQENRQLLQLLTTYIVRENSQVGEGVCAVLLGTLTPMATEMLANGDGTGFPELMVVMATLASAGQGAGHLQLHNAAVDWLSRCKKYLSQKNVVEKLNANVMHGKHVMILECTCHIMSYLADVTNALSQSNGQGPSHLSVDGEERAIEVDSDWVEELAVEEEDSQAEDSDEDSLCNKLCTFTITQKEFMNQHWYHCHTCKMVDGVGVCTVCAKVCHKDHEISYAKYGSFFCDCGAKEDGSCLALVKRTPSSGMSSTMKESAFQSEPRISESLVRHASTSSPADKAKVTISDGKVADEEKPKKSSLCRTVEGCREELQNQANFSFAPLVLDMLNFLMDAIQTNFQQASAVGSSSRAQQALSELHTVEKAVEMTDQLMVPTLGSQEGAFENVRMNYSGDQGQTIRQLISAHVLRRVAMCVLSSPHGRRQHLAVSHEKGKITVLQLSALLKQADSSKRKLTLTRLASAPVPFTVLSLTGNPCKEDYLAVCGLKDCHVLTFSSSGSVSDHLVLHPQLATGNFIIKAVWLPGSQTELAIVTADFVKIYDLCVDALSPTFYFLLPSSKIRDVTFLFNEEGKNIIVIMSSAGYIYTQLMEEASSAQQGPFYVTNVLEINHEDLKDSNSQVAGGGVSVYYSHVLQMLFFSYCQGKSFAATISRTTLEVLQLFPINIKSSNGGSKTSPALCQWSEVMNHPGLVCCVQQTTGVPLVVMVKPDTFLIQEIKTLPAKAKIQDMVAIRHTACNEQQRTTMILLCEDGSLRIYMANVENTSYWLQPSLQPSSVISIMKPVRKRKTATITTRTSSQVTFPIDFFEHNQQLTDVEFGGNDLLQVYNAQQIKHRLNSTGMYVANTKPGGFTIEISNNNSTMVMTGMRIQIGTQAIERAPSYIEIFGRTMQLNLSRSRWFDFPFTREEALQADKKLNLFIGASVDPAGVTMIDAVKIYGKTKEQFGWPDEPPEEFPSASVSNICPSNLNQSNGTGDSDSAAPTTTSGTVLERLVVSSLEALESCFAVGPIIEKERNKNAAQELATLLLSLPAPASVQQQSKSLLASLHTSRSAYHSHKDQALLSKAVQCLNTSSKEGKDLDPEVFQRLVITARSIAIMRPNNLVHFTESKLPQMETEGMDEGKEPQKQLEGDCCSFITQLVNHFWKLHASKPKNAFLAPACLPGLTHIEATVNALVDIIHGYCTCELDCINTASKIYMQMLLCPDPAVSFSCKQALIRVLRPRNKRRHVTLPSSPRSNTPMGDKDDDDDDDADEKMQSSGIPNGGHIRQESQEQSEVDHGDFEMVSESMVLETAENVNNGNPSPLEALLAGAEGFPPMLDIPPDADDETMVELAIALSLQQDQQGSSSSALGLQSLGLSGQAPSSSSLDAGTLSDTTASAPASDDEGSTAATDGSTLRTSPADHGGSVGSESGGSAVDSVAGEHSVSGRSSAYGDATAEGHPAGPGSVSSSTGAISTTTGHQEGDGSEGEGEGETEGDVHTSNRLHMVRLMLLERLLQTLPQLRNVGGVRAIPYMQVILMLTTDLDGEDEKDKGALDNLLSQLIAELGMDKKDVSKKNERSALNEVHLVVMRLLSVFMSRTKSGSKSSICESSSLISSATAAALLSSGAVDYCLHVLKSLLEYWKSQQNDEEPVATSQLLKPHTTSSPPDMSPFFLRQYVKGHAADVFEAYTQLLTEMVLRLPYQIKKITDTNSRIPPPVFDHSWFYFLSEYLMIQQTPFVRRQVRKLLLFICGSKEKYRQLRDLHTLDSHVRGIKKLLEEQGIFLRASVVTASSGSALQYDTLISLMEHLKACAEIAAQRTINWQKFCIKDDSVLYFLLQVSFLVDEGVSPVLLQLLSCALCGSKVLAALAASSGSSSASSSSAPVAASSGQATTQSKSSTKKSKKEEKEKEKDGETSGSQEDQLCTALVNQLNKFADKETLIQFLRCFLLESNSSSVRWQAHCLTLHIYRNSSKSQQELLLDLMWSIWPELPAYGRKAAQFVDLLGYFSLKTPQTEKKLKEYSQKAVEILRTQNHILTNHPNSNIYNTLSGLVEFDGYYLESDPCLVCNNPEVPFCYIKLSSIKVDTRYTTTQQVVKLIGSHTISKVTVKIGDLKRTKMVRTINLYYNNRTVQAIVELKNKPARWHKAKKVQLTPGQTEVKIDLPLPIVASNLMIEFADFYENYQASTETLQCPRCSASVPANPGVCGNCGENVYQCHKCRSINYDEKDPFLCNACGFCKYARFDFMLYAKPCCAVDPIENEEDRKKAVSNINTLLDKADRVYHQLMGHRPQLENLLCKVNEAAPEKPQDDSGTAGGISSTSASVNRYILQLAQEYCGDCKNSFDELSKIIQKVFASRKELLEYDLQQREAATKSSRTSVQPTFTASQYRALSVLGCGHTSSTKCYGCASAVTEHCITLLRALATNPALRHILVSQGLIRELFDYNLRRGAAAMREEVRQLMCLLTRDNPEATQQMNDLIIGKVSTALKGHWANPDLASSLQYEMLLLTDSISKEDSCWELRLRCALSLFLMAVNIKTPVVVENITLMCLRILQKLIKPPAPTSKKNKDVPVEALTTVKPYCNEIHAQAQLWLKRDPKASYDAWKKCLPIRGIDGNGKAPSKSELRHLYLTEKYVWRWKQFLSRRGKRTSPLDLKLGHNNWLRQVLFTPATQAARQAACTIVEALATIPSRKQQVLDLLTSYLDELSIAGECAAEYLALYQKLITSAHWKVYLAARGVLPYVGNLITKEIARLLALEEATLSTDLQQGYALKSLTGLLSSFVEVESIKRHFKSRLVGTVLNGYLCLRKLVVQRTKLIDETQDMLLEMLEDMTTGTESETKAFMAVCIETAKRYNLDDYRTPVFIFERLCSIIYPEENEVTEFFVTLEKDPQQEDFLQGRMPGNPYSSNEPGIGPLMRDIKNKICQDCDLVALLEDDSGMELLVNNKIISLDLPVAEVYKKVWCTTNEGEPMRIVYRMRGLLGDATEEFIESLDSTTDEEEDEEEVYKMAGVMAQCGGLECMLNRLAGIRDFKQGRHLLTVLLKLFSYCVKVKVNRQQLVKLEMNTLNVMLGTLNLALVAEQESKDSGGAAVAEQVLSIMEIILDESNAEPLSEDKGNLLLTGDKDQLVMLLDQINSTFVRSNPSVLQGLLRIIPYLSFGEVEKMQILVERFKPYCNFDKYDEDHSGDDKVFLDCFCKIAAGIKNNSNGHQLKDLILQKGITQNALDYMKKHIPSAKNLDADIWKKFLSRPALPFILRLLRGLAIQHPGTQVLIGTDSIPNLHKLEQVSSDEGIGTLAENLLEALREHPDVNKKIDAARRETRAEKKRMAMAMRQKALGTLGMTTNEKGQVVTKTALLKQMEELIEEPGLTCCICREGYKFQPTKVLGIYTFTKRVALEEMENKPRKQQGYSTVSHFNIVHYDCHLAAVRLARGREEWESAALQNANTKCNGLLPVWGPHVPESAFATCLARHNTYLQECTGQREPTYQLNIHDIKLLFLRFAMEQSFSADTGGGGRESNIHLIPYIIHTVLYVLNTTRATSREEKNLQGFLEQPKEKWVESAFEVDGPYYFTVLALHILPPEQWRATRVEILRRLLVTSQARAVAPGGATRLTDKAVKDYSAYRSSLLFWALVDLIYNMFKKVPTSNTEGGWSCSLAEYIRHNDMPIYEAADKALKTFQEEFMPVETFSEFLDVAGLLSEITDPESFLKDLLNSVP

SEQ ID NO: 94634 - protein, 984 aa, Homo sapiens
  Payload ID: 18869
  Gene Name: ubiquitin protein ligase E3 component n-recognin 4
  ENSP ID: ENSP00000395313
DFPFTREEALQADKKLNLFIGASVDPAGVTMIDAVKIYGKTKEQFGWPDEPPEEFPSASVSNICPSNLNQSNGTGDSDSAAPTTTSGTVLERLVVSSLEALESCFAVGPIIEKERNKNAAQELATLLLSLPAPASVQQQSKSLLASLHTSRSAYHSHKDQALLSKAVQCLNTSSKEGKDLDPEVFQRLVITARSIAIMRPNNLVHFTESKLPQMETDCFFPRCACWSLGIVGILIGAPLETPSPEGMDEGKEPQKQLEGDCCSFITQLVNHFWKLHASKPKNAFLAPACLPGLTHIEATVNALVDIIHGYCTCELDCINTASKIYMQMLLCPDPAVSFSCKQALIRVLRPRNKRRHVTLPSSPRSNTPMGDKDDDDDDDADEKMQSSGIPNGGHIRQESQEQSEVDHGDFEMVSESMVLETAENVNNGNPSPLEALLAGAEGFPPMLDIPPDADDETMVELAIALSLQQDQQAPASDDEGSTAATDGSTLRTSPADHGGSVGSESGGSAVDSVAGEHSVSGRSSAYGDATAEGHPAGPGSVSSSTGAISTTTGHQEGDGSEGEGEGETEGDVHTSNRLHMVRLMLLERLLQTLPQLRNVGGVRAIPYMQVILMLTTDLDGEDEKDKGALDNLLSQLIAELGMDKKDVSKKNERSALNEVHLVVMRLLSVFMSRTKSGSKSSICESSSLISSATAAALLSSGAVDYCLHVLKSLLEYWKSQQNDEEPVATSQLLKPHTTSSPPDMSPFFLRQYVKGHAADVFEAYTQLLTEMVLRLPYQIKKITDTNSRIPPPVFDHSWFYFLSEYLMIQQTPFVRRQVRKLLLFICGSKEKYRQLRDLHTLDSHVRGIKKLLEEQGIFLRASVVTASSGSALQYDTLISLMEHLKACAEIAAQRTINWQKFCIKDDSVLYFLLQVSFLVDEGVSPVLLQLLSCALCGSKVLAALAASSGSSSASSSSAPVAASSGQATTQSKSSTKKSKKEEKE

SEQ ID NO: 94635 - protein, 2058 aa, Homo sapiens
  Payload ID: 18869
  Gene Name: ubiquitin protein ligase E3 component n-recognin 4
  ENSP ID: ENSP00000404897
LVRLTGDLIVWSDEMNPPQVIRTLLPLLLESSTESVAEISSNSLERILGPAESDEFLARVYEKLITGCYNILANHADPNSGLDESILEECLQYLEKQLESSQARKAMEEFFSDSGELVQIMMATANENLSAKFCNRVLKFFTKLFQLTEKSPNPSLLHLCGSLAQLACVEPVRLQAWLTRMTTSPPKDSDQLDVIQENRQLLQLLTTYIVRENSQVGEGVCAVLLGTLTPMATEMLANGDGTGFPELMVVMATLASAGQGAGHLQLHNAAVDWLSRCKKYLSQKNVVEKLNANVMHGKHVMILECTCHIMSYLADVTNALSQSNGQGPSHLSVDGEERAIEVDSDWVEELAVEEEDSQAEDSDEDSLCNKLCTFTITQKEFMNQHWYHCHTCKMVDGVGVCTVCAKVCHKDHEISYAKYGSFFCDCGAKEDGSCLALVKRTPSSGMSSTMKESAFQSEPRISESLVRHASTSSPADKAKVTISDGKVADEEKPKKSSLCRTVEGCREELQNQANFSFAPLVLDMLNFLMDAIQTNFQQASAVGSSSRAQQALSELHTVEKAVEMTDQLMVPTLGSQEGAFENVRMNYSGDQGQTIRQLISAHVLRRVAMCVLSSPHGRRQHLAVSHEKGKITVLQLSALLKQADSSKRKLTLTRLASAPVPFTVLSLTGNPCKEDYLAVCGLKDCHVLTFSSSGSVSDHLVLHPQLATGNFIIKAVWLPGSQTELAIVTADFVKIYDLCVDALSPTFYFLLPSSKIRDVTFLFNEEGKNIIVIMSSAGYIYTQLMEEASSAQQGPFYVTNVLEINHEDLKDSNSQVAGGGVSVYYSHVLQMLFFSYCQGKSFAATISRTTLEVLQLFPINIKSSNGGSKTSPALCQWSEVMNHPGLVCCVQQTTGVPLVVMVKPDTFLIQEIKTLPAKAKIQDMVAIRHTACNEQQRTTMILLCEDGSLRIYMANVENTSYWLQPSLQPSSVISIMKPVRKRKTATITTRTSSQVTFPIDFFEHNQQLTDVEFGGNDLLQVYNAQQIKHRLNSTGMYVANTKPGGFTIEISNNNSTMVMTGMRIQIGTQAIERAPSYIEIFGRTMQLNLSRSRWFDFPFTREEALQADKKLNLFIGASVDPAGVTMIDAVKIYGKTKEQFGWPDEPPEEFPSASVSNICPSNLNQSNGTGDSDSAAPTTTSGTVLESSETESLTKLDRLVVSSLEALESCFAVGPIIEKERNKNAAQELATLLLSLPAPASVQQQSKSLLASLHTSRSAYHSHKDQALLSKAVQCLNTSSKEGKDLDPEVFQRLVITARSIAIMRPNNLVHFTESKLPQMETEGMDEGKEPQKQLEGDCCSFITQLVNHFWKLHASKPKNAFLAPACLPGLTHIEATVNALVDIIHGYCTCELDCINTASKIYMQMLLCPDPAVSFSCKQALIRVLRPRNKRRHVTLPSSPRSNTPMGDKDDDDDDDADEKMQSSGIPNGGHIRQESQEQSEVDHGDFEMVSESMVLETAENVNNGNPSPLEALLAGAEGFPPMLDIPPDADDETMVELAIALSLQQDQQAPASDDEGSTAATDGSTLRTSPADHGGSVGSESGGSAVDSVAGEHSVSGRSSAYGDATAEGHPAGPGSVSSSTGAISTTTGHQEGDGSEGEGEGETEGDVHTSNRLHMVRLMLLERLLQTLPQLRNVGGVRAIPYMQVILMLTTDLDGEDEKDKGALDNLLSQLIAELGMDKKDVSKKNERSALNEVHLVVMRLLSVFMSRTKSGSKSSICESSSLISSATAAALLSSGAVDYCLHVLKSLLEYWKSQQNDEEPVATSQLLKPHTTSSPPDMSPFFLRQYVKGHAADVFEAYTQLLTEMVLRLPYQIKKITDTNSRIPPPVFDHSWFYFLSEYLMIQQTPFVRRQVRKLLLFICGSKEKYRQLRDLHTLDSHVRGIKKLLEEQGIFLRASVVTASSGSALQYDTLISLMEHLKACAEIAAQRTINWQKFCIKDDSVLYFLLQVSFLVDEGVSPVLLQLLSCALCGSKVLAALAASSGSSSASSSSAPVAASSGQATTQSKSSTKKSKK

SEQ ID NO: 94636 - protein, 2798 aa, Homo sapiens
  Payload ID: 18870
  Gene Name: ubiquitin protein ligase E3 component n-recognin 5
  Uniprot ID: O95071
  ENSP ID: ENSP00000220959
MTSIHFVVHPLPGTEDQLNDRLREVSEKLNKYNLNSHPPLNVLEQATIKQCVVGPNHAAFLLEDGRVCRIGFSVQPDRLELGKPDNNDGSKLNSNSGAGRTSRPGRTSDSPWFLSGSETLGRLAGNTLGSRWSSGVGGSGGGSSGRSSAGARDSRRQTRVIRTGRDRGSGLLGSQPQPVIPASVIPEELISQAQVVLQGKSRSVIIRELQRTNLDVNLAVNNLLSRDDEDGDDGDDTASESYLPGEDLMSLLDADIHSAHPSVIIDADAMFSEDISYFGYPSFRRSSLSRLGSSRVLLLPLERDSELLRERESVLRLRERRWLDGASFDNERGSTSKEGEPNLDKKNTPVQSPVSLGEDLQWWPDKDGTKFICIGALYSELLAVSSKGELYQWKWSESEPYRNAQNPSLHHPRATFLGLTNEKIVLLSANSIRATVATENNKVATWVDETLSSVASKLEHTAQTYSELQGERIVSLHCCALYTCAQLENSLYWWGVVPFSQRKKMLEKARAKNKKPKSSAGISSMPNITVGTQVCLRNNPLYHAGAVAFSISAGIPKVGVLMESVWNMNDSCRFQLRSPESLKNMEKASKTTEAKPESKQEPVKTEMGPPPSPASTCSDASSIASSASMPYKRRRSTPAPKEEEKVNEEQWSLREVVFVEDVKNVPVGKVLKVDGAYVAVKFPGTSSNTNCQNSSGPDADPSSLLQDCRLLRIDELQVVKTGGTPKVPDCFQRTPKKLCIPEKTEILAVNVDSKGVHAVLKTGNWVRYCIFDLATGKAEQENNFPTSSIAFLGQNERNVAIFTAGQESPIILRDGNGTIYPMAKDCMGGIRDPDWLDLPPISSLGMGVHSLINLPANSTIKKKAAVIIMAVEKQTLMQHILRCDYEACRQYLMNLEQAVVLEQNLQMLQTFISHRCDGNRNILHACVSVCFPTSNKETKEEEEAERSERNTFAERLSAVEAIANAISVVSSNGPGNRAGSSSSRSLRLREMMRRSLRAAGLGRHEAGASSSDHQDPVSPPIAPPSWVPDPPAMDPDGDIDFILAPAVGSLTTAATGTGQGPSTSTIPGPSTEPSVVESKDRKANAHFILKLLCDSVVLQPYLRELLSAKDARGMTPFMSAVSGRAYPAAITILETAQKIAKAEISSSEKEEDVFMGMVCPSGTNPDDSPLYVLCCNDTCSFTWTGAEHINQDIFECRTCGLLESLCCCTECARVCHKGHDCKLKRTSPTAYCDCWEKCKCKTLIAGQKSARLDLLYRLLTATNLVTLPNSRGEHLLLFLVQTVARQTVEHCQYRPPRIREDRNRKTASPEDSDMPDHDLEPPRFAQLALERVLQDWNALKSMIMFGSQENKDPLSASSRIGHLLPEEQVYLNQQSGTIRLDCFTHCLIVKCTADILLLDTLLGTLVKELQNKYTPGRREEAIAVTMRFLRSVARVFVILSVEMASSKKKNNFIPQPIGKCKRVFQALLPYAVEELCNVAESLIVPVRMGIARPTAPFTLASTSIDAMQGSEELFSVEPLPPRPSSDQSSSSSQSQSSYIIRNPQQRRISQSQPVRGRDEEQDDIVSADVEEVEVVEGVAGEEDHHDEQEEHGEENAEAEGQHDEHDEDGSDMELDLLAAAETESDSESNHSNQDNASGRRSVVTAATAGSEAGASSVPAFFSEDDSQSNDSSDSDSSSSQSDDIEQETFMLDEPLERTTNSSHANGAAQAPRSMQWAVRNTQHQRAASTAPSSTSTPAASSAGLIYIDPSNLRRSGTISTSAAAAAAALEASNASSYLTSASSLARAYSIVIRQISDLMGLIPKYNHLVYSQIPAAVKLTYQDAVNLQNYVEEKLIPTWNWMVSIMDSTEAQLRYGSALASAGDPGHPNHPLHASQNSARRERMTAREEASLRTLEGRRRATLLSARQGMMSARGDFLNYALSLMRSHNDEHSDVLPVLDVCSLKHVAYVFQALIYWIKAMNQQTTLDTPQLERKRTRELLELGIDNEDSEHENDDDTNQSATLNDKDDDSLPAETGQNHPFFRRSDSMTFLGCIPPNPFEVPLAEAIPLADQPHLLQPNARKEDLFGRPSQGLYSSSASSGKCLMEVTVDRNCLEVLPTKMSYAANLKNVMNMQNRQKKEGEEQPVLPEETESSKPGPSAHDLAAQLKSSLLAEIGLTESEGPPLTSFRPQCSFMGMVISHDMLLGRWRLSLELFGRVFMEDVGAEPGSILTELGGFEVKESKFRREMEKLRNQQSRDLSLEVDRDRDLLIQQTMRQLNNHFGRRCATTPMAVHRVKVTFKDEPGEGSGVARSFYTAIAQAFLSNEKLPNLECIQNANKGTHTSLMQRLRNRGERDREREREREMRRSSGLRAGSRRDRDRDFRRQLSIDTRPFRPASEGNPSDDPEPLPAHRQALGERLYPRVQAMQPAFASKITGMLLELSPAQLLLLLASEDSLRARVDEAMELIIAHGRENGADSILDLGLVDSSEKVQENRKRHGSSRSVVDMDLDDTDDGDDNAPLFYQPGKRGFYTPRPGKNTEARLNCFRNIGRILGLCLLQNELCPITLNRHVIKVLLGRKVNWHDFAFFDPVMYESLRQLILASQSSDADAVFSAMDLAFAIDLCKEEGGGQVELIPNGVNIPVTPQNVYEYVRKYAEHRMLVVAEQPLHAMRKGLLDVLPKNSLEDLTAEDFRLLVNGCGEVNVQMLISFTSFNDESGENAEKLLQFKRWFWSIVEKMSMTERQDLVYFWTSSPSLPASEEGFQPMPSITIRPPDDQHLPTANTCISRLYVPLYSSKQILKQKLLLAIKTKNFGFV

SEQ ID NO: 94637 - protein, 2792 aa, Homo sapiens
  Payload ID: 18870
  Gene Name: ubiquitin protein ligase E3 component n-recognin 5
  ENSP ID: ENSP00000427819
MTSIHFVVHPLPGTEDQLNDRLREVSEKLNKYNLNSHPPLNVLEQATIKQCVVGPNHAAFLLEDGRVCRIGFSVQPDRLELGKPDNNDGSKLNSNSGAGRTSRPGRTSDSPWFLSGSETLGRLAGNTLGSRWSSGVGGSGGGSSGRSSAGARDSRRQTRVIRTGRDRGSGLLGSQPQPVIPASVIPEELISQAQVVLQGKSRSVIIRELQRTNLDVNLAVNNLLSRDDEDGDDGDDTASESYLPGEDLMSLLDADIHSAHPSVIIDADAMFSEDISYFGYPSFRRSSLSRLGSSRERDSELLRERESVLRLRERRWLDGASFDNERGSTSKEGEPNLDKKNTPVQSPVSLGEDLQWWPDKDGTKFICIGALYSELLAVSSKGELYQWKWSESEPYRNAQNPSLHHPRATFLGLTNEKIVLLSANSIRATVATENNKVATWVDETLSSVASKLEHTAQTYSELQGERIVSLHCCALYTCAQLENSLYWWGVVPFSQRKKMLEKARAKNKKPKSSAGISSMPNITVGTQVCLRNNPLYHAGAVAFSISAGIPKVGVLMESVWNMNDSCRFQLRSPESLKNMEKASKTTEAKPESKQEPVKTEMGPPPSPASTCSDASSIASSASMPYKRRRSTPAPKEEEKVNEEQWSLREVVFVEDVKNVPVGKVLKVDGAYVAVKFPGTSSNTNCQNSSGPDADPSSLLQDCRLLRIDELQVVKTGGTPKVPDCFQRTPKKLCIPEKTEILAVNVDSKGVHAVLKTGNWVRYCIFDLATGKAEQENNFPTSSIAFLGQNERNVAIFTAGQESPIILRDGNGTIYPMAKDCMGGIRDPDWLDLPPISSLGMGVHSLINLPANSTIKKKAAVIIMAVEKQTLMQHILRCDYEACRQYLMNLEQAVVLEQNLQMLQTFISHRCDGNRNILHACVSVCFPTSNKETKEEEEAERSERNTFAERLSAVEAIANAISVVSSNGPGNRAGSSSSRSLRLREMMRRSLRAAGLGRHEAGASSSDHQDPVSPPIAPPSWVPDPPAMDPDGDIDFILAPAVGSLTTAATGTGQGPSTSTIPGPSTEPSVVESKDRKANAHFILKLLCDSVVLQPYLRELLSAKDARGMTPFMSAVSGRAYPAAITILETAQKIAKAEISSSEKEEDVFMGMVCPSGTNPDDSPLYVLCCNDTCSFTWTGAEHINQDIFECRTCGLLESLCCCTECARVCHKGHDCKLKRTSPTAYCDCWEKCKCKTLIAGQKSARLDLLYRLLTATNLVTLPNSRGEHLLLFLVQTVARQTVEHCQYRPPRIREDRNRKTASPEDSDMPDHDLEPPRFAQLALERVLQDWNALKSMIMFGSQENKDPLSASSRIGHLLPEEQVYLNQQSGTIRLDCFTHCLIVKCTADILLLDTLLGTLVKELQNKYTPGRREEAIAVTMRFLRSVARVFVILSVEMASSKKKNNFIPQPIGKCKRVFQALLPYAVEELCNVAESLIVPVRMGIARPTAPFTLASTSIDAMQGSEELFSVEPLPPRPSSDQSSSSSQSQSSYIIRNPQQRRISQSQPVRGRDEEQDDIVSADVEEVEVVEGVAGEEDHHDEQEEHGEENAEAEGQHDEHDEDGSDMELDLLAAAETESDSESNHSNQDNASGRRSVVTAATAGSEAGASSVPAFFSEDDSQSNDSSDSDSSSSQSDDIEQETFMLDEPLERTTNSSHANGAAQAPRSMQWAVRNTQHQRAASTAPSSTSTPAASSAGLIYIDPSNLRRSGTISTSAAAAAAALEASNASSYLTSASSLARAYSIVIRQISDLMGLIPKYNHLVYSQIPAAVKLTYQDAVNLQNYVEEKLIPTWNWMVSIMDSTEAQLRYGSALASAGDPGHPNHPLHASQNSARRERMTAREEASLRTLEGRRRATLLSARQGMMSARGDFLNYALSLMRSHNDEHSDVLPVLDVCSLKHVAYVFQALIYWIKAMNQQTTLDTPQLERKRTRELLELGIDNEDSEHENDDDTNQSATLNDKDDDSLPAETGQNHPFFRRSDSMTFLGCIPPNPFEVPLAEAIPLADQPHLLQPNARKEDLFGRPSQGLYSSSASSGKCLMEVTVDRNCLEVLPTKMSYAANLKNVMNMQNRQKKEGEEQPVLPEETESSKPGPSAHDLAAQLKSSLLAEIGLTESEGPPLTSFRPQCSFMGMVISHDMLLGRWRLSLELFGRVFMEDVGAEPGSILTELGGFEVKESKFRREMEKLRNQQSRDLSLEVDRDRDLLIQQTMRQLNNHFGRRCATTPMAVHRVKVTFKDEPGEGSGVARSFYTAIAQAFLSNEKLPNLECIQNANKGTHTSLMQRLRNRGERDREREREREMRRSSGLRAGSRRDRDRDFRRQLSIDTRPFRPASEGNPSDDPEPLPAHRQALGERLYPRVQAMQPAFASKITGMLLELSPAQLLLLLASEDSLRARVDEAMELIIAHGRENGADSILDLGLVDSSEKVQENRKRHGSSRSVVDMDLDDTDDGDDNAPLFYQPGKRGFYTPRPGKNTEARLNCFRNIGRILGLCLLQNELCPITLNRHVIKVLLGRKVNWHDFAFFDPVMYESLRQLILASQSSDADAVFSAMDLAFAIDLCKEEGGGQVELIPNGVNIPVTPQNVYEYVRKYAEHRMLVVAEQPLHAMRKGLLDVLPKNSLEDLTAEDFRLLVNGCGEVNVQMLISFTSFNDESGENAEKLLQFKRWFWSIVEKMSMTERQDLVYFWTSSPSLPASEEGFQPMPSITIRPPDDQHLPTANTCISRLYVPLYSSKQILKQKLLLAIKTKNFGFV

SEQ ID NO: 94638 - protein, 166 aa, Homo sapiens
  Payload ID: 18870
  Gene Name: ubiquitin protein ligase E3 component n-recognin 5
  ENSP ID: ENSP00000428062
MGMVISHDMLLGRWRLSLELFGRVFMEDVGAEPGSILTELGGFEVKESKFRREMEKLRNQQSRDLSLEVDRDRDLLIQQTMRQLNNHFGRRCATTPMAVHRVKVTFKDEPGEGSGVARSFYTAIAQAFLSNEKLPNLECIQNANKGTHTSLMQRLRNRGERDRERE

SEQ ID NO: 94639 - protein, 201 aa, Homo sapiens
  Payload ID: 18870
  Gene Name: ubiquitin protein ligase E3 component n-recognin 5
  ENSP ID: ENSP00000428138
  MOD_RES (1)..(1): Any amino acid
XEACRQYLMNLEQAVVLEQNLQMLQTFISHRCDGNRNILHACVSVCFPTSNKETKEEEEAERSERNTFAERLSAVEAIANAISVVSSNGPGNRAGSSSSRSLRLREMMRRSLRAAGLGRHEAGASSSDHQDPVSPPIAPPSWVPDPPAMDPAATGTGQGPSTSTIPGPSTEPSVVESKDRKANAHFILKLLCDSVVLQPYL

SEQ ID NO: 94640 - protein, 527 aa, Homo sapiens
  Payload ID: 18870
  Gene Name: ubiquitin protein ligase E3 component n-recognin 5
  ENSP ID: ENSP00000428693
MAVHRVKVTFKDEPGEGSGVARSFYTAIAQAFLSNEKLPNLECIQNANKGTHTSLMQRLRNRGERDREREREREMRRSSGLRAGSRRDRDRDFRRQLSIDTRPFRPASEGNPSDDPEPLPAHRQALGERLYPRVQAMQPAFASKITGMLLELSPAQLLLLLASEDSLRARVDEAMELIIAHGRENGADSILDLGLVDSSEKVQENRKRHGSSRSVVDMDLDDTDDGDDNAPLFYQPGKRGFYTPRPGKNTEARLNCFRNIGRILGLCLLQNELCPITLNRHVIKVLLGRKVNWHDFAFFDPVMYESLRQLILASQSSDADAVFSAMDLAFAIDLCKEEGGGQVELIPNGVNIPVTPQNVYEYVRKYAEHRMLVVAEQPLHAMRKGLLDVLPKNSLEDLTAEDFRLLVNGCGEVNVQMLISFTSFNDESGENAEKLLQFKRWFWSIVEKMSMTERQDLVYFWTSSPSLPASEEGFQPMPSITIRPPDDQHLPTANTCISRLYVPLYSSKQILKQKLLLAIKTKNFGFV

SEQ ID NO: 94641 - protein, 2799 aa, Homo sapiens
  Payload ID: 18870
  Gene Name: ubiquitin protein ligase E3 component n-recognin 5
  Uniprot ID: O95071
  ENSP ID: ENSP00000429084
MTSIHFVVHPLPGTEDQLNDRLREVSEKLNKYNLNSHPPLNVLEQATIKQCVVGPNHAAFLLEDGRVCRIGFSVQPDRLELGKPDNNDGSKLNSNSGAGRTSRPGRTSDSPWFLSGSETLGRLAGNTLGSRWSSGVGGSGGGSSGRSSAGARDSRRQTRVIRTGRDRGSGLLGSQPQPVIPASVIPEELISQAQVVLQGKSRSVIIRELQRTNLDVNLAVNNLLSRDDEDGDDGDDTASESYLPGEDLMSLLDADIHSAHPSVIIDADAMFSEDISYFGYPSFRRSSLSRLGSSRVLLLPLERDSELLRERESVLRLRERRWLDGASFDNERGSTSKEGEPNLDKKNTPVQSPVSLGEDLQWWPDKDGTKFICIGALYSELLAVSSKGELYQWKWSESEPYRNAQNPSLHHPRATFLGLTNEKIVLLSANSIRATVATENNKVATWVDETLSSVASKLEHTAQTYSELQGERIVSLHCCALYTCAQLENSLYWWGVVPFSQRKKMLEKARAKNKKPKSSAGISSMPNITVGTQVCLRNNPLYHAGAVAFSISAGIPKVGVLMESVWNMNDSCRFQLRSPESLKNMEKASKTTEAKPESKQEPVKTEMGPPPSPASTCSDASSIASSASMPYKRRRSTPAPKEEEKVNEEQWSLREVVFVEDVKNVPVGKVLKVDGAYVAVKFPGTSSNTNCQNSSGPDADPSSLLQDCRLLRIDELQVVKTGGTPKVPDCFQRTPKKLCIPEKTEILAVNVDSKGVHAVLKTGNWVRYCIFDLATGKAEQENNFPTSSIAFLGQNERNVAIFTAGQESPIILRDGNGTIYPMAKDCMGGIRDPDWLDLPPISSLGMGVHSLINLPANSTIKKKAAVIIMAVEKQTLMQHILRCDYEACRQYLMNLEQAVVLEQNLQMLQTFISHRCDGNRNILHACVSVCFPTSNKETKEEEEAERSERNTFAERLSAVEAIANAISVVSSNGPGNRAGSSSSRSLRLREMMRRSLRAAGLGRHEAGASSSDHQDPVSPPIAPPSWVPDPPAMDPDGDIDFILAPAVGSLTTAATGTGQGPSTSTIPGPSTEPSVVESKDRKANAHFILKLLCDSVVLQPYLRELLSAKDARGMTPFMSAVSGRAYPAAITILETAQKIAKAEISSSEKEEDVFMGMVCPSGTNPDDSPLYVLCCNDTCSFTWTGAEHINQDIFECRTCGLLESLCCCTECARVCHKGHDCKLKRTSPTAYCDCWEKCKCKTLIAGQKSARLDLLYRLLTATNLVTLPNSRGEHLLLFLVQTVARQTVEHCQYRPPRIREDRNRKTASPEDSDMPDHDLEPPRFAQLALERVLQDWNALKSMIMFGSQENKDPLSASSRIGHLLPEEQVYLNQQSGTIRLDCFTHCLIVKCTADILLLDTLLGTLVKELQNKYTPGRREEAIAVTMRFLRSVARVFVILSVEMASSKKKNNFIPQPIGKCKRVFQALLPYAVEELCNVAESLIVPVRMGIARPTAPFTLASTSIDAMQGSEELFSVEPLPPRPSSDQSSSSSQSQSSYIIRNPQQRRISQSQPVRGRDEEQDDIVSADVEEVEVVEGVAGEEDHHDEQEEHGEENAEAEGQHDEHDEDGSDMELDLLAAAETESDSESNHSNQDNASGRRSVVTAATAGSEAGASSVPAFFSEDDSQSNDSSDSDSSSSQSDDIEQETFMLDEPLERTTNSSHANGAAQAPRSMQWAVRNTQHQRAASTAPSSTSTPAASSAGLIYIDPSNLRRSGTISTSAAAAAAALEASNASSYLTSASSLARAYSIVIRQISDLMGLIPKYNHLVYSQIPAAVKLTYQDAVNLQNYVEEKLIPTWNWMVSIMDSTEAQLRYGSALASAGDPGHPNHPLHASQNSARRERMTAREEASLRTLEGRRRATLLSARQGMMSARGDFLNYALSLMRSHNDEHSDVLPVLDVCSLKHVAYVFQALIYWIKAMNQQTTLDTPQLERKRTRELLELGIDNEDSEHENDDDTNQSATLNDKDDDSLPAETGQNHPFFRRSDSMTFLGCIPPNPFEVPLAEAIPLADQPHLLQPNARKEDLFGRPSQGLYSSSASSGKCLMEVTVDRNCLEVLPTKMSYAANLKNVMNMQNRQKKEGEEQPVLPEETESSKPGPSAHDLAAQLKSSLLAEIGLTESEGPPLTSFRPQCSFMGMVISHDMLLGRWRLSLELFGRVFMEDVGAEPGSILTELGGFEVKESKFRREMEKLRNQQSRDLSLEVDRDRDLLIQQTMRQLNNHFGRRCATTPMAVHRVKVTFKDEPGEGSGVARSFYTAIAQAFLSNEKLPNLECIQNANKGTHTSLMQRLRNRGERDREREREREMRRSSGLRAGSRRDRDRDFRRQLSIDTRPFRPASEGNPSDDPEPLPAHRQALGERLYPRVQAMQPAFASKITGMLLELSPAQLLLLLASEDSLRARVDEAMELIIAHGRENGADSILDLGLVDSSEKVQQENRKRHGSSRSVVDMDLDDTDDGDDNAPLFYQPGKRGFYTPRPGKNTEARLNCFRNIGRILGLCLLQNELCPITLNRHVIKVLLGRKVNWHDFAFFDPVMYESLRQLILASQSSDADAVFSAMDLAFAIDLCKEEGGGQVELIPNGVNIPVTPQNVYEYVRKYAEHRMLVVAEQPLHAMRKGLLDVLPKNSLEDLTAEDFRLLVNGCGEVNVQMLISFTSFNDESGENAEKLLQFKRWFWSIVEKMSMTERQDLVYFWTSSPSLPASEEGFQPMPSITIRPPDDQHLPTANTCISRLYVPLYSSKQILKQKLLLAIKTKNFGFV

SEQ ID NO: 94642 - protein, 194 aa, Homo sapiens
  Payload ID: 18870
  Gene Name: ubiquitin protein ligase E3 component n-recognin 5
  ENSP ID: ENSP00000429127
  MOD_RES (1)..(1): Any amino acid
XFISHRCDGNRNILHACVSVCFPTSNKETKEEEAERSERNTFAERLSAVEAIANAISVVSSNGPGNRAGSSSSRSLRLREMMRRSLRAAGLGRHEAGASSSDHQDPVSPPIAPPSWVPDPPAMDPDGDIDFILAPAVGSLTTAATGTGQGPSTSTIPGPSTEPSVVESKDRKANAHFILKLLCDSVVLQPYLRE

SEQ ID NO: 94643 - protein, 425 aa, Homo sapiens
  Payload ID: 18871
  Gene Name: ubiquitin protein ligase E3 component n-recognin 7 (putative)
  Uniprot ID: Q8N806
  ENSP ID: ENSP00000013070
MAGAEGAAGRQSELEPVVSLVDVLEEDEELENEACAVLGGSDSEKCSYSQGSVKRQALYACSTCTPEGEEPAGICLACSYECHGSHKLFELYTKRNFRCDCGNSKFKNLECKLLPDKAKVNSGNKYNDNFFGLYCICKRPYPDPEDEIPDEMIQCVVCEDWFHGRHLGAIPPESGDFQEMVCQACMKRCSFLWAYAAQLAVTKISTEDDGLVRNIDGIGDQEVIKPENGEHQDSTLKEDVPEQGKDDVREVKVEQNSEPCAGSSSESDLQTVFKNESLNAESKSGCKLQELKAKQLIKKDTATYWPLNWRSKLCTCQDCMKMYGDLDVLFLTDEYDTVLAYENKGKIAQATDRSDPLMDTLSSMNRVQQVELICEYNDLKTELKDYLKRFADEGTVVKREDIQQFFEEFQSKKRRRVDGMQYYCS

SEQ ID NO: 94644 - protein, 360 aa, Homo sapiens
  Payload ID: 18871
  Gene Name: ubiquitin protein ligase E3 component n-recognin 7 (putative)
  ENSP ID: ENSP00000391706
MRRALSWAAATPRSAPTLRNFRCDCGNSKFKNLECKLLPDKAKVNSGNKYNDNFFGLYCICKRPYPDPEDEIPDEMIQCVVCEDWFHGRHLGAIPPESGDFQEMVCQACMKRCSFLWAYAAQLAVTKISTEDDGLVRNIDGIGDQEVIKPENGEHQDSTLKEDVPEQGKDDVREVKVEQNSEPCAGSSSESDLQTVFKNESLNAESKSGCKLQELKAKQLIKKDTATYWPLNWRSKLCTCQDCMKMYGDLDVLFLTDEYDTVLAYENKGKIAQATDRSDPLMDTLSSMNRVQQVELICEYNDLKTELKDYLKRFADEGTVVKREDIQQFFEEFQKKEKKSGWDAVLLQLEWSMKLSHSSQ

SEQ ID NO: 94645 - protein, 54 aa, Homo sapiens
  Payload ID: 18871
  Gene Name: ubiquitin protein ligase E3 component n-recognin 7 (putative)
  ENSP ID: ENSP00000450470
MAGAEGAAGRQSELEPVVSLVDVLEEDEELENEACAVLGGSDSEKCSYSQKFSL

SEQ ID NO: 94646 - protein, 178 aa, Homo sapiens
  Payload ID: 18871
  Gene Name: ubiquitin protein ligase E3 component n-recognin 7 (putative)
  ENSP ID: ENSP00000450645
MAGAEGAAGRQSELEPVVSLVDVLEEDEELENEACAVLGGSDSEKCSYSQGSVKRQALYACSTCTPEGEEPAGICLACSYECHGSHKLFELYTKRNFRCDCGNSKFKNLECKLLPIPDEMIQCVVCEDWFHGRHLGAIPPESGDFQEMVCQACMKRCSFLWAYAAQLAVTKISTEDDG

SEQ ID NO: 94647 - protein, 152 aa, Homo sapiens
  Payload ID: 18871
  Gene Name: ubiquitin protein ligase E3 component n-recognin 7 (putative)
  ENSP ID: ENSP00000451022
MAGAEGAAGRQSELEPVVSLVDVLEEDEELENEACAVLGGSDSEKCSYSQIPDEMIQCVVCEDWFHGRHLGAIPPESGDFQEMVCQACMKRCSFLWAYAAQLAVTKISTEDDGLVRNIDGIGDQEVIKPENGEHQDSTLKEDVPEQGKDDVR

SEQ ID NO: 94648 - protein, 164 aa, Homo sapiens
  Payload ID: 18871
  Gene Name: ubiquitin protein ligase E3 component n-recognin 7 (putative)
  ENSP ID: ENSP00000451051
  MOD_RES (1)..(1): Any amino acid
XAGAEGAAGRQSELEPVVSLVDVLEEDEELENEACAVLGGSDSEKCSYSQGSVKRQALYACSTCTPEGEEPAGICLACSYECHGSHKLFELYTKSKFKNLECKLLPDKAKVNSGNKYNDNFFGLYCICKRPYPDPEDEIPDEMIQCVVCEDWFHGRHLGAIPPE

SEQ ID NO: 94649 - protein, 174 aa, Homo sapiens
  Payload ID: 18871
  Gene Name: ubiquitin protein ligase E3 component n-recognin 7 (putative)
  ENSP ID: ENSP00000451785
  MOD_RES (1)..(1): Any amino acid
XLACSYECHGSHKLFELYTKRNFRCDCGNSKFKNLECKLLPDKAKVNSGNKYNDNFFGLYCICKRPYPDPEDEIPDEMIQCVVCEDWFHGRHLGAIPPESGDFQEMVCQACMKRCSFLWAYAAQLAEYNDLKTELKDYLKRFADEGTVVKREDIQQFFEEFQSKKRRRVDGMQY

SEQ ID NO: 94650 - protein, 124 aa, Homo sapiens
  Payload ID: 18871
  Gene Name: ubiquitin protein ligase E3 component n-recognin 7 (putative)
  ENSP ID: ENSP00000452488
  MOD_RES (1)..(1): Any amino acid
XVEQNSEPCAGSSSESDLQKMYGDLDVLFLTDEYDTVLAYENKGKIAQATDRSDPLMDTLSSMNRVQQVELICEYNDLKTELKDYLKRFADEGTVVKREDIQQFFEEFQSKKRRRVDGMQYYCS

SEQ ID NO: 94651 - protein, 360 aa, Homo sapiens; identical to SEQ ID NO: 94644
  Payload ID: 18871
  Gene Name: ubiquitin protein ligase E3 component n-recognin 7 (putative)
  ENSP ID: ENSP00000479570

SEQ ID NO: 94652 - protein, 425 aa, Homo sapiens; identical to SEQ ID NO: 94643
  Payload ID: 18871
  Gene Name: ubiquitin protein ligase E3 component n-recognin 7 (putative)
  Uniprot ID: Q8N806
  ENSP ID: ENSP00000483908

SEQ ID NO: 94653 - protein, 164 aa, Homo sapiens; identical to SEQ ID NO: 94648
  Payload ID: 18871
  Gene Name: ubiquitin protein ligase E3 component n-recognin 7 (putative)
  ENSP ID: ENSP00000485686
  MOD_RES (1)..(1): Any amino acid

SEQ ID NO: 94654 - protein, 174 aa, Homo sapiens; identical to SEQ ID NO: 94649
  Payload ID: 18871
  Gene Name: ubiquitin protein ligase E3 component n-recognin 7 (putative)
  ENSP ID: ENSP00000485983
  MOD_RES (1)..(1): Any amino acid

SEQ ID NO: 94655 - protein, 124 aa, Homo sapiens; identical to SEQ ID NO: 94650
  Payload ID: 18871
  Gene Name: ubiquitin protein ligase E3 component n-recognin 7 (putative)
  ENSP ID: ENSP00000486093
  MOD_RES (1)..(1): Any amino acid

SEQ ID NO: 94656 - protein, 152 aa, Homo sapiens; identical to SEQ ID NO: 94647
  Payload ID: 18871
  Gene Name: ubiquitin protein ligase E3 component n-recognin 7 (putative)
  ENSP ID: ENSP00000486462

SEQ ID NO: 94657 - protein, 178 aa, Homo sapiens; identical to SEQ ID NO: 94646
  Payload ID: 18871
  Gene Name: ubiquitin protein ligase E3 component n-recognin 7 (putative)
  ENSP ID: ENSP00000486939

SEQ ID NO: 94658 - protein, 852 aa, Homo sapiens
  Payload ID: 18872
  Gene Name: ubiquitin protein ligase E3A
  Uniprot ID: Q05086
  ENSP ID: ENSP00000232165
MKRAAAKHLIERYYHQLTEGCGNEACTNEFCASCPTFLRMDNNAAAIKALELYKINAKLCDPHPSKKGASSAYLENSKGAPNNSCSEIKMNKKGARIDFKDVTYLTEEKVYEILELCREREDYSPLIRVIGRVFSSAEALVQSFRKVKQHTKEELKSLQAKDEDKDEDEKEKAACSAAAMEEDSEASSSRIGDSSQGDNNLQKLGPDDVSVDIDAIRRVYTRLLSNEKIETAFLNALVYLSPNVECDLTYHNVYSRDPNYLNLFIIVMENRNLHSPEYLEMALPLFCKAMSKLPLAAQGKLIRLWSKYNADQIRRMMETFQQLITYKVISNEFNSRNLVNDDDAIVAASKCLKMVYYANVVGGEVDTNHNEEDDEEPIPESSELTLQELLGEERRNKKGPRVDPLETELGVKTLDCRKPLIPFEEFINEPLNEVLEMDKDYTFFKVETENKFSFMTCPFILNAVTKNLGLYYDNRIRMYSERRITVLYSLVQGQQLNPYLRLKVRRDHIIDDALVRLEMIAMENPADLKKQLYVEFEGEQGVDEGGVSKEFFQLVVEEIFNPDIGMFTYDESTKLFWFNPSSFETEGQFTLIGIVLGLAIYNNCILDVHFPMVVYRKLMGKKGTFRDLGDSHPVLYQSLKDLLEYEGNVEDDMMITFQISQTDLFGNPMMYDLKENGDKIPITNENRKEFVNLYSDYILNKSVEKQFKAFRRGFHMVTNESPLKYLFRPEEIELLICGSRNLDFQALEETTEYDGGYTRDSVLIREFWEIVHSFTDEQKRLFLQFTTGTDRAPVGGLGKLKMIIAKNGPDTERLPTSHTCFNVLLLPEYSSKEKLKERLLKAITYAKGFGML

SEQ ID NO: 94659 - protein, 875 aa, Homo sapiens
  Payload ID: 18872
  Gene Name: ubiquitin protein ligase E3A
  Uniprot ID: Q05086
  ENSP ID: ENSP00000381045
MEKLHQCYWKSGEPQSDDIEASRMKRAAAKHLIERYYHQLTEGCGNEACTNEFCASCPTFLRMDNNAAAIKALELYKINAKLCDPHPSKKGASSAYLENSKGAPNNSCSEIKMNKKGARIDFKDVTYLTEEKVYEILELCREREDYSPLIRVIGRVFSSAEALVQSFRKVKQHTKEELKSLQAKDEDKDEDEKEKAACSAAAMEEDSEASSSRIGDSSQGDNNLQKLGPDDVSVDIDAIRRVYTRLLSNEKIETAFLNALVYLSPNVECDLTYHNVYSRDPNYLNLFIIVMENRNLHSPEYLEMALPLFCKAMSKLPLAAQGKLIRLWSKYNADQIRRMMETFQQLITYKVISNEFNSRNLVNDDDAIVAASKCLKMVYYANVVGGEVDTNHNEEDDEEPIPESSELTLQELLGEERRNKKGPRVDPLETELGVKTLDCRKPLIPFEEFINEPLNEVLEMDKDYTFFKVETENKFSFMTCPFILNAVTKNLGLYYDNRIRMYSERRITVLYSLVQGQQLNPYLRLKVRRDHIIDDALVRLEMIAMENPADLKKQLYVEFEGEQGVDEGGVSKEFFQLVVEEIFNPDIGMFTYDESTKLFWFNPSSFETEGQFTLIGIVLGLAIYNNCILDVHFPMVVYRKLMGKKGTFRDLGDSHPVLYQSLKDLLEYEGNVEDDMMITFQISQTDLFGNPMMYDLKENGDKIPITNENRKEFVNLYSDYILNKSVEKQFKAFRRGFHMVTNESPLKYLFRPEEIELLICGSRNLDFQALEETTEYDGGYTRDSVLIREFWEIVHSFTDEQKRLFLQFTTGTDRAPVGGLGKLKMIIAKNGPDTERLPTSHTCFNVLLLPEYSSKEKLKERLLKAITYAKGFGML

SEQ ID NO: 94660 - protein, 852 aa, Homo sapiens; identical to SEQ ID NO: 94658
  Payload ID: 18872
  Gene Name: ubiquitin protein ligase E3A
  Uniprot ID: Q05086
  ENSP ID: ENSP00000401265

SEQ ID NO: 94661 - protein, 852 aa, Homo sapiens; identical to SEQ ID NO: 94658
  Payload ID: 18872
  Gene Name: ubiquitin protein ligase E3A
  Uniprot ID: Q05086
  ENSP ID: ENSP00000411258

SEQ ID NO: 94662 - protein, 852 aa, Homo sapiens; identical to SEQ ID NO: 94658
  Payload ID: 18872
  Gene Name: ubiquitin protein ligase E3A
  Uniprot ID: Q05086
  ENSP ID: ENSP00000457771

SEQ ID NO: 94663 - protein, 189 aa, Homo sapiens
  Payload ID: 18872
  Gene Name: ubiquitin protein ligase E3A
  ENSP ID: ENSP00000473822
HFPMVVYRKLMGKKGTFRDLGDSHPEFVNLYSDYILNKSVEKQFKAFRRGFHMVTNESPLKYLFRPEEIELLICGSRNLDFQALEETTEYDGGYTRDSVLIREFWEIVHSFTDEQKRLFLQFTTGTDRAPVGGLGKLKMIIAKNGPDTERLPTSHTCFNVLLLPEYSSKEKLKERLLKAITYAKGFGML

SEQ ID NO: 94664 - protein, 872 aa, Homo sapiens
  Payload ID: 18872
  Gene Name: ubiquitin protein ligase E3A
  Uniprot ID: Q05086
  ENSP ID: ENSP00000481796
MATACKRSGEPQSDDIEASRMKRAAAKHLIERYYHQLTEGCGNEACTNEFCASCPTFLRMDNNAAAIKALELYKINAKLCDPHPSKKGASSAYLENSKGAPNNSCSEIKMNKKGARIDFKDVTYLTEEKVYEILELCREREDYSPLIRVIGRVFSSAEALVQSFRKVKQHTKEELKSLQAKDEDKDEDEKEKAACSAAAMEEDSEASSSRIGDSSQGDNNLQKLGPDDVSVDIDAIRRVYTRLLSNEKIETAFLNALVYLSPNVECDLTYHNVYSRDPNYLNLFIIVMENRNLHSPEYLEMALPLFCKAMSKLPLAAQGKLIRLWSKYNADQIRRMMETFQQLITYKVISNEFNSRNLVNDDDAIVAASKCLKMVYYANVVGGEVDTNHNEEDDEEPIPESSELTLQELLGEERRNKKGPRVDPLETELGVKTLDCRKPLIPFEEFINEPLNEVLEMDKDYTFFKVETENKFSFMTCPFILNAVTKNLGLYYDNRIRMYSERRITVLYSLVQGQQLNPYLRLKVRRDHIIDDALVRLEMIAMENPADLKKQLYVEFEGEQGVDEGGVSKEFFQLVVEEIFNPDIGMFTYDESTKLFWFNPSSFETEGQFTLIGIVLGLAIYNNCILDVHFPMVVYRKLMGKKGTFRDLGDSHPVLYQSLKDLLEYEGNVEDDMMITFQISQTDLFGNPMMYDLKENGDKIPITNENRKEFVNLYSDYILNKSVEKQFKAFRRGFHMVTNESPLKYLFRPEEIELLICGSRNLDFQALEETTEYDGGYTRDSVLIREFWEIVHSFTDEQKRLFLQFTTGTDRAPVGGLGKLKMIIAKNGPDTERLPTSHTCFNVLLLPEYSSKEKLKERLLKAITYAKGFGML

SEQ ID NO: 94665 - protein, 39 aa, Homo sapiens
  Payload ID: 18872
  Gene Name: ubiquitin protein ligase E3A
  ENSP ID: ENSP00000485732
MATACKRSGEPQSDDIEASRMKRAAAKHLIERYYHQLTE

SEQ ID NO: 94666 - protein, 148 aa, Homo sapiens
  Payload ID: 18872
  Gene Name: ubiquitin protein ligase E3A
  ENSP ID: ENSP00000485958
MATACKRSGEPQSDDIEASRMKRAAAKHLIERYYHQLTEGCGNEACTNEFCASCPTFLRMDNNAAAIKALELYKINAKLCDPHPSKKGASSAYLENSKGAPNNSCSEIKMNKKGARIDFKDVTYLTEEKVYEILELCREREDYSPLIR

SEQ ID NO: 94667 - protein, 8 aa, Homo sapiens
  Payload ID: 18872
  Gene Name: ubiquitin protein ligase E3A
  ENSP ID: ENSP00000486066
MATACKRS

SEQ ID NO: 94668 - protein, 852 aa, Homo sapiens; identical to SEQ ID NO: 94658
  Payload ID: 18872
  Gene Name: ubiquitin protein ligase E3A
  Uniprot ID: Q05086
  ENSP ID: ENSP00000486349

SEQ ID NO: 94669 - protein, 187 aa, Homo sapiens
  Payload ID: 18872
  Gene Name: ubiquitin protein ligase E3A
  ENSP ID: ENSP00000486388
MATACKRSGEPQSDDIEASRMKRAAAKHLIERYYHQLTEGCGNEACTNEFCASCPTFLRMDNNAAAIKALELYKINAKLCDPHPSKKGASSAYLENSKGAPNNSCSEIKMNKKGARIDFKDVTYLTEEKVYEILELCREREDYSPLIRVIGRVFSSAEALVQSFRKVKQHTKEELKSLQAKDEDKDE

SEQ ID NO: 94670 - protein, 14 aa, Homo sapiens
  Payload ID: 18872
  Gene Name: ubiquitin protein ligase E3A
  ENSP ID: ENSP00000486601
MATACKRSGEPQSD

SEQ ID NO: 94671 - protein, 49 aa, Homo sapiens
  Payload ID: 18872
  Gene Name: ubiquitin protein ligase E3A
  ENSP ID: ENSP00000486900
MKRAAAKHLIERYYHQLTEGCGNEACTNEFCASCPTFLRMDNNAAAIKA

SEQ ID NO: 94672 - protein, 77 aa, Homo sapiens
  Payload ID: 18872
  Gene Name: ubiquitin protein ligase E3A
  ENSP ID: ENSP00000487148
MATACKRSGEPQSDDIEASRMKRAAAKHLIERYYHQLTEGCGNEACTNEFCASCPTFLRMDNNAAAIKALELYKINA

SEQ ID NO: 94673 - protein, 143 aa, Homo sapiens
  Payload ID: 18872
  Gene Name: ubiquitin protein ligase E3A
  ENSP ID: ENSP00000487178
  MOD_RES (1)..(1): Any amino acid
XISQTDLFGNPMMYDLKENGDKIPITNENRKNLDFQALEETTEYDGGYTRDSVLIREFWEIVHSFTDEQKRLFLQFTTGTDRAPVGGLGKLKMIIAKNGPDTERLPTSHTCFNVLLLPEYSSKEKLKERLLKAITYAKGFGML

SEQ ID NO: 94674 - protein, 765 aa, Homo sapiens
  Payload ID: 18872
  Gene Name: ubiquitin protein ligase E3A
  ENSP ID: ENSP00000487217
MKRAAAKHLIERYYHQLTEGCGNEACTNEFCASCPTFLRMDNNAAAIKALELYKINAKLCDPHPSKKGASSAYLENSKGAPNNSCSEIKMNKKGARIDFKDVTYLTEEKVYEILELCREREDYSPLIRVIGRVFSSAEALVQSFRKVKQHTKEELKSLQAKDEDKDEDEKEKAACSAAAMEEDSEASSSRIGDSSQGDNNLQKLGPDDVSVDIDAIRRVYTRLLSNEKIETAFLNALVYLSPNVECDLTYHNVYSRDPNYLNLFIIVMENRNLHSPEYLEMALPLFCKAMSKLPLAAQGKLIRLWSKYNADQIRRMMETFQQLITYKVISNEFNSRNLVNDDDAIVAASKCLKMVYYANVVGGEVDTNHNEEDDEEPIPESSELTLQELLGEERRNKKGPRVDPLETELGVKTLDCRKPLIPFEEFINEPLNEVLEMDKDYTFFKVETENKFSFMTCPFILNAVTKNLGLYYDNRIRMYSERRITVLYSLVQGQQLNPYLRLKVRRDHIIDDALVRLEMIAMENPADLKKQLYVEFEGEQGVDEGGVSKEFFQLVVEEIFNPDIGMFTYDESTKLFWFNPSSFETEGQFTLIGIVLGLAIYNNCILDVHFPMVVYRKLMGKKGTFRDLGDSHPVLYQSLKDLLEYEGNVEDDMMITFQISQTDLFGNPMMYDLKENGDKIPITNENRKEFVNLYSDYILNKSVEKQFKAFRRGFHMVTNESPLKYLFRPEEIELLICGSRNLDFQALEETTEYDGGYTRDSVLIR

SEQ ID NO: 94675 - protein, 237 aa, Homo sapiens
  Payload ID: 18872
  Gene Name: ubiquitin protein ligase E3A
  ENSP ID: ENSP00000487534
MEYFANCFSIAFYRSGEPQSDDIEASRMKRAAAKHLIERYYHQLTEGCGNEACTNEFCASCPTFLRMDNNAAAIKALELYKINAKLCDPHPSKKGASSAYLENSKGAPNNSCSEIKMNKKGARIDFKDVTYLTEEKVYEILELCREREDYSPLIRVIGRVFSSAEALVQSFRKVKQHTKEELKSLQAKDEDKDEDEKEKAACSAAAMEEDSEASSSRIGDSSQGDNNLQKLGPDDVS

SEQ ID NO: 94676 - protein, 62 aa, Homo sapiens
  Payload ID: 18872
  Gene Name: ubiquitin protein ligase E3A
  ENSP ID: ENSP00000487550
MKRAAAKHLIERYYHQLTEGCGNEACTNEFCASCPTFLRMDNNAAAIKALELYKINAKLCDP

SEQ ID NO: 94677 - protein, 49 aa, Homo sapiens; identical to SEQ ID NO: 94671
  Payload ID: 18872
  Gene Name: ubiquitin protein ligase E3A
  ENSP ID: ENSP00000487552

SEQ ID NO: 94678 - protein, 1068 aa, Homo sapiens
  Payload ID: 18873
  Gene Name: ubiquitin protein ligase E3B
  Uniprot ID: Q7Z3V4
  ENSP ID: ENSP00000340596
MFTLSQTSRAWFIDRARQAREERLVQKERERAAVVIQAHVRSFLCRSRLQRDIRREIDDFFKADDPESTKRSALCIFKIARKLLFLFRIKEDNERFEKLCRSILSSMDAENEPKVWYVSLACSKDLTLLWIQQIKNILWYCCDFLKQLKPEILQDSRLITLYLTMLVTFTDTSTWKILRGKGESLRPAMNHICANIMGHLNQHGFYSVLQILLTRGLARPRPCLSKGTLTAAFSLALRPVIAAQFSDNLIRPFLIHIMSVPALVTHLSTVTPERLTVLESHDMLRKFIIFLRDQDRCRDVCESLEGCHTLCLMGNLLHLGSLSPRVLEEETDGFVSLLTQTLCYCRKYVSQKKSNLTHWHPVLGWFSQSVDYGLNESMHLITKQLQFLWGVPLIRIFFCDILSKKLLESQEPAHAQPASPQNVLPVKSLLKRAFQKSASVRNILRPVGGKRVDSAEVQKVCNICVLYQTSLTTLTQIRLQILTGLTYLDDLLPKLWAFICELGPHGGLKLFLECLNNDTEESKQLLAMLMLFCDCSRHLITILDDIEVYEEQISFKLEELVTISSFLNSFVFKMIWDGIVENAKGETLELFQSVHGWLMVLYERDCRRRFTPEDHWLRKDLKPSVLFQELDRDRKRAQLILQYIPHVIPHKNRVLLFRTMVTKEKEKLGLVETSSASPHVTHITIRRSRMLEDGYEQLRQLSQHAMKGVIRVKFVNDLGVDEAGIDQDGVFKEFLEEIIKRVFDPALNLFKTTSGDERLYPSPTSYIHENYLQLFEFVGKMLGKAVYEGIVVDVPFASFFLSQLLGHHHSVFYSSVDELPSLDSEFYKNLTSIKRYDGDITDLGLTLSYDEDVMGQLVCHELIPGGKTIPVTNENKISYIHLMAHFRMHTQIKNQTAALISGFRSIIKPEWIRMFSTPELQRLISGDNAEIDLEDLKKHTVYYGGFHGSHRVIIWLWDILASDFTPDERAMFLKFVTSCSRPPLLGFAYLKPPFSIRCVEVSDDQDTGDTLGSVLRGFFTIRKREPGGRLPTSSTCFNLLKLPNYSKKSVLREKLRYAISMNTGFELS

SEQ ID NO: 94679 - protein, 244 aa, Homo sapiens
  Payload ID: 18873
  Gene Name: ubiquitin protein ligase E3B
  Uniprot ID: Q7Z3V4
  ENSP ID: ENSP00000342614
MFTLSQTSRAWFIDRARQAREERLVQKERERAAVVIQAHVRSFLCRSRLQRDIRREIDDFFKADDPESTKRSALCIFKIARKLLFLFRIKEDNERFEKLCRSILSSMDAENEPKVWYVSLACSKDLTLLWIQQIKNILWYCCDFLKQLKPEILQDSRLITLYLTMLVTFTDTSTWKILRGKGESLRPAMNHICANIMGHLNQHGFYSVLQCCDGLFPDLVSYAPHNNPVRWSVGRSWYDWQLSR

SEQ ID NO: 94680 - protein, 1068 aa, Homo sapiens; identical to SEQ ID NO: 94678
  Payload ID: 18873
  Gene Name: ubiquitin protein ligase E3B
  Uniprot ID: Q7Z3V4
  ENSP ID: ENSP00000391529

SEQ ID NO: 94681 - protein, 708 aa, Homo sapiens
  Payload ID: 18873
  Gene Name: ubiquitin protein ligase E3B
  Uniprot ID: Q7Z3V4
  ENSP ID: ENSP00000395802
MFTLSQTSRAWFIDRARQAREERLVQKERERAAVVIQAHVRSFLCRSRLQRDIRREIDDFFKADDPESTKRSALCIFKIARKLLFLFRIKEDNERFEKLCRSILSSMDAENEPKVWYVSLACSKDLTLLWIQQIKNILWYCCDFLKQLKPEILQDSRLITLYLTMLVTFTDTSTWKILRGKGESLRPAMNHICANIMGHLNQHGFYSVLQILLTRGLARPRPCLSKGTLTAAFSLALRPVIAAQFSDNLIRPFLIHIMSVPALVTHLSTVTPERLTVLESHDMLRKFIIFLRDQDRCRDVCESLEGCHTLCLMGNLLHLGSLSPRVLEEETDGFVSLLTQTLCYCRKYVSQKKSNLTHWHPVLGWFSQSVDYGLNESMHLITKQLQFLWGVPLIRIFFCDILSKKLLESQEPAHAQPASPQNVLPVKSLLKRAFQKSASVRNILRPVGGKRVDSAEVQKVCNICVLYQTSLTTLTQIRLQILTGLTYLDDLLPKLWAFICELGPHGGLKLFLECLNNDTEESKQLLAMLMLFCDCSRHLITILDDIEVYEEQISFKLEELVTISSFLNSFVFKMIWDGIVENAKGETLELFQSVHGWLMVLYERDCRRRFTPEDHWLRKDLKPSVLFQELDRDRKRAQLILQYIPHVIPHKNRVLLFRTMVTKEKEKLGLVETSSASPHVTHITIRRSRMLESLFECPWPLVINAESC

SEQ ID NO: 94682 - protein, 247 aa, Homo sapiens
  Payload ID: 18873
  Gene Name: ubiquitin protein ligase E3B
  ENSP ID: ENSP00000437694
MFTLSQTSRAWFIDRARQAREERLVQKERERAAVVIQAHVRSFLCRSRLQRDIRREIDDFFKADDPESTKRSALCIFKIARKLLFLFRIKEDNERFEKLCRSILSSMDAENEPKVWYVSLACSKDLTLLWIQQIKNILWYCCDFLKQLKPEILQDSRLITLYLTMLVTFTDTSTWKILRGKGESLRPAMNHICANIMGHLNQHGFYSVLQVCDSCPPVCNFSTLQHLHLDFYICIQHTWCPPQKHFS

SEQ ID NO: 94683 - protein, 244 aa, Homo sapiens; identical to SEQ ID NO: 94679
  Payload ID: 18873
  Gene Name: ubiquitin protein ligase E3B
  Uniprot ID: Q7Z3V4
  ENSP ID: ENSP00000440585

SEQ ID NO: 94684 - protein, 871 aa, Homo sapiens
  Payload ID: 18873
  Gene Name: ubiquitin protein ligase E3B
  ENSP ID: ENSP00000443131
MFTLSQTSRAWFIDRARQAREERLVQKERERAAVVIQAHVRSFLCRSRLQRDIRREIDDFFKADDPESTKRSALCIFKIARKLLFLFRIKEDNERFEKLCRSILSSMDAENEPKVWYVSLACSKDLTLLWIQQIKNILWYCCDFLKQLKPEILQDSRLITLYLTMLVTFTDTSTWKILRGKGESLRPAMNHICANIMGHLNQHGFYSVLQILLTRGLARPRPCLSKGTLTAAFSLALRPVIAAQFSDNLIRPFLIHIMSVPALVTHLSTVTPERLTVLESHDMLRKFIIFLRDQDRCRDVCESLEGCHTLCLMGNLLHLGSLSPRVLEEETDGFVSLLTQTLCYCRKYVSQKKSNLTHWHPVLGWFSQSVDYGLNESMHLITKQLQFLWGVPLIRIFFCDILSKKLLESQEPAHAQPASPQNVLPVKSLLKRAFQKSASVRNILRPVGGKRVDSAEVQKVCNICVLYQTSLTTLTQIRLQILTGLTYLDDLLPKLWAFICELGPHGGLKLFLECLNNDTEESKQLLAMLMLFCDCSRHLITILDDIEVYEEQISFKLEELVTISSFLNSFVFKMIWDGIVENAKGETLELFQSVHGWLMVLYERDCRRRFTPEDHWLRKDLKPSVLFQELDRDRKRAQLILQYIPHVIPHKNRVLLFRTMVTKEKEKLGLVETSSASPHVTHITIRRSRMLEDGYEQLRQLSQHAMKGVIRVKFVNDLGVDEAGIDQDGVFKEFLEEIIKRVFDPALNLFKTTSGDERLYPSPTSYIHENYLQLFEFVGKMLGKAVYEGIVVDVPFASFFLSQLLGHHHSVFYSSVDELPSLDSEFYKNLTSIKRYDGDITDLGLTLSYDEDVMGQLVCHELIPGGKTIPV

SEQ ID NO: 94685 - protein, 244 aa, Homo sapiens; identical to SEQ ID NO: 94679
  Payload ID: 18873
  Gene Name: ubiquitin protein ligase E3B
  Uniprot ID: Q7Z3V4
  ENSP ID: ENSP00000443565

SEQ ID NO: 94686 - protein, 175 aa, Homo sapiens
  Payload ID: 18873
  Gene Name: ubiquitin protein ligase E3B
  ENSP ID: ENSP00000474360
TQIKNQTAALISGFRSIIKPEWIRMFSTPELQRLISGDNAEIDLEDLKKHTVYYGGFHGSHRVIIWLWDILASDFTPDERAMFLKFVTSCSRPPLLGFAYLKPPFSIRCVEVSDDQQGRQLDPSEPSEEGPTVLTAGEPASPRETAHGLSPLSAAPFSFLPQGRVPGVGVGTCCF

SEQ ID NO: 94687 - protein, 1083 aa, Homo sapiens
  Payload ID: 18874
  Gene Name: ubiquitin protein ligase E3C
  Uniprot ID: Q15386
  ENSP ID: ENSP00000309198
MFSFEGDFKTRPKVSLGGASRKEEKASLLHRTQEERRKREEERRRLKNAIIIQSFIRGYRDRKQQYSIQRSAFDRCATLSQSGGAFPIANGPNLTLLVRQLLFFYKQNEDSKRLIWLYQNLIKHSSLFVKQLDGSERLTCLFQIKRLMSLCCRLLQNCNDDSLNVALPMRMLEVFSSENTYLPVLQDASYVVSVIEQILHYMIHNGYYRSLYLLINSKLPSSIEYSDLSRVPIAKILLENVLKPLHFTYNSCPEGARQQVFTAFTEEFLAAPFTDQIFHFIIPALADAQTVFPYEPFLNALLLIESRCSRKSGGAPWLFYFVLTVGENYLGALSEEGLLVYLRVLQTFLSQLPVSPASASCHDSASDSEEESEEADKPSSPEDGRLSVSYITEECLKKLDTKQQTNTLLNLVWRDSASEEVFTTMASVCHTLMVQHRMMVPKVRLLYSLAFNARFLRHLWFLISSMSTRMITGSMVPLLQVISRGSPMSFEDSSRIIPLFYLFSSLFSHSLISIHDNEFFGDPIEVVGQRQSSMMPFTLEELIMLSRCLRDACLGIIKLAYPETKPEVREEYITAFQSIGVTTSSEMQQCIQMEQKRWIQLFKVITNLVKMLKSRDTRRNFCPPNHWLSEQEDIKADKVTQLYVPASRHVWRFRRMGRIGPLQSTLDVGLESPPLSVSEERQLAVLTELPFVVPFEERVKIFQRLIYADKQEVQGDGPFLDGINVTIRRNYIYEDAYDKLSPENEPDLKKRIRVHLLNAHGLDEAGIDGGGIFREFLNELLKSGFNPNQGFFKTTNEGLLYPNPAAQMLVGDSFARHYYFLGRMLGKALYENMLVELPFAGFFLSKLLGTSADVDIHHLASLDPEVYKNLLFLKSYEDDVEELGLNFTVVNNDLGEAQVVELKFGGKDIPVTSANRIAYIHLVADYRLNRQIRQHCLAFRQGLANVVSLEWLRMFDQQEIQVLISGAQVPISLEDLKSFTNYSGGYSADHPVIKVFWRVVEGFTDEEKRKLLKFVTSCSRPPLLGFKELYPAFCIHNGGSDLERLPTASTCMNLLKLPEFYDETLLRSKLLYAIECAAGFELS

SEQ ID NO: 94688 - protein, 404 aa, Homo sapiens
  Payload ID: 18874
  Gene Name: ubiquitin protein ligase E3C
  Uniprot ID: Q15386
  ENSP ID: ENSP00000373755
MFSFEGDFKTRPKVSLGGASRKYSIQRSAFDRCATLSQSGGAFPIANGPNLTLLVRQLLFFYKQNEDSKRLIWLYQNLIKHSSLFVKQLDGSERLTCLFQIKRLMSLCCRLLQNCNDDSLNVALPMRMLEVFSSENTYLPVLQDASYVVSVIEQILHYMIHNGYYRSLYLLINSKLPSSIEYSDLSRVPIAKILLENVLKPLHFTYNSCPEGARQQVFTAFTEEFLAAPFTDQIFHFIIPALADAQTVFPYEPFLNALLLIESRCSRKSGGAPWLFYFVLTVGENYLGALSEEGLLVYLRVLQTFLSQLPVSPASASCHDSASDSEEESEEADKPSSPEDGRLSVSYITEECLKKLDTKQQTNTLLNLVWRDSASEEVFTTMASVCHTLMVQHRMMVPKVRVYK

SEQ ID NO: 94689 - protein, 56 aa, Homo sapiens
  Payload ID: 18874
  Gene Name: ubiquitin protein ligase E3C
  ENSP ID: ENSP00000397432
SFEGDFKTRPKVSLGGASRKEEKASLLHRTQEERRKRECWDYRRELPRLADDVDVS

SEQ ID NO: 94690 - protein, 404 aa, Homo sapiens; identical to SEQ ID NO: 94688
  Payload ID: 18874
  Gene Name: ubiquitin protein ligase E3C
  Uniprot ID: Q15386
  ENSP ID: ENSP00000481584

SEQ ID NO: 94691 - protein, 36 aa, Homo sapiens
  Payload ID: 18875
  Gene Name: ubiquitin protein ligase E3D
  ENSP ID: ENSP00000237186
MAASAAETRVFLERTERRRYAHEYFHNAIFTPDENP

SEQ ID NO: 94692 - protein, 183 aa, Homo sapiens
  Payload ID: 18875
  Gene Name: ubiquitin protein ligase E3D
  ENSP ID: ENSP00000358761
  MOD_RES (1)..(1): Any amino acid
XQMKTPEGCTEIQLPAEVRLVPSSCRGLQFVVGDGLHLRLQTQAKLGTKLISMFNQSSQTQECCTFYCQSCGEVIIKDRKLLRVLPLPSENWGALVGEWCCHPDPFANKSLHPQENDCFIGDSFFLVNLRTSLWQQRPELSPVEMCCVSSDNHCKLEPKANTKVICKRCKVMLGETVSSARSC

SEQ ID NO: 94693 - protein, 389 aa, Homo sapiens
  Payload ID: 18875
  Gene Name: ubiquitin protein ligase E3D
  Uniprot ID: Q7Z6J8
  ENSP ID: ENSP00000358762
MAASAAETRVFLEVRGQLQSALLILGEPKEGGMPMNISIMPSSLQMKTPEGCTEIQLPAEVRLVPSSCRGLQFVVGDGLHLRLQTQAKLGTKLISMFNQSSQTQECCTFYCQSCGEVIIKDRKLLRVLPLPSENWGALVGEWCCHPDPFANKSLHPQENDCFIGDSFFLVNLRTSLWQQRPELSPVEMCCVSSDNHCKLEPKANTKVICKRCKVMLGETVSSETTKFYMTEIIIQSSERSFPIIPRSWFVQSVIAQCLVQLSSARSTFRFTIQGQDDKVYILLWLLNSDSLVIESLRNSKYIKKFPLLENTFKADSSSAWSAVKVLYQPCIKSRNEKLVSLWESDISVHPLTLPSATCLELLLILSKSNANLPSSLRRVNSFQVAFLKM

SEQ ID NO: 94694 - protein, 122 aa, Homo sapiens
  Payload ID: 18875
  Gene Name: ubiquitin protein ligase E3D
  ENSP ID: ENSP00000394749
MAASAAETRVFLEVRGQLQSALLILGEPKEGGMPMNISIMPSSLQMKTPEGCTEIQLPAEVRLVPSSCRGLQFVVGDGLHLRLQTQAKLGTKLISMFNQSSQTQECCTFYCQSCGEVIIKDR

SEQ ID NO: 94695 - protein, 37 aa, Homo sapiens
  Payload ID: 18875
  Gene Name: ubiquitin protein ligase E3D
  ENSP ID: ENSP00000422755
MAASAAETRVFLEVRGQLQSALLILGDRVSPYCPCWS

SEQ ID NO: 94696 - protein, 284 aa, Homo sapiens
  Payload ID: 18875
  Gene Name: ubiquitin protein ligase E3D
  ENSP ID: ENSP00000427101
MAASAAETRVFLEVRGQLQSALLILGEPKEGGMPMNISIMPSSLQMKTPEGCTEIQLPAEVRLVPSSCRGLQFVVGDGLHLRLQTQAKLGTKLISMFNQSSQTQECCTFYCQSCGEVIIKDRKLLRVLPLPSENWGALVGEWCCHPDPFANKSLHPQENDCFIGDSFFLVNLRTSLWQQRPELSPVEMCCVSSDNHCKLEPKANTKVICKRCKVMLGETVSSETTKFYMTEIIIQSSERSFPIIPRSWFVQSVIAQCLVQLSSARSTFRFTIQAMAFKFRQFGD

SEQ ID NO: 94697 - protein, 37 aa, Homo sapiens; identical to SEQ ID NO: 94695
  Payload ID: 18875
  Gene Name: ubiquitin protein ligase E3D
  ENSP ID: ENSP00000487457

SEQ ID NO: 94698 - protein, 63 aa, Homo sapiens
  Payload ID: 18876
  Gene Name: ubiquitin related modifier 1
  ENSP ID: ENSP00000361938
MAAPLSVEVEFGSSPGCLFLWSSFAEVVRSSCLTVLRNIESLCLDRRNPGTSGTCSSGSRRIC

SEQ ID NO: 94699 - protein, 63 aa, Homo sapiens
  Payload ID: 18876
  Gene Name: ubiquitin related modifier 1
  Uniprot ID: Q9BTM9
  ENSP ID: ENSP00000361941
MAAPLSVEVEFGGGAELLFDGIKKHRVTLPGQEEPWDIRNLLIWIKKNLLKERPELFIQGDSV

SEQ ID NO: 94700 - protein, 101 aa, Homo sapiens
  Payload ID: 18876
  Gene Name: ubiquitin related modifier 1
  Uniprot ID: Q9BTM9
  ENSP ID: ENSP00000361944
MAAPLSVEVEFGGGAELLFDGIKKHRVTLPGQEEPWDIRNLLIWIKKNLLKERPELFIQGDSVRPGILVLINDADWELLGELDYQLQDQDSVLFISTLHGG

SEQ ID NO: 94701 - protein, 146 aa, Homo sapiens
  Payload ID: 18876
  Gene Name: ubiquitin related modifier 1
  Uniprot ID: Q9BTM9
  ENSP ID: ENSP00000412922
MAAPLSVEVEFGGGAELLFDGIKKHRVTLPGQEEPWDIRNLLIWIKKNLLKERPELFIQGDSVRPGILVLINDADWELLVSTLGDIPPPAPALAASVGKRWASPQAHIEWLGNPPPHSSPTLRLLESPTPGEEGMGSWGHGSTPPS

SEQ ID NO: 94702 - protein, 63 aa, Homo sapiens; identical to SEQ ID NO: 94698
  Payload ID: 18876
  Gene Name: ubiquitin related modifier 1
  ENSP ID: ENSP00000435186

SEQ ID NO: 94703 - protein, 785 aa, Homo sapiens
  Payload ID: 18877
  Gene Name: ubiquitin specific peptidase 1
  Uniprot ID: O94782
  ENSP ID: ENSP00000343526
MPGVIPSESNGLSRGSPSKKNRLSLKFFQKKETKRALDFTDSQENEEKASEYRASEIDQVVPAAQSSPINCEKRENLLPFVGLNNLGNTCYLNSILQVLYFCPGFKSGVKHLFNIISRKKEALKDEANQKDKGNCKEDSLASYELICSLQSLIISVEQLQASFLLNPEKYTDELATQPRRLLNTLRELNPMYEGYLQHDAQEVLQCILGNIQETCQLLKKEEVKNVAELPTKVEEIPHPKEEMNGINSIEMDSMRHSEDFKEKLPKGNGKRKSDTEFGNMKKKVKLSKEHQSLEENQRQTRSKRKATSDTLESPPKIIPKYISENESPRPSQKKSRVKINWLKSATKQPSILSKFCSLGKITTNQGVKGQSKENECDPEEDLGKCESDNTTNGCGLESPGNTVTPVNVNEVKPINKGEEQIGFELVEKLFQGQLVLRTRCLECESLTERREDFQDISVPVQEDELSKVEESSEISPEPKTEMKTLRWAISQFASVERIVGEDKYFCENCHHYTEAERSLLFDKMPEVITIHLKCFAASGLEFDCYGGGLSKINTPLLTPLKLSLEEWSTKPTNDSYGLFAVVMHSGITISSGHYTASVKVTDLNSLELDKGNFVVDQMCEIGKPEPLNEEEARGVVENYNDEEVSIRVGGNTQPSKVLNKKNVEAIGLLGGQKSKADYELYNKASNPDKVASTAFAENRNSETSDTTGTHESDRNKESSDQTGINISGFENKISYVVQSLKEYEGKWLLFDDSEVKVTEEKDFLNSLSPSTSPTSTPYLLFYKKL

SEQ ID NO: 94704 - protein, 785 aa, Homo sapiens; identical to SEQ ID NO: 94703
  Payload ID: 18877
  Gene Name: ubiquitin specific peptidase 1
  Uniprot ID: O94782
  ENSP ID: ENSP00000360188

SEQ ID NO: 94705 - protein, 87 aa, Homo sapiens
  Payload ID: 18877
  Gene Name: ubiquitin specific peptidase 1
  ENSP ID: ENSP00000387986
MPGVIPSESNGLSRGSPSKKNRLSLKFFQKKETKRALDFTDSQENEEKASEYRASEIDQVVPAAQSSPINCEKRENLLPFVGLNNLG

SEQ ID NO: 94706 - protein, 186 aa, Homo sapiens
  Payload ID: 18877
  Gene Name: ubiquitin specific peptidase 1
  ENSP ID: ENSP00000403662
MPGVIPSESNGLSRGSPSKKNRLSLKFFQKKETKRALDFTDSQENEEKASEYRASEIDQVVPAAQSSPINCEKRENLLPFVGLNNLGNTCYLNSILQVLYFCPGFKSGVKHLFNIISRKKEALKDEANQKDKGNCKEDSLASYELICSLQSLIISVEQLQASFLLNPEKYTDELATQPRRLLNTLR

SEQ ID NO: 94707 - protein, 798 aa, Homo sapiens
  Payload ID: 18878
  Gene Name: ubiquitin specific peptidase 10
  Uniprot ID: Q14694
  ENSP ID: ENSP00000219473
MALHSPQYIFGDFSPDEFNQFFVTPRSSVELPPYSGTVLCGTQAVDKLPDGQEYQRIEFGVDEVIEPSDTLPRTPSYSISSTLNPQAPEFILGCTASKITPDGITKEASYGSIDCQYPGSALALDGSSNVEAEVLENDGVSGGLGQRERKKKKKRPPGYYSYLKDGGDDSISTEALVNGHANSAVPNSVSAEDAEFMGDMPPSVTPRTCNSPQNSTDSVSDIVPDSPFPGALGSDTRTAGQPEGGPGADFGQSCFPAEAGRDTLSRTAGAQPCVGTDTTENLGVANGQILESSGEGTATNGVELHTTESIDLDPTKPESASPPADGTGSASGTLPVSQPKSWASLFHDSKPSSSSPVAYVETKYSPPAISPLVSEKQVEVKEGLVPVSEDPVAIKIAELLENVTLIHKPVSLQPRGLINKGNWCYINATLQALVACPPMYHLMKFIPLYSKVQRPCTSTPMIDSFVRLMNEFTNMPVPPKPRQALGDKIVRDIRPGAAFEPTYIYRLLTVNKSSLSEKGRQEDAEEYLGFILNGLHEEMLNLKKLLSPSNEKLTISNGPKNHSVNEEEQEEQGEGSEDEWEQVGPRNKTSVTRQADFVQTPITGIFGGHIRSVVYQQSSKESATLQPFFTLQLDIQSDKIRTVQDALESLVARESVQGYTTKTKQEVEISRRVTLEKLPPVLVLHLKRFVYEKTGGCQKLIKNIEYPVDLEISKELLSPGVKNKNFKCHRTYRLFAVVYHHGNSATGGHYTTDVFQIGLNGWLRIDDQTVKVINQYQVVKPTAERTAYLLYYRRVDLL

SEQ ID NO: 94708 - protein, 62 aa, Homo sapiens
  Payload ID: 18878
  Gene Name: ubiquitin specific peptidase 10
  ENSP ID: ENSP00000445589
MALHSPQYIFGDFSPDEFNQFFVTPRSSVEDKNIRELSLVSMKSLNPVTLCREPPATVFQAH

SEQ ID NO: 94709 - protein, 150 aa, Homo sapiens
  Payload ID: 18878
  Gene Name: ubiquitin specific peptidase 10
  ENSP ID: ENSP00000454751
MALHSPQYIFGDFSPDEFNQFFVTPRSSVEGRQEDAEEYLGFILNGLHEEMLNLKKLLSPSNEKLTISNGPKNHSVNEEEQEEQGEGSEDEWEQVGPRNKTSVTRQADFVQTPITGIFGGHIRSVVYQQSSKESATLQPFFTLQLDIQSD

SEQ ID NO: 94710 - protein, 35 aa, Homo sapiens
  Payload ID: 18878
  Gene Name: ubiquitin specific peptidase 10
  ENSP ID: ENSP00000454902
MALHSPQYIFGDFSPDEFNQFFVTPRSSVESCWRM

SEQ ID NO: 94711 - protein, 63 aa, Homo sapiens
  Payload ID: 18878
  Gene Name: ubiquitin specific peptidase 10
  ENSP ID: ENSP00000454943
MALHSPQMESGSVAPAGVRWRDLSSLQPRPPWFKQFSWLSLPSSRDYSIFLEILALMNSINSL

SEQ ID NO: 94712 - protein, 76 aa, Homo sapiens
  Payload ID: 18878
  Gene Name: ubiquitin specific peptidase 10
  ENSP ID: ENSP00000454987
  MOD_RES (1)..(1): Any amino acid
XQSDKIRTVQDALESLVARESVQGYTTKTKQENCFLQGLKIRILNATEPIGSLQWSTITATVRRAAITLQTSSRSV

SEQ ID NO: 94713 - protein, 141 aa, Homo sapiens
  Payload ID: 18878
  Gene Name: ubiquitin specific peptidase 10
  ENSP ID: ENSP00000455712
MSQQKDFSPDEFNQFFVTPRSSVELPPYSGTVLCGTQAVDKLPDGQEYQRIEFGVDEVIEPSDTLPRTPSYSISSTLNPQAPEFILGCTASKITPDGITKEASYGSIDCQYPGSALALDGSSNVEAEVLENDGVSGGLGQR

SEQ ID NO: 94714 - protein, 110 aa, Homo sapiens
  Payload ID: 18878
  Gene Name: ubiquitin specific peptidase 10
  ENSP ID: ENSP00000455865
  MOD_RES (1)..(1): Any amino acid
XSDKIRTVQDALESLVARESVQGYTTKTKQEVEISRRVTLEKLPPVLVLHLKRFVYEKTGGCQKLIKNIEYPVDLEISKVVYHHGNSATGGHYTTDVFQIGLNGWLRIDD

SEQ ID NO: 94715 - protein, 802 aa, Homo sapiens
  Payload ID: 18878
  Gene Name: ubiquitin specific peptidase 10
  Uniprot ID: Q14694
  ENSP ID: ENSP00000457411
MPWLPSPGIGQYIFGDFSPDEFNQFFVTPRSSVELPPYSGTVLCGTQAVDKLPDGQEYQRIEFGVDEVIEPSDTLPRTPSYSISSTLNPQAPEFILGCTASKITPDGITKEASYGSIDCQYPGSALALDGSSNVEAEVLENDGVSGGLGQRERKKKKKRPPGYYSYLKDGGDDSISTEALVNGHANSAVPNSVSAEDAEFMGDMPPSVTPRTCNSPQNSTDSVSDIVPDSPFPGALGSDTRTAGQPEGGPGADFGQSCFPAEAGRDTLSRTAGAQPCVGTDTTENLGVANGQILESSGEGTATNGVELHTTESIDLDPTKPESASPPADGTGSASGTLPVSQPKSWASLFHDSKPSSSSPVAYVETKYSPPAISPLVSEKQVEVKEGLVPVSEDPVAIKIAELLENVTLIHKPVSLQPRGLINKGNWCYINATLQALVACPPMYHLMKFIPLYSKVQRPCTSTPMIDSFVRLMNEFTNMPVPPKPRQALGDKIVRDIRPGAAFEPTYIYRLLTVNKSSLSEKGRQEDAEEYLGFILNGLHEEMLNLKKLLSPSNEKLTISNGPKNHSVNEEEQEEQGEGSEDEWEQVGPRNKTSVTRQADFVQTPITGIFGGHIRSVVYQQSSKESATLQPFFTLQLDIQSDKIRTVQDALESLVARESVQGYTTKTKQEVEISRRVTLEKLPPVLVLHLKRFVYEKTGGCQKLIKNIEYPVDLEISKELLSPGVKNKNFKCHRTYRLFAVVYHHGNSATGGHYTTDVFQIGLNGWLRIDDQTVKVINQYQVVKPTAERTAYLLYYRRVDLL

SEQ ID NO: 94716 - protein, 158 aa, Homo sapiens
  Payload ID: 18878
  Gene Name: ubiquitin specific peptidase 10
  ENSP ID: ENSP00000458089
MALHSPQYIFGDFSPDEFNQFFVTPRSSVELPPYSGTVLCGTQAVDKLPDELLENVTLIHKPVSLQPRGLINKGNWCYINATLQALVACPPMYHLMKFIPLYSKVQRPCTSTPMIDSFVRLMNEFTNMPVPPKPRQALGDKIVRDIRPGAAFEPTYIY

SEQ ID NO: 94717 - protein, 208 aa, Homo sapiens
  Payload ID: 18878
  Gene Name: ubiquitin specific peptidase 10
  ENSP ID: ENSP00000462762
MEVEVKEGLVPVSEDPVAIKIAELLENVTLIHKPVSLQPRGLINKGNWCYINATLQALVACPPMYHLMKFIPLYSKVQRPCTSTPMIDSFVRLMNEFTNMPVPPKPRQALGDKIVRDIRPGAAFEPTYIYRLLTVNKSSLSEKGRQEDAEEYLGFILNGLHEEMLNLKKLLSPSNEKLTISNGPKNHSVNEEEQEEQAIFHVAVGYPV

SEQ ID NO: 94718 - protein, 963 aa, Homo sapiens
  Payload ID: 18879
  Gene Name: ubiquitin specific peptidase 11
  Uniprot ID: P51784
  ENSP ID: ENSP00000218348
MAVAPRLFGGLCFRFRDQNPEVAVEGRLPISHSCVGCRRERTAMATVAANPAAAAAAVAAAAAVTEDREPQHEELPGLDSQWRQIENGESGRERPLRAGESWFLVEKHWYKQWEAYVQGGDQDSSTFPGCINNATLFQDEINWRLKEGLVEGEDYVLLPAAAWHYLVSWYGLEHGQPPIERKVIELPNIQKVEVYPVELLLVRHNDLGKSHTVQFSHTDSIGLVLRTARERFLVEPQEDTRLWAKNSEGSLDRLYDTHITVLDAALETGQLIIMETRKKDGTWPSAQLHVMNNNMSEEDEDFKGQPGICGLTNLGNTCFMNSALQCLSNVPQLTEYFLNNCYLEELNFRNPLGMKGEIAEAYADLVKQAWSGHHRSIVPHVFKNKVGHFASQFLGYQQHDSQELLSFLLDGLHEDLNRVKKKEYVELCDAAGRPDQEVAQEAWQNHKRRNDSVIVDTFHGLFKSTLVCPDCGNVSVTFDPFCYLSVPLPISHKRVLEVFFIPMDPRRKPEQHRLVVPKKGKISDLCVALSKHTGISPERMMVADVFSHRFYKLYQLEEPLSSILDRDDIFVYEVSGRIEAIEGSREDIVVPVYLRERTPARDYNNSYYGLMLFGHPLLVSVPRDRFTWEGLYNVLMYRLSRYVTKPNSDDEDDGDEKEDDEEDKDDVPGPSTGGSLRDPEPEQAGPSSGVTNRCPFLLDNCLGTSQWPPRRRRKQLFTLQTVNSNGTSDRTTSPEEVHAQPYIAIDWEPEMKKRYYDEVEAEGYVKHDCVGYVMKKAPVRLQECIELFTTVETLEKENPWYCPSCKQHQLATKKLDLWMLPEILIIHLKRFSYTKFSREKLDTLVEFPIRDLDFSEFVIQPQNESNPELYKYDLIAVSNHYGGMRDGHYTTFACNKDSGQWHYFDDNSVSPVNENQIESKAAYVLFYQRQDVARRLLSPAGSSGAPASPACSSPPSSEFMDVN

SEQ ID NO: 94719 - protein, 140 aa, Homo sapiens
  Payload ID: 18879
  Gene Name: ubiquitin specific peptidase 11
  ENSP ID: ENSP00000366279
METRKKDGTWPSAQLHVMNNNMSEEDEDFKGQPGICGLTNLGNTCFMNSALQCLSNVPQLTEYFLNNCYLEELNFRNPLGMKGEIAEAYADLVKQAWSGHHRSIVPHVFKNKVGHFASQFLGYQQHDSQELLSFLLDGLH

SEQ ID NO: 94720 - protein, 49 aa, Homo sapiens
  Payload ID: 18879
  Gene Name: ubiquitin specific peptidase 11
  ENSP ID: ENSP00000366282
METRKKDGTWPSAQLHVMNNNMSEEDEDFKGQPGICGLTNLGNTCFMNS

SEQ ID NO: 94721 - protein, 920 aa, Homo sapiens
  Payload ID: 18879
  Gene Name: ubiquitin specific peptidase 11
  ENSP ID: ENSP00000366311
MATVAANPAAAAAAVAAAAAVTEDREPQHEELPGLDSQWRQIENGESGRERPLRAGESWFLVEKHWYKQWEAYVQGGDQDSSTFPGCINNATLFQDEINWRLKEGLVEGEDYVLLPAAAWHYLVSWYGLEHGQPPIERKVIELPNIQKVEVYPVELLLVRHNDLGKSHTVQFSHTDSIGLVLRTARERFLVEPQEDTRLWAKNSEGSLDRLYDTHITVLDAALETGQLIIMETRKKDGTWPSAQLHVMNNNMSEEDEDFKGQPGICGLTNLGNTCFMNSALQCLSNVPQLTEYFLNNCYLEELNFRNPLGMKGEIAEAYADLVKQAWSGHHRSIVPHVFKNKVGHFASQFLGYQQHDSQELLSFLLDGLHEDLNRVKKKEYVELCDAAGRPDQEVAQEAWQNHKRRNDSVIVDTFHGLFKSTLVCPDCGNVSVTFDPFCYLSVPLPISHKRVLEVFFIPMDPRRKPEQHRLVVPKKGKISDLCVALSKHTGISPERMMVADVFSHRFYKLYQLEEPLSSILDRDDIFVYEVSGRIEAIEGSREDIVVPVYLRERTPARDYNNSYYGLMLFGHPLLVSVPRDRFTWEGLYNVLMYRLSRYVTKPNSDDEDDGDEKEDDEEDKDDVPGPSTGGSLRDPEPEQAGPSSGVTNRCPFLLDNCLGTSQWPPRRRRKQLFTLQTVNSNGTSDRTTSPEEVHAQPYIAIDWEPEMKKRYYDEVEAEGYVKHDCVGYVMKKAPVRLQECIELFTTVETLEKENPWYCPSCKQHQLATKKLDLWMLPEILIIHLKRFSYTKFSREKLDTLVEFPIRDLDFSEFVIQPQNESNPELYKYDLIAVSNHYGGMRDGHYTTFACNKDSGQWHYFDDNSVSPVNENQIESKAAYVLFYQRQDVARRLLSPAGSSGAPASPACSSPPSSEFMDVN

SEQ ID NO: 94722 - protein, 370 aa, Homo sapiens
  Payload ID: 18880
  Gene Name: ubiquitin specific peptidase 12
  Uniprot ID: O75317
  ENSP ID: ENSP00000282344
MEILMTVSKFASICTMGANASALEKEIGPEQFPVNEHYFGLVNFGNTCYCNSVLQALYFCRPFREKVLAYKSQPRKKESLLTCLADLFHSIATQKKKVGVIPPKKFITRLRKENELFDNYMQQDAHEFLNYLLNTIADILQEERKQEKQNGRLPNGNIDNENNNSTPDPTWVHEIFQGTLTNETRCLTCETISSKDEDFLDLSVDVEQNTSITHCLRGFSNTETLCSEYKYYCEECRSKQEAHKRMKVKKLPMILALHLKRFKYMDQLHRYTKLSYRVVFPLELRLFNTSGDATNPDRMYDLVAVVVHCGSGPNRGHYIAIVKSHDFWLLFDDDIVEKIDAQAIEEFYGLTSDISKNSESGYILFYQSRD

SEQ ID NO: 94723 - protein, 18 aa, Homo sapiens
  Payload ID: 18880
  Gene Name: ubiquitin specific peptidase 12
  ENSP ID: ENSP00000478929
MEILMTVSKFASICTMEW

SEQ ID NO: 94724 - protein, 90 aa, Homo sapiens
  Payload ID: 18880
  Gene Name: ubiquitin specific peptidase 12
  ENSP ID: ENSP00000480395
  MOD_RES (1)..(1): Any amino acid
XNIDNENNNSTPDPTWVHEIFQGTLTNETRCLTCETISSKDEDFLDLSVDVEQNTSITHCLRGFSNTETLCSEYKYYCEECRSKQEAHKR

SEQ ID NO: 94725 - protein, 863 aa, Homo sapiens
  Payload ID: 18881
  Gene Name: ubiquitin specific peptidase 13 (isopeptidase T-3)
  Uniprot ID: Q92995
  ENSP ID: ENSP00000263966
MQRRGALFGMPGGSGGRKMAAGDIGELLVPHMPTIRVPRSGDRVYKNECAFSYDSPNSEGGLYVCMNTFLAFGREHVERHFRKTGQSVYMHLKRHVREKVRGASGGALPKRRNSKIFLDLDTDDDLNSDDYEYEDEAKLVIFPDHYEIALPNIEELPALVTIACDAVLSSKSPYRKQDPDTWENELPVSKYANNLTQLDNGVRIPPSGWKCARCDLRENLWLNLTDGSVLCGKWFFDSSGGNGHALEHYRDMGYPLAVKLGTITPDGADVYSFQEEEPVLDPHLAKHLAHFGIDMLHMHGTENGLQDNDIKLRVSEWEVIQESGTKLKPMYGPGYTGLKNLGNSCYLSSVMQAIFSIPEFQRAYVGNLPRIFDYSPLDPTQDFNTQMTKLGHGLLSGQYSKPPVKSELIEQVMKEEHKPQQNGISPRMFKAFVSKSHPEFSSNRQQDAQEFFLHLVNLVERNRIGSENPSDVFRFLVEERIQCCQTRKVRYTERVDYLMQLPVAMEAATNKDELIAYELTRREAEANRRPLPELVRAKIPFSACLQAFSEPENVDDFWSSALQAKSAGVKTSRFASFPEYLVVQIKKFTFGLDWVPKKFDVSIDMPDLLDINHLRARGLQPGEEELPDISPPIVIPDDSKDRLMNQLIDPSDIDESSVMQLAEMGFPLEACRKAVYFTGNMGAEVAFNWIIVHMEEPDFAEPLTMPGYGGAASAGASVFGASGLDNQPPEEIVAIITSMGFQRNQAIQALRATNNNLERALDWIFSHPEFEEDSDFVIEMENNANANIISEAKPEGPRVKDGSGTYELFAFISHMGTSTMSGHYICHIKKEGRWVIYNDHKVCASERPPKDLGYMYFYRRIPS

SEQ ID NO: 94726 - protein, 798 aa, Homo sapiens
  Payload ID: 18881
  Gene Name: ubiquitin specific peptidase 13 (isopeptidase T-3)
  Uniprot ID: Q92995
  ENSP ID: ENSP00000417146
MNTFLAFGREHVERHFRKTGQSVYMHLKRHVREKVRGASGGALPKRRNSKIFLDLDTDDDLNSDDYEYEDEAKLVIFPDHYEIALPNIEELPALVTIACDAVLSSKSPYRKQDPDTWENELPVSKYANNLTQLDNGVRIPPSGWKCARCDLRENLWLNLTDGSVLCGKWFFDSSGGNGHALEHYRDMGYPLAVKLGTITPDGADVYSFQEEEPVLDPHLAKHLAHFGIDMLHMHGTENGLQDNDIKLRVSEWEVIQESGTKLKPMYGPGYTGLKNLGNSCYLSSVMQAIFSIPEFQRAYVGNLPRIFDYSPLDPTQDFNTQMTKLGHGLLSGQYSKPPVKSELIEQVMKEEHKPQQNGISPRMFKAFVSKSHPEFSSNRQQDAQEFFLHLVNLVERNRIGSENPSDVFRFLVEERIQCCQTRKVRYTERVDYLMQLPVAMEAATNKDELIAYELTRREAEANRRPLPELVRAKIPFSACLQAFSEPENVDDFWSSALQAKSAGVKTSRFASFPEYLVVQIKKFTFGLDWVPKKFDVSIDMPDLLDINHLRARGLQPGEEELPDISPPIVIPDDSKDRLMNQLIDPSDIDESSVMQLAEMGFPLEACRKAVYFTGNMGAEVAFNWIIVHMEEPDFAEPLTMPGYGGAASAGASVFGASGLDNQPPEEIVAIITSMGFQRNQAIQALRATNNNLERALDWIFSHPEFEEDSDFVIEMENNANANIISEAKPEGPRVKDGSGTYELFAFISHMGTSTMSGHYICHIKKEGRWVIYNDHKVCASERPPKDLGYMYFYRRIPS

SEQ ID NO: 94727 - protein, 75 aa, Homo sapiens
  Payload ID: 18881
  Gene Name: ubiquitin specific peptidase 13 (isopeptidase T-3)
  ENSP ID: ENSP00000418651
GELLVPHMPTIRVPRSGDRVYKNECAFSYDSPNSEGGLYVCMNTFLAFGREHVERHFRKTGQSVYMHLKRHVREI

SEQ ID NO: 94728 - protein, 299 aa, Homo sapiens
  Payload ID: 18881
  Gene Name: ubiquitin specific peptidase 13 (isopeptidase T-3)
  ENSP ID: ENSP00000420057
FSIPEFQRAYVGNLPRIFDYSPLDPTQDFNTQMTKLGHGLLSGQYSKPPVKSELIEQVMKEEHKPQQNGISPRMFKAFVSKSHPEFSSNRQQDAQEFFLHLVNLVERNRIGSENPSDVFRFLVEERIQCCQTRKVRYTERVDYLMQLPVAMEAATNKDELIAYELTRREAEANRRPLPELVRAKIPFSACLQAFSEPENVDDFWSSALQAKSAGVKTSRFASFPEYLVVQIKKFTFGLDWVPKKFDVSIDMPDLLDINHLRARGLQPGEEELPDISPPIVIPDDSKASDIDESSVMQLA

SEQ ID NO: 94729 - protein, 494 aa, Homo sapiens
  Payload ID: 18882
  Gene Name: ubiquitin specific peptidase 14 (tRNA-guanine transglycosylase)
  Uniprot ID: P54578
  ENSP ID: ENSP00000261601
MPLYSVTVKWGKEKFEGVELNTDEPPMVFKAQLFALTGVQPARQKVMVKGGTLKDDDWGNIKIKNGMTLLMMGSADALPEEPSAKTVFVEDMTEEQLASAMELPCGLTNLGNTCYMNATVQCIRSVPELKDALKRYAGALRASGEMASAQYITAALRDLFDSMDKTSSSIPPIILLQFLHMAFPQFAEKGEQGQYLQQDANECWIQMMRVLQQKLEAIEDDSVKETDSSSASAATPSKKKSLIDQFFGVEFETTMKCTESEEEEVTKGKENQLQLSCFINQEVKYLFTGLKLRLQEEITKQSPTLQRNALYIKSSKISRLPAYLTIQMVRFFYKEKESVNAKVLKDVKFPLMLDMYELCTPELQEKMVSFRSKFKDLEDKKVNQQPNTSDKKSSPQKEVKYEPFSFADDIGSNNCGYYDLQAVLTHQGRSSSSGHYVSWVKRKQDEWIKFDDDKVSIVTPEDILRLSGGGDWHIAYVLLYGPRRVEIMEEESEQ

SEQ ID NO: 94730 - protein, 448 aa, Homo sapiens
  Payload ID: 18882
  Gene Name: ubiquitin specific peptidase 14 (tRNA-guanine transglycosylase)
  ENSP ID: ENSP00000373083
MPLYSVTVKWGKEKFEGVELNTDEPPMVFKAQLFALTGVQPARQKVMVKGGTLKMELPCGLTNLGNTCYMNATVQCIRSVPELKDALKRYAGALRASGEMASAQYITAALRDLFDSMDKTSSSIPPIILLQFLHMAFPQFAEKGEQGQYLQQDANECWIQMMRVLQQKLEAIEDDSVKETDSSSASAATPSKKKSLIDQFFGVEFETTMKCTESEEEEVTKGKENQLQLSCFINQEVKYLFTGLKLRLQEEITKQSPTLQRNALYIKSSKISRLPAYLTIQMVRFFYKEKESVNAKVLKDVKFPLMLDMYELCTPELQEKMVSFRSKFKDLEDKKVNQQPNTSDKKSSPQKEVKYEPFSFADDIGSNNCGYYDLQAVLTHQGRSSSSGHYVSWVKRKQDEWIKFDDDKVSIVTPEDILRLSGGGDWHIAYVLLYGPRRVEIMEEESEQ

SEQ ID NO: 94731 - protein, 483 aa, Homo sapiens
  Payload ID: 18882
  Gene Name: ubiquitin specific peptidase 14 (tRNA-guanine transglycosylase)
  Uniprot ID: P54578
  ENSP ID: ENSP00000383125
MPLYSVTVKWGKEKFEGVELNTDEPPMVFKAQLFALTGVQPARQKVMVKGGTLKGMTLLMMGSADALPEEPSAKTVFVEDMTEEQLASAMELPCGLTNLGNTCYMNATVQCIRSVPELKDALKRYAGALRASGEMASAQYITAALRDLFDSMDKTSSSIPPIILLQFLHMAFPQFAEKGEQGQYLQQDANECWIQMMRVLQQKLEAIEDDSVKETDSSSASAATPSKKKSLIDQFFGVEFETTMKCTESEEEEVTKGKENQLQLSCFINQEVKYLFTGLKLRLQEEITKQSPTLQRNALYIKSSKISRLPAYLTIQMVRFFYKEKESVNAKVLKDVKFPLMLDMYELCTPELQEKMVSFRSKFKDLEDKKVNQQPNTSDKKSSPQKEVKYEPFSFADDIGSNNCGYYDLQAVLTHQGRSSSSGHYVSWVKRKQDEWIKFDDDKVSIVTPEDILRLSGGGDWHIAYVLLYGPRRVEIMEEESEQ

SEQ ID NO: 94732 - protein, 28 aa, Homo sapiens
  Payload ID: 18882
  Gene Name: ubiquitin specific peptidase 14 (tRNA-guanine transglycosylase)
  ENSP ID: ENSP00000462315
MVFKAQLFALTGVQPARQKVMVKGGTLK

SEQ ID NO: 94733 - protein, 20 aa, Homo sapiens
  Payload ID: 18882
  Gene Name: ubiquitin specific peptidase 14 (tRNA-guanine transglycosylase)
  ENSP ID: ENSP00000463891
MVFKAQLFALTGVQPARQKV

SEQ ID NO: 94734 - protein, 459 aa, Homo sapiens
  Payload ID: 18882
  Gene Name: ubiquitin specific peptidase 14 (tRNA-guanine transglycosylase)
  Uniprot ID: P54578
  ENSP ID: ENSP00000464447
MPLYSVTVKWGKEKFEGVELNTDEPPMVFKAQLFALTGVQPARQKVMVKGGTLKDDDWGNIKIKNMELPCGLTNLGNTCYMNATVQCIRSVPELKDALKRYAGALRASGEMASAQYITAALRDLFDSMDKTSSSIPPIILLQFLHMAFPQFAEKGEQGQYLQQDANECWIQMMRVLQQKLEAIEDDSVKETDSSSASAATPSKKKSLIDQFFGVEFETTMKCTESEEEEVTKGKENQLQLSCFINQEVKYLFTGLKLRLQEEITKQSPTLQRNALYIKSSKISRLPAYLTIQMVRFFYKEKESVNAKVLKDVKFPLMLDMYELCTPELQEKMVSFRSKFKDLEDKKVNQQPNTSDKKSSPQKEVKYEPFSFADDIGSNNCGYYDLQAVLTHQGRSSSSGHYVSWVKRKQDEWIKFDDDKVSIVTPEDILRLSGGGDWHIAYVLLYGPRRVEIMEEESEQ

SEQ ID NO: 94735 - protein, 33 aa, Homo sapiens
  Payload ID: 18882
  Gene Name: ubiquitin specific peptidase 14 (tRNA-guanine transglycosylase)
  ENSP ID: ENSP00000473563
  MOD_RES (1)..(1): Any amino acid
XALTGVQPARQKVMVKGGTLKDFHEITFFKNRE

SEQ ID NO: 94736 - protein, 952 aa, Homo sapiens
  Payload ID: 18883
  Gene Name: ubiquitin specific peptidase 15
  Uniprot ID: Q9Y4E8
  ENSP ID: ENSP00000258123
MAEGGAADLDTQRSDIATLLKTSLRKGDTWYLVDSRWFKQWKKYVGFDSWDKYQMGDQNVYPGPIDNSGLLKDGDAQSLKEHLIDELDYILLPTEGWNKLVSWYTLMEGQEPIARKVVEQGMFVKHCKVEVYLTELKLCENGNMNNVVTRRFSKADTIDTIEKEIRKIFSIPDEKETRLWNKYMSNTFEPLNKPDSTIQDAGLYQGQVLVIEQKNEDGTWPRGPSTPNVKNSNYCLPSYTAYKNYDYSEPGRNNEQPGLCGLSNLGNTCFMNSAIQCLSNTPPLTEYFLNDKYQEELNFDNPLGMRGEIAKSYAELIKQMWSGKFSYVTPRAFKTQVGRFAPQFSGYQQQDCQELLAFLLDGLHEDLNRIRKKPYIQLKDADGRPDKVVAEEAWENHLKRNDSIIVDIFHGLFKSTLVCPECAKISVTFDPFCYLTLPLPMKKERTLEVYLVRMDPLTKPMQYKVVVPKIGNILDLCTALSALSGIPADKMIVTDIYNHRFHRIFAMDENLSSIMERDDIYVFEININRTEDTEHVIIPVCLREKFRHSSYTHHTGSSLFGQPFLMAVPRNNTEDKLYNLLLLRMCRYVKISTETEETEGSLHCCKDQNINGNGPNGIHEEGSPSEMETDEPDDESSQDQELPSENENSQSEDSVGGDNDSENGLCTEDTCKGQLTGHKKRLFTFQFNNLGNTDINYIKDDTRHIRFDDRQLRLDERSFLALDWDPDLKKRYFDENAAEDFEKHESVEYKPPKKPFVKLKDCIELFTTKEKLGAEDPWYCPNCKEHQQATKKLDLWSLPPVLVVHLKRFSYSRYMRDKLDTLVDFPINDLDMSEFLINPNAGPCRYNLIAVSNHYGGMGGGHYTAFAKNKDDGKWYYFDDSSVSTASEDQIVSKAAYVLFYQRQDTFSGTGFFPLDRETKGASAATGIPLESDEDSNDNDNDIENENCMHTN

SEQ ID NO: 94737 - protein, 981 aa, Homo sapiens
  Payload ID: 18883
  Gene Name: ubiquitin specific peptidase 15
  Uniprot ID: Q9Y4E8
  ENSP ID: ENSP00000280377
MAEGGAADLDTQRSDIATLLKTSLRKGDTWYLVDSRWFKQWKKYVGFDSWDKYQMGDQNVYPGPIDNSGLLKDGDAQSLKEHLIDELDYILLPTEGWNKLVSWYTLMEGQEPIARKVVEQGMFVKHCKVEVYLTELKLCENGNMNNVVTRRFSKADTIDTIEKEIRKIFSIPDEKETRLWNKYMSNTFEPLNKPDSTIQDAGLYQGQVLVIEQKNEDGTWPRGPSTPKSPGASNFSTLPKISPSSLSNNYNNMNNRNVKNSNYCLPSYTAYKNYDYSEPGRNNEQPGLCGLSNLGNTCFMNSAIQCLSNTPPLTEYFLNDKYQEELNFDNPLGMRGEIAKSYAELIKQMWSGKFSYVTPRAFKTQVGRFAPQFSGYQQQDCQELLAFLLDGLHEDLNRIRKKPYIQLKDADGRPDKVVAEEAWENHLKRNDSIIVDIFHGLFKSTLVCPECAKISVTFDPFCYLTLPLPMKKERTLEVYLVRMDPLTKPMQYKVVVPKIGNILDLCTALSALSGIPADKMIVTDIYNHRFHRIFAMDENLSSIMERDDIYVFEININRTEDTEHVIIPVCLREKFRHSSYTHHTGSSLFGQPFLMAVPRNNTEDKLYNLLLLRMCRYVKISTETEETEGSLHCCKDQNINGNGPNGIHEEGSPSEMETDEPDDESSQDQELPSENENSQSEDSVGGDNDSENGLCTEDTCKGQLTGHKKRLFTFQFNNLGNTDINYIKDDTRHIRFDDRQLRLDERSFLALDWDPDLKKRYFDENAAEDFEKHESVEYKPPKKPFVKLKDCIELFTTKEKLGAEDPWYCPNCKEHQQATKKLDLWSLPPVLVVHLKRFSYSRYMRDKLDTLVDFPINDLDMSEFLINPNAGPCRYNLIAVSNHYGGMGGGHYTAFAKNKDDGKWYYFDDSSVSTASEDQIVSKAAYVLFYQRQDTFSGTGFFPLDRETKGASAATGIPLESDEDSNDNDNDIENENCMHTN

SEQ ID NO: 94738 - protein, 235 aa, Homo sapiens
  Payload ID: 18883
  Gene Name: ubiquitin specific peptidase 15
  Uniprot ID: Q9Y4E8
  ENSP ID: ENSP00000309240
MAEGGAADLDTQRSDIATLLKTSLRKGDTWYLVDSRWFKQWKKYVGFDSWDKYQMGDQNVYPGPIDNSGLLKDGDAQSLKEHLIDELDYILLPTEGWNKLVSWYTLMEGQEPIARKVVEQGMFVKHCKVEVYLTELKLCENGNMNNVVTRRFSKADTIDTIEKEIRKIFSIPDEKETRLWNKYMSNTFEPLNKPDSTIQDAGLYQGQVLVIEQKNEDGTWPRGPSTPKKPLEQSC

SEQ ID NO: 94739 - protein, 49 aa, Homo sapiens
  Payload ID: 18883
  Gene Name: ubiquitin specific peptidase 15
  ENSP ID: ENSP00000446559
HQQATKKLDLWSLPPVLVVHLKRFSYSRYMRDKLDTLVDFPIKYCFCKK

SEQ ID NO: 94740 - protein, 139 aa, Homo sapiens
  Payload ID: 18883
  Gene Name: ubiquitin specific peptidase 15
  ENSP ID: ENSP00000446843
MGDQNVYPGPIDNSGLLKDGDAQSLKEHLIDELDYILLPTEGWNKLVSWYTLMEGQEPIARKVVEQGMFVKHCKVEVYLTELKLCENGNMNNVVTRRFSKADTIDTIEKEIRKIFSIPDEKETRLWNKYMSNTFEPLNK

SEQ ID NO: 94741 - protein, 87 aa, Homo sapiens
  Payload ID: 18883
  Gene Name: ubiquitin specific peptidase 15
  ENSP ID: ENSP00000447367
  MOD_RES (1)..(1): Any amino acid
XDTIEKEIRKIFSIPDEKETRLWNKYMSNTFEPLNKPDSTIQDAGLYQGQVLVIEQKNEDGTWPRGPSTPNFVGHMVSVITITADVV

SEQ ID NO: 94742 - protein, 175 aa, Homo sapiens
  Payload ID: 18883
  Gene Name: ubiquitin specific peptidase 15
  ENSP ID: ENSP00000447603
MAEGGAADLDTQRSDIATLLKTSLRKGDTWYLVDSRWFKQWKKYVGFDSWDKYQMGDQNVYPGPIDNSGLLKDGDAQSLKEHLIDELDYILLPTEGWNKLVSWYTLMEGQEPIARKGGSILGMKVVEQGMFVKHCKVEVYLTELKLCENGNMNNVVTRRFSKADTIDTIEKEIRK

SEQ ID NO: 94743 - protein, 157 aa, Homo sapiens
  Payload ID: 18883
  Gene Name: ubiquitin specific peptidase 15
  ENSP ID: ENSP00000448372
EKLGAEDPWYCPNCKEHQQATKKLDLWSLPPVLVVHLKRFSYSRYMRDKLDTLVDFPINDLDMSEFLINPNAGPCRYNLIAVSNHYGGMGGGHYTAFAKNKDDGKWYYFDDSSVSTASEDQIVCWAHNPLKASESRREVCWCTCGKFFWRKEKMILL

SEQ ID NO: 94744 - protein, 240 aa, Homo sapiens
  Payload ID: 18883
  Gene Name: ubiquitin specific peptidase 15
  ENSP ID: ENSP00000448393
  MOD_RES (1)..(1): Any amino acid
XAADLDTQRSDIATLLKTSLRKGDTWYLVDSRWFKQWKKYVGFDSWDKYQMGDQNVYPGPIDNSGLLKDGDAQSLKEHLIDELDYILLPTEGWNKLVSWYTLMEGQEPIARKVVEQGMFVKHCKVEVYLTELKLCENGNMNNVVTRRFSKADTIDTIEKEIRKIFSIPDEKETRLWNKYMSNTFEPLNKPDSTIQDAGLYQGQVLVIEQKNEDGTWPRGPSTPNTISFLFIPTTLVLGFV

SEQ ID NO: 94745 - protein, 106 aa, Homo sapiens
  Payload ID: 18883
  Gene Name: ubiquitin specific peptidase 15
  ENSP ID: ENSP00000449563
MFVKHCKVEVYLTELKLCENGNMNNVVTRRFSKADTIDTIEKEIRKIFSIPDEKETRLWNKYMSNTFEPLNKPDSTIQDAGLYQGQVLVIEQKNEDGTWPRGPSTP

SEQ ID NO: 94746 - protein, 823 aa, Homo sapiens
  Payload ID: 18884
  Gene Name: ubiquitin specific peptidase 16
  Uniprot ID: Q9Y5T5
  ENSP ID: ENSP00000334808
MGKKRTKGKTVPIDDSSETLEPVCRHIRKGLEQGNLKKALVNVEWNICQDCKTDNKVKDKAEEETEEKPSVWLCLKCGHQGCGRNSQEQHALKHYLTPRSEPHCLVLSLDNWSVWCYVCDNEVQYCSSNQLGQVVDYVRKQASITTPKPAEKDNGNIELENKKLEKESKNEQEREKKENMAKENPPMNSPCQITVKGLSNLGNTCFFNAVMQNLSQTPVLRELLKEVKMSGTIVKIEPPDLALTEPLEINLEPPGPLTLAMSQFLNEMQETKKGVVTPKELFSQVCKKAVRFKGYQQQDSQELLRYLLDGMRAEEHQRVSKGILKAFGNSTEKLDEELKNKVKDYEKKKSMPSFVDRIFGGELTSMIMCDQCRTVSLVHESFLDLSLPVLDDQSGKKSVNDKNLKKTVEDEDQDSEEEKDNDSYIKERSDIPSGTSKHLQKKAKKQAKKQAKNQRRQQKIQGKVLHLNDICTIDHPEDSEYEAEMSLQGEVNIKSNHISQEGVMHKEYCVNQKDLNGQAKMIESVTDNQKSTEEVDMKNINMDNDLEVLTSSPTRNLNGAYLTEGSNGEVDISNGFKNLNLNAALHPDEINIEILNDSHTPGTKVYEVVNEDPETAFCTLANREVFNTDECSIQHCLYQFTRNEKLRDANKLLCEVCTRRQCNGPKANIKGERKHVYTNAKKQMLISLAPPVLTLHLKRFQQAGFNLRKVNKHIKFPEILDLAPFCTLKCKNVAEENTRVLYSLYGVVEHSGTMRSGHYTAYAKARTANSHLSNLVLHGDIPQDFEMESKGQWFHISDTHVQAVPTTKVLNSQAYLLFYERIL

SEQ ID NO: 94747 - protein, 107 aa, Homo sapiens
  Payload ID: 18884
  Gene Name: ubiquitin specific peptidase 16
  ENSP ID: ENSP00000382855
MGKKRTKGKTVPIDDSSETLEPVCRHIRKGLEQGNLKKALVNVEWNICQDCKTDNKVKDKAEEETEEKPSVWLCLKCGHQGCGRNSQEQHALKHYLTPRSEPHCLVL

SEQ ID NO: 94748 - protein, 822 aa, Homo sapiens
  Payload ID: 18884
  Gene Name: ubiquitin specific peptidase 16
  Uniprot ID: Q9Y5T5
  ENSP ID: ENSP00000382857
MGKKRTKGKTVPIDDSSETLEPVCRHIRKGLEQGNLKKALVNVEWNICQDCKTDNKVKDKAEEETEEKPSVWLCLKCGHQGCGRNSQEQHALKHYLTPRSEPHCLVLSLDNWSVWCYVCDNEVQYCSSNQLGQVVDYVRKQASITTPKPEKDNGNIELENKKLEKESKNEQEREKKENMAKENPPMNSPCQITVKGLSNLGNTCFFNAVMQNLSQTPVLRELLKEVKMSGTIVKIEPPDLALTEPLEINLEPPGPLTLAMSQFLNEMQETKKGVVTPKELFSQVCKKAVRFKGYQQQDSQELLRYLLDGMRAEEHQRVSKGILKAFGNSTEKLDEELKNKVKDYEKKKSMPSFVDRIFGGELTSMIMCDQCRTVSLVHESFLDLSLPVLDDQSGKKSVNDKNLKKTVEDEDQDSEEEKDNDSYIKERSDIPSGTSKHLQKKAKKQAKKQAKNQRRQQKIQGKVLHLNDICTIDHPEDSEYEAEMSLQGEVNIKSNHISQEGVMHKEYCVNQKDLNGQAKMIESVTDNQKSTEEVDMKNINMDNDLEVLTSSPTRNLNGAYLTEGSNGEVDISNGFKNLNLNAALHPDEINIEILNDSHTPGTKVYEVVNEDPETAFCTLANREVFNTDECSIQHCLYQFTRNEKLRDANKLLCEVCTRRQCNGPKANIKGERKHVYTNAKKQMLISLAPPVLTLHLKRFQQAGFNLRKVNKHIKFPEILDLAPFCTLKCKNVAEENTRVLYSLYGVVEHSGTMRSGHYTAYAKARTANSHLSNLVLHGDIPQDFEMESKGQWFHISDTHVQAVPTTKVLNSQAYLLFYERIL

SEQ ID NO: 94749 - protein, 823 aa, Homo sapiens; identical to SEQ ID NO: 94746
  Payload ID: 18884
  Gene Name: ubiquitin specific peptidase 16
  Uniprot ID: Q9Y5T5
  ENSP ID: ENSP00000382858

SEQ ID NO: 94750 - protein, 530 aa, Homo sapiens
  Payload ID: 18885
  Gene Name: ubiquitin specific peptidase 17-like family member 1
  Uniprot ID: Q7RTZ2
  ENSP ID: ENSP00000485364
MGDDSLYLGGEWQFNHFSKLTSSRPDAAFAEIQRTSLPEKSPLSSETRVDLCDDLAPVARQLAPREKLPLSSRRPAAVGAGLQNMGNTCYENASLQCLTYTLPLANYMLSREHSQTCQRPKCCMLCTMQAHITWALHSPGHVIQPSQALAAGFHRGKQEDVHEFLMFTVDAMKKACLPGHKQVDHHCKDTTLIHQIFGGCWRSQIKCLHCHGISDTFDPYLDIALDIQAAQSVKQALEQLVKPEELNGENAYHCGLCLQRAPASNTLTLHTSAKVLILVLKRFSDVAGNKLAKNVQYPECLDMQPYMSQQNTGPLVYVLYAVLVHAGWSCHDGHYFSYVKAQEVQWYKMDDAEVTVCSIISVLSQQAYVLFYIQKSEWERHSESVSRGREPRALGAEDTDRRAKQGELKRDHPCLQAPELDEHLVERATQESTLDHWKFLQEQNKTKPEFNVGKVEGTLPPNALVIHQSKYKCGMKNHHPEQQSSLLNLSSTTRTDQESMNTGTLASLQGRTRRAKGKNKHSKRALLVCQ

SEQ ID NO: 94751 - protein, 558 aa, Homo sapiens
  Payload ID: 18886
  Gene Name: ubiquitin specific peptidase 17-like family member 10
  ENSP ID: ENSP00000390759
MEDDSLYLGGEWQFNHFSKLTSSRPDAAFAEIQRTSLPEKSPLSCETRVDLCDDLAPVARQLAPREKPPLSSRRPAAVGAGLQNMGNTCYVNASLQCLTYKPPLANYMLFREHSQTCHRHKGCMLCTMQAHITRALHIPGHVIQPSQALAAGFHRGKQEDAHEFLMFTVDAMRKACLPGHKQVDRHSKDTTLIHQIFGGYWRSQIKCLHCHGISDTFDPYLDIALDIQAAQSVQQALEQLVKPEELNGENAYHCGVCLQRAPASKTLTLHNSAKVLILVLKRFPDVTGNKIAKNVQYPECLDMQPYMSQQNTGPLVYVLYAVLVHAGWSCHNGHYSSYVKAQEGQWYKMDDAEVTASSITSVLSQQAYVLFYIQKSEWERHSESVSRGREPRALGVEDTDRRATQGELKRDHPCLQAPELDEHLVERATQESTLDHWKFLQEQNKTKPEFNVRRVEGTVPPDVLVIHQSKYKCRMKNHHPEQQSSLLNLSSTTPTDQESMNTGTLASLRGRTRRSKGKNKHSKRALLVCQSQWKYRPTRDIQCVFMNMTYRRVGLRVR

SEQ ID NO: 94752 - protein, 530 aa, Homo sapiens
  Payload ID: 18886
  Gene Name: ubiquitin specific peptidase 17-like family member 10
  Uniprot ID: C9JJH3
  ENSP ID: ENSP00000403760
MEDDSLYLGGEWQFNHFSKLTSSRPDAAFAEIQRTSLPEKSPLSCETRVDLCDDLAPVARQLAPREKPPLSSRRPAAVGAGLQNMGNTCYVNASLQCLTYKPPLANYMLFREHSQTCHRHKGCMLCTMQAHITRALHIPGHVIQPSQALAAGFHRGKQEDAHEFLMFTVDAMRKACLPGHKQVDRHSKDTTLIHQIFGGYWRSQIKCLHCHGISDTFDPYLDIALDIQAAQSVQQALEQLVKPEELNGENAYHCGVCLQRAPASKTLTLHNSAKVLILVLKRFPDVTGNKIAKNVQYPECLDMQPYMSQQNTGPLVYVLYAVLVHAGWSCHNGHYSSYVKAQEGQWYKMDDAEVTASSITSVLSQQAYVLFYIQKSEWERHSESVSRGREPRALGVEDTDRRATQGELKRDHPCLQAPELDEHLVERATQESTLDHWKFLQEQNKTKPEFNVRRVEGTVPPDVLVIHQSKYKCRMKNHHPEQQSSLLNLSSTTPTDQESMNTGTLASLRGRTRRSKGKNKHSKRALLVCQ

SEQ ID NO: 94753 - protein, 530 aa, Homo sapiens
  Payload ID: 18887
  Gene Name: ubiquitin specific peptidase 17-like family member 11
  Uniprot ID: C9JVI0
  ENSP ID: ENSP00000400880
MEDDSLYLGGEWQFNHFSKLTSSRPDAAFAEIQRTSLPEKSPLSCETRVDLCDDLAPVARQLAPREKLPLSSRRPAAVGAGLQNMGNTCYVNASLQCLTYTPPLANYMLSREHSQTCHRHKGCMLCTMQAHITRALHNPGHVIQPSQALAAGFHRGKQEDAHEFLMFTVDAMKKACLPGHKQVDHHSKDTTLIHQIFGGYWRSQIKCLHCHGISDTFDPYLDIALDIQAAQSVQQALEQLVKPEELNGENAYHCGVCLQRAPASKTLTLHTSAKVLILVLKRFSDVTGNKIAKNVQYPECLDMQPYMSQTNTGPLVYVLYAVLVHAGWSCHNGHYFSYVKAQEGQWYKMDDAEVTASSITSVLSQQAYVLFYIQKSEWERHSESVSRGREPRALGAEDTDRRATQGELKRDHPCLQAPELDEHLVERATQESTLDHWKFLQEQNKTKPEFNVRKVEGTLPPDVLVIHQSKYKCGMKNHHPEQQSSLLNLSSTTPTHQESMNTGTLASLRGRARRSKGKNKHSKRALLVCQ

SEQ ID NO: 94754 - protein, 558 aa, Homo sapiens
  Payload ID: 18887
  Gene Name: ubiquitin specific peptidase 17-like family member 11
  ENSP ID: ENSP00000477697
MEDDSLYLGGEWQFNHFSKLTSSRPDAAFAEIQRTSLPEKSPLSCETRVDLCDDLAPVARQLAPREKLPLSSRRPAAVGAGLQNMGNTCYVNASLQCLTYTPPLANYMLSREHSQTCHRHKGCMLCTMQAHITRALHNPGHVIQPSQALAAGFHRGKQEDAHEFLMFTVDAMKKACLPGHKQVDHHSKDTTLIHQIFGGYWRSQIKCLHCHGISDTFDPYLDIALDIQAAQSVQQALEQLVKPEELNGENAYHCGVCLQRAPASKTLTLHTSAKVLILVLKRFSDVTGNKIAKNVQYPECLDMQPYMSQTNTGPLVYVLYAVLVHAGWSCHNGHYFSYVKAQEGQWYKMDDAEVTASSITSVLSQQAYVLFYIQKSEWERHSESVSRGREPRALGAEDTDRRATQGELKRDHPCLQAPELDEHLVERATQESTLDHWKFLQEQNKTKPEFNVRKVEGTLPPDVLVIHQSKYKCGMKNHHPEQQSSLLNLSSTTPTHQESMNTGTLASLRGRARRSKGKNKHSKRALLVCQSQWKYRPTRDIQCVFLNMTYRRVGLRVR

SEQ ID NO: 94755 - protein, 530 aa, Homo sapiens
  Payload ID: 18888
  Gene Name: ubiquitin specific peptidase 17-like family member 12
  Uniprot ID: C9JPN9
  ENSP ID: ENSP00000389443
MEEDSLYLGGEWQFNHFSKLTSSRPDAAFAEIQRTSLPEKSPLSCETRVDLCDDLAPVARQLAPREKLPLSNRRPAAVGAGLQNMGNTCYVNASLQCLTYTPPLANYMLSREHSQTCHRHKGCMLCTMQAHITRALHNPGHVIQPSQALAAGFHRGKQEDAHEFLMFTVDAMKKACLPGHKQVDHHSKDTTLIHQIFGGYWRSQIKCLHCHGISDTFDPYLDIALDIQAAQSVQQALEQLVKPEELNGENAYHCGVCLQRAPASKMLTLLTSAKVLILVLKRFSDVTGNKIAKNVQYPECLDMQPYMSQPNTGPLVYVLYAVLVHAGWSCHNGHYFSYVKAQEGQWYKMDDAEVTASSITSVLSQQAYVLFYIQKSEWERHSESVSRGREPRALGAEDTDRRATQGELKRDHPCLQAPELDEHLVERATQESTLDHWKFLQEQNKTKPEFNVRKVEGTLPPDVLVIHQSKYKCGMKNHHPEQQSSLLKLSSTTPTHQESMNTGTLASLRGRARRSKGKNKHSKRALLVCQ

SEQ ID NO: 94756 - protein, 530 aa, Homo sapiens
  Payload ID: 18889
  Gene Name: ubiquitin specific peptidase 17-like family member 13
  Uniprot ID: C9JLJ4
  ENSP ID: ENSP00000414392
MEEDSLYLGGEWQFNHFSKLTSSRLDAAFAEIQRTSLPEKSPLSCETRVDLCDDLVPEARQLAPREKLPLSSRRPAAVGAGLQNMGNTCYVNASLQCLTYTPPLANYMLSREHSQTCHRHKGCMLCTMQAHITRALHNPGHVIQPSQALAAGFHRGKQEDAHEFLMFTVDAMKKACLPGHKQVDHPSKDTTLIHQIFGGYWRSQIKCLHCHGISDTFDPYLDIALDIQAAQSVQQALEQLVKPEELNGENAYHCGVCLQRAPASKTLTLHTSAKVLILVLKRFSDVTGNKIAKNVQYPECLDMQPYMSQQNTGPLVYVLYAVLVHAGWSCHNGHYFSYVKAQEGQWYKMDDAEVTAASITSVLSQQAYVLFYIQKSEWERHSESVSRGREPRALGAEDTDRRATQGELKRDHPCLQAPELDEHLVERATQESTLDRWKFLQEQNKTKPEFNVRKVEGTLPPDVLVIHQSKYKCGMKNHHPEQQSSLLNLSSSTPTHQESMNTGTLASLRGRARRSKGKNKHSKRALLVCQ

SEQ ID NO: 94757 - protein, 558 aa, Homo sapiens
  Payload ID: 18889
  Gene Name: ubiquitin specific peptidase 17-like family member 13
  ENSP ID: ENSP00000481603
MEEDSLYLGGEWQFNHFSKLTSSRLDAAFAEIQRTSLPEKSPLSCETRVDLCDDLVPEARQLAPREKLPLSSRRPAAVGAGLQNMGNTCYVNASLQCLTYTPPLANYMLSREHSQTCHRHKGCMLCTMQAHITRALHNPGHVIQPSQALAAGFHRGKQEDAHEFLMFTVDAMKKACLPGHKQVDHPSKDTTLIHQIFGGYWRSQIKCLHCHGISDTFDPYLDIALDIQAAQSVQQALEQLVKPEELNGENAYHCGVCLQRAPASKTLTLHTSAKVLILVLKRFSDVTGNKIAKNVQYPECLDMQPYMSQQNTGPLVYVLYAVLVHAGWSCHNGHYFSYVKAQEGQWYKMDDAEVTAASITSVLSQQAYVLFYIQKSEWERHSESVSRGREPRALGAEDTDRRATQGELKRDHPCLQAPELDEHLVERATQESTLDRWKFLQEQNKTKPEFNVRKVEGTLPPDVLVIHQSKYKCGMKNHHPEQQSSLLNLSSSTPTHQESMNTGTLASLRGRARRSKGKNKHSKRALLVCQSQWKYRPTRDIQCVFLNMTYRRVGLRVR

SEQ ID NO: 94758 - protein, 530 aa, Homo sapiens
  Payload ID: 18890
  Gene Name: ubiquitin specific peptidase 17-like family member 15
  Uniprot ID: C9J2P7
  ENSP ID: ENSP00000410621
MEDDSLYLGGEWQFNHFSKLTSSRPDAAFAEIQRTSLPEKSPLSCETRVDLCDDLAPVARQLAPREKLPLSSRRPAAVGAGLQNMGNTCYVNASLQCLTYTPPLANYMLSREHSQTCHRHKGCMLCTMQAHITRALHNPGHVIQPSQALAAGFHRGKQEDAHEFLMFTVDAMKKACLPGHKQVDHHSKDTTLIHQIFGGYWRSQIKCLHCHGISDTFDPYLDIALDIQAAQSVQQALEQLVKPEELNGENAYHCGVCLQRAPASKTLTLHTSAKVLILVLKRFSDVTGNKIDKNVQYPECLDMKLYMSQTNSGPLVYVLYAVLVHAGWSCHNGHYFSYVKAQEGQWYKMDDAEVTASSITSVLSQQAYVLFYIQKSEWERHSESVSRGREPRALGAEDTDRRATQGELKRDHPCLQAPELDEHLVERATQESTLDHWKFLQEQNKTKPEFNVRKVEGTLPPDVLVIHQSKYKCGMKNHHPEQQSSLLNLSSTTPTHQESMNTGTLASLRGRARRSKGKNKHSKRALLVCQ

SEQ ID NO: 94759 - protein, 559 aa, Homo sapiens
  Payload ID: 18890
  Gene Name: ubiquitin specific peptidase 17-like family member 15
  ENSP ID: ENSP00000478980
MEDDSLYLGGEWQFNHFSKLTSSRPDAAFAEIQRTSLPEKSPLSCETRVDLCDDLAPVARQLAPREKLPLSSRRPAAVGAGLQNMGNTCYVNASLQCLTYTPPLANYMLSREHSQTCHRHKGCMLCTMQAHITRALHNPGHVIQPSQALAAGFHRGKQEDAHEFLMFTVDAMKKACLPGHKQVDHHSKDTTLIHQIFGGYWRSQIKCLHCHGISDTFDPYLDIALDIQAAQSVQQALEQLVKPEELNGENAYHCGVCLQRAPASKTLTLHTSAKVLILVLKRFSDVTGNKIDKNVQYPECLDMKLYMSQTNSGPLVYVLYAVLVHAGWSCHNGHYFSYVKAQEGQWYKMDDAEVTASSITSVLSQQAYVLFYIQKSEWERHSESVSRGREPRALGAEDTDRRATQGELKRDHPCLQAPELDEHLVERATQESTLDHWKFLQEQNKTKPEFNVRKVEGTLPPDVLVIHQSKYKCGMKNHHPEQQSSLLNLSSTTPTHQESMNTGTLASLRGRARRSKGKNKHSKRALLVCQWSQWKYRPTRDIQCVFLNMTYRRVGLRVR

SEQ ID NO: 94760 - protein, 559 aa, Homo sapiens; identical to SEQ ID NO: 94759
  Payload ID: 18890
  Gene Name: ubiquitin specific peptidase 17-like family member 15
  ENSP ID: ENSP00000483519

SEQ ID NO: 94761 - protein, 530 aa, Homo sapiens
  Payload ID: 18891
  Gene Name: ubiquitin specific peptidase 17-like family member 17
  Uniprot ID: D6RBQ6
  ENSP ID: ENSP00000422621
MEDDSLYLGGEWQFNHFSKLTSSRPDAAFAEIQRTSLPEKSPLSCETRVDLCDDLAPVARQLAPREKLPLSSRRPAAVGAGLQNMGNTCYVNASLQCLTYTPPLANYMLSREHSQTCHRHKGCMLCTMQAHITRALHNPGHVIQPSQALAAGFHRGKQEDAHEFLMFTVDAMKKACLPGHKQVDHHSKDTTLIHQIFGGYWRSQIKCLHCHGISDTFDPYLDIALDIQAAQSVQQALEQLVKPEELNGENAYHCGVCLQRAPASKTLTLHTSAKVLILVLKRFSDVTGNKIAKNVQYPECLDMQPYMSQQNTGPLVYVLYAVLVHAGWSCHNGHYFSYVKAQEGQWYKMDDAEVTAASITSVLSQQAYVLFYIQKSEWERHSESVSRGREPRALGAEDTDRRATQGELKRDHPCLQAPELDEHLVERATQESTLDHWKFLQEQNKTKPEFNVRKVEGTLPPDVLVIHQSKYKCGMKNHHPEQQSSLLNLSSSTPTHQESMNTGTLASLRGRARRSKGKNKHSKRALLVCQ

SEQ ID NO: 94762 - protein, 558 aa, Homo sapiens
  Payload ID: 18891
  Gene Name: ubiquitin specific peptidase 17-like family member 17
  ENSP ID: ENSP00000479739
MEDDSLYLGGEWQFNHFSKLTSSRPDAAFAEIQRTSLPEKSPLSCETRVDLCDDLAPVARQLAPREKLPLSSRRPAAVGAGLQNMGNTCYVNASLQCLTYTPPLANYMLSREHSQTCHRHKGCMLCTMQAHITRALHNPGHVIQPSQALAAGFHRGKQEDAHEFLMFTVDAMKKACLPGHKQVDHHSKDTTLIHQIFGGYWRSQIKCLHCHGISDTFDPYLDIALDIQAAQSVQQALEQLVKPEELNGENAYHCGVCLQRAPASKTLTLHTSAKVLILVLKRFSDVTGNKIAKNVQYPECLDMQPYMSQQNTGPLVYVLYAVLVHAGWSCHNGHYFSYVKAQEGQWYKMDDAEVTAASITSVLSQQAYVLFYIQKSEWERHSESVSRGREPRALGAEDTDRRATQGELKRDHPCLQAPELDEHLVERATQESTLDHWKFLQEQNKTKPEFNVRKVEGTLPPDVLVIHQSKYKCGMKNHHPEQQSSLLNLSSSTPTHQESMNTGTLASLRGRARRSKGKNKHSKRALLVCQSQWKYRPTRDIQCVFLNMTYRRVGLRVR

SEQ ID NO: 94763 - protein, 530 aa, Homo sapiens
  Payload ID: 18892
  Gene Name: ubiquitin specific peptidase 17-like family member 18
  Uniprot ID: D6R9N7
  ENSP ID: ENSP00000423503
MEDDSLYLGGEWQFNHFSKLTSSRPDAAFAEIQRTSLPEKSPLSCETRVDLCDDLAPVARQLAPREKLPLSSRRPAAVGAGLQNMGNTCYVNASLQCLTYTPPLANYMLSREHSQTCHRHKGCMLCTMQAHITRALHNPGHVIQPSQALAAGFHRGKQEDAHEFLMFTVDAMKKACLPGHKQVDHHSKDTTLIHQIFGGYWRSQIKCLHCHGISDTFDPYLDIALDIQAAQSVQQALEQLVKPEELNGENAYHCGVCLQRAPASKTLTLHTSAKVLILVLKRFSDVTGNKIAKNVQYPECLDMQPYMSQTNTGPLVYVLYAVLVHAGWSCHNGHYFSYVKAQEGQWYKMDDAEVTASSITSVLSQQAYVLFYIQKSEWERHSESVSRGREPRALGAEDTDRRAKQGELKRDHPCLQAPELDEHLVERATQESTLDHWKFLQEQNKTKPEFNVRKVEGTLPPDVLVIHQSKYKCGMKNHHPEQQSSLLNLSSTTPTHQESMNTGTLASLRGRARRSKGKNKHSKRALLVCQ

SEQ ID NO: 94764 - protein, 558 aa, Homo sapiens
  Payload ID: 18892
  Gene Name: ubiquitin specific peptidase 17-like family member 18
  ENSP ID: ENSP00000477751
MEDDSLYLGGEWQFNHFSKLTSSRPDAAFAEIQRTSLPEKSPLSCETRVDLCDDLAPVARQLAPREKLPLSSRRPAAVGAGLQNMGNTCYVNASLQCLTYTPPLANYMLSREHSQTCHRHKGCMLCTMQAHITRALHNPGHVIQPSQALAAGFHRGKQEDAHEFLMFTVDAMKKACLPGHKQVDHHSKDTTLIHQIFGGYWRSQIKCLHCHGISDTFDPYLDIALDIQAAQSVQQALEQLVKPEELNGENAYHCGVCLQRAPASKTLTLHTSAKVLILVLKRFSDVTGNKIAKNVQYPECLDMQPYMSQTNTGPLVYVLYAVLVHAGWSCHNGHYFSYVKAQEGQWYKMDDAEVTASSITSVLSQQAYVLFYIQKSEWERHSESVSRGREPRALGAEDTDRRAKQGELKRDHPCLQAPELDEHLVERATQESTLDHWKFLQEQNKTKPEFNVRKVEGTLPPDVLVIHQSKYKCGMKNHHPEQQSSLLNLSSTTPTHQESMNTGTLASLRGRARRSKGKNKHSKRALLVCQSQWKYRPTRDIQCVFLNMTYRRVGLRVR

SEQ ID NO: 94765 - protein, 530 aa, Homo sapiens
  Payload ID: 18893
  Gene Name: ubiquitin specific peptidase 17-like family member 19
  Uniprot ID: D6RCP7
  ENSP ID: ENSP00000425582
MEEDSLYLGGEWQFNHFSKLTSSRPDAAFAEIQRTSLPEKSPLSCETRVDLCDDLAPVARQLAPREKLPLSSRRPAAVGAGLQNMGNTCYVNASLQCLTYTPPLANYMLSREHSQTCHRHKGCMLCTMQAHITRALHNPGHVIQPSQALAAGFHRGKQEDAHEFLMFTVDAMKKACLPGHKQVDHHSKDTTLIHQIFGGYWRSQIKCLHCHGISDTFDPYLDIALDIQAAQSVQQALEQLVKPEELNGENAYHCGVCLQRAPASKTLTLHTSAKVLILVLKRFSDVTGNKIAKNVQYPECLDMQPYMSQTNTGPLVYVLYAVLVHAGWSCHNGHYFSYVKAQEGQWYKMDDAEVTASSITSVLSQQAYVLFYIQKSEWERHSESVSRGREPRALGAEDTDRRATQGELKRDHPCLQAPELDEHLVERATQESTLDHWKFLQEQNKTKPEFNVRKVEGTLPPDVLVIHQSKYKCGMKNHHPEQQSSLLKLSSTTPTHQESMNTGTLASLRGRARRSKGKNKHSKRALLVCQ

SEQ ID NO: 94766 - protein, 558 aa, Homo sapiens
  Payload ID: 18893
  Gene Name: ubiquitin specific peptidase 17-like family member 19
  ENSP ID: ENSP00000481718
MEEDSLYLGGEWQFNHFSKLTSSRPDAAFAEIQRTSLPEKSPLSCETRVDLCDDLAPVARQLAPREKLPLSSRRPAAVGAGLQNMGNTCYVNASLQCLTYTPPLANYMLSREHSQTCHRHKGCMLCTMQAHITRALHNPGHVIQPSQALAAGFHRGKQEDAHEFLMFTVDAMKKACLPGHKQVDHHSKDTTLIHQIFGGYWRSQIKCLHCHGISDTFDPYLDIALDIQAAQSVQQALEQLVKPEELNGENAYHCGVCLQRAPASKTLTLHTSAKVLILVLKRFSDVTGNKIAKNVQYPECLDMQPYMSQTNTGPLVYVLYAVLVHAGWSCHNGHYFSYVKAQEGQWYKMDDAEVTASSITSVLSQQAYVLFYIQKSEWERHSESVSRGREPRALGAEDTDRRATQGELKRDHPCLQAPELDEHLVERATQESTLDHWKFLQEQNKTKPEFNVRKVEGTLPPDVLVIHQSKYKCGMKNHHPEQQSSLLKLSSTTPTHQESMNTGTLASLRGRARRSKGKNKHSKRALLVCQSQWKYRPTRDIQCVFLNMTYRRVGLRVR

SEQ ID NO: 94767 - protein, 530 aa, Homo sapiens
  Payload ID: 18894
  Gene Name: ubiquitin specific peptidase 17-like family member 2
  Uniprot ID: Q6R6M4
  ENSP ID: ENSP00000333329
MEDDSLYLGGEWQFNHFSKLTSSRPDAAFAEIQRTSLPEKSPLSSEARVDLCDDLAPVARQLAPRKKLPLSSRRPAAVGAGLQNMGNTCYENASLQCLTYTPPLANYMLSREHSQTCQRPKCCMLCTMQAHITWALHSPGHVIQPSQALAAGFHRGKQEDAHEFLMFTVDAMKKACLPGHKQVDHHSKDTTLIHQIFGGCWRSQIKCLHCHGISDTFDPYLDIALDIQAAQSVKQALEQLVKPEELNGENAYHCGLCLQRAPASKTLTLHTSAKVLILVLKRFSDVTGNKLAKNVQYPECLDMQPYMSQQNTGPLVYVLYAVLVHAGWSCHDGHYFSYVKAQEGQWYKMDDAKVTACSITSVLSQQAYVLFYIQKSEWERHSESVSRGREPRALGAEDTDRRATQGELKRDHPCLQAPELDERLVERATQESTLDHWKFPQEQNKTKPEFNVRKVEGTLPPNVLVIHQSKYKCGMKNHHPEQQSSLLNLSSTTRTDQESVNTGTLASLQGRTRRSKGKNKHSKRALLVCQ

SEQ ID NO: 94768 - protein, 530 aa, Homo sapiens
  Payload ID: 18895
  Gene Name: ubiquitin specific peptidase 17-like family member 20
  Uniprot ID: D6RJB6
  ENSP ID: ENSP00000427264
MEDDSLYLGGEWQFNHFSKLTSSRPDAAFAEIQRTSLPEKSPLSCETRVDLCDDLAPVARQLAPREKLPLSSRRPAAVGAGLQNMGNTCYVNASLQCLTYTPPLANYMLSREHSQTCHRHKGCMLCTMQAHITRALHNPGHVIQPSQALAAGFHRGKQEDAHEFLMFTVDAMKKACLPGHKQVDHHSKDTTLIHQIFGGYWRSQIKCLHCHGISDTFDPYLDIALDIQAAQSVQQALEQLVKPEELNGENAYHCGVCLQRAPASKTLTLHTSAKVLILVLKRFSDVTGNKIAKNVQYPECLDMQPYMSQPNTGPLVYVLYAVLVHAGWSCHNGHYFSYVKAQEGQWYKMDDAEVTASSITSVLSQQAYVLFYIQKSEWERHSESVSRGREPRALGAEDTDRRATQGELKRDHPCLQAPELDEHLVERATQESTLDHWKFLQEQNKTKPEFNVRKVEGTLPPDVLVIHQSKYKCGMKNHHPEQQSSLLNLSSTTPTHQESMNTGTLASLRGRARRSKGKNKHSKRALLVCQ

SEQ ID NO: 94769 - protein, 558 aa, Homo sapiens
  Payload ID: 18895
  Gene Name: ubiquitin specific peptidase 17-like family member 20
  ENSP ID: ENSP00000477832
MEDDSLYLGGEWQFNHFSKLTSSRPDAAFAEIQRTSLPEKSPLSCETRVDLCDDLAPVARQLAPREKLPLSSRRPAAVGAGLQNMGNTCYVNASLQCLTYTPPLANYMLSREHSQTCHRHKGCMLCTMQAHITRALHNPGHVIQPSQALAAGFHRGKQEDAHEFLMFTVDAMKKACLPGHKQVDHHSKDTTLIHQIFGGYWRSQIKCLHCHGISDTFDPYLDIALDIQAAQSVQQALEQLVKPEELNGENAYHCGVCLQRAPASKTLTLHTSAKVLILVLKRFSDVTGNKIAKNVQYPECLDMQPYMSQPNTGPLVYVLYAVLVHAGWSCHNGHYFSYVKAQEGQWYKMDDAEVTASSITSVLSQQAYVLFYIQKSEWERHSESVSRGREPRALGAEDTDRRATQGELKRDHPCLQAPELDEHLVERATQESTLDHWKFLQEQNKTKPEFNVRKVEGTLPPDVLVIHQSKYKCGMKNHHPEQQSSLLNLSSTTPTHQESMNTGTLASLRGRARRSKGKNKHSKRALLVCQSQWKYRPTRDIQCVFLNMTYRRVGLRVR

SEQ ID NO: 94770 - protein, 530 aa, Homo sapiens
  Payload ID: 18896
  Gene Name: ubiquitin specific peptidase 17-like family member 21
  Uniprot ID: D6R901
  ENSP ID: ENSP00000422216
MEEDSLYLGGEWQFNHFSKLTSSRPDAAFAEIQRTSLPEKSPLSCETRVDLCDDLAPVARQLAPREKLPLSNRRPAAVGAGLQNMGNTCYVNASLQCLTYTPPLANYMLSREHSQTCHRHKGCMLCTMQAHITRALHNPGHVIQPSQALAAGFHRGKQEDAHEFLMFTVDAMKKACLPGHKQVDHHSKDTTLIHQIFGGYWRSQIKCLHCHGISDTFDPYLDIALDIQAAQSVQQALEQLVKPEELNGENAYHCGVCLQRAPASKMLTLLTSAKVLILVLKRFSDVTGNKIAKNVQYPECLDMQPYMSQPNTGPLVYVLYAVLVHAGWSCHNGHYFSYVKAQEGQWYKMDDAEVTASSITSVLSQQAYVLFYIQKSEWERHSESVSRGREPRALGAEDTDRRATQGELKRDHPCLQAPELDEHLVERATQESTLDHWKFLQEQNKTKPEFNVRKVEGTLPPDVLVIHQSKYKCGMKNHHPEQQSSLLNLSSSTPTHQESMNTGTLASLRGRARRSKGKNKHSKRALLVCQ

SEQ ID NO: 94771 - protein, 558 aa, Homo sapiens
  Payload ID: 18896
  Gene Name: ubiquitin specific peptidase 17-like family member 21
  ENSP ID: ENSP00000478565
MEEDSLYLGGEWQFNHFSKLTSSRPDAAFAEIQRTSLPEKSPLSCETRVDLCDDLAPVARQLAPREKLPLSNRRPAAVGAGLQNMGNTCYVNASLQCLTYTPPLANYMLSREHSQTCHRHKGCMLCTMQAHITRALHNPGHVIQPSQALAAGFHRGKQEDAHEFLMFTVDAMKKACLPGHKQVDHHSKDTTLIHQIFGGYWRSQIKCLHCHGISDTFDPYLDIALDIQAAQSVQQALEQLVKPEELNGENAYHCGVCLQRAPASKMLTLLTSAKVLILVLKRFSDVTGNKIAKNVQYPECLDMQPYMSQPNTGPLVYVLYAVLVHAGWSCHNGHYFSYVKAQEGQWYKMDDAEVTASSITSVLSQQAYVLFYIQKSEWERHSESVSRGREPRALGAEDTDRRATQGELKRDHPCLQAPELDEHLVERATQESTLDHWKFLQEQNKTKPEFNVRKVEGTLPPDVLVIHQSKYKCGMKNHHPEQQSSLLNLSSSTPTHQESMNTGTLASLRGRARRSKGKNKHSKRALLVCQSQWKYRPTRDIQCVFLNMTYRRVGLRVR

SEQ ID NO: 94772 - protein, 530 aa, Homo sapiens
  Payload ID: 18897
  Gene Name: ubiquitin specific peptidase 17-like family member 22
  Uniprot ID: D6RA61
  ENSP ID: ENSP00000423115
MEDDSLYLGGEWQFNHFSKLTSSRPDAAFAEIQRTSLPEKSPLSCETRVDLCDDLAPVARQLAPREKLPLSSRRPAAVGAGLQNMGNTCYVNASLQCLTYTPPLANYMLSREHSQTCHRHKGCMLCTMQAHITRALHNPGHVIQPSQALAAGFHRGKQEDAHEFLMFTVDAMKKACLPGHKQVDHHSKDTTLIHQIFGGYWRSQIKCLHCHGISDTFDPYLDIALDIQAAQSVQQALEQLVKPEELNGENAYHCGVCLQRAPASKTLTLHTSAKVLILVLKRFSDVTGNKIAKNVQYPECLDMQPYMSQQNTGPLVYVLYAVLVHAGWSCHNGHYFSYVKAQEGQWYKMDDAEVTASSITSVLSQQAYVLFYIQKSEWERHSESVSRGREPRALGAEDTDRRATQGELKRDHPCLQAPELDEHLVERATQESTLDHWKFLQEQNKTKPEFNVRKVEGTLPPDVLVIHQSKYKCGMKNHHPEQQSSLLKLSSTTPTHQESMNTGTLASLRGRARRSKGKNKHSKRALLVCQ

SEQ ID NO: 94773 - protein, 558 aa, Homo sapiens
  Payload ID: 18897
  Gene Name: ubiquitin specific peptidase 17-like family member 22
  ENSP ID: ENSP00000480174
MEDDSLYLGGEWQFNHFSKLTSSRPDAAFAEIQRTSLPEKSPLSCETRVDLCDDLAPVARQLAPREKLPLSSRRPAAVGAGLQNMGNTCYVNASLQCLTYTPPLANYMLSREHSQTCHRHKGCMLCTMQAHITRALHNPGHVIQPSQALAAGFHRGKQEDAHEFLMFTVDAMKKACLPGHKQVDHHSKDTTLIHQIFGGYWRSQIKCLHCHGISDTFDPYLDIALDIQAAQSVQQALEQLVKPEELNGENAYHCGVCLQRAPASKTLTLHTSAKVLILVLKRFSDVTGNKIAKNVQYPECLDMQPYMSQQNTGPLVYVLYAVLVHAGWSCHNGHYFSYVKAQEGQWYKMDDAEVTASSITSVLSQQAYVLFYIQKSEWERHSESVSRGREPRALGAEDTDRRATQGELKRDHPCLQAPELDEHLVERATQESTLDHWKFLQEQNKTKPEFNVRKVEGTLPPDVLVIHQSKYKCGMKNHHPEQQSSLLKLSSTTPTHQESMNTGTLASLRGRARRSKGKNKHSKRALLVCQSQWKYRPTRDIQCVFLNMTYRRVGLRVR

SEQ ID NO: 94774 - protein, 183 aa, Homo sapiens
  Payload ID: 18898
  Gene Name: ubiquitin specific peptidase 17-like family member 23
  Uniprot ID: D6RBM5
  ENSP ID: ENSP00000424077
MEDDSLYLGGEWQFNHFSKLTSSRPDAAFAEIQRTSLPEKSPLSCETRVDLCDDLAPVARQLAPREKLPLSSRRPAAVGAGLQNMGNTCYVNASLQCLTYTPPLANYMLSREHSQTCHRHKGCMLCTMQAHITRALHNPGHVIQPSQALAAGFHRGKQEDAHEFLMFTVDAMEKACLPGHKQV

SEQ ID NO: 94775 - protein, 530 aa, Homo sapiens
  Payload ID: 18899
  Gene Name: ubiquitin specific peptidase 17-like family member 24
  Uniprot ID: Q0WX57
  ENSP ID: ENSP00000425375
MEDDSLYLRGEWQFNHFSKLTSSRPDAAFAEIQRTSLPEKSPLSCETRVDLCDDLAPVARQLAPREKLPLSSRRPAAVGAGLQNMGNTCYVNASLQCLTYTPPLANYMLSREHSQTCHRHKGCMLCTMQAHITRALHNPGHVIQPSQALAAGFHRGKQEDAHEFLMFTVDAMKKACLPGHKQVDHHSKDTTLIHQIFGGYWRSQIKCLHCHGISDTFDPYLDIALDIQAAQSVQQALEQLVKPEELNGENAYHCGVCLQRAPASKTLTLHTSAKVLILVLKRFSDVTGNKIAKNVQYPECLDMQPYMSQPNTGPLVYVLYAVLVHAGWSCHNGHYFSYVKAQEGQWYKMDDAEVTASSITSVLSQQAYVLFYIQKSEWERHSESVSRGREPRALGAEDTDRRATQGELKRDHPCLQAPELDEHLVERATQESTLDHWKFLQEQNKTKPEFNVRKVEGTLPPDVLVIHQSKYKCGMKNHHPEQQSSLLNLSSSTPTHQESMNTGTLASLRGRARRSKGKNKHSKRALLVCQ

SEQ ID NO: 94776 - protein, 558 aa, Homo sapiens
  Payload ID: 18899
  Gene Name: ubiquitin specific peptidase 17-like family member 24
  ENSP ID: ENSP00000477655
MEDDSLYLRGEWQFNHFSKLTSSRPDAAFAEIQRTSLPEKSPLSCETRVDLCDDLAPVARQLAPREKLPLSSRRPAAVGAGLQNMGNTCYVNASLQCLTYTPPLANYMLSREHSQTCHRHKGCMLCTMQAHITRALHNPGHVIQPSQALAAGFHRGKQEDAHEFLMFTVDAMKKACLPGHKQVDHHSKDTTLIHQIFGGYWRSQIKCLHCHGISDTFDPYLDIALDIQAAQSVQQALEQLVKPEELNGENAYHCGVCLQRAPASKTLTLHTSAKVLILVLKRFSDVTGNKIAKNVQYPECLDMQPYMSQPNTGPLVYVLYAVLVHAGWSCHNGHYFSYVKAQEGQWYKMDDAEVTASSITSVLSQQAYVLFYIQKSEWERHSESVSRGREPRALGAEDTDRRATQGELKRDHPCLQAPELDEHLVERATQESTLDHWKFLQEQNKTKPEFNVRKVEGTLPPDVLVIHQSKYKCGMKNHHPEQQSSLLNLSSSTPTHQESMNTGTLASLRGRARRSKGKNKHSKRALLVCQSQWKYRPTRDIQCVFLNMTYRRVGLRVR

SEQ ID NO: 94777 - protein, 530 aa, Homo sapiens; identical to SEQ ID NO: 94775
  Payload ID: 18900
  Gene Name: ubiquitin specific peptidase 17-like family member 25
  Uniprot ID: Q0WX57
  ENSP ID: ENSP00000422097

SEQ ID NO: 94778 - protein, 558 aa, Homo sapiens; identical to SEQ ID NO: 94776
  Payload ID: 18900
  Gene Name: ubiquitin specific peptidase 17-like family member 25
  ENSP ID: ENSP00000478002

SEQ ID NO: 94779 - protein, 530 aa, Homo sapiens; identical to SEQ ID NO: 94775
  Payload ID: 18901
  Gene Name: ubiquitin specific peptidase 17-like family member 26
  Uniprot ID: Q0WX57
  ENSP ID: ENSP00000427366

SEQ ID NO: 94780 - protein, 558 aa, Homo sapiens; identical to SEQ ID NO: 94776
  Payload ID: 18901
  Gene Name: ubiquitin specific peptidase 17-like family member 26
  ENSP ID: ENSP00000484378

SEQ ID NO: 94781 - protein, 530 aa, Homo sapiens; identical to SEQ ID NO: 94775
  Payload ID: 18902
  Gene Name: ubiquitin specific peptidase 17-like family member 27
  Uniprot ID: Q0WX57
  ENSP ID: ENSP00000423211

SEQ ID NO: 94782 - protein, 530 aa, Homo sapiens; identical to SEQ ID NO: 94775
  Payload ID: 18903
  Gene Name: ubiquitin specific peptidase 17-like family member 28
  Uniprot ID: Q0WX57
  ENSP ID: ENSP00000423777

SEQ ID NO: 94783 - protein, 530 aa, Homo sapiens; identical to SEQ ID NO: 94775
  Payload ID: 18904
  Gene Name: ubiquitin specific peptidase 17-like family member 29
  Uniprot ID: Q0WX57
  ENSP ID: ENSP00000422969

SEQ ID NO: 94784 - protein, 530 aa, Homo sapiens
  Payload ID: 18905
  Gene Name: ubiquitin specific peptidase 17-like family member 3
  Uniprot ID: A6NCW0
  ENSP ID: ENSP00000485323
MGDDSLYLGGEWQFNHFSKLTSSRPDAAFAEIQRTSLPEKSPLSSETRVDLCDDLAPVARQLAPREKLPLSSRRPAAVGAGLQNMGNTCYENASLQCLTYTLPLANYMLSREHSQTCQRPKCCMLCTMQAHITWALHSPGHVIQPSQALASGFHRGKQEDVHEFLMFTVDAMKKACLPGHKQVDHHSKDTTLIHQIFGGCWRSQIKCLHCHGISDTFDPYLDIALDIQAAQSVKQALEQLVKPEELNGENAYHCGLCLQRAPASNTLTLHTSAKVLILVLKRFSDVAGNKLAKNVQYPECLDMQPYMSQQNTGPLVYVLYAVLVHAGWSCHDGHYFSYVKAQEGQWYKMDDAEVTVCSITSVLSQQAYVLFYIQKSEWERHSESVSRGREPRALGAEDTDRRAKQGELKRDHPCLQAPELDEHLVERATQESTLDHWKFLQEQNKTKPEFNVGKVEGTLPPNALVIHQSKYKCGMKNHHPEQQSSLLNLSSTTRTDQESMNTGTLASLQGRTRRAKGKNKHSKRALLVCQ

SEQ ID NO: 94785 - protein, 530 aa, Homo sapiens; identical to SEQ ID NO: 94775
  Payload ID: 18906
  Gene Name: ubiquitin specific peptidase 17-like family member 30
  Uniprot ID: Q0WX57
  ENSP ID: ENSP00000422887

SEQ ID NO: 94786 - protein, 530 aa, Homo sapiens
  Payload ID: 18907
  Gene Name: ubiquitin specific peptidase 17-like family member 4
  Uniprot ID: A6NCW7
  ENSP ID: ENSP00000485243
MGDDSLYLGGEWQFNHFSKLTSSRPDAAFAEIQRTSLPEKSPLSSETRVDLCDDLAPVARQLAPREKLPLSSRRPAAVGAGLQNMGNTCYENASLQCLTYTLPLANYMLSREHSQTCQRPKCCMLCTMQAHITWALHSPGHVIQPSQALAAGFHRGKQEDVHEFLMFTVDAMKKACLPGHKQVDHHSKDTTLIHQIFGGCWRSQIKCLHCHGISDTFDPYLDIALDIQAAQSVKQALEQLVKPEELNGENAYHCGLCLQRAPASNTLTLHTSAKVLILVLKRFSDVAGNKLAKNVQYPECLDMQPYMSQQNTGPLVYVLYAVLVHAGWSCHDGYYFSYVKAQEGQWYKMDDAEVTVCSITSVLSQQAYVLFYIQKSEWERHSESVSRGREPRALGAEDTDRPATQGELKRDHPCLQVPELDEHLVERATEESTLDHWKFPQEQNKMKPEFNVRKVEGTLPPNVLVIHQSKYKCGMKNHHPEQQSSLLNLSSMNSTDQESMNTGTLASLQGRTRRSKGKNKHSKRSLLVCQ

SEQ ID NO: 94787 - protein, 530 aa, Homo sapiens
  Payload ID: 18908
  Gene Name: ubiquitin specific peptidase 17-like family member 5
  Uniprot ID: A8MUK1
  ENSP ID: ENSP00000425955
MEDDSLYLRGEWQFNHFSKLTSSRPDAAFAEIQRTSLPEKSPLSCETRVDLCDDLAPVARQLAPREKLPLSSRRPAAVGAGLQNMGNTCYVNASLQCLTYTPPLANYMLSREHSQTCHRHKGCMLCTMQAHITRALHNPGHVIQPSQALAAGFHRGKQEDAHEFLMFTVDAMKKACLPGHKQVDHHSKDTTLIHQIFGGYWRSQIKCLHCHGISDTFDPYLDIALDIQAAQSVQQALEQLAKPEELNGENAYHCGVCLQRAPASKTLTLHTSAKVLILVLKRFSDVTGNKIAKNVQYPECLDMQPYMSQPNTGPLVYVLYAVLVHAGWSCHNGHYFSYVKAQEGQWYKMDDAEVTASSITSVLSQQAYVLFYIQKSEWERHSESVSRGREPRALGAEDTDRRATQGELKRDHPCLQAPELDEHLVERATQESTLDHWKFLQEQNKTKPEFNVRKVEGTLPPDVLVIHQSKYKCGMKNHHPEQQSSLLNLSSSTPTHQESMNTGTLASLRGRARRSKGKNKHSKRALLVCQ

SEQ ID NO: 94788 - protein, 530 aa, Homo sapiens
  Payload ID: 18909
  Gene Name: ubiquitin specific peptidase 17-like family member 7
  Uniprot ID: P0C7H9
  ENSP ID: ENSP00000485337
MEDDSLYLGGDWQFNHFSKLTSSRLDAAFAEIQRTSLSEKSPLSSETRFDLCDDLAPVARQLAPREKLPLSSRRPAAVGAGLQKIGNTFYVNVSLQCLTYTLPLSNYMLSREDSQTCHLHKCCMFCTMQAHITWALHSPGHVIQPSQVLAAGFHRGEQEDAHEFLMFTVDAMKKACLPGHKQLDHHSKDTTLIHQIFGAYWRSQIKYLHCHGVSDTFDPYLDIALDIQAAQSVKQALEQLVKPKELNGENAYHCGLCLQKAPASKTLTLPTSAKVLILVLKRFSDVTGNKLAKNVQYPKCRDMQPYMSQQNTGPLVYVLYAVLVHAGWSCHNGHYFSYVKAQEGQWYKMDDAEVTASGITSVLSQQAYVLFYIQKSEWERHSESVSRGREPRALGAEDTDRPATQGELKRDHPCLQVPELDEHLVERATQESTLDHWKFPQEQNKTKPEFNVRKVEGTLPPNVLVIHQSKYKCGMKNHHPEQQSSLLNLSSTKPTDQESMNTGTLASLQGSTRRSKGNNKHSKRSLLVCQ

SEQ ID NO: 94789 - protein, 530 aa, Homo sapiens
  Payload ID: 18910
  Gene Name: ubiquitin specific peptidase 17-like family member 8
  ENSP ID: ENSP00000485101
MGDDSLYLGGEWQFNHFSKLTSSRPDAAFAEIQRTSLPEKSPLSSETRVDLCDDLAPVARQLAPREKLPLSSRRPAAVGAGLQNMGNTCYENASLQCLTYTLPLANYMLSREHSQTCQRPKCCMLCTMQAHITWALHSPGHVIQPSQALASGFHRGKQEDVHEFLMFTVDAMKKACLPGHKQVDHHSKDTTLIHQIFGGCWRSQIKCLHCHGISDTFDPYLDIALDIQAAQSVKQALEQLVKPEELNGENAYHCGLCLQRAPASNTLTLHTSAKVLILVLKRFCDVTGNKLAKNVQYPECLDMQPYMSQQNTGPLVYVLYAVLVHAGWSCHNGYYFSYVKAQEGQWYKMDDAEVTACSITSVLSQQAYVLFYIQKSEWERHSESVSRGREPRALGAEDTDRPATQGELKRDHPCLQVPELDEHLVERATEESTLDHWKFPQEQNKMKPEFNVRKVEGTLPPNVLVIHQSKYKCGMKNHHPEQQSSLLNLSSMNSTDQESMNTGTLASLQGRTRRSKGKNKHSKRSLLVCQ

SEQ ID NO: 94790 - protein, 530 aa, Homo sapiens
  Payload ID: 18910
  Gene Name: ubiquitin specific peptidase 17-like family member 8
  Uniprot ID: P0C7I0
  ENSP ID: ENSP00000485306
MEDDSLYLGGEWQFNHFSKLTSPRPDAAFAEIQRTSLPEKSPLSSETRVDLCDDLAPVARQLAPREKLPLSSRRPAAVGAGLQNMGNTCYLNASLQCLTYTPPLANYMLSREHSQTCQRPKCCMLCTMQAHITWALHSPGHVIQPSQALAAGFHRGKQEDAHEFLMFTVDAMKKACLPGHKQVDHHSKDTTLIHQIFGGCWRSQIKCLHCHGISDTFDPYLDIALDIQAAQSVKQALEQLVKPEELNGENAYPCGLCLQRAPASNTLTLHTSAKVLILVLKRFCDVTGNKLAKNVQYPECLDMQPYMSQQNTGPLVYVLYAVLVHAGWSCHNGYYFSYVKAQEGQWYKMDDAEVTACSITSVLSQQAYVLFYIQKSEWERHSESVSRGREPRALGAEDTDRPATQGELKRDHPCLQVPELDEHLVERATEESTLDHWKFPQEQNKMKPEFNVRKVEGTLPPNVLVIHQSKYKCGMKNHHPEQQSSLLNLSSMNSTDQESMNTGTLASLQGRTRRSKGKNKHSKRSLLVCQ

SEQ ID NO: 94791 - protein, 372 aa, Homo sapiens
  Payload ID: 18911
  Gene Name: ubiquitin specific peptidase 18
  Uniprot ID: Q9UMW8
  ENSP ID: ENSP00000215794
MSKAFGLLRQICQSILAESSQSPADLEEKKEEDSNMKREQPRERPRAWDYPHGLVGLHNIGQTCCLNSLIQVFVMNVDFTRILKRITVPRGADEQRRSVPFQMLLLLEKMQDSRQKAVRPLELAYCLQKCNVPLFVQHDAAQLYLKLWNLIKDQITDVHLVERLQALYTIRVKDSLICVDCAMESSRNSSMLTLPLSLFDVDSKPLKTLEDALHCFFQPRELSSKSKCFCENCGKKTRGKQVLKLTHLPQTLTIHLMRFSIRNSQTRKICHSLYFPQSLDFSQILPMKRESCDAEEQSGGQYELFAVIAHVGMADSGHYCVYIRNAVDGKWFCFNDSNICLVSWEDIQCTYGNPNYHWQETAYLLVYMKMEC

SEQ ID NO: 94792 - protein, 568 aa, Homo sapiens
  Payload ID: 18912
  Gene Name: ubiquitin specific peptidase 19
  ENSP ID: ENSP00000303503
MSGGASATGPRRGPPGLEDTTSKKKQKDRANQESKDGDPRKETGSRYVAQAGLEPLASGDPSASASHAAGITGSRHRTRLFFPSSSGSASTPQEEQTKEELLLDWRQSAEEVIVKLRVGVGPLQLEDVDAAFTDTDCVVRFAGGQQWGGVFYAEIKSSCAKVQTRKGSLLHLTLPKKVPMLTWPSLLKKPLGTQELVPGLRCQENGQELSPIALEPGPEPHRAKQEARNQKRAQGRGEVGAGAGPGAQAGPSAKRAVHLCRGPEGDGSRDDPGPRGDAPPFVADPATQVEADEQLCIPPLNSQTCLLGSEENLAPLAGEKAVPPGNDPVSPAMVRSRNPGKDDCAKEEMAVAADAATLVDEPESMVNLAFVKNDSYEKGPDSVVVHVYVKEICRDTSRVLFREQDFTLIFQTRDGNFLRLHPGCGPHTTFRWQVKLRNLIEPEQCTFCFTASRIDICLRKRQSQRWGGLEAPAARGAVGGAKVAVPTGPTPLDSTPPGGAPHPLTGQEEARAVEKDKSKARSEDTGLDSVATRTPMEHVTPKPETHLASPKPTCMVPPMPHSPVSGDS

SEQ ID NO: 94793 - protein, 1318 aa, Homo sapiens
  Payload ID: 18912
  Gene Name: ubiquitin specific peptidase 19
  Uniprot ID: O94966
  ENSP ID: ENSP00000381863
MSGGASATGPRRGPPGLEDTTSKKKQKDRANQESKDGDPRKETGSRYVAQAGLEPLASGDPSASASHAAGITGSRHRTRLFFPSSSGSASTPQEEQTKEGACEDPHDLLATPTPELLLDWRQSAEEVIVKLRVGVGPLQLEDVDAAFTDTDCVVRFAGGQQWGGVFYAEIKSSCAKVQTRKGSLLHLTLPKKVPMLTWPSLLVEADEQLCIPPLNSQTCLLGSEENLAPLAGEKAVPPGNDPVSPAMVRSRNPGKDDCAKEEMAVAADAATLVDEPESMVNLAFVKNDSYEKGPDSVVVHVYVKEICRDTSRVLFREQDFTLIFQTRDGNFLRLHPGCGPHTTFRWQVKLRNLIEPEQCTFCFTASRIDICLRKRQSQRWGGLEAPAARVGGAKVAVPTGPTPLDSTPPGGAPHPLTGQEEARAVEKDKSKARSEDTGLDSVATRTPMEHVTPKPETHLASPKPTCMVPPMPHSPVSGDSVEEEEEEEKKVCLPGFTGLVNLGNTCFMNSVIQSLSNTRELRDFFHDRSFEAEINYNNPLGTGGRLAIGFAVLLRALWKGTHHAFQPSKLKAIVASKASQFTGYAQHDAQEFMAFLLDGLHEDLNRIQNKPYTETVDSDGRPDEVVAEEAWQRHKMRNDSFIVDLFQGQYKSKLVCPVCAKVSITFDPFLYLPVPLPQKQKVLPVFYFAREPHSKPIKFLVSVSKENSTASEVLDSLSQSVHVKPENLRLAEVIKNRFHRVFLPSHSLDTVSPSDTLLCFELLSSELAKERVVVLEVQQRPQVPSVPISKCAACQRKQQSEDEKLKRCTRCYRVGYCNQLCQKTHWPDHKGLCRPENIGYPFLVSVPASRLTYARLAQLLEGYARYSVSVFQPPFQPGRMALESQSPGCTTLLSTGSLEAGDSERDPIQPPELQLVTPMAEGDTGLPRVWAAPDRGPVPSTSGISSEMLASGPIEVGSLPAGERVSRPEAAVPGYQHPSEAMNAHTPQFFIYKIDSSNREQRLEDKGDTPLELGDDCSLALVWRNNERLQEFVLVASKELECAEDPGSAGEAARAGHFTLDQCLNLFTRPEVLAPEEAWYCPQCKQHREASKQLLLWRLPNVLIVQLKRFSFRSFIWRDKINDLVEFPVRNLDLSKFCIGQKEEQLPSYDLYAVINHYGGMIGGHYTACARLPNDRSSQRSDVGWRLFDDSTVTTVDESQVVTRYAYVLFYRRRNSPVERPPRAGHSEHHPDLGPAAEAAASQASRIWQELEAEEEPVPEGSGPLGPWGPQDWVGPLPRGPTTPDEGCLRYFVLGTVAALVALVLNVFYPLVSQSRWR

SEQ ID NO: 94794 - protein, 1358 aa, Homo sapiens
  Payload ID: 18912
  Gene Name: ubiquitin specific peptidase 19
  ENSP ID: ENSP00000381867
MSGGASATGPRRGPPGLEDTTSKKKQKDRANQESKDGDPRKASTPQEEQTKEELLLDWRQSAEEVIVKLRVGVGPLQLEDVDAAFTDTDCVVRFAGGQQWGGVFYAEIKSSCAKVQTRKGSLLHLTLPKKVPMLTWPSLLKPLGTQELVPGLRCQENGQELSPIALEPGPEPHRAKQEARNQKRAQGRGEVGAGAGPGAQAGPSAKRAVHLCRGPEGDGSRDDPGPRGDAPPFVADPATQVEADEQLCIPPLNSQTCLLGSEENLAPLAGEKAVPPGNDPVSPAMVRSRNPGKDDCAKEEMAVAADAATLVDEPESMVNLAFVKNDSYEKGPDSVVVHVYVKEICRDTSRVLFREQDFTLIFQTRDGNFLRLHPGCGPHTTFRWQVKLRNLIEPEQCTFCFTASRIDICLRKRQSQRWGGLEAPAARGAVGGAKVAVPTGPTPLDSTPPGGAPHPLTGQEEARAVEKDKSKARSEDTGLDSVATRTPMEHVTPKPETHLASPKPTCMVPPMPHSPVSGDSVEEEEEEEKKVCLPGFTGLVNLGNTCFMNSVIQSLSNTRELRDFFHDRSFEAEINYNNPLGTGGRLAIGFAVLLRALWKGTHHAFQPSKLKAIVASKASQFTGYAQHDAQEFMAFLLDGLHEDLNRIQNKPYTETVDSDGRPDEVVAEEAWQRHKMRNDSFIVDLFQGQYKSKLVCPVCAKVSITFDPFLYLPVPLPQKQKVLPVFYFAREPHSKPIKFLVSVSKENSTASEVLDSLSQSVHVKPENLRLAEVIKNRFHRVFLPSHSLDTVSPSDTLLCFELLSSELAKERVVVLEVQQRPQVPSVPISKCAACQRKQQSEDEKLKRCTRCYRVGYCNQLCQKTHWPDHKGLCRPENIGYPFLVSVPASRLTYARLAQLLEGYARYSVSVFQPPFQPGRMALESQSPGCTTLLSTGSLEAGDSERDPIQPPELQLVTPMAEGDTGLPRVWAAPDRGPVPSTSGISSEMLASGPIEVGSLPAGERVSRPEAAVPGYQHPSEAMNAHTPQFFIYKIDSSNREQRLEDKGDTPLELGDDCSLALVWRNNERLQEFVLVASKELECAEDPGSAGEAARAGHFTLDQCLNLFTRPEVLAPEEAWYCPQCKQHREASKQLLLWRLPNVLIVQLKRFSFRSFIWRDKINDLVEFPVRNLDLSKFCIGQKEEQLPSYDLYAVINHYGGMIGGHYTACARLPNDRSSQRSDVGWRLFDDSTVTTVDESQVVTRYAYVLFYRRRNSPVERPPRAGHSEHHPDLGPAAEAAASQASRIWQELEAEEEPVPEGSGPLGPWGPQDWVGPLPRGPTTPDEGCLRYFVLGTVAALVALVLNVFYPLVSQSRWR

SEQ ID NO: 94795 - protein, 1180 aa, Homo sapiens
  Payload ID: 18912
  Gene Name: ubiquitin specific peptidase 19
  ENSP ID: ENSP00000381870
  MOD_RES (1)..(1): Any amino acid
XSTPQEEQTKEELLLDWRQSAEEVIVKLRVGVGPLQLEDVDAAFTDTDCVVRFAGGQQWGGVFYAEIKSSCAKVQTRKGSLLHLTLPKKVPMLTWPSLLVEADEQLCIPPLNSQTCLLGSEENLAPLAGEKAVPPGNDPVSPAMVRSRNPGKDDCAKEEMAVAADAATLVDEPESMVNLAFVKNDSYEKGPDSVVVHVYVKEICRDTSRVLFREQDFTLIFQTRDGNFLRLHPGCGPHTTFRWQVKLRNLIEPEQCTFCFTASRIDICLRKRQSQRWGGLEAPAARGAVGGAKVAVPTGPTPLDSTPPGGAPHPLTGQEEARAVEKDKSKARSEDTGLDSVATRTPMEHVTPKPETHLASPKPTCMVPPMPHSPVSGDSVEEEEEEEKKVCLPGFTGLVNLGNTCFMNSVIQSLSNTRELRDFFHDRSFEAEINYNNPLGTGGRLAIGFAVLLRALWKGTHHAFQPSKLKAIVASKASQFTGYAQHDAQEFMAFLLDGLHEDLNRIQNKPYTETVDSDGRPDEVVAEEAWQRHKMRNDSFIVDLFQGQYKSKLVCPVCAKVSITFDPFLYLPVPLPQKQKVLPVFYFAREPHSKPIKFLVSVSKENSTASEVLDSLSQSVHVKPENLRLAEVIKNRFHRVFLPSHSLDTVSPSDTLLCFELLSSELAKERVVVLEVQQRPQVPSVPISKCAACQRKQQSEDEKLKRCTRCYRVGYCNQLCQKTHWPDHKGLCRPENIGYPFLVSVPASRLTYARLAQLLEGYARYSVSVFQPPFQPGRMALESQSPGCTTLLSTGSLEAGDSERDPIQPPELQLVTPMAEGDTGLPRVWAAPDRGPVPSTSGISSEMLASGPIEVGSLPAGERVSRPEAAVPGYQHPSEAMNAHTPQFFIYKIDSSNREQRLEDKGDTPLELGDDCSLALVWRNNERLQEFVLVASKELECAEDPGSAGEAARAGHFTLDQCLNLFTRPEVLAPEEAWYCPQCKQHREASKQLLLWRLPNVLIVQLKRFSFRSFIWRDKINDLVEFPVRNLDLSKFCIGQKEEQLPSYDLYAVINHYGGMIGGHYTACARLPNDRSSQRSDVGWRLFDDSTVTTVDESQVVTRYAYVLFYRRRNSPVERPPRAGHSEHHPDLGPAAEAAASQGLGPGQAPEVAPTRTAPERFAPPVDRPAPTYSNMEEVD

SEQ ID NO: 94796 - protein, 1321 aa, Homo sapiens
  Payload ID: 18912
  Gene Name: ubiquitin specific peptidase 19
  ENSP ID: ENSP00000381872
MSGGASATGPRRGPPGLEDTTSKKKQKDRANQESKDGDPRKASTPQEEQTKEELLLDWRQSAEEVIVKLRVGVGPLQLEDVDAAFTDTDCVVRFAGGQQWGGVFYAEIKSSCAKVQTRKGSLLHLTLPKKVPMLTWPSLLKPLGTQELVPGLRCQENGQELSPIALEPGPEPHRAKQEARNQKRAQGRGEVGAGAGPGAQAGPSAKRAVHLCRGPEGDGSRDDPGPRGDAPPFVADPATQVEADEQLCIPPLNSQTCLLGSEENLAPLAGEKAVPPGNDPVSPAMVRSRNPGKDDCAKEEMAVAADAATLVDEPESMVNLAFVKNDSYEKGPDSVVVHVYVKEICRDTSRVLFREQDFTLIFQTRDGNFLRLHPGCGPHTTFRWQVKLRNLIEPEQCTFCFTASRIDICLRKRQSQRWGGLEAPAARGAVGGAKVAVPTGPTPLDSTPPGGAPHPLTGQEEARAVEKDKSKARSEDTGLDSVATRTPMEHVTPKPETHLASPKPTCMVPPMPHSPVSGDSVEEEEEEEKKVCLPGFTGLVNLGNTCFMNSVIQSLSNTRELRDFFHDRSFEAEINYNNPLGTGGRLAIGFAVLLRALWKGTHHAFQPSKLKAIVASKASQFTGYAQHDAQEFMAFLLDGLHEDLNRIQNKPYTETVDSDGRPDEVVAEEAWQRHKMRNDSFIVDLFQGQYKSKLVCPVCAKVSITFDPFLYLPVPLPQKQKVLPVFYFAREPHSKPIKFLVSVSKENSTASEVLDSLSQSVHVKPENLRLAEVIKNRFHRVFLPSHSLDTVSPSDTLLCFELLSSELAKERVVVLEVQQRPQVPSVPISKCAACQRKQQSEDEKLKRCTRCYRVGYCNQLCQKTHWPDHKGLCRPENIGYPFLVSVPASRLTYARLAQLLEGYARYSVSVFQPPFQPGRMALESQSPGCTTLLSTGSLEAGDSERDPIQPPELQLVTPMAEGDTGLPRVWAAPDRGPVPSTSGISSEMLASGPIEVGSLPAGERVSRPEAAVPGYQHPSEAMNAHTPQFFIYKIDSSNREQRLEDKGDTPLELGDDCSLALVWRNNERLQEFVLVASKELECAEDPGSAGEAARAGHFTLDQCLNLFTRPEVLAPEEAWYCPQCKQHREASKQLLLWRLPNVLIVQLKRFSFRSFIWRDKINDLVEFPVRNLDLSKFCIGQKEEQLPSYDLYAVINHYGGMIGGHYTACARLPNDRSSQRSDVGWRLFDDSTVTTVDESQVVTRYAYVLFYRRRNSPVERPPRAGHSEHHPDLGPAAEAAASQGLGPGQAPEVAPTRTAPERFAPPVDRPAPTYSNMEEVD

SEQ ID NO: 94797 - protein, 1384 aa, Homo sapiens
  Payload ID: 18912
  Gene Name: ubiquitin specific peptidase 19
  Uniprot ID: O94966
  ENSP ID: ENSP00000395260
MSGGASATGPRRGPPGLEDTTSKKKQKDRANQESKDGDPRKETGSRYVAQAGLEPLASGDPSASASHAAGITGSRHRTRLFFPSSSGSASTPQEEQTKEGACEDPHDLLATPTPELLLDWRQSAEEVIVKLRVGVGPLQLEDVDAAFTDTDCVVRFAGGQQWGGVFYAEIKSSCAKVQTRKGSLLHLTLPKKVPMLTWPSLLKKPLGTQELVPGLRCQENGQELSPIALEPGPEPHRAKQEARNQKRAQGRGEVGAGAGPGAQAGPSAKRAVHLCRGPEGDGSRDDPGPRGDAPPFVADPATQVEADEQLCIPPLNSQTCLLGSEENLAPLAGEKAVPPGNDPVSPAMVRSRNPGKDDCAKEEMAVAADAATLVDEPESMVNLAFVKNDSYEKGPDSVVVHVYVKEICRDTSRVLFREQDFTLIFQTRDGNFLRLHPGCGPHTTFRWQVKLRNLIEPEQCTFCFTASRIDICLRKRQSQRWGGLEAPAARGAVGGAKVAVPTGPTPLDSTPPGGAPHPLTGQEEARAVEKDKSKARSEDTGLDSVATRTPMEHVTPKPETHLASPKPTCMVPPMPHSPVSGDSVEEEEEEEKKVCLPGFTGLVNLGNTCFMNSVIQSLSNTRELRDFFHDRSFEAEINYNNPLGTGGRLAIGFAVLLRALWKGTHHAFQPSKLKAIVASKASQFTGYAQHDAQEFMAFLLDGLHEDLNRIQNKPYTETVDSDGRPDEVVAEEAWQRHKMRNDSFIVDLFQGQYKSKLVCPVCAKVSITFDPFLYLPVPLPQKQKVLPVFYFAREPHSKPIKFLVSVSKENSTASEVLDSLSQSVHVKPENLRLAEVIKNRFHRVFLPSHSLDTVSPSDTLLCFELLSSELAKERVVVLEVQQRPQVPSVPISKCAACQRKQQSEDEKLKRCTRCYRVGYCNQLCQKTHWPDHKGLCRPENIGYPFLVSVPASRLTYARLAQLLEGYARYSVSVFQPPFQPGRMALESQSPGCTTLLSTGSLEAGDSERDPIQPPELQLVTPMAEGDTGLPRVWAAPDRGPVPSTSGISSEMLASGPIEVGSLPAGERVSRPEAAVPGYQHPSEAMNAHTPQFFIYKIDSSNREQRLEDKGDTPLELGDDCSLALVWRNNERLQEFVLVASKELECAEDPGSAGEAARAGHFTLDQCLNLFTRPEVLAPEEAWYCPQCKQHREASKQLLLWRLPNVLIVQLKRFSFRSFIWRDKINDLVEFPVRNLDLSKFCIGQKEEQLPSYDLYAVINHYGGMIGGHYTACARLPNDRSSQRSDVGWRLFDDSTVTTVDESQVVTRYAYVLFYRRRNSPVERPPRAGHSEHHPDLGPAAEAAASQGLGPGQAPEVAPTRTAPERFAPPVDRPAPTYSNMEEVD

SEQ ID NO: 94798 - protein, 1372 aa, Homo sapiens
  Payload ID: 18912
  Gene Name: ubiquitin specific peptidase 19
  Uniprot ID: O94966
  ENSP ID: ENSP00000400090
MSGGASATGPRRGPPGLEDTTSKKKQKDRANQESKDGDPRKETGSRYVAQAGLEPLASGDPSASASHAAGITGSRHRTRLFFPSSSGSASTPQEEQTKEGACEDPHDLLATPTPELLLDWRQSAEEVIVKLRVGVGPLQLEDVDAAFTDTDCVVRFAGGQQWGGVFYAEIKSSCAKVQTRKGSLLHLTLPKKKKPLGTQELVPGLRCQENGQELSPIALEPGPEPHRAKQEARNQKRAQGRGEVGAGAGPGAQAGPSAKRAVHLCRGPEGDGSRDDPGPRGDAPPFVADPATQVEADEQLCIPPLNSQTCLLGSEENLAPLAGEKAVPPGNDPVSPAMVRSRNPGKDDCAKEEMAVAADAATLVDEPESMVNLAFVKNDSYEKGPDSVVVHVYVKEICRDTSRVLFREQDFTLIFQTRDGNFLRLHPGCGPHTTFRWQVKLRNLIEPEQCTFCFTASRIDICLRKRQSQRWGGLEAPAARVGGAKVAVPTGPTPLDSTPPGGAPHPLTGQEEARAVEKDKSKARSEDTGLDSVATRTPMEHVTPKPETHLASPKPTCMVPPMPHSPVSGDSVEEEEEEEKKVCLPGFTGLVNLGNTCFMNSVIQSLSNTRELRDFFHDRSFEAEINYNNPLGTGGRLAIGFAVLLRALWKGTHHAFQPSKLKAIVASKASQFTGYAQHDAQEFMAFLLDGLHEDLNRIQNKPYTETVDSDGRPDEVVAEEAWQRHKMRNDSFIVDLFQGQYKSKLVCPVCAKVSITFDPFLYLPVPLPQKQKVLPVFYFAREPHSKPIKFLVSVSKENSTASEVLDSLSQSVHVKPENLRLAEVIKNRFHRVFLPSHSLDTVSPSDTLLCFELLSSELAKERVVVLEVQQRPQVPSVPISKCAACQRKQQSEDEKLKRCTRCYRVGYCNQLCQKTHWPDHKGLCRPENIGYPFLVSVPASRLTYARLAQLLEGYARYSVSVFQPPFQPGRMALESQSPGCTTLLSTGSLEAGDSERDPIQPPELQLVTPMAEGDTGLPRVWAAPDRGPVPSTSGISSEMLASGPIEVGSLPAGERVSRPEAAVPGYQHPSEAMNAHTPQFFIYKIDSSNREQRLEDKGDTPLELGDDCSLALVWRNNERLQEFVLVASKELECAEDPGSAGEAARAGHFTLDQCLNLFTRPEVLAPEEAWYCPQCKQHREASKQLLLWRLPNVLIVQLKRFSFRSFIWRDKINDLVEFPVRNLDLSKFCIGQKEEQLPSYDLYAVINHYGGMIGGHYTACARLPNDRSSQRSDVGWRLFDDSTVTTVDESQVVTRYAYVLFYRRRNSPVERPPRAGHSEHHPDLGPAAEAAASQGLGPGQAPEVAPTRTAPERFAPPVDRPAPTYSNMEEVD

SEQ ID NO: 94799 - protein, 1419 aa, Homo sapiens
  Payload ID: 18912
  Gene Name: ubiquitin specific peptidase 19
  Uniprot ID: O94966
  ENSP ID: ENSP00000401197
MSGGASATGPRRGPPGLEDTTSKKKQKDRANQESKDGDPRKETGSRYVAQAGLEPLASGDPSASASHAAGITGSRHRTRLFFPSSSGSASTPQEEQTKEGACEDPHDLLATPTPELLLDWRQSAEEVIVKLRVGVGPLQLEDVDAAFTDTDCVVRFAGGQQWGGVFYAEIKSSCAKVQTRKGSLLHLTLPKKVPMLTWPSLLKKPLGTQELVPGLRCQENGQELSPIALEPGPEPHRAKQEARNQKRAQGRGEVGAGAGPGAQAGPSAKRAVHLCRGPEGDGSRDDPGPRGDAPPFVADPATQVEADEQLCIPPLNSQTCLLGSEENLAPLAGEKAVPPGNDPVSPAMVRSRNPGKDDCAKEEMAVAADAATLVDEPESMVNLAFVKNDSYEKGPDSVVVHVYVKEICRDTSRVLFREQDFTLIFQTRDGNFLRLHPGCGPHTTFRWQVKLRNLIEPEQCTFCFTASRIDICLRKRQSQRWGGLEAPAARVGGAKVAVPTGPTPLDSTPPGGAPHPLTGQEEARAVEKDKSKARSEDTGLDSVATRTPMEHVTPKPETHLASPKPTCMVPPMPHSPVSGDSVEEEEEEEKKVCLPGFTGLVNLGNTCFMNSVIQSLSNTRELRDFFHDRSFEAEINYNNPLGTGGRLAIGFAVLLRALWKGTHHAFQPSKLKAIVASKASQFTGYAQHDAQEFMAFLLDGLHEDLNRIQNKPYTETVDSDGRPDEVVAEEAWQRHKMRNDSFIVDLFQGQYKSKLVCPVCAKVSITFDPFLYLPVPLPQKQKVLPVFYFAREPHSKPIKFLVSVSKENSTASEVLDSLSQSVHVKPENLRLAEVIKNRFHRVFLPSHSLDTVSPSDTLLCFELLSSELAKERVVVLEVQQRPQVPSVPISKCAACQRKQQSEDEKLKRCTRCYRVGYCNQLCQKTHWPDHKGLCRPENIGYPFLVSVPASRLTYARLAQLLEGYARYSVSVFQPPFQPGRMALESQSPGCTTLLSTGSLEAGDSERDPIQPPELQLVTPMAEGDTGLPRVWAAPDRGPVPSTSGISSEMLASGPIEVGSLPAGERVSRPEAAVPGYQHPSEAMNAHTPQFFIYKIDSSNREQRLEDKGDTPLELGDDCSLALVWRNNERLQEFVLVASKELECAEDPGSAGEAARAGHFTLDQCLNLFTRPEVLAPEEAWYCPQCKQHREASKQLLLWRLPNVLIVQLKRFSFRSFIWRDKINDLVEFPVRNLDLSKFCIGQKEEQLPSYDLYAVINHYGGMIGGHYTACARLPNDRSSQRSDVGWRLFDDSTVTTVDESQVVTRYAYVLFYRRRNSPVERPPRAGHSEHHPDLGPAAEAAASQASRIWQELEAEEEPVPEGSGPLGPWGPQDWVGPLPRGPTTPDEGCLRYFVLGTVAALVALVLNVFYPLVSQSRWR

SEQ ID NO: 94800 - protein, 120 aa, Homo sapiens
  Payload ID: 18912
  Gene Name: ubiquitin specific peptidase 19
  ENSP ID: ENSP00000428539
KPLGTQELVPGLRCQENGQELSPIALEPGPEPHRAKQEARNQKRAQGRGEVEADEQLCIPPLNSQTCLLGSEENLAPLAGEKAVPPGNDPVSPAMVRSRNPGKDDCAKEEMAVAADAATL

SEQ ID NO: 94801 - protein, 605 aa, Homo sapiens
  Payload ID: 18913
  Gene Name: ubiquitin specific peptidase 2
  Uniprot ID: O75604
  ENSP ID: ENSP00000260187
MSQLSSTLKRYTESARYTDAHYAKSGYGAYTPSSYGANLAASLLEKEKLGFKPVPTSSFLTRPRTYGPSSLLDYDRGRPLLRPDITGGGKRAESQTRGTERPLGSGLSGGSGFPYGVTNNCLSYLPINAYDQGVTLTQKLDSQSDLARDFSSLRTSDSYRIDPRNLGRSPMLARTRKELCTLQGLYQTASCPEYLVDYLENYGRKGSASQVPSQAPPSRVPEIISPTYRPIGRYTLWETGKGQAPGPSRSSSPGRDGMNSKSAQGLAGLRNLGNTCFMNSILQCLSNTRELRDYCLQRLYMRDLHHGSNAHTALVEEFAKLIQTIWTSSPNDVVSPSEFKTQIQRYAPRFVGYNQQDAQEFLRFLLDGLHNEVNRVTLRPKSNPENLDHLPDDEKGRQMWRKYLEREDSRIGDLFVGQLKSSLTCTDCGYCSTVFDPFWDLSLPIAKRGYPEVTLMDCMRLFTKEDVLDGDEKPTCCRCRGRKRCIKKFSIQRFPKILVLHLKRFSESRIRTSKLTTFVNFPLRDLDLREFASENTNHAVYNLYAVSNHSGTTMGGHYTAYCRSPGTGEWHTFNDSSVTPMSSSQVRTSDAYLLFYELASPPSRM

SEQ ID NO: 94802 - protein, 362 aa, Homo sapiens
  Payload ID: 18913
  Gene Name: ubiquitin specific peptidase 2
  Uniprot ID: O75604
  ENSP ID: ENSP00000407842
MLVPGSTRPYSKKRQNSKSAQGLAGLRNLGNTCFMNSILQCLSNTRELRDYCLQRLYMRDLHHGSNAHTALVEEFAKLIQTIWTSSPNDVVSPSEFKTQIQRYAPRFVGYNQQDAQEFLRFLLDGLHNEVNRVTLRPKSNPENLDHLPDDEKGRQMWRKYLEREDSRIGDLFVGQLKSSLTCTDCGYCSTVFDPFWDLSLPIAKRGYPEVTLMDCMRLFTKEDVLDGDEKPTCCRCRGRKRCIKKFSIQRFPKILVLHLKRFSESRIRTSKLTTFVNFPLRDLDLREFASENTNHAVYNLYAVSNHSGTTMGGHYTAYCRSPGTGEWHTFNDSSVTPMSSSQVRTSDAYLLFYELASPPSRM

SEQ ID NO: 94803 - protein, 137 aa, Homo sapiens
  Payload ID: 18913
  Gene Name: ubiquitin specific peptidase 2
  ENSP ID: ENSP00000431857
MSQLSSTLKRYTESARYTDAHYAKSGYGAYTPSSYGANLAASLLEKEKLGFKPVPTSSFLTRPRTYGPSSLLDYDRGRPLLRPDITGGGKRAESQTRGTERPLGSGLSGGSGFPYGVTNNCLSYLPINAYDQGVTLT

SEQ ID NO: 94804 - protein, 167 aa, Homo sapiens
  Payload ID: 18913
  Gene Name: ubiquitin specific peptidase 2
  ENSP ID: ENSP00000433977
MSQLSSTLKRYTESARYTDAHYAKSGYGAYTPSSYGANLAASLLEKEKLGFKPVPTSSFLTRPRTYGPSSLLDYDRGRPLLRPDITGGGKRAESQTRGTERPLGSGLSGGSGFPYGVTNNCLSYLPINAYDQGVTLTQKLDSQSDLARDFSSLRTSDSYRIDPRNLG

SEQ ID NO: 94805 - protein, 396 aa, Homo sapiens
  Payload ID: 18913
  Gene Name: ubiquitin specific peptidase 2
  Uniprot ID: O75604
  ENSP ID: ENSP00000436952
MRTSYTVTLPEDPPAAPFPALAKELRPRSPLSPSLLLSTFVGLLLNKAKNSKSAQGLAGLRNLGNTCFMNSILQCLSNTRELRDYCLQRLYMRDLHHGSNAHTALVEEFAKLIQTIWTSSPNDVVSPSEFKTQIQRYAPRFVGYNQQDAQEFLRFLLDGLHNEVNRVTLRPKSNPENLDHLPDDEKGRQMWRKYLEREDSRIGDLFVGQLKSSLTCTDCGYCSTVFDPFWDLSLPIAKRGYPEVTLMDCMRLFTKEDVLDGDEKPTCCRCRGRKRCIKKFSIQRFPKILVLHLKRFSESRIRTSKLTTFVNFPLRDLDLREFASENTNHAVYNLYAVSNHSGTTMGGHYTAYCRSPGTGEWHTFNDSSVTPMSSSQVRTSDAYLLFYELASPPSRM

SEQ ID NO: 94806 - protein, 914 aa, Homo sapiens
  Payload ID: 18914
  Gene Name: ubiquitin specific peptidase 20
  Uniprot ID: Q9Y2K6
  ENSP ID: ENSP00000313811
MGDSRDLCPHLDSIGEVTKEDLLLKSKGTCQSCGVTGPNLWACLQVACPYVGCGESFADHSTIHAQAKKHNLTVNLTTFRLWCYACEKEVFLEQRLAAPLLGSSSKFSEQDSPPPSHPLKAVPIAVADEGESESEDDDLKPRGLTGMKNLGNSCYMNAALQALSNCPPLTQFFLECGGLVRTDKKPALCKSYQKLVSEVWHKKRPSYVVPTSLSHGIKLVNPMFRGYAQQDTQEFLRCLMDQLHEELKEPVVATVALTEARDSDSSDTDEKREGDRSPSEDEFLSCDSSSDRGEGDGQGRGGGSSQAETELLIPDEAGRAISEKERMKDRKFSWGQQRTNSEQVDEDADVDTAMAALDDQPAEAQPPSPRSSSPCRTPEPDNDAHLRSSSRPCSPVHHHEGHAKLSSSPPRASPVRMAPSYVLKKAQVLSAGSRRRKEQRYRSVISDIFDGSILSLVQCLTCDRVSTTVETFQDLSLPIPGKEDLAKLHSAIYQNVPAKPGACGDSYAAQGWLAFIVEYIRRFVVSCTPSWFWGPVVTLEDCLAAFFAADELKGDNMYSCERCKKLRNGVKYCKVLRLPEILCIHLKRFRHEVMYSFKINSHVSFPLEGLDLRPFLAKECTSQITTYDLLSVICHHGTAGSGHYIAYCQNVINGQWYEFDDQYVTEVHETVVQNAEGYVLFYRKSSEEAMRERQQVVSLAAMREPSLLRFYVSREWLNKFNTFAEPGPITNQTFLCSHGGIPPHKYHYIDDLVVILPQNVWEHLYNRFGGGPAVNHLYVCSICQVEIEALAKRRRIEIDTFIKLNKAFQAEESPGVIYCISMQWFREWEAFVKGKDNEPPGPIDNSRIAQVKGSGHVQLKQGADYGQISEETWTYLNSLYGGGPEIAIRQSVAQPLGPENLHGEQKIEAETRAV

SEQ ID NO: 94807 - protein, 914 aa, Homo sapiens; identical to SEQ ID NO: 94806
  Payload ID: 18914
  Gene Name: ubiquitin specific peptidase 20
  Uniprot ID: Q9Y2K6
  ENSP ID: ENSP00000351122

SEQ ID NO: 94808 - protein, 914 aa, Homo sapiens; identical to SEQ ID NO: 94806
  Payload ID: 18914
  Gene Name: ubiquitin specific peptidase 20
  Uniprot ID: Q9Y2K6
  ENSP ID: ENSP00000361506

SEQ ID NO: 94809 - protein, 565 aa, Homo sapiens
  Payload ID: 18915
  Gene Name: ubiquitin specific peptidase 21
  Uniprot ID: Q9UK80
  ENSP ID: ENSP00000289865
MPQASEHRLGRTREPPVNIQPRVGSKLPFAPRARSKERRNPASGPNPMLRPLPPRPGLPDERLKKLELGRGRTSGPRPRGPLRADHGVPLPGSPPPTVALPLPSRTNLARSKSVSSGDLRPMGIALGGHRGTGELGAALSRLALRPEPPTLRRSTSLRRLGGFPGPPTLFSIRTEPPASHGSFHMISARSSEPFYSDDKMAHHTLLLGSGHVGLRNLGNTCFLNAVLQCLSSTRPLRDFCLRRDFRQEVPGGGRAQELTEAFADVIGALWHPDSCEAVNPTRFRAVFQKYVPSFSGYSQQDAQEFLKLLMERLHLEINRRGRRAPPILANGPVPSPPRRGGALLEEPELSDDDRANLMWKRYLEREDSKIVDLFVGQLKSCLKCQACGYRSTTFEVFCDLSLPIPKKGFAGGKVSLRDCFNLFTKEEELESENAPVCDRCRQKTRSTKKLTVQRFPRILVLHLNRFSASRGSIKKSSVGVDFPLQRLSLGDFASDKAGSPVYQLYALCNHSGSVHYGHYTALCRCQTGWHVYNDSRVSPVSENQVASSEGYVLFYQLMQEPPRCL

SEQ ID NO: 94810 - protein, 551 aa, Homo sapiens
  Payload ID: 18915
  Gene Name: ubiquitin specific peptidase 21
  Uniprot ID: Q9UK80
  ENSP ID: ENSP00000356980
MPQASEHRLGRTREPPVNIQPRVGSKLPFAPRARSKERRNPASGPNPMLRPLPPRPGLPDERLKKLELGRGRTSGPRPRGPLRADHGVPLPGSPPPTVALPLPSRTNLARSKSVSSGDLRPMGIALGGHRGTGELGAALSRLALRPEPPTLRRSTSLRRLGGFPGPPTLFSIRTEPPASHGSFHMISARSSEPFYSDDKMAHHTLLLGSGHVGLRNLGNTCFLNAVLQCLSSTRPLRDFCLRRDFRQEVPGGGRAQELTEAFADVIGALWHPDSCEAVNPTRFRAVFQKYVPSFSGYSQQDAQEFLKLLMERLHLEINRRGRRAPPILANGPVPSPPRRGGALLEEPELSDDDRANLMWKRYLEREDSKIVDLFVGQLKSCLKCQACGYRSTTFEVFCDLSLPIPKKGFAGGKVSLRDCFNLFTKEEELESENAPVCDRCRQKTRSTKKLTVQRFPRILVLHLNRFSASRGSIKKSSVGVDFPLQRLSLGDFASDKAGSVHYGHYTALCRCQTGWHVYNDSRVSPVSENQVASSEGYVLFYQLMQEPPRCL

SEQ ID NO: 94811 - protein, 565 aa, Homo sapiens; identical to SEQ ID NO: 94809
  Payload ID: 18915
  Gene Name: ubiquitin specific peptidase 21
  Uniprot ID: Q9UK80
  ENSP ID: ENSP00000356981

SEQ ID NO: 94812 - protein, 253 aa, Homo sapiens
  Payload ID: 18915
  Gene Name: ubiquitin specific peptidase 21
  ENSP ID: ENSP00000476344
MPQASEHRLGRTREPPVNIQPRVGSKLPFAPRARSKERRNPASGPNPMLRPLPPRPGLPDERLKKLELGRGRTSGPRPRGPLRADHGVPLPGSPPPTVALPLPSRTNLARSKSVSSGDLRPMGIALGGHRGTGELGAALSRLALRPEPPTLRRSTSLRRLGGFPGPPTLFSIRTEPPASHGSFHMISARSSEPFYSDDKMAHHTLLLGSGHVGLRNLGNTCFLNAVLQCLSSTRPLRDFCLRRDFRQEVPGGG

SEQ ID NO: 94813 - protein, 117 aa, Homo sapiens
  Payload ID: 18915
  Gene Name: ubiquitin specific peptidase 21
  ENSP ID: ENSP00000476830
MPQASEHRLGRTREPPVNIQPRVGSKLPFAPRARSKERRNPASGPNPMLRPLPPRPGLPDERLKKLELGRGRTSGPRPRGPLRADHGVPLPGSPPPTVALPLPSRTNLARSKSVSSG

SEQ ID NO: 94814 - protein, 525 aa, Homo sapiens
  Payload ID: 18916
  Gene Name: ubiquitin specific peptidase 22
  Uniprot ID: Q9UPT9
  ENSP ID: ENSP00000261497
MVSRPEPEGEAMDAELAVAPPGCSHLGSFKVDNWKQNLRAIYQCFVWSGTAEARKRKAKSCICHVCGVHLNRLHSCLYCVFFGCFTKKHIHEHAKAKRHNLAIDLMYGGIYCFLCQDYIYDKDMEIIAKEEQRKAWKMQGVGEKFSTWEPTKRELELLKHNPKRRKITSNCTIGLRGLINLGNTCFMNCIVQALTHTPLLRDFFLSDRHRCEMQSPSSCLVCEMSSLFQEFYSGHRSPHIPYKLLHLVWTHARHLAGYEQQDAHEFLIAALDVLHRHCKGDDNGKKANNPNHCNCIIDQIFTGGLQSDVTCQVCHGVSTTIDPFWDISLDLPGSSTPFWPLSPGSEGNVVNGESHVSGTTTLTDCLRRFTRPEHLGSSAKIKCSGCHSYQESTKQLTMKKLPIVACFHLKRFEHSAKLRRKITTYVSFPLELDMTPFMASSKESRMNGQYQQPTDSLNNDNKYSLFAVVNHQGTLESGHYTSFIRQHKDQWFKCDDAIITKASIKDVLDSEGYLLFYHKQFLEYE

SEQ ID NO: 94815 - protein, 513 aa, Homo sapiens
  Payload ID: 18916
  Gene Name: ubiquitin specific peptidase 22
  Uniprot ID: Q9UPT9
  ENSP ID: ENSP00000440950
MAPGWPSLSAGSRQEAPQLAAGGSAYQAVGRQFQPRATALQGPSQAKSCICHVCGVHLNRLHSCLYCVFFGCFTKKHIHEHAKAKRHNLAIDLMYGGIYCFLCQDYIYDKDMEIIAKEEQRKAWKMQGVGEKFSTWEPTKRELELLKHNPKRRKITSNCTIGLRGLINLGNTCFMNCIVQALTHTPLLRDFFLSDRHRCEMQSPSSCLVCEMSSLFQEFYSGHRSPHIPYKLLHLVWTHARHLAGYEQQDAHEFLIAALDVLHRHCKGDDNGKKANNPNHCNCIIDQIFTGGLQSDVTCQVCHGVSTTIDPFWDISLDLPGSSTPFWPLSPGSEGNVVNGESHVSGTTTLTDCLRRFTRPEHLGSSAKIKCSGCHSYQESTKQLTMKKLPIVACFHLKRFEHSAKLRRKITTYVSFPLELDMTPFMASSKESRMNGQYQQPTDSLNNDNKYSLFAVVNHQGTLESGHYTSFIRQHKDQWFKCDDAIITKASIKDVLDSEGYLLFYHKQFLEYE

SEQ ID NO: 94816 - protein, 194 aa, Homo sapiens
  Payload ID: 18916
  Gene Name: ubiquitin specific peptidase 22
  ENSP ID: ENSP00000464398
MAPGWPSLSAGSRQEAPQLAAGGSAYQAVGRQFQPRATALQGPSQVTATGGPANSSRLGGAFGWESAGPGWRPDLRRSSSSPRLFAAELRPAQTGSVLGLTSRAAQPQHAPASPVLWKRQGTSSRQGPGRRLCTRRTILRAYDNSRRPSPVSAMSVASTSTGCIPASTVSSSAVSQRSIFTSMRRRSGTTWPLI

SEQ ID NO: 94817 - protein, 102 aa, Homo sapiens
  Payload ID: 18916
  Gene Name: ubiquitin specific peptidase 22
  ENSP ID: ENSP00000464499
  MOD_RES (1)..(1): Any amino acid
XELLKHNPKRRKITSNCTIGLRGLINLGNTCFMNCIVQALTHTPLLRDFFLSDRHRCEMQSPSSCLVCEMSSLFQEWSLHHHRPLLGHQLGSPRLFHPILAP

SEQ ID NO: 94818 - protein, 125 aa, Homo sapiens
  Payload ID: 18916
  Gene Name: ubiquitin specific peptidase 22
  ENSP ID: ENSP00000468457
MYGGIYCFLCQDYIYDKDMEIIAKEEQRKAWKMQGVGEKFSTWEPTKRELELLKHNPKRRKITSNCTIGLRGLINLGNTCFMNCIVQALTHTPLLRDFFLSDRHRCEMQSPSSCLVCEMSSLFQE

SEQ ID NO: 94819 - protein, 107 aa, Homo sapiens
  Payload ID: 18916
  Gene Name: ubiquitin specific peptidase 22
  ENSP ID: ENSP00000468748
MYGGIYCFLCQDYIYDKDMEIIAKEEQRKAWKMQGVGEKFSTWEPTKRELELLKHNPKRRKITSNCTIGLRGLINLGNTCFMNCIVQALTHTPLLRDFFLSDRHRCE

SEQ ID NO: 94820 - protein, 2620 aa, Homo sapiens
  Payload ID: 18917
  Gene Name: ubiquitin specific peptidase 24
  Uniprot ID: Q9UPU5
  ENSP ID: ENSP00000294383
MESEEEQHMTTLLCMGFSDPATIRKALRLAKNDINEAVALLTNERPGLDYGGYEPMDSGGGPSPGPGGGPRGDGGGDGGGGGPSRGGSTGGGGGFDPPPAYHEVVDAEKNDENGNCSGEGIEFPTTNLYELESRVLTDHWSIPYKREESLGKCLLASTYLARLGLSESDENCRRFMDRCMPEAFKKLLTSSAVHKWGTEIHEGIYNMLMLLIELVAERIKQDPIPTGLLGVLTMAFNPDNEYHFKNRMKVSQRNWAEVFGEGNMFAVSPVSTFQKEPHGWVVDLVNKFGELGGFAAIQAKLHSEDIELGAVSALIQPLGVCAEYLNSSVVQPMLDPVILTTIQDVRSVEEKDLKDKRLVSIPELLSAVKLLCMRFQPDLVTIVDDLRLDILLRMLKSPHFSAKMNSLKEVTKLIEDSTLSKSVKNAIDTDRLLDWLVENSVLSIALEGNIDQAQYCDRIKGIIELLGSKLSLDELTKIWKIQSGQSSTVIENIHTIIAAAAVKFNSDQLNHLFVLIQKSWETESDRVRQKLLSLIGRIGREARFETTSGKVLDVLWELAHLPTLPSSLIQQALEEHLTILSDAYAVKEAIKRSYIIKCIEDIKRPGEWSGLEKNKKDGFKSSQLNNPQFVWVVPALRQLHEITRSFIKQTYQKQDKSIIQDLKKNFEIVKLVTGSLIACHRLAAAVAGPGGLSGSTLVDGRYTYREYLEAHLKFLAFFLQEATLYLGWNRAKEIWECLVTGQDVCELDREMCFEWFTKGQHDLESDVQQQLFKEKILKLESYEITMNGFNLFKTFFENVNLCDHRLKRQGAQLYVEKLELIGMDFIWKIAMESPDEEIANEAIQLIINYSYINLNPRLKKDSVSLHKKFIADCYTRLEAASSALGGPTLTHAVTRATKMLTATAMPTVATSVQSPYRSTKLVIIERLLLLAERYVITIEDFYSVPRTILPHGASFHGHLLTLNVTYESTKDTFTVEAHSNETIGSVRWKIAKQLCSPVDNIQIFTNDSLLTVNKDQKLLHQLGFSDEQILTVKTSGSGTPSGSSADSSTSSSSSSSGVFSSSYAMEQEKSLPGVVMALVCNVFDMLYQLANLEEPRITLRVRKLLLLIPTDPAIQEALDQLDSLGRKKTLLSESSSQSSKSPSLSSKQQHQPSASSILESLFRSFAPGMSTFRVLYNLEVLSSKLMPTADDDMARSCAKSFCENFLKAGGLSLVVNVMQRDSIPSEVDYETRQGVYSICLQLARFLLVGQTMPTLLDEDLTKDGIEALSSRPFRNVSRQTSRQMSLCGTPEKSSYRQLSVSDRSSIRVEEIIPAARVAIQTMEVSDFTSTVACFMRLSWAAAAGRLDLVGSSQPIKESNSLCPAGIRNRLSSSGSNCSSGSEGEPVALHAGICVRQQSVSTKDSLIAGEALSLLVTCLQLRSQQLASFYNLPCVADFIIDILLGSPSAEIRRVACDQLYTLSQTDTSAHPDVQKPNQFLLGVILTAQLPLWSPTSIMRGVNQRLLSQCMEYFDLRCQLLDDLTTSEMEQLRISPATMLEDEITWLDNFEPNRTAECETSEADNILLAGHLRLIKTLLSLCGAEKEMLGSSLIKPLLDDFLFRASRIILNSHSPAGSAAISQQDFHPKCSTANSRLAAYEVLVMLADSSPSNLQIIIKELLSMHHQPDPALTKEFDYLPPVDSRSSSGFVGLRNGGATCYMNAVFQQLYMQPGLPESLLSVDDDTDNPDDSVFYQVQSLFGHLMESKLQYYVPENFWKIFKMWNKELYVREQQDAYEFFTSLIDQMDEYLKKMGRDQIFKNTFQGIYSDQKICKDCPHRYEREEAFMALNLGVTSCQSLEISLDQFVRGEVLEGSNAYYCEKCKEKRITVKRTCIKSLPSVLVIHLMRFGFDWESGRSIKYDEQIRFPWMLNMEPYTVSGMARQDSSSEVGENGRSVDQGGGGSPRKKVALTENYELVGVIVHSGQAHAGHYYSFIKDRRGCGKGKWYKFNDTVIEEFDLNDETLEYECFGGEYRPKVYDQTNPYTDVRRRYWNAYMLFYQRVSDQNSPVLPKKSRVSVVRQEAEDLSLSAPSSPEISPQSSPRPHRPNNDRLSILTKLVKKGEKKGLFVEKMPARIYQMVRDENLKFMKNRDVYSSDYFSFVLSLASLNATKLKHPYYPCMAKVSLQLAIQFLFQTYLRTKKKLRVDTEEWIATIEALLSKSFDACQWLVEYFISSEGRELIKIFLLECNVREVRVAVATILEKTLDSALFYQDKLKSLHQLLEVLLALLDKDVPENCKNCAQYFFLFNTFVQKQGIRAGDLLLRHSALRHMISFLLGASRQNNQIRRWSSAQAREFGNLHNTVALLVLHSDVSSQRNVAPGIFKQRPPISIAPSSPLLPLHEEVEALLFMSEGKPYLLEVMFALRELTGSLLALIEMVVYCCFCNEHFSFTMLHFIKNQLETAPPHELKNTFQLLHEILVIEDPIQVERVKFVFETENGLLALMHHSNHVDSSRCYQCVKFLVTLAQKCPAAKEYFKENSHHWSWAVQWLQKKMSEHYWTPQSNVSNETSTGKTFQRTISAQDTLAYATALLNEKEQSGSSNGSESSPANENGDRHLQQGSESPMMIGELRSDLDDVDP

SEQ ID NO: 94821 - protein, 150 aa, Homo sapiens
  Payload ID: 18917
  Gene Name: ubiquitin specific peptidase 24
  ENSP ID: ENSP00000489026
ERVKFVFETENGLLALMHHSNHVDSSRCYQCVKFLVTLAQKCPAAKEYFKENSHHWSWAVQWLQKKMSEHYWTPQSNVSNETSTGKTFQRTISAQDTLAYATALLNEKEQSGSSNGSESSPANENGDRHLQQVTESPSFALTSLPGNVDS

SEQ ID NO: 94822 - protein, 34 aa, Homo sapiens
  Payload ID: 18917
  Gene Name: ubiquitin specific peptidase 24
  ENSP ID: ENSP00000489531
PGEWSGLEKNKKDGFKAARWADWGLCLPARLHRN

SEQ ID NO: 94823 - protein, 1055 aa, Homo sapiens
  Payload ID: 18918
  Gene Name: ubiquitin specific peptidase 25
  Uniprot ID: Q9UHP3
  ENSP ID: ENSP00000285679
MTVEQNVLQQSAAQKHQQTFLNQLREITGINDTQILQQALKDSNGNLELAVAFLTAKNAKTPQQEETTYYQTALPGNDRYISVGSQADTNVIDLTGDDKDDLQRAIALSLAESNRAFRETGITDEEQAISRVLEASIAENKACLKRTPTEVWRDSRNPYDRKRQDKAPVGLKNVGNTCWFSAVIQSLFNLLEFRRLVLNYKPPSNAQDLPRNQKEHRNLPFMRELRYLFALLVGTKRKYVDPSRAVEILKDAFKSNDSQQQDVSEFTHKLLDWLEDAFQMKAEEETDEEKPKNPMVELFYGRFLAVGVLEGKKFENTEMFGQYPLQVNGFKDLHECLEAAMIEGEIESLHSENSGKSGQEHWFTELPPVLTFELSRFEFNQALGRPEKIHNKLEFPQVLYLDRYMHRNREITRIKREEIKRLKDYLTVLQQRLERYLSYGSGPKRFPLVDVLQYALEFASSKPVCTSPVDDIDASSPPSGSIPSQTLPSTTEQQGALSSELPSTSPSSVAAISSRSVIHKPFTQSRIPPDLPMHPAPRHITEEELSVLESCLHRWRTEIENDTRDLQESISRIHRTIELMYSDKSMIQVPYRLHAVLVHEGQANAGHYWAYIFDHRESRWMKYNDIAVTKSSWEELVRDSFGGYRNASAYCLMYINDKAQFLIQEEFNKETGQPLVGIETLPPDLRDFVEEDNQRFEKELEEWDAQLAQKALQEKLLASQKLRESETSVTTAQAAGDPEYLEQPSRSDFSKHLKEETIQIITKASHEHEDKSPETVLQSAIKLEYARLVKLAQEDTPPETDYRLHHVVVYFIQNQAPKKIIEKTLLEQFGDRNLSFDERCHNIMKVAQAKLEMIKPEEVNLEEYEEWHQDYRKFRETTMYLIIGLENFQRESYIDSLLFLICAYQNNKELLSKGLYRGHDEELISHYRRECLLKLNEQAAELFESGEDREVNNGLIIMNEFIVPFLPLLLVDEMEEKDILAVEDMRNRWCSYLGQEMEPHLQEKLTDFLPKLLDCSMEIKSFHEPPKLPSYSTHELCERFARIMLSLSRTPADGR

SEQ ID NO: 94824 - protein, 1087 aa, Homo sapiens
  Payload ID: 18918
  Gene Name: ubiquitin specific peptidase 25
  Uniprot ID: Q9UHP3
  ENSP ID: ENSP00000285681
MTVEQNVLQQSAAQKHQQTFLNQLREITGINDTQILQQALKDSNGNLELAVAFLTAKNAKTPQQEETTYYQTALPGNDRYISVGSQADTNVIDLTGDDKDDLQRAIALSLAESNRAFRETGITDEEQAISRVLEASIAENKACLKRTPTEVWRDSRNPYDRKRQDKAPVGLKNVGNTCWFSAVIQSLFNLLEFRRLVLNYKPPSNAQDLPRNQKEHRNLPFMRELRYLFALLVGTKRKYVDPSRAVEILKDAFKSNDSQQQDVSEFTHKLLDWLEDAFQMKAEEETDEEKPKNPMVELFYGRFLAVGVLEGKKFENTEMFGQYPLQVNGFKDLHECLEAAMIEGEIESLHSENSGKSGQEHWFTELPPVLTFELSRFEFNQALGRPEKIHNKLEFPQVLYLDRYMHRNREITRIKREEIKRLKDYLTVLQQRLERYLSYGSGPKRFPLVDVLQYALEFASSKPVCTSPVDDIDASSPPSGSIPSQTLPSTTEQQGALSSELPSTSPSSVAAISSRSVIHKPFTQSRIPPDLPMHPAPRHITEEELSVLESCLHRWRTEIENDTRDLQESISRIHRTIELMYSDKSMIQVPYRLHAVLVHEGQANAGHYWAYIFDHRESRWMKYNDIAVTKSSWEELVRDSFGGYRNASAYCLMYINDKAQFLIQEEFNKETGQPLVGIETLPPDLRDFVEEDNQRFEKELEEWDAQLAQKALQEKLLASQKLRESETSVTTAQAAGDPEYLEQPSRSDFSKHLKEETIQIITKASHEHEDKSPETVLQSIMMTPNMQGIIMAIGKSRSVYDRCGPEAGFFKAIKLEYARLVKLAQEDTPPETDYRLHHVVVYFIQNQAPKKIIEKTLLEQFGDRNLSFDERCHNIMKVAQAKLEMIKPEEVNLEEYEEWHQDYRKFRETTMYLIIGLENFQRESYIDSLLFLICAYQNNKELLSKGLYRGHDEELISHYRRECLLKLNEQAAELFESGEDREVNNGLIIMNEFIVPFLPLLLVDEMEEKDILAVEDMRNRWCSYLGQEMEPHLQEKLTDFLPKLLDCSMEIKSFHEPPKLPSYSTHELCERFARIMLSLSRTPADGR

SEQ ID NO: 94825 - protein, 450 aa, Homo sapiens
  Payload ID: 18918
  Gene Name: ubiquitin specific peptidase 25
  ENSP ID: ENSP00000299574
MTVEQNVLQQSAAQKHQQTFLNQLREITGINDTQILQQALKDSNGNLELAVAFLTAKNAKTPQQEETTYYQTALPGNDRYISVGSQADTNVIDLTGDDKDDLQRAIALSLAESNRAFRETGITDEEQAISRVLEASIAENKACLKRTPTEVWRDSRNPYDRKRQDKAPVGLKNVGNTCWFSAVIQSLFNLLEFRRLVLNYKPPSNAQDLPRNQKEHRNLPFMRELRYLFALLVGTKRKYVDPSRAVEILKDAFKSNDSQQEWHQDYRKFRETTMYLIIGLENFQRESYIDSLLFLICAYQNNKELLSKGLYRGHDEELISHYRRECLLKLNEQAAELFESGEDREVNNGLIIMNEFIVPFLPLLLVDEMEEKDILAVEDMRNRWCSYLGQEMEPHLQEKLTDFLPKLLDCSMEIKSFHEPPKLPSYSTHELCERFARIMLSLSRTPADGR

SEQ ID NO: 94826 - protein, 1125 aa, Homo sapiens
  Payload ID: 18918
  Gene Name: ubiquitin specific peptidase 25
  Uniprot ID: Q9UHP3
  ENSP ID: ENSP00000383044
MTVEQNVLQQSAAQKHQQTFLNQLREITGINDTQILQQALKDSNGNLELAVAFLTAKNAKTPQQEETTYYQTALPGNDRYISVGSQADTNVIDLTGDDKDDLQRAIALSLAESNRAFRETGITDEEQAISRVLEASIAENKACLKRTPTEVWRDSRNPYDRKRQDKAPVGLKNVGNTCWFSAVIQSLFNLLEFRRLVLNYKPPSNAQDLPRNQKEHRNLPFMRELRYLFALLVGTKRKYVDPSRAVEILKDAFKSNDSQQQDVSEFTHKLLDWLEDAFQMKAEEETDEEKPKNPMVELFYGRFLAVGVLEGKKFENTEMFGQYPLQVNGFKDLHECLEAAMIEGEIESLHSENSGKSGQEHWFTELPPVLTFELSRFEFNQALGRPEKIHNKLEFPQVLYLDRYMHRNREITRIKREEIKRLKDYLTVLQQRLERYLSYGSGPKRFPLVDVLQYALEFASSKPVCTSPVDDIDASSPPSGSIPSQTLPSTTEQQGALSSELPSTSPSSVAAISSRSVIHKPFTQSRIPPDLPMHPAPRHITEEELSVLESCLHRWRTEIENDTRDLQESISRIHRTIELMYSDKSMIQVPYRLHAVLVHEGQANAGHYWAYIFDHRESRWMKYNDIAVTKSSWEELVRDSFGGYRNASAYCLMYINDKAQFLIQEEFNKETGQPLVGIETLPPDLRDFVEEDNQRFEKELEEWDAQLAQKALQEKLLASQKLRESETSVTTAQAAGDPEYLEQPSRSDFSKHLKEETIQIITKASHEHEDKSPETVLQSKPENTTSQPLSNQRVVEVAIPHVGKFMIESKEGGYDDEIMMTPNMQGIIMAIGKSRSVYDRCGPEAGFFKAIKLEYARLVKLAQEDTPPETDYRLHHVVVYFIQNQAPKKIIEKTLLEQFGDRNLSFDERCHNIMKVAQAKLEMIKPEEVNLEEYEEWHQDYRKFRETTMYLIIGLENFQRESYIDSLLFLICAYQNNKELLSKGLYRGHDEELISHYRRECLLKLNEQAAELFESGEDREVNNGLIIMNEFIVPFLPLLLVDEMEEKDILAVEDMRNRWCSYLGQEMEPHLQEKLTDFLPKLLDCSMEIKSFHEPPKLPSYSTHELCERFARIMLSLSRTPADGR

SEQ ID NO: 94827 - protein, 229 aa, Homo sapiens
  Payload ID: 18918
  Gene Name: ubiquitin specific peptidase 25
  ENSP ID: ENSP00000402354
  MOD_RES (1)..(1): Any amino acid
XPETVLQSKPENTTSQPLSNQRVVEVAIPHVGKFMIESKEGGYDDEIMMTPNMQGIIMAIGKSRSVYDRCGPEAGFFKAIKLEYARLVKLAQEDTPPETDYRLHHVVVYFIQNQAPKKIIEKTLLEQFGDRNLSFDERCHNIMKVAQAKLEMIKPEEVNLEEYEEWHQDYRKFRETTMYLIIGLENFQRESYIDSLLFLICAYQNNKELLSKGLYRGHDEELISHYRRE

SEQ ID NO: 94828 - protein, 204 aa, Homo sapiens
  Payload ID: 18918
  Gene Name: ubiquitin specific peptidase 25
  ENSP ID: ENSP00000404086
  MOD_RES (1)..(1): Any amino acid
XIKRLKDYLTVLQQRLESTTEQQGALSSELPSTSPSSVAAISSRSVIHKPFTQSRIPPDLPMHPAPRHITEEELSVLESCLHRWRTEIENDTRDLQESISRIHRTIELMYSDKSMIQVPYRLHAVLVHEGQANAGHYWAYIFDHRESRWMKYNDIAVTKSSWEELVRDSFGGYRNASAYCLMYINDKAQFLIQEEFNKETGQPL

SEQ ID NO: 94829 - protein, 913 aa, Homo sapiens
  Payload ID: 18919
  Gene Name: ubiquitin specific peptidase 26
  Uniprot ID: Q9BXU7
  ENSP ID: ENSP00000359869
MAALFLRGFVQIGNCKTGISKSKEAFIEAVERKKKDRLVLYFKSGKYSTFRLSDNIQNVVLKSYRGNQNHLHLTLQNNNGLFIEGLSSTDAEQLKIFLDRVHQNEVQPPVRPGKGGSVFSSTTQKEINKTSFHKVDEKSSSKSFEIAKGSGTGVLQRMPLLTSKLTLTCGELSENQHKKRKRMLSSSSEMNEEFLKENNSVEYKKSKADCSRCVSYNREKQLKLKELEENKKLECESSCIMNATGNPYLDDIGLLQALTEKMVLVFLLQQGYSDGYTKWDKLKLFFELFPEKICHGLPNLGNTCYMNAVLQSLLSIPSFADDLLNQSFPWGKIPLNALTMCLARLLFFKDTYNIEIKEMLLLNLKKAISAAAEIFHGNAQNDAHEFLAHCLDQLKDNMEKLNTIWKPKSEFGEDNFPKQVFADDPDTSGFSCPVITNFELELLHSIACKACGQVILKTELNNYLSINLPQRIKAHPSSIQSTFDLFFGAEELEYKCAKCEHKTSVGVHSFSRLPRILIVHLKRYSLNEFCALKKNDQEVIISKYLKVSSHCNEGTRPPLPLSEDGEITDFQLLKVIRKMTSGNISVSWPATKESKDILAPHIGSDKESEQKKGQTVFKGASRRQQQKYLGKNSKPNELESVYSGDRAFIEKEPLAHLMTYLEDTSLCQFHKAGGKPASSPGTPLSKVDFQTVPENPKRKKYVKTSKFVAFDRIINPTKDLYEDKNIRIPERFQKVSEQTQQCDGMRICEQAPQQALPQSFPKPGTQGHTKNLLRPTKLNLQKSNRNSLLALGSNKNPRNKDILDKIKSKAKETKRNDDKGDHTYRLISVVSHLGKTLKSGHYICDAYDFEKQIWFTYDDMRVLGIQEAQMQEDRRCTGYIFFYMHNEIFEEMLKREENAQLNSKEVEETLQKE

SEQ ID NO: 94830 - protein, 913 aa, Homo sapiens; identical to SEQ ID NO: 94829
  Payload ID: 18919
  Gene Name: ubiquitin specific peptidase 26
  Uniprot ID: Q9BXU7
  ENSP ID: ENSP00000423390

SEQ ID NO: 94831 - protein, 438 aa, Homo sapiens
  Payload ID: 18920
  Gene Name: ubiquitin specific peptidase 27, X-linked
  Uniprot ID: A6NNY8
  ENSP ID: ENSP00000483631
MCKDYVYDKDIEQIAKEEQGEALKLQASTSTEVSHQQCSVPGLGEKFPTWETTKPELELLGHNPRRRRITSSFTIGLRGLINLGNTCFMNCIVQALTHTPILRDFFLSDRHRCEMPSPELCLVCEMSSLFRELYSGNPSPHVPYKLLHLVWIHARHLAGYRQQDAHEFLIAALDVLHRHCKGDDVGKAANNPNHCNCIIDQIFTGGLQSDVTCQACHGVSTTIDPCWDISLDLPGSCTSFWPMSPGRESSVNGESHIPGITTLTDCLRRFTRPEHLGSSAKIKCGSCQSYQESTKQLTMNKLPVVACFHFKRFEHSAKQRRKITTYISFPLELDMTPFMASSKESRMNGQLQLPTNSGNNENKYSLFAVVNHQGTLESGHYTSFIRHHKDQWFKCDDAVITKASIKDVLDSEGYLLFYHKQVLEHESEKVKEMNTQAY

SEQ ID NO: 94832 - protein, 1077 aa, Homo sapiens
  Payload ID: 18921
  Gene Name: ubiquitin specific peptidase 28
  Uniprot ID: Q96RU2
  ENSP ID: ENSP00000003302
MTAELQQDDAAGAADGHGSSCQMLLNQLREITGIQDPSFLHEALKASNGDITQAVSLLTDERVKEPSQDTVATEPSEVEGSAANKEVLAKVIDLTHDNKDDLQAAIALSLLESPKIQADGRDLNRMHEATSAETKRSKRKRCEVWGENPNPNDWRRVDGWPVGLKNVGNTCWFSAVIQSLFQLPEFRRLVLSYSLPQNVLENCRSHTEKRNIMFMQELQYLFALMMGSNRKFVDPSAALDLLKGAFRSSEEQQQDVSEFTHKLLDWLEDAFQLAVNVNSPRNKSENPMVQLFYGTFLTEGVREGKPFCNNETFGQYPLQVNGYRNLDECLEGAMVEGDVELLPSDHSVKYGQERWFTKLPPVLTFELSRFEFNQSLGQPEKIHNKLEFPQIIYMDRYMYRSKELIRNKRECIRKLKEEIKILQQKLERYVKYGSGPARFPLPDMLKYVIEFASTKPASESCPPESDTHMTLPLSSVHCSVSDQTSKESTSTESSSQDVESTFSSPEDSLPKSKPLTSSRSSMEMPSQPAPRTVTDEEINFVKTCLQRWRSEIEQDIQDLKTCIASTTQTIEQMYCDPLLRQVPYRLHAVLVHEGQANAGHYWAYIYNQPRQSWLKYNDISVTESSWEEVERDSYGGLRNVSAYCLMYINDKLPYFNAEAAPTESDQMSEVEALSVELKHYIQEDNWRFEQEVEEWEEEQSCKIPQMESSTNSSSQDYSTSQEPSVASSHGVRCLSSEHAVIVKEQTAQAIANTARAYEKSGVEAALSEVMLSPAMQGVILAIAKARQTFDRDGSEAGLIKAFHEEYSRLYQLAKETPTSHSDPRLQHVLVYFFQNEAPKRVVERTLLEQFADKNLSYDERSISIMKVAQAKLKEIGPDDMNMEEYKKWHEDYSLFRKVSVYLLTGLELYQKGKYQEALSYLVYAYQSNAALLMKGPRRGVKESVIALYRRKCLLELNAKAASLFETNDDHSVTEGINVMNELIIPCIHLIINNDISKDDLDAIEVMRNHWCSYLGQDIAENLQLCLGEFLPRLLDPSAEIIVLKEPPTIRPNSPYDLCSRFAAVMESIQGVSTVTVK

SEQ ID NO: 94833 - protein, 46 aa, Homo sapiens
  Payload ID: 18921
  Gene Name: ubiquitin specific peptidase 28
  ENSP ID: ENSP00000437450
MRNYICRTKLADRYPQSCQMLLNQLREITGIQDPSFLHEALKASNG

SEQ ID NO: 94834 - protein, 40 aa, Homo sapiens
  Payload ID: 18921
  Gene Name: ubiquitin specific peptidase 28
  ENSP ID: ENSP00000437688
  MOD_RES (1)..(1): Any amino acid
XFALMMGSNRKFVDPSAALDLLKGAFRSSEEQQQQSQEQI

SEQ ID NO: 94835 - protein, 51 aa, Homo sapiens
  Payload ID: 18921
  Gene Name: ubiquitin specific peptidase 28
  ENSP ID: ENSP00000438050
  MOD_RES (1)..(1): Any amino acid
XRNIMFMQELQYLFALMMGSNRKFVDPSAALDLLKGAFRSSEEQQQSQEQI

SEQ ID NO: 94836 - protein, 194 aa, Homo sapiens
  Payload ID: 18921
  Gene Name: ubiquitin specific peptidase 28
  ENSP ID: ENSP00000440260
  MOD_RES (1)..(1): Any amino acid
XNWRFEQEVEEWEEEQSCKIPQMESSTNSSSQDYSTSQEPSVASSHGVRCLSSEHAVIVKEQTAQAIANTARAYEKSGVEAALSELKEAEPKKPMPQETNLAEQSEQPPKANDAESTAQPNSEVMLSPAMQGVILAIAKARQTFDRDGSEAGLIKAFHEEYSRLYQLAKETPTSHSDPRLQHVLVYFFQNEAPK

SEQ ID NO: 94837 - protein, 244 aa, Homo sapiens
  Payload ID: 18921
  Gene Name: ubiquitin specific peptidase 28
  ENSP ID: ENSP00000440799
CGAAAGRRGRRGRRPRLEVIDLTHDNKDDLQAAIALSLLESPKIQADGRDLNRMHEATSAETKRSKRKRCEVWGENPNPNDWRRVDGWPVGLKNVGNTCWFSAVIQEKRNIMFMQELQYLFALMMGSNRKFVDPSAALDLLKGAFRSSEEQQQDVSEFTHKLLDWLEDAFQLAVNVNSPRNKSENPMVQLFYGTFLTEGVREGKPFCNNETFGQYPLQVNGYRNLDECLEGAMVEGDVELLPSD

SEQ ID NO: 94838 - protein, 194 aa, Homo sapiens
  Payload ID: 18921
  Gene Name: ubiquitin specific peptidase 28
  ENSP ID: ENSP00000441513
MTAELQQDDAAGAADGHGSSCQMLLNQLREITGIQDPSFLHEALKASNGDITQAVSLLTDERVKEPSQDTVATEPSEVEGSAANKEVLAKVIDLTHDNKDDLQAAIALSLLESPKIQADGRDLNRMHEATSAETKRSKRKRCEVWGENPNPNDWRRVDGWPVGLKNVGNTCWFSAVIQDASSGVPPCRPERVFI

SEQ ID NO: 94839 - protein, 360 aa, Homo sapiens
  Payload ID: 18921
  Gene Name: ubiquitin specific peptidase 28
  ENSP ID: ENSP00000442257
AALDLLKGAFRSSEEQQQDVSEFTHKLLDWLEDAFQLAVNVNSPRNKSENPMVQLFYGTFLTEGVREGKPFCNNETFGQYPLQVNGYRNLDECLEGAMVEGDVELLPSDHSVKYGQERWFTKLPPVLTFELSRFEFNQSLGQPEKIHNKLEFPQIIYMDRYMYRSKELIRNKRECIRKLKEEIKILQQKLESTSTESSSQDVESTFSSPEDSLPKSKPLTSSRSSMEMPSQPAPRTVTDEEINFVKTCLQRWRSEIEQDIQDLKTCIASTTQTIEQMYCDPLLRQVPYRLHAVLVHEGQANAGHYWAYIYNQPRQSWLKYNDISVTESSWEEVERDSYGGLRNVSAYCLMYINDKLPYFN

SEQ ID NO: 94840 - protein, 753 aa, Homo sapiens
  Payload ID: 18921
  Gene Name: ubiquitin specific peptidase 28
  ENSP ID: ENSP00000442431
MSFLKSLSLCLGKPFCNNETFGQYPLQVNGYRNLDECLEGAMVEGDVELLPSDHSVKYGQERWFTKLPPVLTFELSRFEFNQSLGQPEKIHNKLEFPQIIYMDRYMYRSKELIRNKRECIRKLKEEIKILQQKLERYVKYGSGPARFPLPDMLKYVIEFASTKPASESCPPESDTHMTLPLSSVHCSVSDQTSKESTSTESSSQDVESTFSSPEDSLPKSKPLTSSRSSMEMPSQPAPRTVTDEEINFVKTCLQRWRSEIEQDIQDLKTCIASTTQTIEQMYCDPLLRQVPYRLHAVLVHEGQANAGHYWAYIYNQPRQSWLKYNDISVTESSWEEVERDSYGGLRNVSAYCLMYINDKLPYFNAEAAPTESDQMSEVEALSVELKHYIQEDNWRFEQEVEEWEEEQSCKIPQMESSTNSSSQDYSTSQEPSVASSHGVRCLSSEHAVIVKEQTAQAIANTARAYEKSGVEAALSEAFHEEYSRLYQLAKETPTSHSDPRLQHVLVYFFQNEAPKRVVERTLLEQFADKNLSYDERSISIMKVAQAKLKEIGPDDMNMEEYKKWHEDYSLFRKVSVYLLTGLELYQKGKYQEALSYLVYAYQSNAALLMKGPRRGVKESVIALYRRKCLLELNAKAASLFETNDDHSVTEGINVMNELIIPCIHLIINNDISKDDLDAIEVMRNHWCSYLGQDIAENLQLCLGEFLPRLLDPSAEIIVLKEPPTIRPNSPYDLCSRFAAVMESIQGVSTVTVK

SEQ ID NO: 94841 - protein, 920 aa, Homo sapiens
  Payload ID: 18921
  Gene Name: ubiquitin specific peptidase 28
  ENSP ID: ENSP00000444991
MHEATSAETKRSKRKRCEVWGENPNPNDWRRVDGWPVGLKNVGNTCWFSAVIQSLFQLPEFRRLVLSYSLPQNVLENCRSHTEKRNIMFMQELQYLFALMMGSNRKFVDPSAALDLLKGAFRSSEEQQQDVSEFTHKLLDWLEDAFQLAVNVNSPRNKSENPMVQLFYGTFLTEGVREGKPFCNNETFGQYPLQVNGYRNLDECLEGAMVEGDVELLPSDHSVKYGQERWFTKLPPVLTFELSRFEFNQSLGQPEKIHNKLEFPQIIYMDRYMYRSKELIRNKRECIRKLKEEIKILQQKLERYVKYGSGPARFPLPDMLKYVIEFASTKPASESCPPESDTHMTLPLSSVHCSVSDQTSKESTSTESSSQDVESTFSSPEDSLPKSKPLTSSRSSMEMPSQPAPRTVTDEEINFVKTCLQRWRSEIEQDIQDLKTCIASTTQTIEQMYCDPLLRQVPYRLHAVLVHEGQANAGHYWAYIYNQPRQSWLKYNDISVTESSWEEVERDSYGGLRNVSAYCLMYINDKLPYFNAEAAPTESDQMSEVEALSVELKHYIQEDNWRFEQEVEEWEEEQSCKIPQMESSTNSSSQDYSTSQEPSVASSHGVRCLSSEHAVIVKEQTAQAIANTARAYEKSGVEAALSEAFHEEYSRLYQLAKETPTSHSDPRLQHVLVYFFQNEAPKRVVERTLLEQFADKNLSYDERSISIMKVAQAKLKEIGPDDMNMEEYKKWHEDYSLFRKVSVYLLTGLELYQKGKYQEALSYLVYAYQSNAALLMKGPRRGVKESVIALYRRKCLLELNAKAASLFETNDDHSVTEGINVMNELIIPCIHLIINNDISKDDLDAIEVMRNHWCSYLGQDIAENLQLCLGEFLPRLLDPSAEIIVLKEPPTIRPNSPYDLCSRFAAVMESIQGVSTVTVK

SEQ ID NO: 94842 - protein, 91 aa, Homo sapiens
  Payload ID: 18921
  Gene Name: ubiquitin specific peptidase 28
  ENSP ID: ENSP00000445722
  MOD_RES (1)..(1): Any amino acid
XNPELSPFPKSSSPRNKSENPMVQLFYGTFLTEGVREGKPFCNNETFGQYPLQVNGYRNLDECLEGAMVEGDVELLPSDHSVKYGQEPTCT

SEQ ID NO: 94843 - protein, 583 aa, Homo sapiens
  Payload ID: 18921
  Gene Name: ubiquitin specific peptidase 28
  Uniprot ID: Q96RU2
  ENSP ID: ENSP00000445743
MTAELQQDDAAGAADGHGSSCQMLLNQLREITGIQDPSFLHEALKASNGDITQAVSLLTDERVKEPSQDTVATEPSEVEGSAANKEVLAKVIDLTHDNKDDLQAAIALSLLESPKIQADGRDLNRMHEATSAETKRSKRKRCEVWGENPNPNDWRRVDGWPVGLKNVGNTCWFSAVIQSLFQLPEFRRLVLSYSLPQNVLENCRSHTEKRNIMFMQELQYLFALMMGSNRKFVDPSAALDLLKGAFRSSEEQQQDVSEFTHKLLDWLEDAFQLAVNVNSPRNKSENPMVQLFYGTFLTEGVREGKPFCNNETFGQYPLQVNGYRNLDECLEGAMVEGDVELLPSDHSVKYGQERWFTKLPPVLTFELSRFEFNQSLGQPEKIHNKLEFPQIIYMDRYMYRSKELIRNKRECIRKLKEEIKILQQKLERYVKYGSGPARFPLPDMLKYVIEFASTKPASESCPPESDTHMTLPLSSVHCSVSDQTSKESTSTESSSQDVESTFSSPEDSLPKSKPLTSSRSSMEMPSQPAPRTVTDEEINFVKTCLQRWRSEIEQDIQDLKTCIASTTQTIEQMYCDPLLRQVE

SEQ ID NO: 94844 - protein, 77 aa, Homo sapiens
  Payload ID: 18921
  Gene Name: ubiquitin specific peptidase 28
  ENSP ID: ENSP00000446284
MRNYICRTKLADRYPQSCQMLLNQLREITGIQDPSFLHEALKASNGDITQAVSLLTDERVKEPSQDTVATEPSEVEG

SEQ ID NO: 94845 - protein, 922 aa, Homo sapiens
  Payload ID: 18922
  Gene Name: ubiquitin specific peptidase 29
  Uniprot ID: Q9HBJ7
  ENSP ID: ENSP00000254181
MISLKVCGFIQIWSQKTGMTKLKEALIETVQRQKEIKLVVTFKSGKFIRIFQLSNNIRSVVLRHCKKRQSHLRLTLKNNVFLFIDKLSYRDAKQLNMFLDIIHQNKSQQPMKSDDDWSVFESRNMLKEIDKTSFYSICNKPSYQKMPLFMSKSPTHVKKGILENQGGKGQNTLSSDVQTNEDILKEDNPVPNKKYKTDSLKYIQSNRKNPSSLEDLEKDRDLKLGPSFNTNCNGNPNLDETVLATQTLNAKNGLTSPLEPEHSQGDPRCNKAQVPLDSHSQQLQQGFPNLGNTCYMNAVLQSLFAIPSFADDLLTQGVPWEYIPFEALIMTLTQLLALKDFCSTKIKRELLGNVKKVISAVAEIFSGNMQNDAHEFLGQCLDQLKEDMEKLNATLNTGKECGDENSSPQMHVGSAATKVFVCPVVANFEFELQLSLICKACGHAVLKVEPNNYLSINLHQETKPLPLSIQNSLDLFFKEEELEYNCQMCKQKSCVARHTFSRLSRVLIIHLKRYSFNNAWLLVKNNEQVYIPKSLSLSSYCNESTKPPLPLSSSAPVGKCEVLEVSQEMISEINSPLTPSMKLTSESSDSLVLPVEPDKNADLQRFQRDCGDASQEQHQRDLENGSALESELVHFRDRAIGEKELPVADSLMDQGDISLPVMYEDGGKLISSPDTRLVEVHLQEVPQHPELQKYEKTNTFVEFNFDSVTESTNGFYDCKENRIPEGSQGMAEQLQQCIEESIIDEFLQQAPPPGVRKLDAQEHTEETLNQSTELRLQKADLNHLGALGSDNPGNKNILDAENTRGEAKELTRNVKMGDPLQAYRLISVVSHIGSSPNSGHYISDVYDFQKQAWFTYNDLCVSEISETKMQEARLHSGYIFFYMHNGIFEELLRKAENSRLPSTQAGVIPQGEYEGDSLYRPA

SEQ ID NO: 94846 - protein, 30 aa, Homo sapiens
  Payload ID: 18922
  Gene Name: ubiquitin specific peptidase 29
  ENSP ID: ENSP00000470618
MISLKVCGFIQIWSQKTGMTKLKEALIETV

SEQ ID NO: 94847 - protein, 922 aa, Homo sapiens; identical to SEQ ID NO: 94845
  Payload ID: 18922
  Gene Name: ubiquitin specific peptidase 29
  Uniprot ID: Q9HBJ7
  ENSP ID: ENSP00000470747

SEQ ID NO: 94848 - protein, 13 aa, Homo sapiens
  Payload ID: 18922
  Gene Name: ubiquitin specific peptidase 29
  ENSP ID: ENSP00000472876
MISLKVCGFIQIW

SEQ ID NO: 94849 - protein, 498 aa, Homo sapiens
  Payload ID: 18923
  Gene Name: ubiquitin specific peptidase 3
  ENSP ID: ENSP00000268049
MQSPPHLAVCRSNKSPWVCLTCSSVHCGRYVNGHAKKHYEDAQVPLTNHKKSEKQDKVQHTVCMDCSSYSTYCYRCDDFVVNDTKLGLVQKVREHLQNLENSAFTADRHKKRKLLENSTLNSKLLKVNGSTTAICATGLRNLGNTCFMNAILQSLSNIEQFCCYFKELPAVELRNGKTAGRRTYHTRSQGDNNVSLVEEFRKTLCALWQGSQTAFSPESLFYVVWKIMPNFRGYQQQDAHEFMRYLLDHLHLELQGGFNGVSRSAILQENSTLSASNKCCINGASTVVTAIFGGILQNEVNCLICGTESRKFDPFLDLSLDIPSQFRSKRSKNQENGPVCSLRDCLRSFTDLEELDETELYMCHKCKKKQKSTKKFWIQKLPKVLCLHLKRFHWTAYLRNKVDTYVEFPLRGLDMKCYLLEPENSGPESCLYDLAAVVVHHGSGVGSGHYTAYATHEGRWFHFNDSTVTLTDEETVVKAKAYILFYVEHQAKAGSDKL

SEQ ID NO: 94850 - protein, 520 aa, Homo sapiens
  Payload ID: 18923
  Gene Name: ubiquitin specific peptidase 3
  Uniprot ID: Q9Y6I4
  ENSP ID: ENSP00000369681
MECPHLSSSVCIAPDSAKFPNGSPSSWCCSVCRSNKSPWVCLTCSSVHCGRYVNGHAKKHYEDAQVPLTNHKKSEKQDKVQHTVCMDCSSYSTYCYRCDDFVVNDTKLGLVQKVREHLQNLENSAFTADRHKKRKLLENSTLNSKLLKVNGSTTAICATGLRNLGNTCFMNAILQSLSNIEQFCCYFKELPAVELRNGKTAGRRTYHTRSQGDNNVSLVEEFRKTLCALWQGSQTAFSPESLFYVVWKIMPNFRGYQQQDAHEFMRYLLDHLHLELQGGFNGVSRSAILQENSTLSASNKCCINGASTVVTAIFGGILQNEVNCLICGTESRKFDPFLDLSLDIPSQFRSKRSKNQENGPVCSLRDCLRSFTDLEELDETELYMCHKCKKKQKSTKKFWIQKLPKVLCLHLKRFHWTAYLRNKVDTYVEFPLRGLDMKCYLLEPENSGPESCLYDLAAVVVHHGSGVGSGHYTAYATHEGRWFHFNDSTVTLTDEETVVKAKAYILFYVEHQAKAGSDKL

SEQ ID NO: 94851 - protein, 6 aa, Homo sapiens
  Payload ID: 18923
  Gene Name: ubiquitin specific peptidase 3
  ENSP ID: ENSP00000445793
  MOD_RES (1)..(1): Any amino acid
XSYSTY

SEQ ID NO: 94852 - protein, 476 aa, Homo sapiens
  Payload ID: 18923
  Gene Name: ubiquitin specific peptidase 3
  Uniprot ID: Q9Y6I4
  ENSP ID: ENSP00000445828
MECPHLSSSVCIAPDSAKFPNGSPSSWCCSVCRSNKSPWVCLTCSSVHCGSYRCDDFVVNDTKLGLVQKVREHLQNLENSAFTADRHKKRKLLENSTLNSKLLKVNGSTTAICATGLRNLGNTCFMNAILQSLSNIEQFCCYFKELPAVELRNGKTAGRRTYHTRSQGDNNVSLVEEFRKTLCALWQGSQTAFSPESLFYVVWKIMPNFRGYQQQDAHEFMRYLLDHLHLELQGGFNGVSRSAILQENSTLSASNKCCINGASTVVTAIFGGILQNEVNCLICGTESRKFDPFLDLSLDIPSQFRSKRSKNQENGPVCSLRDCLRSFTDLEELDETELYMCHKCKKKQKSTKKFWIQKLPKVLCLHLKRFHWTAYLRNKVDTYVEFPLRGLDMKCYLLEPENSGPESCLYDLAAVVVHHGSGVGSGHYTAYATHEGRWFHFNDSTVTLTDEETVVKAKAYILFYVEHQAKAGSDKL

SEQ ID NO: 94853 - protein, 56 aa, Homo sapiens
  Payload ID: 18923
  Gene Name: ubiquitin specific peptidase 3
  ENSP ID: ENSP00000452929
MECPHLSSSVCIAPDSAKFPNGSPSSWCCSAFKCLSGVTVLCPQRVLYVAQAGLEL

SEQ ID NO: 94854 - protein, 443 aa, Homo sapiens
  Payload ID: 18923
  Gene Name: ubiquitin specific peptidase 3
  ENSP ID: ENSP00000452947
  MOD_RES (1)..(1): Any amino acid
XKVQHTVCMDCSSYSTYCYRCDDFVVNDTKLGLVQKVREHLQNLENSAFTADRHKKRKLLENSTLNSKLLKVNGSTTAICATGLRNLGNTCFMNAILQSLSNIEQFCCYFKELPAVELRNGKTAGRRTYHTRSQGDNNVSLVEEFRKTLCALWQGSQTAFSPESLFYVVWKIMPNFRGYQQQDAHEFMRYLLDHLHLELQGGFNGVSRSAILQENSTLSASNKCCINGASTVVTAIFGGILQNEVNCLICGTESRKFDPFLDLSLDIPSQFRSKRSKNQENGPVCSLRDCLRSFTDLEELDETELYMCHKCKKKQKSTKKFWIQKLPKVLCLHLKRFHWTAYLRNKVDTYVEFPLRGLDMKCYLLEPENSGPESCLYDLAAVVVHHGSGVGSGHYTAYATHEGRWFHFNDSTVTLTDEETVVKAKAYILFYVEHQAKAGSDKL

SEQ ID NO: 94855 - protein, 126 aa, Homo sapiens
  Payload ID: 18923
  Gene Name: ubiquitin specific peptidase 3
  ENSP ID: ENSP00000453093
MQSPPHLAVCRSNKSPWVCLTCSSVHCGRYVNGHAKKHYEDAQVPLTNHKKSEKQDKVQHTVCMDCSSYSTYCYRCDDFVVNDTKLGLVQKVREHLQNLENSAFTADRHKKRKLLENSTLNSKLLK

SEQ ID NO: 94856 - protein, 431 aa, Homo sapiens
  Payload ID: 18923
  Gene Name: ubiquitin specific peptidase 3
  ENSP ID: ENSP00000453138
MENTEGYRCDDFVVNDTKLGLVQKVREHLQNLENSAFTADRHKKRKLLENSTLNSKLLKVNGSTTAICATGLRNLGNTCFMNAILQSLSNIEQFCCYFKELPAVELRNGKTAGRRTYHTRSQGDNNVSLVEEFRKTLCALWQGSQTAFSPESLFYVVWKIMPNFRGYQQQDAHEFMRYLLDHLHLELQGGFNGVSRSAILQENSTLSASNKCCINGASTVVTAIFGGILQNEVNCLICGTESRKFDPFLDLSLDIPSQFRSKRSKNQENGPVCSLRDCLRSFTDLEELDETELYMCHKCKKKQKSTKKFWIQKLPKVLCLHLKRFHWTAYLRNKVDTYVEFPLRGLDMKCYLLEPENSGPESCLYDLAAVVVHHGSGVGSGHYTAYATHEGRWFHFNDSTVTLTDEETVVKAKAYILFYVEHQAKAGSDKL

SEQ ID NO: 94857 - protein, 133 aa, Homo sapiens
  Payload ID: 18923
  Gene Name: ubiquitin specific peptidase 3
  ENSP ID: ENSP00000453194
MECPHLSSSVCIAPDSAKFPNGSPSSWCCSVCRSNKSPWVCLTCSSVHCGSYRCDDFVVNDTKLGLVQKVREHLQNLENSAFTADRHKKRKLLENSTLNSKLLKVNGSTTAICATGLRNLGNTCFMNAILQSL

SEQ ID NO: 94858 - protein, 55 aa, Homo sapiens
  Payload ID: 18923
  Gene Name: ubiquitin specific peptidase 3
  ENSP ID: ENSP00000453228
MECPHLSSSVCIAPDSAKFPNGSPSSWCCSVCRSNKSPWVCLTCSSVHCGRIWGT

SEQ ID NO: 94859 - protein, 106 aa, Homo sapiens
  Payload ID: 18923
  Gene Name: ubiquitin specific peptidase 3
  ENSP ID: ENSP00000453489
HWTAYLRNKVDTYVEFPLRGLDMKCYLLEPENSGPESCLYDLAAVVVHHGSGVGSGHYTAYATHEGRWFHFNDSTVTLTDEETVVKAKAYILFYVEHQAKAGSDKL

SEQ ID NO: 94860 - protein, 503 aa, Homo sapiens
  Payload ID: 18923
  Gene Name: ubiquitin specific peptidase 3
  ENSP ID: ENSP00000453619
MMQLVYCVFFFLLVCRSNKSPWVCLTCSSVHCGRYVNGHAKKHYEDAQVPLTNHKKSEKQDKVQHTVCMDCSSYSTYCYRCDDFVVNDTKLGLVQKVREHLQNLENSAFTADRHKKRKLLENSTLNSKLLKVNGSTTAICATGLRNLGNTCFMNAILQSLSNIEQFCCYFKELPAVELRNGKTAGRRTYHTRSQGDNNVSLVEEFRKTLCALWQGSQTAFSPESLFYVVWKIMPNFRGYQQQDAHEFMRYLLDHLHLELQGGFNGVSRSAILQENSTLSASNKCCINGASTVVTAIFGGILQNEVNCLICGTESRKFDPFLDLSLDIPSQFRSKRSKNQENGPVCSLRDCLRSFTDLEELDETELYMCHKCKKKQKSTKKFWIQKLPKVLCLHLKRFHWTAYLRNKVDTYVEFPLRGLDMKCYLLEPENSGPESCLYDLAAVVVHHGSGVGSGHYTAYATHEGRWFHFNDSTVTLTDEETVVKAKAYILFYVEHQAKAGSDKL

SEQ ID NO: 94861 - protein, 132 aa, Homo sapiens
  Payload ID: 18923
  Gene Name: ubiquitin specific peptidase 3
  ENSP ID: ENSP00000453688
MECPHLSSSVCIAPDSAKFPNGSPSSWCCSEMEFHHFTKAGLELLDSSNLPASASQSVGTTVCRSNKSPWVCLTCSSVHCGRYVNGHAKKHYEDAQVPLTNHKKSEKQDKVQHTVCMDCSSYSTYCYRCDDF

SEQ ID NO: 94862 - protein, 79 aa, Homo sapiens
  Payload ID: 18923
  Gene Name: ubiquitin specific peptidase 3
  ENSP ID: ENSP00000453767
MECPHLSSSVCIAPDSAKFPNGSPSSWCCSGAINSRTPMNSCATFWTTYTWNFRAVSTVFPAQQFCRRILLCLQVTSVA

SEQ ID NO: 94863 - protein, 56 aa, Homo sapiens; identical to SEQ ID NO: 94853
  Payload ID: 18923
  Gene Name: ubiquitin specific peptidase 3
  ENSP ID: ENSP00000454043

SEQ ID NO: 94864 - protein, 39 aa, Homo sapiens
  Payload ID: 18923
  Gene Name: ubiquitin specific peptidase 3
  ENSP ID: ENSP00000454197
MQSPPHLAVCRSNKSPWVCLTCSSVHCGRYVNGHAKKHY

SEQ ID NO: 94865 - protein, 517 aa, Homo sapiens
  Payload ID: 18924
  Gene Name: ubiquitin specific peptidase 30
  Uniprot ID: Q70CQ3
  ENSP ID: ENSP00000257548
MLSSRAEAAMTAADRAIQRFLRTGAAVRYKVMKNWGVIGGIAAALAAGIYVIWGPITERKKRRKGLVPGLVNLGNTCFMNSLLQGLSACPAFIRWLEEFTSQYSRDQKEPPSHQYLSLTLLHLLKALSCQEVTDDEVLDASCLLDVLRMYRWQISSFEEQDAHELFHVITSSLEDERDRQPRVTHLFDVHSLEQQSEITPKQITCRTRGSPHPTSNHWKSQHPFHGRLTSNMVCKHCEHQSPVRFDTFDSLSLSIPAATWGHPLTLDHCLHHFISSESVRDVVCDNCTKIEAKGTLNGEKVEHQRTTFVKQLKLGKLPQCLCIHLQRLSWSSHGTPLKRHEHVQFNEFLMMDIYKYHLLGHKPSQHNPKLNKNPGPTLELQDGPGAPTPVLNQPGAPKTQIFMNGACSPSLLPTLSAPMPFPLPVVPDYSSSTYLFRLMAVVVHHGDMHSGHFVTYRRSPPSARNPLSTSNQWLWVSDDTVRKASLQEVLSSSAYLLFYERVLSRMQHQSQECKSEE

SEQ ID NO: 94866 - protein, 486 aa, Homo sapiens
  Payload ID: 18924
  Gene Name: ubiquitin specific peptidase 30
  ENSP ID: ENSP00000376535
MKNWGVIGGIAAALAAGIYVIWGPITERKKRRKGLVPGLVNLGNTCFMNSLLQGLSACPAFIRWLEEFTSQYSRDQKEPPSHQYLSLTLLHLLKALSCQEVTDDEVLDASCLLDVLRMYRWQISSFEEQDAHELFHVITSSLEDERDRQPRVTHLFDVHSLEQQSEITPKQITCRTRGSPHPTSNHWKSQHPFHGRLTSNMVCKHCEHQSPVRFDTFDSLSLSIPAATWGHPLTLDHCLHHFISSESVRDVVCDNCTKIEAKGTLNGEKVEHQRTTFVKQLKLGKLPQCLCIHLQRLSWSSHGTPLKRHEHVQFNEFLMMDIYKYHLLGHKPSQHNPKLNKNPGPTLELQDGPGAPTPVLNQPGAPKTQIFMNGACSPSLLPTLSAPMPFPLPVVPDYSSSTYLFRLMAVVVHHGDMHSGHFVTYRRSPPSARNPLSTSNQWLWVSDDTVRKASLQEVLSSSAYLLFYERVLSRMQHQSQECKSEE

SEQ ID NO: 94867 - protein, 146 aa, Homo sapiens
  Payload ID: 18924
  Gene Name: ubiquitin specific peptidase 30
  ENSP ID: ENSP00000438829
MLSSRAEAAMTAADRAIQRFLRTGAAVRYKVMKNWGVIGGIAAALAAGIYVIWGPITERKKRRKALSCQEVTDDEVLDASCLLDVLRMYRWQISSFEEQDAHELFHVITSSLEDERDRQPRVTHLFDVHSLEQQSEITPKQITCRT

SEQ ID NO: 94868 - protein, 95 aa, Homo sapiens
  Payload ID: 18924
  Gene Name: ubiquitin specific peptidase 30
  ENSP ID: ENSP00000440837
MRYKVMKNWGVIGGIAAALAAGIYVIWGPITERKKRRKGLVPGLVNLGNTCFMNSLLQGLSACPAFIRWLEEFTSQYSRDQKEPPSHQYLSLTLL

SEQ ID NO: 94869 - protein, 177 aa, Homo sapiens
  Payload ID: 18924
  Gene Name: ubiquitin specific peptidase 30
  ENSP ID: ENSP00000443678
MKNWGVIGGIAAALAAGIYVIWGPITERKKRRKGLVPGLVNLGNTCFMNSLLQGLSACPAFIRWLEEFTSQYSRDQKEPPSHQYLSLTLLHLLKALSCQEVTDDEVLDASCLLDVLRMYRWQISSFEEQDAHELFHVITSSLEDERDRQPRVTHLFDVHSLEQQSEITPKQITCRTR

SEQ ID NO: 94870 - protein, 35 aa, Homo sapiens
  Payload ID: 18924
  Gene Name: ubiquitin specific peptidase 30
  ENSP ID: ENSP00000473942
MLSSRAEAAMTAADRAIQRFLRTGAAVSLVLPRSY

SEQ ID NO: 94871 - protein, 91 aa, Homo sapiens
  Payload ID: 18924
  Gene Name: ubiquitin specific peptidase 30
  ENSP ID: ENSP00000474166
PDYSSSTYLFRLMAVVVHHGDMHSGHFVTYRRSPPSARNPLSTSNQWLWVSDDTVRKASLQEVLSSSAYLLFYERVLSRMQHQSQECKSEE

SEQ ID NO: 94872 - protein, 1352 aa, Homo sapiens
  Payload ID: 18925
  Gene Name: ubiquitin specific peptidase 31
  Uniprot ID: Q70CQ4
  ENSP ID: ENSP00000219689
MSKVTAPGSGPPAAASGKEKRSFSKRLFRSGRAGGGGAGGPGASGPAAPSSPSSPSSARSVGSFMSRVLKTLSTLSHLSSEGAAPDRGGLRSCFPPGPAAAPTPPPCPPPPASPAPPACAAEPVPGVAGLRNHGNTCFMNATLQCLSNTELFAEYLALGQYRAGRPEPSPDPEQPAGRGAQGQGEVTEQLAHLVRALWTLEYTPQHSRDFKTIVSKNALQYRGNSQHDAQEFLLWLLDRVHEDLNHSVKQSGQPPLKPPSETDMMPEGPSFPVCSTFVQELFQAQYRSSLTCPHCQKQSNTFDPFLCISLPIPLPHTRPLYVTVVYQGKCSHCMRIGVAVPLSGTVARLREAVSMETKIPTDQIVLTEMYYDGFHRSFCDTDDLETVHESDCIFAFETPEIFRPEGILSQRGIHLNNNLNHLKFGLDYHRLSSPTQTAAKQGKMDSPTSRAGSDKIVLLVCNRACTGQQGKRFGLPFVLHLEKTIAWDLLQKEILEKMKYFLRPTVCIQVCPFSLRVVSVVGITYLLPQEEQPLCHPIVERALKSCGPGGTAHVKLVVEWDKETRDFLFVNTEDEYIPDAESVRLQRERHHQPQTCTLSQCFQLYTKEERLAPDDAWRCPHCKQLQQGSITLSLWTLPDVLIIHLKRFRQEGDRRMKLQNMVKFPLTGLDMTPHVVKRSQSSWSLPSHWSPWRRPYGLGRDPEDYIYDLYAVCNHHGTMQGGHYTAYCKNSVDGLWYCFDDSDVQQLSEDEVCTQTAYILFYQRRTAIPSWSANSSVAGSTSSSLCEHWVSRLPGSKPASVTSAASSRRTSLASLSESVEMTGERSEDDGGFSTRPFVRSVQRQSLSSRSSVTSPLAVNENCMRPSWSLSAKLQMRSNSPSRFSGDSPIHSSASTLEKIGEAADDKVSISCFGSLRNLSSSYQEPSDSHSRREHKAVGRAPLAVMEGVFKDESDTRRLNSSVVDTQSKHSAQGDRLPPLSGPFDNNNQIAYVDQSDSVDSSPVKEVKAPSHPGSLAKKPESTTKRSPSSKGTSEPEKSLRKGRPALASQESSLSSTSPSSPLPVKVSLKPSRSRSKADSSSRGSGRHSSPAPAQPKKESSPKSQDSVSSPSPQKQKSASALTYTASSTSAKKASGPATRSPFPPGKSRTSDHSLSREGSRQSLGSDRASATSTSKPNSPRVSQARAGEGRGAGKHVRSSSMASLRSPSTSIKSGLKRDSKSEDKGLSFFKSALRQKETRRSTDLGKTALLSKKAGGSSVKSVCKNTGDDEAERGHQPPASQQPNANTTGKEQLVTKDPASAKHSLLSARKSKSSQLDSGVPSSPGGRQSAEKSSKKLSSSMQTSARPSQKPQ

SEQ ID NO: 94873 - protein, 645 aa, Homo sapiens
  Payload ID: 18925
  Gene Name: ubiquitin specific peptidase 31
  ENSP ID: ENSP00000461621
MRQEVCLTSFHLNWGYSDRHDMTQGLGIDADLGVRTSTPPSSARNTFMRVCVAQGWPRDPSLTSMPVFFSAGSTSSSLCEHWVSRLPGSKPASVTSAASSRRTSLASLSESVEMTGERSEDDGGFSTRPFVRSVQRQSLSSRSSVTSPLAVNENCMRPSWSLSAKLQMRSNSPSRFSGDSPIHSSASTLEKIGEAADDKVSISCFGSLRNLSSSYQEPSDSHSRREHKAVGRAPLAVMEGVFKDESDTRRLNSSVVDTQSKHSAQGDRLPPLSGPFDNNNQIAYVDQSDSVDSSPVKEVKAPSHPGSLAKKPESTTKRSPSSKGTSEPEKSLRKGRPALASQESSLSSTSPSSPLPVKVSLKPSRSRSKADSSSRGSGRHSSPAPAQPKKESSPKSQDSVSSPSPQKQKSASALTYTASSTSAKKASGPATRSPFPPGKSRTSDHSLSREGSRQSLGSDRASATSTSKPNSPRVSQARAGEGRGAGKHVRSSSMASLRSPSTSIKSGLKRDSKSEDKGLSFFKSALRQKETRRSTDLGKTALLSKKAGGSSVKSVCKNTGDDEAERGHQPPASQQPNANTTGKEQLVTKDPASAKHSLLSARKSKSSQLDSGVPSSPGGRQSAEKSSKKLSSSMQTSARPSQKPQ

SEQ ID NO: 94874 - protein, 266 aa, Homo sapiens
  Payload ID: 18925
  Gene Name: ubiquitin specific peptidase 31
  ENSP ID: ENSP00000481339
  MOD_RES (1)..(1): Any amino acid
XQEEQPLCHPIVERALKSCGPGGTAHVKLVVEWDKETRDFLFVNTEDEYIPDAESVRLQRERHHQPQTCTLSQCFQLYTKEERLAPDDAWRCPHCKQLQQGSITLSLWTLPDVLIIHLKRFRQEGDRRMKLQNMVKFPLTGLDMTPHVVKRSQSSWSLPSHWSPWRRPYGLGRDPEDYIYDLYAVCNHHGTMQGGHYTGLQCERLRVCAGESFRRVCLWQGDLTLEPHFPSGRQCANCEGSFHPLDLCPRANKRTFFLLFLSWVVQ

SEQ ID NO: 94875 - protein, 1604 aa, Homo sapiens
  Payload ID: 18926
  Gene Name: ubiquitin specific peptidase 32
  Uniprot ID: Q8NFA0
  ENSP ID: ENSP00000300896
MGAKESRIGFLSYEEALRRVTDVELKRLKDAFKRTCGLSYYMGQHCFIREVLGDGVPPKVAEVIYCSFGGTSKGLHFNNLIVGLVLLTRGKDEEKAKYIFSLFSSESGNYVIREEMERMLHVVDGKVPDTLRKCFSEGEKVNYEKFRNWLFLNKDAFTFSRWLLSGGVYVTLTDDSDTPTFYQTLAGVTHLEESDIIDLEKRYWLLKAQSRTGRFDLETFGPLVSPPIRPSLSEGLFNAFDENRDNHIDFKEISCGLSACCRGPLAERQKFCFKVFDVDRDGVLSRVELRDMVVALLEVWKDNRTDDIPELHMDLSDIVEGILNAHDTTKMGHLTLEDYQIWSVKNVLANEFLNLLFQVCHIVLGLRPATPEEEGQIIRGWLERESRYGLQAGHNWFIISMQWWQQWKEYVKYDANPVVIEPSSVLNGGKYSFGTAAHPMEQVEDRIGSSLSYVNTTEEKFSDNISTASEASETAGSGFLYSATPGADVCFARQHNTSDNNNQCLLGANGNILLHLNPQKPGAIDNQPLVTQEPVKATSLTLEGGRLKRTPQLIHGRDYEMVPEPVWRALYHWYGANLALPRPVIKNSKTDIPELELFPRYLLFLRQQPATRTQQSNIWVNMGNVPSPNAPLKRVLAYTGCFSRMQTIKEIHEYLSQRLRIKEEDMRLWLYNSENYLTLLDDEDHKLEYLKIQDEQHLVIEVRNKDMSWPEEMSFIANSSKIDRHKVPTEKGATGLSNLGNTCFMNSSIQCVSNTQPLTQYFISGRHLYELNRTNPIGMKGHMAKCYGDLVQELWSGTQKNVAPLKLRWTIAKYAPRFNGFQQQDSQELLAFLLDGLHEDLNRVHEKPYVELKDSDGRPDWEVAAEAWDNHLRRNRSIVVDLFHGQLRSQVKCKTCGHISVRFDPFNFLSLPLPMDSYMHLEITVIKLDGTTPVRYGLRLNMDEKYTGLKKQLSDLCGLNSEQILLAEVHGSNIKNFPQDNQKVRLSVSGFLCAFEIPVPVSPISASSPTQTDFSSSPSTNEMFTLTTNGDLPRPIFIPNGMPNTVVPCGTEKNFTNGMVNGHMPSLPDSPFTGYIIAVHRKMMRTELYFLSSQKNRPSLFGMPLIVPCTVHTRKKDLYDAVWIQVSRLASPLPPQEASNHAQDCDDSMGYQYPFTLRVVQKDGNSCAWCPWYRFCRGCKIDCGEDRAFIGNAYIAVDWDPTALHLRYQTSQERVVDEHESVEQSRRAQAEPINLDSCLRAFTSEEELGENEMYYCSKCKTHCLATKKLDLWRLPPILIIHLKRFQFVNGRWIKSQKIVKFPRESFDPSAFLVPRDPALCQHKPLTPQGDELSEPRILAREVKKVDAQSSAGEEDVLLSKSPSSLSANIISSPKGSPSSSRKSGTSCPSSKNSSPNSSPRTLGRSKGRLRLPQIGSKNKLSSSKENLDASKENGAGQICELADALSRGHVLGGSQPELVTPQDHEVALANGFLYEHEACGNGYSNGQLGNHSEEDSTDDQREDTRIKPIYNLYAISCHSGILGGGHYVTYAKNPNCKWYCYNDSSCKELHPDEIDTDSAYILFYEQQGIDYAQFLPKTDGKKMADTSSMDEDFESDYKKYCVLQ

SEQ ID NO: 94876 - protein, 390 aa, Homo sapiens
  Payload ID: 18926
  Gene Name: ubiquitin specific peptidase 32
  Uniprot ID: Q8NFA0
  ENSP ID: ENSP00000376727
MGAKESRIGFLSYEEALRRVTDVELKRLKDAFKRTCGLSYYMGQHCFIREVLGDGVPPKVAEVIYCSFGGTSKGLHFNNLIVGLVLLTRGKDEEKAKYIFSLFSSESGNYVIREEMERMLHVVDGKVPDTLRKCFSEGEKVNYEKFRNWLFLNKDAFTFSRWLLSGGVYVTLTDDSDTPTFYQTLAGVTHLEESDIIDLEKRYWLLKAQSRTGRFDLETFGPLVSPPIRPSLSEGLFNAFDENRDNHIDFKEISCGLSACCRGPLAERQKFCFKVFDVDRDGVLSRVELRDMVVALLEVWKDNRTDDIPELHMDLSDIVEGILNAHDTTKMGHLTLEDYQIWSVKNVLANEFLNLLFQVCHIVLGLRPATPEEEGQIIRTLETDQIYTRN

SEQ ID NO: 94877 - protein, 246 aa, Homo sapiens
  Payload ID: 18926
  Gene Name: ubiquitin specific peptidase 32
  ENSP ID: ENSP00000464762
EASETAGSGFLYSATPGADVCFARQHNTSDNNNQCLLGANGNILLHLNPQKPGAIDNQPLVTQEPVKATSLTLEGGRLKRTPQLIHGRDYEMVPEPVWRALYHWYGANLALPRPVIKNSKTDIPELELFPRYLLFLRQQPATRTQQSNIWVNMGMMSLRMFPQHLPRGNVPSPNAPLKRVLAYTGCFSRMQTIKEIHEYLSQRLRIKEEDMRLWLYNSENYLTLLDDEDHKLEYLKIQDEQHLVIE

SEQ ID NO: 94878 - protein, 133 aa, Homo sapiens
  Payload ID: 18926
  Gene Name: ubiquitin specific peptidase 32
  ENSP ID: ENSP00000465659
MGAKESRIGFLSYEEALRRVTDVELKRLKDAFKRTCGLSYYMGQHCFIREVLGDGVPPKVAEVCHIVLGLRPATPEEEGQIIRGWLERESRYGLQAGHNWFIISMQWWQQWKEYVKYDANPVVIEPSSVLNGG

SEQ ID NO: 94879 - protein, 847 aa, Homo sapiens
  Payload ID: 18926
  Gene Name: ubiquitin specific peptidase 32
  ENSP ID: ENSP00000465844
MRYVRRCVPLPGAPARVTDVELKRLKDAFKRTCGLSYYMGQHCFIREVLGDGVPPKVAEVIYCSFGGTSKGLHFNNLIVGLVLLTRGKDEEKAKYIFSLFSSESGNYVIREEMERMLHVVDGKVPDTLRKCFSEGEKVNYEKFRNWLFLNKDAFTFSRWLLSGGVYVTLTDDSDTPTFYQTLAGVTHLEESDIIDLEKRYWLLKAQSRTGRFDLETFGPLVSPPIRPSLSEGLFNAFDENRDNHIDFKEISCGLSACCRGPLAERQKFCFKVFDVDRDGVLSRVELRDMVVALLEVWKDNRTDDIPELHMDLSDIVEGILNAHDTTKMGHLTLEDYQIWSVKNVLANEFLNLLFQVCHIVLGLRPATPEEEGQIIRGWLERESRYGLQAGHNWFIISMQWWQQWKEYVKYDANPVVIEPSSVLNGGKYSFGTAAHPMEQVEDRIGSSLSYVNTTEEKFSDNISTASEASETAGSGFLYSATPGADVCFARQHNTSDNNNQCLLGANGNILLHLNPQKPGAIDNQPLVTQEPVKATSLTLEGGRLKRTPQLIHGRDYEMVPEPVWRALYHWYGANLALPRPVIKNSKTDIPELELFPRYLLFLRQQPATRTQQSNIWVNMGNVPSPNAPLKRVLAYTGCFSRMQTIKEIHEYLSQRLRIKEEDMRLWLYNSENYLTLLDDEDHKLEYLKIQDEQHLVIEVRNKDMSWPEEMSFIANSSKIDRHKVPTEKGATGLSNLGNTCFMNSSIQCVSNTQPLTQYFISGRHLYELNRTNPIGMKGHMAKCYGDLVQELWSGTQKNVAPLKLRWTIAKYAPRFNGFQQQDSQELLAFLLDGLHEDLNRVHEKPYV

SEQ ID NO: 94880 - protein, 87 aa, Homo sapiens
  Payload ID: 18926
  Gene Name: ubiquitin specific peptidase 32
  ENSP ID: ENSP00000465922
DANPVVIEPSSVLNGGKYSFGTAAHPMEQVEDRIGSSLSYVNTTEEKFSDNISTASEASETAGSGYIINTRRRTIKTNSTADSWKRL

SEQ ID NO: 94881 - protein, 174 aa, Homo sapiens
  Payload ID: 18926
  Gene Name: ubiquitin specific peptidase 32
  ENSP ID: ENSP00000466740
  MOD_RES (1)..(1): Any amino acid
XTLGRSKGRLRLPQIGSKNKLSSSKENLDASKENGAGQICELADALSRGHVLGGSQPELVTPQDHEVALANGFLYEHEACGNGYSNGQLGNHSEEDSTDDQREDTRIKPIYNLYAISELHPDEIDTDSAYILFYEQQGIDYAQFLPKTDGKKMADTSSMDEDFESDYKKYCVLQ

SEQ ID NO: 94882 - protein, 153 aa, Homo sapiens
  Payload ID: 18926
  Gene Name: ubiquitin specific peptidase 32
  ENSP ID: ENSP00000467098
MCGVERRLWQSAQQARRGWRPFSQEYCQMLILTPPVTDVELKRLKDAFKRTCGLSYYMGQHCFIREVLGDGVPPKVAEVIYCSFGGTSKGLHFNNLIVGLVLLTRGKDEEKAKYIFSLFSSESGNYVIREEMERMLHVVDGKVPDTLRKCFSE

SEQ ID NO: 94883 - protein, 87 aa, Homo sapiens
  Payload ID: 18926
  Gene Name: ubiquitin specific peptidase 32
  ENSP ID: ENSP00000467435
  MOD_RES (1)..(1): Any amino acid
XRRLWQSAQQARRGWRPFSQEYCQMLILTPPGIPSPGPSFVSSGPGPSCPHSVWPCSSPAFATVRWDRRRPGPPLPPSGHLGHRRGA

SEQ ID NO: 94884 - protein, 1274 aa, Homo sapiens
  Payload ID: 18926
  Gene Name: ubiquitin specific peptidase 32
  ENSP ID: ENSP00000467885
MGHLTLEDYQIWSVKNVLANEFLNLLFQVCHIVLGLRPATPEEEGQIIRGWLERESRYGLQAGHNWFIISMQWWQQWKEYVKYDANPVVIEPSSVLNGGKYSFGTAAHPMEQVEDRIGSSLSYVNTTEEKFSDNISTASEASETAGSGFLYSATPGADVCFARQHNTSDNNNQCLLGANGNILLHLNPQKPGAIDNQPLVTQEPVKATSLTLEGGRLKRTPQLIHGRDYEMVPEPVWRALYHWYGANLALPRPVIKNSKTDIPELELFPRYLLFLRQQPATRTQQSNIWVNMGNVPSPNAPLKRVLAYTGCFSRMQTIKEIHEYLSQRLRIKEEDMRLWLYNSENYLTLLDDEDHKLEYLKIQDEQHLVIEVRNKDMSWPEEMSFIANSSKIDRHKVPTEKGATGLSNLGNTCFMNSSIQCVSNTQPLTQYFISGRHLYELNRTNPIGMKGHMAKCYGDLVQELWSGTQKNVAPLKLRWTIAKYAPRFNGFQQQDSQELLAFLLDGLHEDLNRVHEKPYVELKDSDGRPDWEVAAEAWDNHLRRNRSIVVDLFHGQLRSQVKCKTCGHISVRFDPFNFLSLPLPMDSYMHLEITVIKLDGTTPVRYGLRLNMDEKYTGLKKQLSDLCGLNSEQILLAEVHGSNIKNFPQDNQKVRLSVSGFLCAFEIPVPVSPISASSPTQTDFSSSPSTNEMFTLTTNGDLPRPIFIPNGMPNTVVPCGTEKNFTNGMVNGHMPSLPDSPFTGYIIAVHRKMMRTELYFLSSQKNRPSLFGMPLIVPCTVHTRKKDLYDAVWIQVSRLASPLPPQEASNHAQDCDDSMGYQYPFTLRVVQKDGNSCAWCPWYRFCRGCKIDCGEDRAFIGNAYIAVDWDPTALHLRYQTSQERVVDEHESVEQSRRAQAEPINLDSCLRAFTSEEELGENEMYYCSKCKTHCLATKKLDLWRLPPILIIHLKRFQFVNGRWIKSQKIVKFPRESFDPSAFLVPRDPALCQHKPLTPQGDELSEPRILAREVKKVDAQSSAGEEDVLLSKSPSSLSANIISSPKGSPSSSRKSGTSCPSSKNSSPNSSPRTLGRSKGRLRLPQIGSKNKLSSSKENLDASKENGAGQICELADALSRGHVLGGSQPELVTPQDHEVALANGFLYEHEACGNGYSNGQLGNHSEEDSTDDQREDTRIKPIYNLYAISCHSGILGGGHYVTYAKNPNCKWYCYNDSSCKELHPDEIDTDSAYILFYEQQGIDYAQFLPKTDGKKMADTSSMDEDFESDYKKYCVLQ

SEQ ID NO: 94885 - protein, 942 aa, Homo sapiens
  Payload ID: 18927
  Gene Name: ubiquitin specific peptidase 33
  Uniprot ID: Q8TEY7
  ENSP ID: ENSP00000350009
MTGSNSHITILTLKVLPHFESLGKQEKIPNKMSAFRNHCPHLDSVGEITKEDLIQKSLGTCQDCKVQGPNLWACLENRCSYVGCGESQVDHSTIHSQETKHYLTVNLTTLRVWCYACSKEVFLDRKLGTQPSLPHVRQPHQIQENSVQDFKIPSNTTLKTPLVAVFDDLDIEADEEDELRARGLTGLKNIGNTCYMNAALQALSNCPPLTQFFLDCGGLARTDKKPAICKSYLKLMTELWHKSRPGSVVPTTLFQGIKTVNPTFRGYSQQDAQEFLRCLMDLLHEELKEQVMEVEEDPQTITTEETMEEDKSQSDVDFQSCESCSNSDRAENENGSRCFSEDNNETTMLIQDDENNSEMSKDWQKEKMCNKINKVNSEGEFDKDRDSISETVDLNNQETVKVQIHSRASEYITDVHSNDLSTPQILPSNEGVNPRLSASPPKSGNLWPGLAPPHKKAQSASPKRKKQHKKYRSVISDIFDGTIISSVQCLTCDRVSVTLETFQDLSLPIPGKEDLAKLHSSSHPTSIVKAGSCGEAYAPQGWIAFFMEYVKRFVVSCVPSWFWGPVVTLQDCLAAFFARDELKGDNMYSCEKCKKLRNGVKFCKVQNFPEILCIHLKRFRHELMFSTKISTHVSFPLEGLDLQPFLAKDSPAQIVTYDLLSVICHHGTASSGHYIAYCRNNLNNLWYEFDDQSVTEVSESTVQNAEAYVLFYRKSSEEAQKERRRISNLLNIMEPSLLQFYISRQWLNKFKTFAEPGPISNNDFLCIHGGVPPRKAGYIEDLVLMLPQNIWDNLYSRYGGGPAVNHLYICHTCQIEAEKIEKRRKTELEIFIRLNRAFQKEDSPATFYCISMQWFREWESFVKGKDGDPPGPIDNTKIAVTKCGNVMLRQGADSGQISEETWNFLQSIYGGGPEVILRPPVVHVDPDILQAEEKIEVETRSL

SEQ ID NO: 94886 - protein, 828 aa, Homo sapiens
  Payload ID: 18927
  Gene Name: ubiquitin specific peptidase 33
  Uniprot ID: Q8TEY7
  ENSP ID: ENSP00000359828
MTGSNSHITILTLKVLPHFESLGKQEKIPNKMSAFRNHCPHLDSVGEITKEDLIQKSLGTCQDCKVQGPNLWACLENRCSYVGCGESQVDHSTIHSQETKHYLTVNLTTLRVWCYACSKEVFLDRKLGTQPSLPHVRQPHQIQENSVQDFKIPSNTTLKTPLVAVFDDLDIEADEEDELRARGLTGLKNIGNTCYMNAALQALSNCPPLTQFFLDCGGLARTDKKPAICKSYLKLMTELWHKSRPGSVVPTTLFQGIKTVNPTFRGYSQQDAQEFLRCLMDLLHEELKEQVMEVEEDPQTITTEETMEEDKSQSDVDFQSCESCSNSDRAENENGSRCFSEDNNETTMLIQDDENNSEMSKDWQKEKMCNKINKVNSEGEFDKDRDSISETVDLNNQETVKVQIHSRASEYITDVHSNDLSTPQILPSNEGVNPRLSASPPKSGNLWPGLAPPHKKAQSASPKRKKQHKKYRSVISDIFDGTIISSVQCLTCDRVSVTLETFQDLSLPIPGKEDLAKLHSSSHPTSIVKAGSCGEAYAPQGWIAFFMEYVKSWFWGPVVTLQDCLAAFFARDELKGDNMYSCEKCKKLRNGVKFCKVQNFPEILCIHLKRFRHELMFSTKISTHVSFPLEGLDLQPFLAKDSPAQIVTYDLLSVICHHGTASSGHYIAYCRNNLNNLWYEFDDQSVTEVSESTVQNAEAYVLFYRKSSEEAQKERRRISNLLNIMEPSLLQFYISRQWLNKFKTFAEPGPISNNDFLCIHGGVPPRKAGYIEDLVLMLPQNIWDNLYSRYGGGPAVNHLYICHTCQIEAEKIEKRRKTELEIFIRVKK

SEQ ID NO: 94887 - protein, 942 aa, Homo sapiens; identical to SEQ ID NO: 94885
  Payload ID: 18927
  Gene Name: ubiquitin specific peptidase 33
  Uniprot ID: Q8TEY7
  ENSP ID: ENSP00000359829

SEQ ID NO: 94888 - protein, 911 aa, Homo sapiens
  Payload ID: 18927
  Gene Name: ubiquitin specific peptidase 33
  Uniprot ID: Q8TEY7
  ENSP ID: ENSP00000359830
MSAFRNHCPHLDSVGEITKEDLIQKSLGTCQDCKVQGPNLWACLENRCSYVGCGESQVDHSTIHSQETKHYLTVNLTTLRVWCYACSKEVFLDRKLGTQPSLPHVRQPHQIQENSVQDFKIPSNTTLKTPLVAVFDDLDIEADEEDELRARGLTGLKNIGNTCYMNAALQALSNCPPLTQFFLDCGGLARTDKKPAICKSYLKLMTELWHKSRPGSVVPTTLFQGIKTVNPTFRGYSQQDAQEFLRCLMDLLHEELKEQVMEVEEDPQTITTEETMEEDKSQSDVDFQSCESCSNSDRAENENGSRCFSEDNNETTMLIQDDENNSEMSKDWQKEKMCNKINKVNSEGEFDKDRDSISETVDLNNQETVKVQIHSRASEYITDVHSNDLSTPQILPSNEGVNPRLSASPPKSGNLWPGLAPPHKKAQSASPKRKKQHKKYRSVISDIFDGTIISSVQCLTCDRVSVTLETFQDLSLPIPGKEDLAKLHSSSHPTSIVKAGSCGEAYAPQGWIAFFMEYVKRFVVSCVPSWFWGPVVTLQDCLAAFFARDELKGDNMYSCEKCKKLRNGVKFCKVQNFPEILCIHLKRFRHELMFSTKISTHVSFPLEGLDLQPFLAKDSPAQIVTYDLLSVICHHGTASSGHYIAYCRNNLNNLWYEFDDQSVTEVSESTVQNAEAYVLFYRKSSEEAQKERRRISNLLNIMEPSLLQFYISRQWLNKFKTFAEPGPISNNDFLCIHGGVPPRKAGYIEDLVLMLPQNIWDNLYSRYGGGPAVNHLYICHTCQIEAEKIEKRRKTELEIFIRLNRAFQKEDSPATFYCISMQWFREWESFVKGKDGDPPGPIDNTKIAVTKCGNVMLRQGADSGQISEETWNFLQSIYGGGPEVILRPPVVHVDPDILQAEEKIEVETRSL

SEQ ID NO: 94889 - protein, 456 aa, Homo sapiens
  Payload ID: 18927
  Gene Name: ubiquitin specific peptidase 33
  ENSP ID: ENSP00000432392
  MOD_RES (1)..(1): Any amino acid
XQETVKVQIHSRASEYITDVHSNDLSTPQILPSNEGVNPRLSASPPKSGNLWPGLAPPHKKAQSASPKRKKQHKKYRSVISDIFDGTIISSVQCLTCDRVSVTLETFQDLSLPIPGKEDLAKLHSSSHPTSIVKAGSCGEAYAPQGWIAFFMEYVKRFVVSCVPSWFWGPVVTLQDCLAAFFARDELKGDNMYSCEKCKKLRNGVKFCKVQNFPEILCIHLKRFRHELMFSTKISTHVSFPLEGLDLQPFLAKDSPAQIVTYDLLSVICHHGTASSGHYIAYCRNNLNNLWYEFDDQSVTEVSESTVQNAEAYVLFYRKSSEEAQKERRRISNLLNIMEPSLLQFYISRQWLNKFKTFAEPGPISNNDFLCIHGGVPPRKAGYIEDLVLMLPQNIWDNLYSRYGGGPAVNHLYICHTCQIEAEKIEKRRKTELEIFIRILQVLLTILRLQSLNVVM

SEQ ID NO: 94890 - protein, 139 aa, Homo sapiens
  Payload ID: 18927
  Gene Name: ubiquitin specific peptidase 33
  ENSP ID: ENSP00000432667
  MOD_RES (1)..(1): Any amino acid
XDNMYSCEKCKKLRNGVKFCKVQNFPEILCIHLKRFRHELMFSTKISTHVSFPLEGLDLQPFLAKDSPAQIVTYDLLSVICHHGTASSGHYIAYCRNNLNNLWYEFDDQSVTEVSESTVQNAEAYVLFYRCSSKKSWLY

SEQ ID NO: 94891 - protein, 110 aa, Homo sapiens
  Payload ID: 18927
  Gene Name: ubiquitin specific peptidase 33
  ENSP ID: ENSP00000433283
MTGSNSHITILTLKVLPHFESLGKQEKIPNKMSAFRNHCPHLDSVGEITKEDLIQKSLGTCQDCKVQGPNLWACLENRCSYVGCGESQVDHSTIHSQETKHYLTVNLTTL

SEQ ID NO: 94892 - protein, 202 aa, Homo sapiens
  Payload ID: 18927
  Gene Name: ubiquitin specific peptidase 33
  ENSP ID: ENSP00000434441
MTGSNSHITILTLKVLPHFESLGKQEKIPNKMSAFRNHCPHLDSVGEITKEDLIQKSLGTCQDCKVQGPNLWACLENRCSYVGCGESQVDHSTIHSQETKHYLTVNLTTLRVWCYACSKEVFLDRKLGTQPSLPHVRQPHQIQENSVQDFKIPSNTTLKTPLVAVFDDLDIEADEEDELRARGLTGLKNIGNTCYMNAALQA

SEQ ID NO: 94893 - protein, 72 aa, Homo sapiens
  Payload ID: 18927
  Gene Name: ubiquitin specific peptidase 33
  ENSP ID: ENSP00000436441
MSAFRNHCPHLDSVGEITKEDLIQKSLGTCQDCKVQGPNLWACLENRCSYVGCGESQVDHSTIHSQETKHYL

SEQ ID NO: 94894 - protein, 3546 aa, Homo sapiens
  Payload ID: 18928
  Gene Name: ubiquitin specific peptidase 34
  Uniprot ID: Q70CQ2
  ENSP ID: ENSP00000381577
MCENCADLVEVLNEISDVEGGDGLQLRKEHTLKIFTYINSWTQRQCLCCFKEYKHLEIFNQVVCALINLVIAQVQVLRDQLCKHCTTINIDSTWQDESNQAEEPLNIDRECNEGSTERQKSIEKKSNSTRICNLTEEESSKSSDPFSLWSTDEKEKLLLCVAKIFQIQFPLYTAYKHNTHPTIEDISTQESNILGAFCDMNDVEVPLHLLRYVCLFCGKNGLSLMKDCFEYGTPETLPFLIAHAFITVVSNIRIWLHIPAVMQHIIPFRTYVIRYLCKLSDQELRQSAARNMADLMWSTVKEPLDTTLCFDKESLDLAFKYFMSPTLTMRLAGLSQITNQLHTFNDVCNNESLVSDTETSIAKELADWLISNNVVEHIFGPNLHIEIIKQCQVILNFLAAEGRLSTQHIDCIWAAAQLKHCSRYIHDLFPSLIKNLDPVPLRHLLNLVSALEPSVHTEQTLYLASMLIKALWNNALAAKAQLSKQSSFASLLNTNIPIGNKKEEEELRRTAPSPWSPAASPQSSDNSDTHQSGGSDIEMDEQLINRTKHVQQRLSDTEESMQGSSDETANSGEDGSSGPGSSSGHSDGSSNEVNSSHASQSAGSPGSEVQSEDIADIEALKEEDEDDDHGHNPPKSSCGTDLRNRKLESQAGICLGDSQGMSERNGTSSGTGKDLVFNTESLPSVDNRMRMLDACSHSEDPEHDISGEMNATHIAQGSQESCITRTGDFLGETIGNELFNCRQFIGPQHHHHHHHHHHHHDGHMVDDMLSADDVSCSSSQVSAKSEKNMADFDGEESGCEEELVQINSHAELTSHLQQHLPNLASIYHEHLSQGPVVHKHQFNSNAVTDINLDNVCKKGNTLLWDIVQDEDAVNLSEGLINEAEKLLCSLVCWFTDRQIRMRFIEGCLENLGNNRSVVISLRLLPKLFGTFQQFGSSYDTHWITMWAEKELNMMKLFFDNLVYYIQTVREGRQKHALYSHSAEVQVRLQFLTCVFSTLGSPDHFRLSLEQVDILWHCLVEDSECYDDALHWFLNQVRSKDQHAMGMETYKHLFLEKMPQLKPETISMTGLNLFQHLCNLARLATSAYDGCSNSELCGMDQFWGIALRAQSGDVSRAAIQYINSYYINGKTGLEKEQEFISKCMESLMIASSSLEQESHSSLMVIERGLLMLKTHLEAFRRRFAYHLRQWQIEGTGISSHLKALSDKQSLPLRVVCQPAGLPDKMTIEMYPSDQVADLRAEVTHWYENLQKEQINQQAQLQEFGQSNRKGEFPGGLMGPVRMISSGHELTTDYDEKALHELGFKDMQMVFVSLGAPRRERKGEGVQLPASCLPPPQKDNIPMLLLLQEPHLTTLFDLLEMLASFKPPSGKVAVDDSESLRCEELHLHAENLSRRVWELLMLLPTCPNMLMAFQNISDEQSNDGFNWKELLKIKSAHKLLYALEIIEALGKPNRRIRRESTGSYSDLYPDSDDSSEDQVENSKNSWSCKFVAAGGLQQLLEIFNSGILEPKEQESWTVWQLDCLACLLKLICQFAVDPSDLDLAYHDVFAWSGIAESHRKRTWPGKSRKAAGDHAKGLHIPRLTEVFLVLVQGTSLIQRLMSVAYTYDNLAPRVLKAQSDHRSRHEVSHYSMWLLVSWAHCCSLVKSSLADSDHLQDWLKKLTLLIPETAVRHESCSGLYKLSLSGLDGGDSINRSFLLLAASTLLKFLPDAQALKPIRIDDYEEEPILKPGCKEYFWLLCKLVDNIHIKDASQTTLLDLDALARHLADCIRSREILDHQDGNVEDDGLTGLLRLATSVVKHKPPFKFSREGQEFLRDIFNLLFLLPSLKDRQQPKCKSHSSRAAAYDLLVEMVKGSVENYRLIHNWVMAQHMQSHAPYKWDYWPHEDVRAECRFVGLTNLGATCYLASTIQQLYMIPEARQAVFTAKYSEDMKHKTTLLELQKMFTYLMESECKAYNPRPFCKTYTMDKQPLNTGEQKDMTEFFTDLITKIEEMSPELKNTVKSLFGGVITNNVVSLDCEHVSQTAEEFYTVRCQVADMKNIYESLDEVTIKDTLEGDNMYTCSHCGKKVRAEKRACFKKLPRILSFNTMRYTFNMVTMMKEKVNTHFSFPLRLDMTPYTEDFLMGKSERKEGFKEVSDHSKDSESYEYDLIGVTVHTGTADGGHYYSFIRDIVNPHAYKNNKWYLFNDAEVKPFDSAQLASECFGGEMTTKTYDSVTDKFMDFSFEKTHSAYMLFYKRMEPEEENGREYKFDVSSELLEWIWHDNMQFLQDKNIFEHTYFGFMWQLCSCIPSTLPDPKAVSLMTAKLSTSFVLETFIHSKEKPTMLQWIELLTKQFNNSQAACEWFLDRMADDDWWPMQILIKCPNQIVRQMFQRLCIHVIQRLRPVHAHLYLQPGMEDGSDDMDTSVEDIGGRSCVTRFVRTLLLIMEHGVKPHSKHLTEYFAFLYEFAKMGEEESQFLLSLQAISTMVHFYMGTKGPENPQVEVLSEEEGEEEEEEEDILSLAEEKYRPAALEKMIALVALLVEQSRSERHLTLSQTDMAALTGGKGFPFLFQHIRDGINIRQTCNLIFSLCRYNNRLAEHIVSMLFTSIAKLTPEAANPFFKLLTMLMEFAGGPPGMPPFASYILQRIWEVIEYNPSQCLDWLAVQTPRNKLAHSWVLQNMENWVERFLLAHNYPRVRTSAAYLLVSLIPSNSFRQMFRSTRSLHIPTRDLPLSPDTTVVLHQVYNVLLGLLSRAKLYVDAAVHGTTKLVPYFSFMTYCLISKTEKLMFSTYFMDLWNLFQPKLSEPAIATNHNKQALLSFWYNVCADCPENIRLIVQNPVVTKNIAFNYILADHDDQDVVLFNRGMLPAYYGILRLCCEQSPAFTRQLASHQNIQWAFKNLTPHASQYPGAVEELFNLMQLFIAQRPDMREEELEDIKQFKKTTISCYLRCLDGRSCWTTLISAFRILLESDEDRLLVVFNRGLILMTESFNTLHMMYHEATACHVTGDLVELLSIFLSVLKSTRPYLQRKDVKQALIQWQERIEFAHKLLTLLNSYSPPELRNACIDVLKELVLLSPHDFLHTLVPFLQHNHCTYHHSNIPMSLGPYFPCRENIKLIGGKSNIRPPRPELNMCLLPTMVETSKGKDDVYDRMLLDYFFSYHQFIHLLCRVAINCEKFTETLVKLSVLVAYEGLPLHLALFPKLWTELCQTQSAMSKNCIKLLCEDPVFAEYIKCILMDERTFLNNNIVYTFMTHFLLKVQSQVFSEANCANLISTLITNLISQYQNLQSDFSNRVEISKASASLNGDLRALALLLSVHTPKQLNPALIPTLQELLSKCRTCLQQRNSLQEQEAKERKTKDDEGATPIKRRRVSSDEEHTVDSCISDMKTETREVLTPTSTSDNETRDSSIIDPGTEQDLPSPENSSVKEYRMEVPSSFSEDMSNIRSQHAEEQSNNGRYDDCKEFKDLHCSKDSTLAEEESEFPSTSISAVLSDLADLRSCDGQALPSQDPEVALSLSCGHSRGLFSHMQQHDILDTLCRTIESTIHVVTRISGKGNQAAS

SEQ ID NO: 94895 - protein, 45 aa, Homo sapiens
  Payload ID: 18928
  Gene Name: ubiquitin specific peptidase 34
  ENSP ID: ENSP00000388129
  MOD_RES (1)..(1): Any amino acid
XCENCADLVEVLNEISDVEGGDGLQLRKEHTLKIFTYINSWTQRM

SEQ ID NO: 94896 - protein, 424 aa, Homo sapiens
  Payload ID: 18928
  Gene Name: ubiquitin specific peptidase 34
  ENSP ID: ENSP00000398489
GKSNIRPPRPELNMCLLPTMVETSKFIHLLCRVAINCEKFTETLVKLSVLVAYEGLPLHLALFPKLWTELCQTQSAMSKNCIKLLCEDPVFAEYIKCILMDERTFLNNNIVYTFMTHFLLKVQSQVFSEANCANLISTLITNLISQYQNLQSDFSNRVEISKASASLNGDLRALALLLSVHTPKQLNPALIPTLQELLSKCRTCLQQRNSLQEQEAKERKTKDDEGATPIKRRRVSSDEEHTVDSCISDMKTETREVLTPTSTSDNETRDSSIIDPGTEQDLPSPENSSVKEYRMEVPSSFSEDMSNIRSQHAEEQSNNGRYDDCKEFKDLHCSKDSTLAEEESEFPSTSISAVLSDLADLRSCDGQALPSQDPEVALSLSCGHSRGLFSHMQQHDILDTLCRTIESTIHVVTRISGKGNQAAS

SEQ ID NO: 94897 - protein, 1223 aa, Homo sapiens
  Payload ID: 18928
  Gene Name: ubiquitin specific peptidase 34
  ENSP ID: ENSP00000398960
  MOD_RES (1)..(1): Any amino acid
XEEENGREYKFDVSSELLEWIWHDNMQFLQDKNIFEHTYFGFMWQLCSCIPSTLPDPKAVSLMTAKLSTSFVLETFIHSKEKPTMLQWIELLTKQFNNSQAACEWFLDRMADDDWWPMQILIKCPNQIVRQMFQRLCIHVIQRLRPVHAHLYLQPGMEDGSDDMDTSVEDIGGRSCVTRFVRTLLLIMEHGVKPHSKHLTEYFAFLYEFAKMGEEESQFLLSLQAISTMVHFYMGTKGPENPQVEVLSEEEGEEEEEEEDILSLAEEKYRPAALEKMIALVALLVEQSRSERHLTLSQTDMAALTGGKGFPFLFQHIRDGINIRQTCNLIFSLCRYNNRLAEHIVSMLFTSIAKLTPEAANPFFKLLTMLMEFAGGPPGMPPFASYILQRIWEVIEYNPSQCLDWLAVQTPRNKLAHSWVLQNMENWVERFLLAHNYPRVRTSAAYLLVSLIPSNSFRQMFRSTRSLHIPTRDLPLSPDTTVVLHQVYNVLLGLLSRAKLYVDAAVHGTTKLVPYFSFMTYCLISKTEKLMFSTYFMDLWNLFQPKLSEPAIATNHNKQALLSFWYNVCADCPENIRLIVQNPVVTKNIAFNYILADHDDQDVVLFNRGMLPAYYGILRLCCEQSPAFTRQLASHQNIQWAFKNLTPHASQYPGAVEELFNLMQLFIAQRPDMREEELEDIKQFKKTTISCYLRCLDGRSCWTTLISAFRILLESDEDRLLVVFNRGLILMTESFNTLHMMYHEATACHVTGDLVELLSIFLSVLKSTRPYLQRKDVKQALIQWQERIEFAHKLLTLLNSYSPPELRNACIDVLKELVLLSPHDFLHTLVPFLQHNHCTYHHSNIPSVLVAYEGLPLHLALFPKLWTELCQTQSAMSKNCIKLLCEDPVFAEYIKCILMDERTFLNNNIVYTFMTHFLLKVQSQVFSEANCANLISTLITNLISQYQNLQSDFSNRVEISKASASLNGDLRALALLLSVHTPKQLNPALIPTLQELLSKCRTCLQQRNSLQEQEAKERKTKDDEGATPIKRRRVSSDEEHTVDSCISDMKTETREVLTPTSTSDNETRDSSIIDPGTEQDLPSPENSSVKEYRMEVPSSFSEDMSNIRSQHAEEQSNNGRYDDCKEFKDLHCSKDSTLAEEESEFPSTSISAVLSDLADLRSCDGQALPSQDPEVALSLSCGHSRGLFSHMQQHDILDTLCRTIESTIHVVTRISGKGNQAAS

SEQ ID NO: 94898 - protein, 810 aa, Homo sapiens
  Payload ID: 18928
  Gene Name: ubiquitin specific peptidase 34
  ENSP ID: ENSP00000410559
EEPILKPGCKEYFWLLCKLVDNIHIKDASQTTLLDLDALARHLADCIRSREILDHQDGNVEDDGLTGLLRLATSVVKHKPPFKFSREGQEFLRDIFNLLFLLPSLKDRQQPKCKSHSSRAAAYDLLVEMVKGSVENYRLIHNWVMAQHMQSHAPYKWDYWPHEDVRAECRFVGLTNLGATCYLASTIQQLYMIPEARQAVFTAKYSEDMKHKTTLLELQKMFTYLMESECKAYNPRPFCKTYTMDKQPLNTGEQKDMTEFFTDLITKIEEMSPELKNTVKSLFGGVITNNVVSLDCEHVSQTAEEFYTVRCQVADMKNIYESLDEVTIKDTLEGDNMYTCSHCGKKVRAEKRACFKKLPRILSFNTMRYTFNMVTMMKEKVNTHFSFPLRLDMTPYTEDFLMGKSERKEGFKEVSDHSKDSESYEYDLIGVTVHTGTADGGHYYSFIRDIVNPHAYKNNKWYLFNDAEVKPFDSAQLASECFGGEMTTKTYDSVTDKFMDFSFEKTHSAYMLFYKRMEPEEENGREYKFDVSSELLEWIWHDNMQFLQDKNIFEHTYFGFMWQLCSCIPSTLPDPKAVSLMTAKLSTSFVLETFIHSKEKPTMLQWIELLTKQFNNSQAACEWFLDRMADDDWWPMQILIKCPNQIVRQMFQRLCIHVIQRLRPVHAHLYLQPGMEDGSDDMDTSVEDIGGRSCVTRFVRTLLLIMEHGVKPHSKHLTEYFAFLYEFAKMGEEESQFLLSLQAISTMVHFYMGTKGPENPQVEVLSEEEGEEEEEEEDILSLAEEKYRPAALEKMIALVALLVEQSRSER

SEQ ID NO: 94899 - protein, 1018 aa, Homo sapiens
  Payload ID: 18929
  Gene Name: ubiquitin specific peptidase 35
  Uniprot ID: Q9P2H5
  ENSP ID: ENSP00000431876
MDKILEAVVTSSYPVSVKQGLVRRVLEAARQPLEREQCLALLALGARLYVGGAEELPRRVGCQLLHVAGRHHPDVFAEFFSARRVLRLLQGGAGPPGPRALACVQLGLQLLPEGPAADEVFALLRREVLRTVCERPGPAACAQVARLLARHPRCVPDGPHRLLFCQQLVRCLGRFRCPAEGEEGAVEFLEQAQQVSGLLAQLWRAQPAAILPCLKELFAVISCAEEEPPSSALASVVQHLPLELMDGVVRNLSNDDSVTDSQMLTAISRMIDWVSWPLGKNIDKWIIALLKGLAAVKKFSILIEVSLTKIEKVFSKLLYPIVRGAALSVLKYMLLTFQHSHEAFHLLLPHIPPMVASLVKEDSNSGTSCLEQLAELVHCMVFRFPGFPDLYEPVMEAIKDLHVPNEDRIKQLLGQDAWTSQKSELAGFYPRLMAKSDTGKIGLINLGNTCYVNSILQALFMASDFRHCVLRLTENNSQPLMTKLQWLFGFLEHSQRPAISPENFLSASWTPWFSPGTQQDCSEYLKYLLDRLHEEEKTGTRICQKLKQSSSPSPPEEPPAPSSTSVEKMFGGKIVTRICCLCCLNVSSREEAFTDLSLAFPPPERCRRRRLGSVMRPTEDITARELPPPTSAQGPGRVGPRRQRKHCITEDTPPTSLYIEGLDSKEAGGQSSQEERIEREEEGKEERTEKEEVGEEEESTRGEGEREKEEEVEEEEEKVEKETEKEAEQEKEEDSLGAGTHPDAAIPSGERTCGSEGSRSVLDLVNYFLSPEKLTAENRYYCESCASLQDAEKVVELSQGPCYLILTLLRFSFDLRTMRRRKILDDVSIPLLLRLPLAGGRGQAYDLCSVVVHSGVSSESGHYYCYAREGAARPAASLGTADRPEPENQWYLFNDTRVSFSSFESVSNVTSFFPKDTAYVLFYRQRPREGPEAELGSSRVRTEPTLHKDLMEAISKDNILYLQEQEKEARSRAAYISALPTSPHWGRGFDEDKDEDEGSPGGCNPAGGNGGDFHRLVF

SEQ ID NO: 94900 - protein, 749 aa, Homo sapiens
  Payload ID: 18929
  Gene Name: ubiquitin specific peptidase 35
  Uniprot ID: Q9P2H5
  ENSP ID: ENSP00000434942
MIDWVSWPLGKNIDKWIIALLKGLAAVKKFSILIEVSLTKIEKVFSKLLYPIVRGAALSVLKYMLLTFQHSHEAFHLLLPHIPPMVASLVKEDSNSGTSCLEQLAELVHCMVFRFPGFPDLYEPVMEAIKDLHVPNEDRIKQLLGQDAWTSQKSELAGFYPRLMAKSDTGKIGLINLGNTCYVNSILQALFMASDFRHCVLRLTENNSQPLMTKLQWLFGFLEHSQRPAISPENFLSASWTPWFSPGTQQDCSEYLKYLLDRLHEEEKTGTRICQKLKQSSSPSPPEEPPAPSSTSVEKMFGGKIVTRICCLCCLNVSSREEAFTDLSLAFPPPERCRRRRLGSVMRPTEDITARELPPPTSAQGPGRVGPRRQRKHCITEDTPPTSLYIEGLDSKEAGGQSSQEERIEREEEGKEERTEKEEVGEEEESTRGEGEREKEEEVEEEEEKVEKETEKEAEQEKEEDSLGAGTHPDAAIPSGERTCGSEGSRSVLDLVNYFLSPEKLTAENRYYCESCASLQDAEKVVELSQGPCYLILTLLRFSFDLRTMRRRKILDDVSIPLLLRLPLAGGRGQAYDLCSVVVHSGVSSESGHYYCYAREGAARPAASLGTADRPEPENQWYLFNDTRVSFSSFESVSNVTSFFPKDTAYVLFYRQRPREGPEAELGSSRVRTEPTLHKDLMEAISKDNILYLQEQEKEARSRAAYISALPTSPHWGRGFDEDKDEDEGSPGGCNPAGGNGGDFHRLVF

SEQ ID NO: 94901 - protein, 586 aa, Homo sapiens
  Payload ID: 18929
  Gene Name: ubiquitin specific peptidase 35
  ENSP ID: ENSP00000435468
MAKSDTGKIGLINLGNTCYVNSILQALFMASDFRHCVLRLTENNSQPLMTKLQWLFGFLEHSQRPAISPENFLSASWTPWFSPGTQQDCSEYLKYLLDRLHEEEKTGTRICQKLKQSSSPSPPEEPPAPSSTSVEKMFGGKIVTRICCLCCLNVSSREEAFTDLSLAFPPPERCRRRRLGSVMRPTEDITARELPPPTSAQGPGRVGPRRQRKHCITEDTPPTSLYIEGLDSKEAGGQSSQEERIEREEEGKEERTEKEEVGEEEESTRGEGEREKEEEVEEEEEKVEKETEKEAEQEKEEDSLGAGTHPDAAIPSGERTCGSEGSRSVLDLVNYFLSPEKLTAENRYYCESCASLQDAEKVVELSQGPCYLILTLLRFSFDLRTMRRRKILDDVSIPLLLRLPLAGGRGQAYDLCSVVVHSGVSSESGHYYCYAREGAARPAASLGTADRPEPENQWYLFNDTRVSFSSFESVSNVTSFFPKDTAYVLFYRQRPREGPEAELGSSRVRTEPTLHKDLMEAISKDNILYLQEQEKEARSRAAYISALPTSPHWGRGFDEDKDEDEGSPGGCNPAGGNGGDFHRLVF

SEQ ID NO: 94902 - protein, 298 aa, Homo sapiens
  Payload ID: 18929
  Gene Name: ubiquitin specific peptidase 35
  ENSP ID: ENSP00000436001
MDGVVRNLSNDDSVTDSQMLTAISRMIDWVSWPLGKNIDKWIIALLKGLAAVKKFSILIEVSLTKIEKVFSKLLYPIVRGAALSVLKYMLLTFQHSHEAFHLLLPHIPPMVASLVKEDSNSGTSCLEQLAELVHCMVFRFPGFPDLYEPVMEAIKDLHVPNEDRIKQLLGQDAWTSQKSELAGFYPRLMAKSDTGKIGLINLGNTCYVNSILQALFMASDFRHCVLRLTENNSQPLMTKLQWLFGFLEHSQRPAISPENFLSASWTPWFSPGTQQDCSEYLKYLLDRLHEEEKTGTRI

SEQ ID NO: 94903 - protein, 108 aa, Homo sapiens
  Payload ID: 18929
  Gene Name: ubiquitin specific peptidase 35
  ENSP ID: ENSP00000436253
  MOD_RES (1)..(1): Any amino acid
XAVEFLEQAQQVSGLLAQLWRAQPAAILPCLKELFAVISCAEEEPPSSALASVVQHLPLELMDGVVRNLSNDDSVTDSQMLTAISRFSLSCCTPSSGELPCLCSSTCS

SEQ ID NO: 94904 - protein, 1123 aa, Homo sapiens
  Payload ID: 18930
  Gene Name: ubiquitin specific peptidase 36
  Uniprot ID: Q9P275
  ENSP ID: ENSP00000310590
MPIVDKLKEALKPGRKDSADDGELGKLLASSAKKVLLQKIEFEPASKSFSYQLEALKSKYVLLNPKTEGASRHKSGDDPPARRQGSEHTYESCGDGVPAPQKVLFPTERLSLRWERVFRVGAGLHNLGNTCFLNATIQCLTYTPPLANYLLSKEHARSCHQGSFCMLCVMQNHIVQAFANSGNAIKPVSFIRDLKKIARHFRFGNQEDAHEFLRYTIDAMQKACLNGCAKLDRQTQATTLVHQIFGGYLRSRVKCSVCKSVSDTYDPYLDVALEIRQAANIVRALELFVKADVLSGENAYMCAKCKKKVPASKRFTIHRTSNVLTLSLKRFANFSGGKITKDVGYPEFLNIRPYMSQNNGDPVMYGLYAVLVHSGYSCHAGHYYCYVKASNGQWYQMNDSLVHSSNVKVVLNQQAYVLFYLRIPGSKKSPEGLISRTGSSSLPGRPSVIPDHSKKNIGNGIISSPLTGKRQDSGTMKKPHTTEEIGVPISRNGSTLGLKSQNGCIPPKLPSGSPSPKLSQTPTHMPTILDDPGKKVKKPAPPQHFSPRTAQGLPGTSNSNSSRSGSQRQGSWDSRDVVLSTSPKLLATATANGHGLKGNDESAGLDRRGSSSSSPEHSASSDSTKAPQTPRSGAAHLCDSQETNCSTAGHSKTPPSGADSKTVKLKSPVLSNTTTEPASTMSPPPAKKLALSAKKASTLWRATGNDLRPPPPSPSSDLTHPMKTSHPVVASTWPVHRARAVSPAPQSSSRLQPPFSPHPTLLSSTPKPPGTSEPRSCSSISTALPQVNEDLVSLPHQLPEASEPPQSPSEKRKKTFVGEPQRLGSETRLPQHIREATAAPHGKRKRKKKKRPEDTAASALQEGQTQRQPGSPMYRREGQAQLPAVRRQEDGTQPQVNGQQVGCVTDGHHASSRKRRRKGAEGLGEEGGLHQDPLRHSCSPMGDGDPEAMEESPRKKKKKKRKQETQRAVEEDGHLKCPRSAKPQDAVVPESSSCAPSANGWCPGDRMGLSQAPPVSWNGERESDVVQELLKYSSDKAYGRKVLTWDGKMSAVSQDAIEDSRQARTETVVDDWDEEFDRGKEKKIKKFKREKRRNFNAFQKLQTRRNFWSVTHPAKAASLSYRR

SEQ ID NO: 94905 - protein, 548 aa, Homo sapiens
  Payload ID: 18930
  Gene Name: ubiquitin specific peptidase 36
  ENSP ID: ENSP00000401119
MPIVDKLKEALKPGRKDSADDGELGKLLASSAKKVLLQKIEFEPASKSFSYQLEALKSKYVLLNPKTEGASRHKSGDDPPARRQGSEHTYESCGDGVPAPQKVLFPTERLSLRWERVFRVGAGLHNLGNTCFLNATIQCLTYTPPLANYLLSKEHARSCHQGSFCMLCVMQNHIVQAFANSGNAIKPVSFIRDLKKIARHFRFGNQEDAHEFLRYTIDAMQKACLNGCAKLDRQTQATTLVHQIFGGYLRSRVKCSVCKSVSDTYDPYLDVALEIRQAANIVRALELFVKADVLSGENAYMCAKCKKKVPASKRFTIHRTSNVLTLSLKRFANFSGGKITKDVGYPEFLNIRPYMSQNNGDPVMYGLYAVLVHSGYSCHAGHYYCYVKASNGQWYQMNDSLVHSSNVKVVLNQQAYVLFYLRIPGSKKSPEGLISRTGSSSLPGRPSVIPDHSKKNIGNGIISSPLTGKRQDSGTMKKPHTTEEIGVPISRNGSTLGLKSQNGCIPPKLPSGSPSPKLSQTPTHMPTILDDPGKKVKKPAPPLPTGMG

SEQ ID NO: 94906 - protein, 1123 aa, Homo sapiens; identical to SEQ ID NO: 94904
  Payload ID: 18930
  Gene Name: ubiquitin specific peptidase 36
  Uniprot ID: Q9P275
  ENSP ID: ENSP00000441214

SEQ ID NO: 94907 - protein, 101 aa, Homo sapiens
  Payload ID: 18930
  Gene Name: ubiquitin specific peptidase 36
  ENSP ID: ENSP00000464746
  MOD_RES (1)..(1): Any amino acid
XDVVQELLKYSSDKAYGRKVLTWDGKMSAVSQDAIEDSRQARTETVVDDWDEEFDRGKEKKIKKFKREKRRNFNAFQKLQTRRNFWSVTHPAKAASLSYRR

SEQ ID NO: 94908 - protein, 24 aa, Homo sapiens
  Payload ID: 18930
  Gene Name: ubiquitin specific peptidase 36
  ENSP ID: ENSP00000464886
  MOD_RES (1)..(1): Any amino acid
XLQTRRNFWSVTHPAKAASLSYRR

SEQ ID NO: 94909 - protein, 52 aa, Homo sapiens
  Payload ID: 18930
  Gene Name: ubiquitin specific peptidase 36
  ENSP ID: ENSP00000465183
MPIVDKLKEALKPGRKDSADDGELGKLLASSAKKVLLQKIEFEPASKSFSYQ

SEQ ID NO: 94910 - protein, 71 aa, Homo sapiens
  Payload ID: 18930
  Gene Name: ubiquitin specific peptidase 36
  ENSP ID: ENSP00000465679
  MOD_RES (1)..(1): Any amino acid
XQDAIEDSRQARTETVVDDWDEEFDRGKEKKIKKFKREKRRNFNAFQKLQTRRNFWSVTHPAKAASLSYRR

SEQ ID NO: 94911 - protein, 69 aa, Homo sapiens
  Payload ID: 18930
  Gene Name: ubiquitin specific peptidase 36
  ENSP ID: ENSP00000465698
  MOD_RES (1)..(1): Any amino acid
XAIEDSRQARTETVVDDWDEEFDRGKEKKIKKFKREKRRNFNAFQKLQTRRNFWSVTHPAKAASLSYRR

SEQ ID NO: 94912 - protein, 234 aa, Homo sapiens
  Payload ID: 18930
  Gene Name: ubiquitin specific peptidase 36
  ENSP ID: ENSP00000466187
MPIVDKLKEALKPGRKDSADDGELGKLLASSAKKVLLQKIEFEPASKSFSYQLEALKSKYVLLNPKTEGASRHKSGDDPPARRQGSEHTYESCGDGVPAPQKVLFPTERLSLRWERVFRVGAGLHNLGNTCFLNATIQCLTYTPPLANYLLSKEHARSCHQGSFCMLCVMQNHIVQAFANSGNAIKPVSFIRDLKKIARHFRFGNQEDAHEFLRYTIDAMQKACLNGCAKIKIE

SEQ ID NO: 94913 - protein, 80 aa, Homo sapiens
  Payload ID: 18930
  Gene Name: ubiquitin specific peptidase 36
  ENSP ID: ENSP00000466212
MPIVDKLKEALKPGRKDSADDGELGKLLASSAKKVLLQKIEFEPASKSFSYQLEALKSKYVLLNPKTEGASRHKSGDDPP

SEQ ID NO: 94914 - protein, 259 aa, Homo sapiens
  Payload ID: 18930
  Gene Name: ubiquitin specific peptidase 36
  ENSP ID: ENSP00000466567
MILYWSPKYFRAPGVWEVPWLDRQTQATTLVHQIFGGYLRSRVKCSVCKSVSDTYDPYLDVALEIRQAANIVRALELFVKADVLSGENAYMCAKCKKKVPASKRFTIHRTSNVLTLSLKRFANFSGGKITKDVGYPEFLNIRPYMSQNNGDPVMYGLYAVLVHSGYSCHAGHYYCYVKASNGQWYQMNDSLVHSSNVKVVLNQQAYVLFYLRIPGSKKSPEGLISRTGSSSLPGRPSVIPDHSKKNIGNGIISSPLTGK

SEQ ID NO: 94915 - protein, 1123 aa, Homo sapiens; identical to SEQ ID NO: 94904
  Payload ID: 18930
  Gene Name: ubiquitin specific peptidase 36
  Uniprot ID: Q9P275
  ENSP ID: ENSP00000467280

SEQ ID NO: 94916 - protein, 179 aa, Homo sapiens
  Payload ID: 18930
  Gene Name: ubiquitin specific peptidase 36
  ENSP ID: ENSP00000467520
MPIVDKLKEALKPGRKDSADDGELGKLLASSAKKVLLQKIEFEPASKSFSYQLEALKSKYVLLNPKTEGASRHKSGDDPPARRQGSEHTYESCGDGVPAPQKVLFPTERLSLRWERVFRVGAGLHNLGNTCFLNATIQCLTYTPPLANYLLSKEHARSCHQGSFCMLCVMQNHIVQAFA

SEQ ID NO: 94917 - protein, 285 aa, Homo sapiens
  Payload ID: 18930
  Gene Name: ubiquitin specific peptidase 36
  ENSP ID: ENSP00000467682
MPIVDKLKEALKPGRKDSADDGELGKLLASSAKKVLLQKIEFEPASKSFSYQLEALKSKYVLLNPKTEGASRHKSGDDPPARRQGSEHTYESCGDGVPAPQKVLFPTERLSLRWERVFRVGAGLHNLGNTCFLNATIQCLTYTPPLANYLLSKEHARSCHQGSFCMLCVMQNHIVQAFANSGNAIKPVSFIRDLKKIARHFRFGNQEDAHEFLRYTIDAMQKACLNGCAKCVLPHPPSQGFGHLFYMVAAEHSYGNSQPGTFLPRLPLGRRGRICLWVLKLLEPK

SEQ ID NO: 94918 - protein, 159 aa, Homo sapiens
  Payload ID: 18930
  Gene Name: ubiquitin specific peptidase 36
  ENSP ID: ENSP00000467951
MPIVDKLKEALKPGRKDSADDGELGKLLASSAKKVLLQKIEFEPASKSFSYQLEALKSKYVLLNPKTEGASRHKSGDDPPARRQGSEHTYESCGDGVPAPQKVLFPTERLSLRWERVFRVGAGLHNLGNTCFLNATIQCLTYTPPLANYLLSKEHARSC

SEQ ID NO: 94919 - protein, 66 aa, Homo sapiens
  Payload ID: 18930
  Gene Name: ubiquitin specific peptidase 36
  ENSP ID: ENSP00000468194
MPIVDKLKEALKPGRKDSADDGELGKLLASSAKKVLLQKIEFEPASKSFSYQLEALKSKYVLLNPK

SEQ ID NO: 94920 - protein, 11 aa, Homo sapiens
  Payload ID: 18930
  Gene Name: ubiquitin specific peptidase 36
  ENSP ID: ENSP00000468356
PAKAASLSYRR

SEQ ID NO: 94921 - protein, 961 aa, Homo sapiens
  Payload ID: 18930
  Gene Name: ubiquitin specific peptidase 36
  ENSP ID: ENSP00000468549
MPIVDKLKEALKPGRKDSADDGELGKLLASSAKKVLLQKIEFEPASKSFSYQLEALKSKYVLLNPKTEGASRHKSGDDPPARRQGSEHTYESCGDGVPAPQKVLFPTERLSLRWERVFRVGAGLHNLGNTCFLNATIQCLTYTPPLANYLLSKEHARSCHQGSFCMLCVMQNHIVQAFANSGNAIKPVSFIRDLKKIARHFRFGNQEDAHEFLRYTIDAMQKACLNGCAKLDRQTQATTLVHQIFGGYLRSRVKCSVCKSVSDTYDPYLDVALEIRQAANIVRALELFVKADVLSGENAYMCAKCKKKVPASKRFTIHRTSNVLTLSLKRFANFSGGKITKDVGYPEFLNIRPYMSQNNGDPVMYGLYAVLVHSGYSCHAGHYYCYVKASNGQWYQMNDSLVHSSNVKVVLNQQAYVLFYLRIPGSKKSPEGLISRTGSSSLPGRPSVIPDHSKKNIGNGIISSPLTGKRQDSGTMKKPHTTEEIGVPISRNGSTLGLKSQNGCIPPKLPSGSPSPKLSQTPTHMPTILDDPGKKVKKPAPPQHFSPRTAQGLPGTSNSNSSRSGSQRQGSWDSRDVVLSTSPKLLATATANGHGLKGNDESAGLDRRGSSSSSPEHSASSDSTKAPQTPRSGAAHLCDSQETNCSTAGHSKTPPSGADSKTVKLKSPVLSNTTTEPASTMSPPPAKKLALSAKKASTLWRATGNDLRPPPPSPSSDLTHPMKTSHPVVASTWPVHRARAVSPAPQSSSRLQPPFSPHPTLLSSTPKPPGTSEPRSCSSISTALPQVNEDLVSLPHQLPEASEPPQSPSEKRKKTFVGEPQRLGSETRLPQHIREATAAPHGKRKRKKKKRPEDTAASALQEGQTQRQPGSPMYRREGQAQLPAVRRQEDGTQPQVNGQQVGCVTDGHHASSRKRRRKGAEGLGEEGGLHQDPLRHSCSPMGDGDPEAMEESPRKKKKKKR

SEQ ID NO: 94922 - protein, 61 aa, Homo sapiens
  Payload ID: 18930
  Gene Name: ubiquitin specific peptidase 36
  ENSP ID: ENSP00000475654
MPIVDKLKEALKPGRKDSADDGELGKLLASSAKKAVSTRMRAVVTESQPRRKCFSPRSDCL

SEQ ID NO: 94923 - protein, 979 aa, Homo sapiens
  Payload ID: 18931
  Gene Name: ubiquitin specific peptidase 37
  Uniprot ID: Q86T82
  ENSP ID: ENSP00000258399
MSPLKIHGPIRIRSMQTGITKWKEGSFEIVEKENKVSLVVHYNTGGIPRIFQLSHNIKNVVLRPSGAKQSRLMLTLQDNSFLSIDKVPSKDAEEMRLFLDAVHQNRLPAAMKPSQGSGSFGAILGSRTSQKETSRQLSYSDNQASAKRGSLETKDDIPFRKVLGNPGRGSIKTVAGSGIARTIPSLTSTSTPLRSGLLENRTEKRKRMISTGSELNEDYPKENDSSSNNKAMTDPSRKYLTSSREKQLSLKQSEENRTSGLLPLQSSSFYGSRAGSKEHSSGGTNLDRTNVSSQTPSAKRSLGFLPQPVPLSVKKLRCNQDYTGWNKPRVPLSSHQQQQLQGFSNLGNTCYMNAILQSLFSLQSFANDLLKQGIPWKKIPLNALIRRFAHLLVKKDICNSETKKDLLKKVKNAISATAERFSGYMQNDAHEFLSQCLDQLKEDMEKLNKTWKTEPVSGEENSPDISATRAYTCPVITNLEFEVQHSIICKACGEIIPKREQFNDLSIDLPRRKKPLPPRSIQDSLDLFFRAEELEYSCEKCGGKCALVRHKFNRLPRVLILHLKRYSFNVALSLNNKIGQQVIIPRYLTLSSHCTENTKPPFTLGWSAHMAISRPLKASQMVNSCITSPSTPSKKFTFKSKSSLALCLDSDSEDELKRSVALSQRLCEMLGNEQQQEDLEKDSKLCPIEPDKSELENSGFDRMSEEELLAAVLEISKRDASPSLSHEDDDKPTSSPDTGFAEDDIQEMPENPDTMETEKPKTITELDPASFTEITKDCDENKENKTPEGSQGEVDWLQQYDMEREREEQELQQALAQSLQEQEAWEQKEDDDLKRATELSLQEFNNSFVDALGSDEDSGNEDVFDMEYTEAEAEELKRNAETGNLPHSYRLISVVSHIGSTSSSGHYISDVYDIKKQAWFTYNDLEVSKIQEAAVQSDRDRSGYIFFYMHKEIFDELLETEKNSQSLSTEVGKTTRQAL

SEQ ID NO: 94924 - protein, 302 aa, Homo sapiens
  Payload ID: 18931
  Gene Name: ubiquitin specific peptidase 37
  ENSP ID: ENSP00000345043
MSPLKIHGPIRIRSMQTGITKWKEGSFEIVEKENKVSLVVHYNTGGIPRIFQLSHNIKNVVLRPSGAKQSRLMLTLQDNSFLSIDKVPSKDAEEMRLFLDAVHQNRLPAAMKPSQGSGSFGAILGSRTSQKETSRQLSYSDNQASAKRGSLETKDDIPFRKVLGNPGRGSIKTVAGSGIARTIPSLTSTSTPLRSGLLENRTEKRKRMISTGSELNEDYPKENDSSSNNKAMTDPSRKYLTSSREKQLSLKQSEENRTSGLLPLQSSSFYGSRAGSKEHSSGGTNLDRFIGYKYIRYLLSTC

SEQ ID NO: 94925 - protein, 979 aa, Homo sapiens; identical to SEQ ID NO: 94923
  Payload ID: 18931
  Gene Name: ubiquitin specific peptidase 37
  Uniprot ID: Q86T82
  ENSP ID: ENSP00000393662

SEQ ID NO: 94926 - protein, 979 aa, Homo sapiens; identical to SEQ ID NO: 94923
  Payload ID: 18931
  Gene Name: ubiquitin specific peptidase 37
  Uniprot ID: Q86T82
  ENSP ID: ENSP00000396585

SEQ ID NO: 94927 - protein, 885 aa, Homo sapiens
  Payload ID: 18931
  Gene Name: ubiquitin specific peptidase 37
  Uniprot ID: Q86T82
  ENSP ID: ENSP00000400902
MLTLQDNSFLSIDKVPSKDAEEMRLFLDAVHQNRLPAAMKPSQGSGSFGAILGSRTSQKETSRQLSYSDNQASAKRGSLETKDDIPFRKVLGNPGRGSIKTVAGSGIARTIPSLTSTSTPLRSGLLENRTEKRKRMISTGSELNEDYPKENDSSSNNKAMTDPSRKYLTSSREKQLSLKQSEENRTSGLLPLQSSSFYGSRAGSKEHSSGGTNLDRTNVSSQTPSAKRSLGFLPQPVPLSVKKLRCNQDYTGWNKPRVPLSSHQQQQLQGFSNLGNTCYMNAILQSLFSLQSFANDLLKQGIPWKKIPLNALIRRFAHLLVKKDICNSETKKDLLKKVKNAISATAERFSGYMQNDAHEFLSQCLDQLKEDMEKLNKTWKTEPVSGEENSPDISATRAYTCPVITNLEFEVQHSIICKACGEIIPKREQFNDLSIDLPRRKKPLPPRSIQDSLDLFFRAEELEYSCEKCGGKCALVRHKFNRLPRVLILHLKRYSFNVALSLNNKIGQQVIIPRYLTLSSHCTENTKPPFTLGWSAHMAMKFTFKSKSSLALCLDSDSEDELKRSVALSQRLCEMLGNEQQQEDLEKDSKLCPIEPDKSELENSGFDRMSEEELLAAVLEISKRDASPSLSHEDDDKPTSSPDTGFAEDDIQEMPENPDTMETEKPKTITELDPASFTEITKDCDENKENKTPEGSQGEVDWLQQYDMEREREEQELQQALAQSLQEQEAWEQKEDDDLKRATELSLQEFNNSFVDALGSDEDSGNEDVFDMEYTEAEAEELKRNAETGNLPHSYRLISVVSHIGSTSSSGHYISDVYDIKKQAWFTYNDLEVSKIQEAAVQSDRDRSGYIFFYMHKEIFDELLETEKNSQSLSTEVGKTTRQAL

SEQ ID NO: 94928 - protein, 1042 aa, Homo sapiens
  Payload ID: 18932
  Gene Name: ubiquitin specific peptidase 38
  Uniprot ID: Q8NB14
  ENSP ID: ENSP00000303434
MDKILEGLVSSSHPLPLKRVIVRKVVESAEHWLDEAQCEAMFDLTTRLILEGQDPFQRQVGHQVLEAYARYHRPEFESFFNKTFVLGLLHQGYHSLDRKDVAILDYIHNGLKLIMSCPSVLDLFSLLQVEVLRMVCERPEPQLCARLSDLLTDFVQCIPKGKLSITFCQQLVRTIGHFQCVSTQERELREYVSQVTKVSNLLQNIWKAEPATLLPSLQEVFASISSTDASFEPSVALASLVQHIPLQMITVLIRSLTTDPNVKDASMTQALCRMIDWLSWPLAQHVDTWVIALLKGLAAVQKFTILIDVTLLKIELVFNRLWFPLVRPGALAVLSHMLLSFQHSPEAFHLIVPHVVNLVHSFKNDGLPSSTAFLVQLTELIHCMMYHYSGFPDLYEPILEAIKDFPKPSEEKIKLILNQSAWTSQSNSLASCLSRLSGKSETGKTGLINLGNTCYMNSVIQALFMATDFRRQVLSLNLNGCNSLMKKLQHLFAFLAHTQREAYAPRIFFEASRPPWFTPRSQQDCSEYLRFLLDRLHEEEKILKVQASHKPSEILECSETSLQEVASKAAVLTETPRTSDGEKTLIEKMFGGKLRTHIRCLNCRSTSQKVEAFTDLSLAFCPSSSLENMSVQDPASSPSIQDGGLMQASVPGPSEEPVVYNPTTAAFICDSLVNEKTIGSPPNEFYCSENTSVPNESNKILVNKDVPQKPGGETTPSVTDLLNYFLAPEILTGDNQYYCENCASLQNAEKTMQITEEPEYLILTLLRFSYDQKYHVRRKILDNVSLPLVLELPVKRITSFSSLSESWSVDVDFTDLSENLAKKLKPSGTDEASCTKLVPYLLSSVVVHSGISSESGHYYSYARNITSTDSSYQMYHQSEALALASSQSHLLGRDSPSAVFEQDLENKEMSKEWFLFNDSRVTFTSFQSVQKITSRFPKDTAYVLLYKKQHSTNGLSGNNPTSGLWINGDPPLQKELMDAITKDNKLYLQEQELNARARALQAASASCSFRPNGFDDNDPPGSCGPTGGGGGGGFNTVGRLVF

SEQ ID NO: 94929 - protein, 347 aa, Homo sapiens
  Payload ID: 18932
  Gene Name: ubiquitin specific peptidase 38
  ENSP ID: ENSP00000424158
KTFVLGLLHQGYHSLDRKDVAILDYIHNGLKLIMSCPSVLDLFSLLQVEVLRMVCERPEPQLCARLSDLLTDFVQCIPKGKLSITFCQQLVRTIGHFQCVSTQERELREYVSQVTKVSNLLQNIWKAEPATLLPSLQEVFASISSTDASFEPSVALASLVQHIPLQMITVLIRSLTTDPNVKDASMTQALCRMIDWLSWPLAQHVDTWVIALLKGLAAVQKFTILIDVTLLKIELVFNRLWFPLVRPGALAVLSHMLLSFQHSPEAFHLIVPHVVNLVHSFKNDGLPSSTAFLVQLTELIHCMMYHYSGFPDLYEPILEAIKSCSVAQAEVQWHDHGSLQPLHLELK

SEQ ID NO: 94930 - protein, 1004 aa, Homo sapiens
  Payload ID: 18932
  Gene Name: ubiquitin specific peptidase 38
  Uniprot ID: Q8NB14
  ENSP ID: ENSP00000427647
MDKILEGLVSSSHPLPLKRVIVRKVVESAEHWLDEAQCEAMFDLTTRLILEGQDPFQRQVGHQVLEAYARYHRPEFESFFNKTFVLGLLHQGYHSLDRKDVAILDYIHNGLKLIMSCPSVLDLFSLLQVEVLRMVCERPEPQLCARLSDLLTDFVQCIPKGKLSITFCQQLVRTIGHFQCVSTQERELREYVSQVTKVSNLLQNIWKAEPATLLPSLQEVFASISSTDASFEPSVALASLVQHIPLQMITVLIRSLTTDPNVKDASMTQALCRMIDWLSWPLAQHVDTWVIALLKGLAAVQKFTILIDVTLLKIELVFNRLWFPLVRPGALAVLSHMLLSFQHSPEAFHLIVPHVVNLVHSFKNDGLPSSTAFLVQLTELIHCMMYHYSGFPDLYEPILEAIKDFPKPSEEKIKLILNQSAWTSQSNSLASCLSRLSGKSETGKTGLINLGNTCYMNSVIQALFMATDFRRQVLSLNLNGCNSLMKKLQHLFAFLAHTQREAYAPRIFFEASRPPWFTPRSQQDCSEYLRFLLDRLHEEEKILKVQASHKPSEILECSETSLQEVASKAAVLTETPRTSDGEKTLIEKMFGGKLRTHIRCLNCRSTSQKVEAFTDLSLAFCPSSSLENMSVQDPASSPSIQDGGLMQASVPGPSEEPVVYNPTTAAFICDSLVNEKTIGSPPNEFYCSENTSVPNESNKILVNKDVPQKPGGETTPSVTDLLNYFLAPEILTGDNQYYCENCASLQNAEKTMQITEEPEYLILTLLRFSYDQKYHVRRKILDNVSLPLVLELPVKRITSFSSLSESWSVDVDFTDLSENLAKKLKPSGTDEASCTKLVPYLLSSVVVHSGISSESGHYYSYARNITSTDSSYQMYHQSEALALASSQSHLLGRDSPSAVFEQDLENKEMSKEWFLFNDSRVTFTSFQSVQKITSRFPKDTAYVLLYKKQHSTNGLSGNNPTSGLWINGDPPLQKELMDAITKDNKLYLQVSWKYKLYLLKILNN

SEQ ID NO: 94931 - protein, 565 aa, Homo sapiens
  Payload ID: 18933
  Gene Name: ubiquitin specific peptidase 39
  Uniprot ID: Q53GS9
  ENSP ID: ENSP00000312981
MSGRSKRESRGSTRGKRESESRGSSGRVKRERDREREPEAASSRGSPVRVKREFEPASAREAPASVVPFVRVKREREVDEDSEPEREVRAKNGRVDSEDRRSRHCPYLDTINRSVLDFDFEKLCSISLSHINAYACLVCGKYFQGRGLKSHAYIHSVQFSHHVFLNLHTLKFYCLPDNYEIIDSSLEDITYVLKPTFTKQQIANLDKQAKLSRAYDGTTYLPGIVGLNNIKANDYANAVLQALSNVPPLRNYFLEEDNYKNIKRPPGDIMFLLVQRFGELMRKLWNPRNFKAHVSPHEMLQAVVLCSKKTFQITKQGDGVDFLSWFLNALHSALGGTKKKKKTIVTDVFQGSMRIFTKKLPHPDLPAEEKEQLLHNDEYQETMVESTFMYLTLDLPTAPLYKDEKEQLIIPQVPLFNILAKFNGITEKEYKTYKENFLKRFQLTKLPPYLIFCIKRFTKNNFFVEKNPTIVNFPITNVDLREYLSEEVQAVHKNTTYDLIANIVHDGKPSEGSYRIHVLHHGTGKWYELQDLQVTDILPQMITLSEAYIQIWKRRDNDETNQQGA

SEQ ID NO: 94932 - protein, 536 aa, Homo sapiens
  Payload ID: 18933
  Gene Name: ubiquitin specific peptidase 39
  ENSP ID: ENSP00000386572
MSGRSKRESRGSTRGKRESESRGSSGRVKRERDREREPEAASSRGSPVRVKREFEPASAREAPASVVPFVRVKREREVDEDSEPEREVRAKNGRVDSEDRRSRHCPYLDTINRSVLDFDFEKLCSISLSHINAYACLVCGKYFQGRGLKSHAYIHSVQFSHHVFLNLHTLKFYCLPDNYEIIDSSLEDITYVLKPTFTKQQIANLDKQAKLSRAYDGTTYLPGIVGLNNIKANDYANAVLQALSNVPPLRNYFLEEDNYKNIKRPPGDIMFLLVQRFGELMRKLWNPRNFKAHVSPHEMLQAVVLCSKKTFQITKQGDGVDFLSWFLNALHSALGGTKKKKKTIVTDVFQGSMRIFTKKLPHPDLPAEEKEQLLHNDEYQETMVESTFMYLTLDLPTAPLYKDEKEQLIIPQVPLFNILAKFNGITEKEYKTYKENFLKRFQLTKLPPYLIFCIKRFTKNNFFVEKNPTIVNFPITNVDLREYLSEEVQAVHKNTTYDLIANIVHDGKPSEGSYRIHVLHHIWKRRDNDETNQQGA

SEQ ID NO: 94933 - protein, 488 aa, Homo sapiens
  Payload ID: 18933
  Gene Name: ubiquitin specific peptidase 39
  Uniprot ID: Q53GS9
  ENSP ID: ENSP00000386803
MSGRSKRESRGSTRGKRESESRGSSGRVKRERDREREPEAASSRGSPVRVKREFEPASAREAPASVVPFVRVKREREVDEDSEPEREVRAKNGRVDSEDRRSRHCPYLDTINRSVLDFDFEKLCSISLSHINAYACLVCGKYFQGRGLKSHAYIHSVQFSHHVFLNLHTLKFYCLPDNYEIIDSSLEDITYVLKPTFTKQQIANLDKQAKLSRAYDGTTYLPGIVGLNNIKANDYANAVLQALSNVPPLRNYFLEEDNYKNIKRPPGDIMFLLVQRFGELMRKLWNPRNFKAHVSPHEMLQAVVLCSKKTFQITKQGDGVDFLSWFLNALHSALGGTKKKKKTIVTDVFQGSMRIFTKKLPHPDLPAEEKEQLLHNDEYQETMVESTFMYLTLDLPTAPLYKDEKEQLIIPQVPLFNILAKFNGITEKEYKTYKENFLKRFQLTKLPPYLIFCIKRFTKNNFFVEKNPTIVNFPITGQANGMNYKTSR

SEQ ID NO: 94934 - protein, 565 aa, Homo sapiens; identical to SEQ ID NO: 94931
  Payload ID: 18933
  Gene Name: ubiquitin specific peptidase 39
  Uniprot ID: Q53GS9
  ENSP ID: ENSP00000386864

SEQ ID NO: 94935 - protein, 113 aa, Homo sapiens
  Payload ID: 18933
  Gene Name: ubiquitin specific peptidase 39
  ENSP ID: ENSP00000392911
MLTAVPSHLFSAKNGRVDSEDRRSRHCPYLDTINSFSPFPTGRGLKSHAYIHSVQFSHHVFLNLHTLKFYCLPDNYEIIDSSLEDITYVLKPTFTKQQIANLDKQAKLSRAYD

SEQ ID NO: 94936 - protein, 462 aa, Homo sapiens
  Payload ID: 18933
  Gene Name: ubiquitin specific peptidase 39
  Uniprot ID: Q53GS9
  ENSP ID: ENSP00000396133
MLTAVPSHLFSAKNGRVDSEDRRSRHCPYLDTINSFSPFPTGRGLKSHAYIHSVQFSHHVFLNLHTLKFYCLPDNYEIIDSSLEDITYVLKPTFTKQQIANLDKQAKLSRAYDGTTYLPGIVGLNNIKANDYANAVLQALSNVPPLRNYFLEEDNYKNIKRPPGDIMFLLVQRFGELMRKLWNPRNFKAHVSPHEMLQAVVLCSKKTFQITKQGDGVDFLSWFLNALHSALGGTKKKKKTIVTDVFQGSMRIFTKKLPHPDLPAEEKEQLLHNDEYQETMVESTFMYLTLDLPTAPLYKDEKEQLIIPQVPLFNILAKFNGITEKEYKTYKENFLKRFQLTKLPPYLIFCIKRFTKNNFFVEKNPTIVNFPITNVDLREYLSEEVQAVHKNTTYDLIANIVHDGKPSEGSYRIHVLHHGTGKWYELQDLQVTDILPQMITLSEAYIQIWKRRDNDETNQQGA

SEQ ID NO: 94937 - protein, 129 aa, Homo sapiens
  Payload ID: 18933
  Gene Name: ubiquitin specific peptidase 39
  ENSP ID: ENSP00000396854
MLTAVPSHLFSAKNGRVDSEDRRSRHCPYLDTINRSVLDFDFEKLCSISLSHINAYACLVCGKYFQGRGLKSHAYIHSVQFSHHVFLNLHTLKFYCLPDNYEIIDSSLEDITYVLKPTFTKQQIANLDK

SEQ ID NO: 94938 - protein, 154 aa, Homo sapiens
  Payload ID: 18933
  Gene Name: ubiquitin specific peptidase 39
  ENSP ID: ENSP00000400690
MSGRSKRESRGSTRGKRESESRGSSGRVKRERDREREPEAASSRGSPVRVKREFEPASAREAPASVVPFVRVKREREVDEDSEPEREVRAKNGRVDSEDRRSRHCPYLDTINRSVLDFDFEKLCSISLSHINAYACLVCGKYFQAFHPSLQAGV

SEQ ID NO: 94939 - protein, 61 aa, Homo sapiens
  Payload ID: 18933
  Gene Name: ubiquitin specific peptidase 39
  ENSP ID: ENSP00000479885
YVLKPTFTKQQIANLDKQAKLSRAYDGTTYLPGIVGLNNIKANDYANAVLQEMALTFCLGF

SEQ ID NO: 94940 - protein, 487 aa, Homo sapiens
  Payload ID: 18933
  Gene Name: ubiquitin specific peptidase 39
  ENSP ID: ENSP00000484024
MLTAVPSHLFSAKNGRVDSEDRRSRHCPYLDTINRSVLDFDFEKLCSISLSHINAYACLVCGKYFQGRGLKSHAYIHSVQFSHHVFLNLHTLKFYCLPDNYEIIDSSLEDITYVLKPTFTKQQIANLDKQAKLSRAYDGTTYLPGIVGLNNIKANDYANAVLQALSNVPPLRNYFLEEDNYKNIKRPPGDIMFLLVQRFGELMRKLWNPRNFKAHVSPHEMLQAVVLCSKKTFQITKQGDGVDFLSWFLNALHSALGGTKKKKKTIVTDVFQGSMRIFTKKLPHPDLPAEEKEQLLHNDEYQETMVESTFMYLTLDLPTAPLYKDEKEQLIIPQVPLFNILAKFNGITEKEYKTYKENFLKRFQLTKLPPYLIFCIKRFTKNNFFVEKNPTIVNFPITNVDLREYLSEEVQAVHKNTTYDLIANIVHDGKPSEGSYRIHVLHHGTGKWYELQDLQVTDILPQMITLSEAYIQIWKRRDNDETNQQGA

SEQ ID NO: 94941 - protein, 963 aa, Homo sapiens
  Payload ID: 18934
  Gene Name: ubiquitin specific peptidase 4 (proto-oncogene)
  Uniprot ID: Q13107
  ENSP ID: ENSP00000265560
MAEGGGCRERPDAETQKSELGPLMRTTLQRGAQWYLIDSRWFKQWKKYVGFDSWDMYNVGEHNLFPGPIDNSGLFSDPESQTLKEHLIDELDYVLVPTEAWNKLLNWYGCVEGQQPIVRKVVEHGLFVKHCKVEVYLLELKLCENSDPTNVLSCHFSKADTIATIEKEMRKLFNIPAERETRLWNKYMSNTYEQLSKLDNTVQDAGLYQGQVLVIEPQNEDGTWPRQTLQSKSSTAPSRNFTTSPKSSASPYSSVSASLIANGDSTSTCGMHSSGVSRGGSGFSASYNCQEPPSSHIQPGLCGLGNLGNTCFMNSALQCLSNTAPLTDYFLKDEYEAEINRDNPLGMKGEIAEAYAELIKQMWSGRDAHVAPRMFKTQVGRFAPQFSGYQQQDSQELLAFLLDGLHEDLNRVKKKPYLELKDANGRPDAVVAKEAWENHRLRNDSVIVDTFHGLFKSTLVCPECAKVSVTFDPFCYLTLPLPLKKDRVMEVFLVPADPHCRPTQYRVTVPLMGAVSDLCEALSRLSGIAAENMVVADVYNHRFHKIFQMDEGLNHIMPRDDIFVYEVCSTSVDGSECVTLPVYFRERKSRPSSTSSASALYGQPLLLSVPKHKLTLESLYQAVCDRISRYVKQPLPDEFGSSPLEPGACNGSRNSCEGEDEEEMEHQEEGKEQLSETEGSGEDEPGNDPSETTQKKIKGQPCPKRLFTFSLVNSYGTADINSLAADGKLLKLNSRSTLAMDWDSETRRLYYDEQESEAYEKHVSMLQPQKKKKTTVALRDCIELFTTMETLGEHDPWYCPNCKKHQQATKKFDLWSLPKILVVHLKRFSYNRYWRDKLDTVVEFPIRGLNMSEFVCNLSARPYVYDLIAVSNHYGAMGVGHYTAYAKNKLNGKWYYFDDSNVSLASEDQIVTKAAYVLFYQRRDDEFYKTPSLSSSGSSDGGTRPSSSQQGFGDDEACSMDTN

SEQ ID NO: 94942 - protein, 916 aa, Homo sapiens
  Payload ID: 18934
  Gene Name: ubiquitin specific peptidase 4 (proto-oncogene)
  Uniprot ID: Q13107
  ENSP ID: ENSP00000341028
MAEGGGCRERPDAETQKSELGPLMRTTLQRGAQWYLIDSRWFKQWKKYVGFDSWDMYNVGEHNLFPGPIDNSGLFSDPESQTLKEHLIDELDYVLVPTEAWNKLLNWYGCVEGQQPIVRKVVEHGLFVKHCKVEVYLLELKLCENSDPTNVLSCHFSKADTIATIEKEMRKLFNIPAERETRLWNKYMSNTYEQLSKLDNTVQDAGLYQGQVLVIEPQNEDGTWPRQTLQSNGSGFSASYNCQEPPSSHIQPGLCGLGNLGNTCFMNSALQCLSNTAPLTDYFLKDEYEAEINRDNPLGMKGEIAEAYAELIKQMWSGRDAHVAPRMFKTQVGRFAPQFSGYQQQDSQELLAFLLDGLHEDLNRVKKKPYLELKDANGRPDAVVAKEAWENHRLRNDSVIVDTFHGLFKSTLVCPECAKVSVTFDPFCYLTLPLPLKKDRVMEVFLVPADPHCRPTQYRVTVPLMGAVSDLCEALSRLSGIAAENMVVADVYNHRFHKIFQMDEGLNHIMPRDDIFVYEVCSTSVDGSECVTLPVYFRERKSRPSSTSSASALYGQPLLLSVPKHKLTLESLYQAVCDRISRYVKQPLPDEFGSSPLEPGACNGSRNSCEGEDEEEMEHQEEGKEQLSETEGSGEDEPGNDPSETTQKKIKGQPCPKRLFTFSLVNSYGTADINSLAADGKLLKLNSRSTLAMDWDSETRRLYYDEQESEAYEKHVSMLQPQKKKKTTVALRDCIELFTTMETLGEHDPWYCPNCKKHQQATKKFDLWSLPKILVVHLKRFSYNRYWRDKLDTVVEFPIRGLNMSEFVCNLSARPYVYDLIAVSNHYGAMGVGHYTAYAKNKLNGKWYYFDDSNVSLASEDQIVTKAAYVLFYQRRDDEFYKTPSLSSSGSSDGGTRPSSSQQGFGDDEACSMDTN

SEQ ID NO: 94943 - protein, 621 aa, Homo sapiens
  Payload ID: 18934
  Gene Name: ubiquitin specific peptidase 4 (proto-oncogene)
  ENSP ID: ENSP00000399079
  MOD_RES (1)..(1): Any amino acid
XPKSSASPYSSVSASLIANGDSTSTCGMHSSGVSRGGSGFSASYNCQEPPSSHIQPGLCGLGNLGNTCFMNSALQCLSNTAPLTDYFLKDEYEAEINRDNPLGMKGEIAEAYAELIKQMWSGRDAHVAPRMFKTQVGRFAPQFSGYQQQDSQELLAFLLDGLHEDLNRVVAKEAWENHRLRNDSVIVDTFHGLFKSTLVCPECAKVSVTFDPFCYLTLPLPLKKDRVMEVFLVPADPHCRPTQYRVTVPLMGAVSDLCEALSRLSGIAAENMVVADVYNHRFHKIFQMDEGLNHIMPRDDIFVYEVCSTSVDGSECVTLPVYFRERKSRPSSTSSASALYGQPLLLSVPKHKLTLESLYQAVCDRISRYVKQPLPDEFGSSPLEPGACNGSRNSCEGEDEEEMEHQEEGKEQLSETEGSGEDEPGNDPSETTQKKIKGQPCPKRLFTFSLVNSYGTADINSLAADGKLLKLNSRSTLAMDWDSETRRLYYDEQESEAYEKHVSMLQPQKKKKTTVALRDCIELFTTMETLGEHDPWYCPNCKKHQQATKKFDLWSLPKILVVHLKRFSYNRYWRDKLDTVVEFPIRGLNMSEFVCNLSARPYVYDLIAVSNHYGAMGVGHY

SEQ ID NO: 94944 - protein, 313 aa, Homo sapiens
  Payload ID: 18934
  Gene Name: ubiquitin specific peptidase 4 (proto-oncogene)
  Uniprot ID: Q13107
  ENSP ID: ENSP00000400623
MAEGGGCRERPDAETQKSELGPLMRTTLQRGAQWYLIDSRWFKQWKKYVGFDSWDMYNVGEHNLFPGPIDNSGLFSDPESQTLKEHLIDELDYVLVPTEAWNKLLNWYGCVEGQQPIVRKVVEHGLFVKHCKVEVYLLELKLCENSDPTNVLSCHFSKADTIATIEKEMRKLFNIPAERETRLWNKYMSNTYEQLSKLDNTVQDAGLYQGQVLVIEPQNEDGTWPRQTLQSKVSFFLPRLECNGAILAHCNFCLPGSSNSPASASRVAPSHLANFFFFEMESHSVTKLECGGAVSAYSRVQVMLLPQPPEWLG

SEQ ID NO: 94945 - protein, 363 aa, Homo sapiens
  Payload ID: 18934
  Gene Name: ubiquitin specific peptidase 4 (proto-oncogene)
  ENSP ID: ENSP00000408274
MAEGGGCRERPDAETQKSELGPLMRTTLQRGAQWYLIDSRWFKQWKKYVGFDSWDMYNVGEHNLFPGPIDNSGLFSDPESQTLKEHLIDELDYVLVPTEAWNKLLNWYGCVEGQQPIVRKVVEHGLFVKHCKVEVYLLELKLCENSDPTNVLSCHFSKADTIATIEKEMRKLFNIPAERETRLWNKYMSNTYEQLSKLDNTVQDAGLYQGQVLVIEPQNEDGTWPRQTLQSKGPQEMLTQQGMALQNYDNKLVKCIEELCQKQEELCWQIQQEEDKKQRLQNEVRQLTEKLACVNEKLARVNENLARKIASCSKFYQTIAETEATYLKMLESSQTLLSVLKREAGNLTKATASDQKSSGGRDS

SEQ ID NO: 94946 - protein, 1235 aa, Homo sapiens
  Payload ID: 18935
  Gene Name: ubiquitin specific peptidase 40
  Uniprot ID: Q9NVE5
  ENSP ID: ENSP00000251722
MFGDLFEEEYSTVSNNQYGKGKKLKTKALEPPAPREFTNLSGIRNQGGTCYLNSLLQTLHFTPEFREALFSLGPEELGLFEDKDKPDAKVRIIPLQLQRLFAQLLLLDQEAASTADLTDSFGWTSNEEMRQHDVQELNRILFSALETSLVGTSGHDLIYRLYHGTIVNQIVCKECKNVSERQEDFLDLTVAVKNVSGLEDALWNMYVEEEVFDCDNLYHCGTCDRLVKAAKSAKLRKLPPFLTVSLLRFNFDFVKCERYKETSCYTFPLRINLKPFCEQSELDDLEYIYDLFSVIIHKGGCYGGHYHVYIKDVDHLGNWQFQEEKSKPDVNLKDLQSEEEIDHPLMILKAILLEENNLIPVDQLGQKLLKKIGISWNKKYRKQHGPLRKFLQLHSQIFLLSSDESTVRLLKNSSLQAESDFQRNDQQIFKMLPPESPGLNNSISCPHWFDINDSKVQPIREKDIEQQFQGKESAYMLFYRKSQLQRPPEARANPRYGVPCHLLNEMDAANIELQTKRAECDSANNTFELHLHLGPQYHFFNGALHPVVSQTESVWDLTFDKRKTLGDLRQSIFQLLEFWEGDMVLSVAKLVPAGLHIYQSLGGDELTLCETEIADGEDIFVWNGVEVGGVHIQTGIDCEPLLLNVLHLDTSSDGEKCCQVIESPHVFPANAEVGTVLTALAIPAGVIFINSAGCPGGEGWTAIPKEDMRKTFREQGLRNGSSILIQDSHDDNSLLTKEEKWVTSMNEIDWLHVKNLCQLESEEKQVKISATVNTMVFDIRIKAIKELKLMKELADNSCLRPIDRNGKLLCPVPDSYTLKEAELKMGSSLGLCLGKAPSSSQLFLFFAMGSDVQPGTEMEIVVEETISVRDCLKLMLKKSGLQGDAWHLRKMDWCYEAGEPLCEEDATLKELLICSGDTLLLIEGQLPPLGFLKVPIWWYQLQGPSGHWESHQDQTNCTSSWGRVWRATSSQGASGNEPAQVSLLYLGDIEISEDATLAELKSQAMTLPPFLEFGVPSPAHLRAWTVERKRPGRLLRTDRQPLREYKLGRRIEICLEPLQKGENLGPQDVLLRTQVRIPGERTYAPALDLVWNAAQGGTAGSLRQRVADFYRLPVEKIEIAKYFPEKFEWLPISSWNQQITKRKKKKKQDYLQGAPYYLKDGDTIGVKNLLIDDDDDFSTIRDDTGKEKQKQRALGRRKSQEALHEQSSYILSSAETPARPRAPETSLSIHVGSFR

SEQ ID NO: 94947 - protein, 163 aa, Homo sapiens
  Payload ID: 18935
  Gene Name: ubiquitin specific peptidase 40
  Uniprot ID: Q9NVE5
  ENSP ID: ENSP00000386664
MGSSLGLCLGKAPSSSQLFLFFAMGSDVQPGTEMEIVVEETISVRDCLKLMLKKSGLQGDAWHLRKMDWCYEAGEPLCEEDATLKELLICSGDTLLLIEGQLPPLGFLKVPIWWYQLQGPSGHWESHQDQTNCTSSWGRVWRATSSQGENRMGFQQPVHHKEK

SEQ ID NO: 94948 - protein, 1235 aa, Homo sapiens; identical to SEQ ID NO: 94946
  Payload ID: 18935
  Gene Name: ubiquitin specific peptidase 40
  Uniprot ID: Q9NVE5
  ENSP ID: ENSP00000387898

SEQ ID NO: 94949 - protein, 246 aa, Homo sapiens
  Payload ID: 18935
  Gene Name: ubiquitin specific peptidase 40
  ENSP ID: ENSP00000388121
  MOD_RES (1)..(1): Any amino acid
XGSSLGLCLGKAPSSSQLFLFFAMGSDVQPGTEMEIVVEETISVRDCLKLMLKKSGLQGDAWHLRKMDWCYEAGEPLCEEDATLKELLICSGDTLLLIEGQLPPLGFLKVPIWWYQLQGPSGHWESHQDQTNCTSSWGRVWRATSSQGASGNEPAQVSLLYLGDIEISEDATLAELKSQAMTLPPFLEFGVPSPAHLRAWTVERKRPGRLLRTDRQPLREYKLGRRIEICLEPLQKGENLGCILTP

SEQ ID NO: 94950 - protein, 116 aa, Homo sapiens
  Payload ID: 18935
  Gene Name: ubiquitin specific peptidase 40
  ENSP ID: ENSP00000394133
  MOD_RES (1)..(1): Any amino acid
XEFGVPSPAHLRAWTVERKRPGRLLRTDRQPLSPQDVLLRTQVRIPGERTYAPALDLVWNAAQGGTAGSLRQRVADFYRLPVEKIEIAKYFPEKFEWLPISSWNQQITKRKKKKKQ

SEQ ID NO: 94951 - protein, 98 aa, Homo sapiens
  Payload ID: 18935
  Gene Name: ubiquitin specific peptidase 40
  ENSP ID: ENSP00000394154
MFGDLFEEEYSTVSNNQYGKGKKLKTKALEPPAPREFTNLSGIRNQGGTCYLNSLLQTLHFTPEFREALFSLGPEELGLFEDKDKPDAKKVTWPIPYG

SEQ ID NO: 94952 - protein, 97 aa, Homo sapiens
  Payload ID: 18935
  Gene Name: ubiquitin specific peptidase 40
  ENSP ID: ENSP00000407696
  MOD_RES (1)..(1): Any amino acid
XTNCTSSWGRVWRATSSQGASGNEPAQVSLLYLGDIEISEDATLAELKSQSVLIWHLSYAMFSGHDLASFPGVRCPVPSPPQSLDGGEEAPRQAFTN

SEQ ID NO: 94953 - protein, 98 aa, Homo sapiens
  Payload ID: 18935
  Gene Name: ubiquitin specific peptidase 40
  ENSP ID: ENSP00000408853
EDMRKTFREQGLRNGSSILIQDSHDDNSLLTKEEKWVTSMNEIDWLHVKNLCQLESEEKQVKISATVNTMVFDIRIKAIKELKLMKELGNHLHFLFGS

SEQ ID NO: 94954 - protein, 1247 aa, Homo sapiens
  Payload ID: 18935
  Gene Name: ubiquitin specific peptidase 40
  Uniprot ID: Q9NVE5
  ENSP ID: ENSP00000415434
MSLFLRVVFSFTMFGDLFEEEYSTVSNNQYGKGKKLKTKALEPPAPREFTNLSGIRNQGGTCYLNSLLQTLHFTPEFREALFSLGPEELGLFEDKDKPDAKVRIIPLQLQRLFAQLLLLDQEAASTADLTDSFGWTSNEEMRQHDVQELNRILFSALETSLVGTSGHDLIYRLYHGTIVNQIVCKECKNVSERQEDFLDLTVAVKNVSGLEDALWNMYVEEEVFDCDNLYHCGTCDRLVKAAKSAKLRKLPPFLTVSLLRFNFDFVKCERYKETSCYTFPLRINLKPFCEQSELDDLEYIYDLFSVIIHKGGCYGGHYHVYIKDVDHLGNWQFQEEKSKPDVNLKDLQSEEEIDHPLMILKAILLEENNLIPVDQLGQKLLKKIGISWNKKYRKQHGPLRKFLQLHSQIFLLSSDESTVRLLKNSSLQAESDFQRNDQQIFKMLPPESPGLNNSISCPHWFDINDSKVQPIREKDIEQQFQGKESAYMLFYRKSQLQRPPEARANPRYGVPCHLLNEMDAANIELQTKRAECDSANNTFELHLHLGPQYHFFNGALHPVVSQTESVWDLTFDKRKTLGDLRQSIFQLLEFWEGDMVLSVAKLVPAGLHIYQSLGGDELTLCETEIADGEDIFVWNGVEVGGVHIQTGIDCEPLLLNVLHLDTSSDGEKCCQVIESPHVFPANAEVGTVLTALAIPAGVIFINSAGCPGGEGWTAIPKEDMRKTFREQGLRNGSSILIQDSHDDNSLLTKEEKWVTSMNEIDWLHVKNLCQLESEEKQVKISATVNTMVFDIRIKAIKELKLMKELADNSCLRPIDRNGKLLCPVPDSYTLKEAELKMGSSLGLCLGKAPSSSQLFLFFAMGSDVQPGTEMEIVVEETISVRDCLKLMLKKSGLQGDAWHLRKMDWCYEAGEPLCEEDATLKELLICSGDTLLLIEGQLPPLGFLKVPIWWYQLQGPSGHWESHQDQTNCTSSWGRVWRATSSQGASGNEPAQVSLLYLGDIEISEDATLAELKSQAMTLPPFLEFGVPSPAHLRAWTVERKRPGRLLRTDRQPLREYKLGRRIEICLEPLQKGENLGPQDVLLRTQVRIPGERTYAPALDLVWNAAQGGTAGSLRQRVADFYRLPVEKIEIAKYFPEKFEWLPISSWNQQITKRKKKKKQDYLQGAPYYLKDGDTIGVKNLLIDDDDDFSTIRDDTGKEKQKQRALGRRKSQEALHEQSSYILSSAETPARPRAPETSLSIHVGSFR

SEQ ID NO: 94955 - protein, 306 aa, Homo sapiens
  Payload ID: 18936
  Gene Name: ubiquitin specific peptidase 41
  ENSP ID: ENSP00000292729
  MOD_RES (1)..(1): Any amino acid
XLVGLHNIGQTCCLNSLIQVFVMNVDFARILKRITVPRGADEQRRSVPFQMLLLLEKMQDSRQKAVWPLELAYCLQKYNVPLFVQHDAAQLYLKLWNLIKDQIADVHLVERLQALYMIRMKDSLICLDCAMESSRNSSMLTLRLSFFDVDSKPLKTLEDALHCFFQPRELSSKSKCFCENCGKKTRGKQVLKLTHLPQTLTIHLMRFSIRNSQTRKICHSLYFPQSLDFSQILPMKRESCDAEEQSGGQYELFAVIAHVGMADSGHYCVYIRNAVDGKWFCFNDSNICLVSWEDIQCTYGNPNYHW

SEQ ID NO: 94956 - protein, 358 aa, Homo sapiens
  Payload ID: 18936
  Gene Name: ubiquitin specific peptidase 41
  Uniprot ID: Q3LFD5
  ENSP ID: ENSP00000414922
MDGVLFRAHQCQYVHPCVHVYVTVGLMDPLCRRKSKSRKQNKLQPNLRICPWSLVGLHNIGQTCCLNSLIQVFVMNVDFARILKRITVPRGADEQRRSVPFQMLLLLEKMQDSRQKAVWPLELAYCLQKYNVPLFVQHDAAQLYLKLWNLIKDQIADVHLVERLQALYMIRMKDSLICLDCAMESSRNSSMLTLRLSFFDVDSKPLKTLEDALHCFFQPRELSSKSKCFCENCGKKTRGKQVLKLTHLPQTLTIHLMRFSIRNSQTRKICHSLYFPQSLDFSQILPMKRESCDAEEQSGGQYELFAVIAHVGMADSGHYCVYIRNAVDGKWFCFNDSNICLVSWEDIQCTYGNPNYHW

SEQ ID NO: 94957 - protein, 1316 aa, Homo sapiens
  Payload ID: 18937
  Gene Name: ubiquitin specific peptidase 42
  Uniprot ID: Q9H9J4
  ENSP ID: ENSP00000301962
MTIVDKASESSDPSAYQNQPGSSEAVSPGDMDAGSASWGAVSSLNDVSNHTLSLGPVPGAVVYSSSSVPDKSKPSPQKDQALGDGIAPPQKVLFPSEKICLKWQQTHRVGAGLQNLGNTCFANAALQCLTYTPPLANYMLSHEHSKTCHAEGFCMMCTMQAHITQALSNPGDVIKPMFVINEMRRIARHFRFGNQEDAHEFLQYTVDAMQKACLNGSNKLDRHTQATTLVCQIFGGYLRSRVKCLNCKGVSDTFDPYLDITLEIKAAQSVNKALEQFVKPEQLDGENSYKCSKCKKMVPASKRFTIHRSSNVLTLSLKRFANFTGGKIAKDVKYPEYLDIRPYMSQPNGEPIVYVLYAVLVHTGFNCHAGHYFCYIKASNGLWYQMNDSIVSTSDIRSVLSQQAYVLFYIRSHDVKNGGELTHPTHSPGQSSPRPVISQRVVTNKQAAPGFIGPQLPSHMIKNPPHLNGTGPLKDTPSSSMSSPNGNSSVNRASPVNASASVQNWSVNRSSVIPEHPKKQKITISIHNKLPVRQCQSQPNLHSNSLENPTKPVPSSTITNSAVQSTSNASTMSVSSKVTKPIPRSESCSQPVMNGKSKLNSSVLVPYGAESSEDSDEESKGLGKENGIGTIVSSHSPGQDAEDEEATPHELQEPMTLNGANSADSDSDPKENGLAPDGASCQGQPALHSENPFAKANGLPGKLMPAPLLSLPEDKILETFRLSNKLKGSTDEMSAPGAERGPPEDRDAEPQPGSPAAESLEEPDAAAGLSSTKKAPPPRDPGTPATKEGAWEAMAVAPEEPPPSAGEDIVGDTAPPDLCDPGSLTGDASPLSQDAKGMIAEGPRDSALAEAPEGLSPAPPARSEEPCEQPLLVHPSGDHARDAQDPSQSLGAPEAAERPPAPVLDMAPAGHPEGDAEPSPGERVEDAAAPKAPGPSPAKEKIGSLRKVDRGHYRSRRERSSSGEPARESRSKTEGHRHRRRRTCPRERDRQDRHAPEHHPGHGDRLSPGERRSLGRCSHHHSRHRSGVELDWVRHHYTEGERGWGREKFYPDRPRWDRCRYYHDRYALYAARDWKPFHGGREHERAGLHERPHKDHNRGRRGCEPARERERHRPSSPRAGAPHALAPHPDRFSHDRTALVAGDNCNLSDRFHEHENGKSRKRRHDSVENSDSHVEKKARRSEQKDPLEEPKAKKHKKSKKKKKSKDKHRDRDSRHQQDSDLSAACSDADLHRHKKKKKKKKRHSRKSEDFVKDSELHLPRVTSLETVAQFRRAQGGFPLSGGPPLEGVGPFREKTKHLRMESRDDRCRLFEYGQGD

SEQ ID NO: 94958 - protein, 174 aa, Homo sapiens
  Payload ID: 18937
  Gene Name: ubiquitin specific peptidase 42
  ENSP ID: ENSP00000385964
MTIVDKASESSDPSAYQNQPGSSEAVSPGDMDAGSASWGAVSSLNDVSNHTLSLGPVPGAVVYSSSSVPDKSKPSPQKDQALGDGIAPPQKVLFPSEKICLKWQQTHRVGAGLQNLGNTCFANAALQCLTYTPPLANYMLSHEHSKTFHNSFPTDSFPITFALNESRVWMKTQH

SEQ ID NO: 94959 - protein, 1043 aa, Homo sapiens
  Payload ID: 18937
  Gene Name: ubiquitin specific peptidase 42
  ENSP ID: ENSP00000408217
MMCTMQAHITQALSNPGDVIKPMFVINEMRRIARHFRFGNQEDAHEFLQYTVDAMQKACLNGSNKLDRHTQATTLVCQIFGGYLRSRVKCLNCKGVSDTFDPYLDITLEIKAAQSVNKALEQFVKPEQLDGENSYKCSKCKKMVPASKRFTIHRSSNVLTLSLKRFANFTGGKIAKDVKYPEYLDIRPYMSQPNGEPIVYVLYAVLVHTGFNCHAGHYFCYIKASNGLWYQMNDSIVSTSDIRSVLSQQAYVLFYIRSHDVKNGGELTHPTHSPGQSSPRPVISQRVVTNKQAAPGFIGPQLPSHMIKNPPHLNGTGPLKDTPSSSMSSPNGNSSVNRASPVNASASVQNWSVNRSSVIPEHPKKQKITISIHNKLPVRQCQSQPNLHSNSLENPTKPVPSSTITNSAVQSTSNASTMSVSSKVTKPIPRSESCSQPVMNGKSKLNSSVLVPYGAESSEDSDEESKGLGKENGIGTIVSSHSPGQDAEDEEATPHELQEPMTLNGANSADSDSDPKENGLAPDGASCQGQPALHSENPFAKANGLPGKLMPAPLLSLPEDKILETFRLSNKLKGSTDEMSAPGAERGPPEDRDAEPQPGSPAAESLEEPDAAAGLSSTKKAPPPRDPGTPATKEGAWEAMAVAPEEPPPSAGEDIVGDTAPPDLCDPGSLTGDASPLSQDAKGMIAEGPRDSALAEAPEGLSPAPPARSEEPCEQPLLVHPSGDHARDAQDPSQSLGAPEAAERPPAPVLDMAPAGHPEGDAEPSPGERVEDAAAPKAPGPSPAKEKIGSLRKVDRGHYRSRRERSSSGEPARESRSKTEGHRHRRRRTCPRERDRQDRHAPEHHPGHGDRLSPGERRSLGRCSHHHSRHRSGVELDWVRHHYTEGERGWGREKFYPDRPRWDRCRYYHDRYALYAARDWKPFHGGREHERAGLHERPHKDHNRGRRGCEPARERERHRPSSPRAGAPHALAPHPDRFSHDRTALVAGDNCNLSDRFHEHENGKSRKRRHDSVENSDSHVEKKARRSEQKDPLEEPKAKKHKK

SEQ ID NO: 94960 - protein, 98 aa, Homo sapiens
  Payload ID: 18937
  Gene Name: ubiquitin specific peptidase 42
  ENSP ID: ENSP00000416910
MTIVDKASESSDPSAYQNQPGSSEAVSPGDMDAGSASWGAVSSLNDVSNHTLSLGPVPGAVVYSSSSVPDKSKPSPQKDQVETGVHHVSQDGLDLLTS

SEQ ID NO: 94961 - protein, 475 aa, Homo sapiens
  Payload ID: 18937
  Gene Name: ubiquitin specific peptidase 42
  ENSP ID: ENSP00000430568
MTIVDKASESSDPSAYQNQPGSSEAVSPGDMDAGSASWGAVSSLNDVSNHTLSLGPVPGAVVYSSSSVPDKSKPSPQKDQGHAEGFCMMCTMQAHITQALSNPGDVIKPMFVINEMRRIARHFRFGNQEDAHEFLQYTVDAMQKACLNGSNKLDRHTQATTLVCQIFGGYLRSRVKCLNCKGVSDTFDPYLDITLEIKAAQSVNKALEQFVKPEQLDGENSYKCSKCKKMVPASKRFTIHRSSNVLTLSLKRFANFTGGKIAKDVKYPEYLDIRPYMSQPNGEPIVYVLYAVLVHTGFNCHAGHYFCYIKASNGLWYQMNDSIVSTSDIRSVLSQQAYVLFYIRSHDVKNGGELTHPTHSPGQSSPRPVISQRVVTNKQAAPGFIGPQLPSHMIKNPPHLNGTGPLKDTPSSSMSSPNGNSSVNRASPVNASASVQNWSVNRSSVIPEHPKKQKITISIHNKLPVRQCQSQPNLH

SEQ ID NO: 94962 - protein, 219 aa, Homo sapiens
  Payload ID: 18937
  Gene Name: ubiquitin specific peptidase 42
  ENSP ID: ENSP00000431127
MTIVDKASESSDPSAYQNQPGSSEAVSPGDMDAGSASWGAVSSLNDVSNHTLSLGPVPGAVVYSSSSVPDKSKPSPQKDQALGDGIAPPQKVLFPSEKICLKWQQTHRVGAGLQNLGNTCFANAALQCLTYTPPLANYMLSHEHSKTCHAEGFCMMCTMQAHITQALSNPGDVIKPMFVINEMRRIARHFRFGNQEDAHEFLQYTVDAMQKACLNGSNK

SEQ ID NO: 94963 - protein, 1123 aa, Homo sapiens
  Payload ID: 18938
  Gene Name: ubiquitin specific peptidase 43
  Uniprot ID: Q70EL4
  ENSP ID: ENSP00000285199
MDLGPGDAAGGGPLAPRPRRRRSLRRLFSRFLLALGSRSRPGDSPPRPQPGHCDGDGEGGFACAPGPVPAAPGSPGEERPPGPQPQLQLPAGDGARPPGAQGLKNHGNTCFMNAVVQCLSNTDLLAEFLALGRYRAAPGRAEVTEQLAALVRALWTREYTPQLSAEFKNAVSKYGSQFQGNSQHDALEFLLWLLDRVHEDLEGSSRGPVSEKLPPEATKTSENCLSPSAQLPLGQSFVQSHFQAQYRSSLTCPHCLKQSNTFDPFLCVSLPIPLRQTRFLSVTLVFPSKSQRFLRVGLAVPILSTVAALRKMVAEEGGVPADEVILVELYPSGFQRSFFDEEDLNTIAEGDNVYAFQVPPSPSQGTLSAHPLGLSASPRLAAREGQRFSLSLHSESKVLILFCNLVGSGQQASRFGPPFLIREDRAVSWAQLQQSILSKVRHLMKSEAPVQNLGSLFSIRVVGLSVACSYLSPKDSRPLCHWAVDRVLHLRRPGGPPHVKLAVEWDSSVKERLFGSLQEERAQDADSVWQQQQAHQQHSCTLDECFQFYTKEEQLAQDDAWKCPHCQVLQQGMVKLSLWTLPDILIIHLKRFCQVGERRNKLSTLVKFPLSGLNMAPHVAQRSTSPEAGLGPWPSWKQPDCLPTSYPLDFLYDLYAVCNHHGNLQGGHYTAYCRNSLDGQWYSYDDSTVEPLREDEVNTRGAYILFYQKRNSIPPWSASSSMRGSTSSSLSDHWLLRLGSHAGSTRGSLLSWSSAPCPSLPQVPDSPIFTNSLCNQEKGGLEPRRLVRGVKGRSISMKAPTTSRAKQGPFKTMPLRWSFGSKEKPPGASVELVEYLESRRRPRSTSQSIVSLLTGTAGEDEKSASPRSNVALPANSEDGGRAIERGPAGVPCPSAQPNHCLAPGNSDGPNTARKLKENAGQDIKLPRKFDLPLTVMPSVEHEKPARPEGQKAMNWKESFQMGSKSSPPSPYMGFSGNSKDSRRGTSELDRPLQGTLTLLRSVFRKKENRRNERAEVSPQVPPVSLVSGGLSPAMDGQAPGSPPALRIPEGLARGLGSRLERDVWSAPSSLRLPRKASRAPRGSALGMSQRTVPGEQASYGTFQRVKYHTLSLGRKKTLPESSF

SEQ ID NO: 94964 - protein, 1118 aa, Homo sapiens
  Payload ID: 18938
  Gene Name: ubiquitin specific peptidase 43
  Uniprot ID: Q70EL4
  ENSP ID: ENSP00000458963
MDLGPGDAAGGGPLAPRPRRRRSLRRLFSRFLLALGSRSRPGDSPPRPQPGHCDGDGEGGFACAPGPVPAAPGSPGEERPPGPQPQLQLPAGDGARPPGAQGLKNHGNTCFMNAVVQCLSNTDLLAEFLALGRYRAAPGRAEVTEQLAALVRALWTREYTPQLSAEFKNAVSKYGSQFQGNSQHDALEFLLWLLDRVHEDLEGSSRGPVSEKLPPEATKTSENCLSPSAQLPLGQSFVQSHFQAQYRSSLTCPHCLKQSNTFDPFLCVSLPIPLRQTRFLSVTLVFPSKSQRFLRVGLAVPILSTVAALRKMVAEEGGVPADEVILVELYPSGFQRSFFDEEDLNTIAEGDNVYAFQVPPSPSQGTLSAHPLGLSASPRLAAREGQRFSLSLHSESKVLILFCNLVGSGQQASRFGPPFLIREDRAVSWAQLQQSILSKVRHLMKSEAPVQNLGSLFSIRVVGLSVACSYLSPKDSRPLCHWAVDRVLHLRRPGGPPHVKLAVEWDSSVKERLFGSLQEERAQDADSVWQQQQAHQQHSCTLDECFQFYTKEEQLAQDDAWKCPHCQVLQQGMVKLSLWTLPDILIIHLKRFCQVGERRNKLSTLVKFPLSGLNMAPHVAQRSTSPEAGLGPWPSWKQPDCLPTSYPLDFLYDLYAVCNHHGNLQAYCRNSLDGQWYSYDDSTVEPLREDEVNTRGAYILFYQKRNSIPPWSASSSMRGSTSSSLSDHWLLRLGSHAGSTRGSLLSWSSAPCPSLPQVPDSPIFTNSLCNQEKGGLEPRRLVRGVKGRSISMKAPTTSRAKQGPFKTMPLRWSFGSKEKPPGASVELVEYLESRRRPRSTSQSIVSLLTGTAGEDEKSASPRSNVALPANSEDGGRAIERGPAGVPCPSAQPNHCLAPGNSDGPNTARKLKENAGQDIKLPRKFDLPLTVMPSVEHEKPARPEGQKAMNWKESFQMGSKSSPPSPYMGFSGNSKDSRRGTSELDRPLQGTLTLLRSVFRKKENRRNERAEVSPQVPPVSLVSGGLSPAMDGQAPGSPPALRIPEGLARGLGSRLERDVWSAPSSLRLPRKASRAPRGSALGMSQRTVPGEQASYGTFQRVKYHTLSLGRKKTLPESSF

SEQ ID NO: 94965 - protein, 910 aa, Homo sapiens
  Payload ID: 18938
  Gene Name: ubiquitin specific peptidase 43
  ENSP ID: ENSP00000459328
  MOD_RES (1)..(1): Any amino acid
XAIPSTTPWNSCSGCWIVYMRTWRVHPEGRCRRRSSLTCPHCLKQSNTFDPFLCVSLPIPLRQTRFLSVTLVFPSKSQRFLRVGLAVPILSTVAALRKMVAEEGGVPADEVILVELYPSGFQRSFFDEEDLNTIAEGDNVYAFQVPPSPSQGTLSAHPLGLSASPRLAAREGQRFSLSLHSESKVLILFCNLVGSGQQASRFGPPFLIREDRAVSWAQLQQSILSKVRHLMKSEAPVQNLGSLFSIRVVGLSVACSYLSPKDSRPLCHWAVDRVLHLRRPGGPPHVKLAVEWDSSVKERLFGSLQEERAQDADSVWQQQQAHQQHSCTLDECFQFYTKEEQLAQDDAWKCPHCQVLQQGMVKLSLWTLPDILIIHLKRFCQVGERRNKLSTLVKFPLSGLNMAPHVAQRSTSPEAGLGPWPSWKQPDCLPTSYPLDFLYDLYAVCNHHGNLQGGHYTAYCRNSLDGQWYSYDDSTVEPLREDEVNTRGAYILFYQKRNSIPPWSASSSMRGSTSSSLSDHWLLRLGSHAGSTRGSLLSWSSAPCPSLPQVPDSPIFTNSLCNQEKGGLEPRRLVRGVKGRSISMKAPTTSRAKQGPFKTMPLRWSFGSKEKPPGASVELVEYLESRRRPRSTSQSIVSLLTGTAGEDEKSASPRSNVALPANSEDGGRAIERGPAGVPCPSAQPNHCLAPGNSDGPNTARKLKENAGQDIKLPRKFDLPLTVMPSVEHEKPARPEGQKAMNWKESFQMGSKSSPPSPYMGFSGNSKDSRRGTSELDRPLQGTLTLLRSVFRKKENRRNERAEVSPQVPPVSLVSGGLSPAMDGQAPGSPPALRIPEGLARGLGSRLERDVWSAPSSLRLPRKASRAPRGSALGMSQRTVPGEQASYGTFQRVKYHTLSLGRKKTLPESSF

SEQ ID NO: 94966 - protein, 648 aa, Homo sapiens
  Payload ID: 18938
  Gene Name: ubiquitin specific peptidase 43
  ENSP ID: ENSP00000477318
AACSGASRRSERRMPTVCGSSSRRISSTAVPWMNVFSSTPRRSRSRPGGPCPGREGGWLPLVGWPRAAGASQSGWFAFQLAQDDAWKCPHCQVLQQGMVKLSLWTLPDILIIHLKRFCQVGERRNKLSTLVKFPLSGLNMAPHVAQRSTSPEAGLGPWPSWKQPDCLPTSYPLDFLYDLYAVCNHHGNLQGGHYTAYCRNSLDGQWYSYDDSTVEPLREDEVNTRGAYILFYQKRNSIPPWSASSSMRGSTSSSLSDHWLLRLGSHAGSTRGSLLSWSSAPCPSLPQVPDSPIFTNSLCNQEKGGLEPRRLVRGVKGRSISMKAPTTSRAKQGPFKTMPLRWSFGSKEKPPGASVELVEYLESRRRPRSTSQSIVSLLTGTAGEDEKSASPRSNVALPANSEDGGRAIERGPAGVPCPSAQPNHCLAPGNSDGPNTARKLKENAGQDIKLPRKFDLPLTVMPSVEHEKPARPEGQKAMNWKESFQMGSKSSPPSPYMGFSGNSKDSRRGTSELDRPLQGTLTLLRSVFRKKENRRNERAEVSPQVPPVSLVSGGLSPAMDGQAPGSPPALRIPEGLARGLGSRLERDVWSAPSSLRLPRKASRAPRGSALGMSQRTVPGEQASYGTFQRVKYHTLSLGRKKTLPESSF

SEQ ID NO: 94967 - protein, 712 aa, Homo sapiens
  Payload ID: 18939
  Gene Name: ubiquitin specific peptidase 44
  Uniprot ID: Q9H0E7
  ENSP ID: ENSP00000258499
MLAMDTCKHVGQLQLAQDHSSLNPQKWHCVDCNTTESIWACLSCSHVACGRYIEEHALKHFQESSHPVALEVNEMYVFCYLCDDYVLNDNTTGDLKLLRRTLSAIKSQNYHCTTRSGRFLRSMGTGDDSYFLHDGAQSLLQSEDQLYTALWHRRRILMGKIFRTWFEQSPIGRKKQEEPFQEKIVVKREVKKRRQELEYQVKAELESMPPRKSLRLQGLAQSTIIEIVSVQVPAQTPASPAKDKVLSTSENEISQKVSDSSVKRRPIVTPGVTGLRNLGNTCYMNSVLQVLSHLLIFRQCFLKLDLNQWLAMTASEKTRSCKHPPVTDTVVYQMNECQEKDTGFVCSRQSSLSSGLSGGASKGRKMELIQPKEPTSQYISLCHELHTLFQVMWSGKWALVSPFAMLHSVWRLIPAFRGYAQQDAQEFLCELLDKIQRELETTGTSLPALIPTSQRKLIKQVLNVVNNIFHGQLLSQVTCLACDNKSNTIEPFWDLSLEFPERYQCSGKDIASQPCLVTEMLAKFTETEALEGKIYVCDQCNSKRRRFSSKPVVLTEAQKQLMICHLPQVLRLHLKRFRWSGRNNREKIGVHVGFEEILNMEPYCCRETLKSLRPECFIYDLSAVVMHHGKGFGSGHYTAYCYNSEGGFWVHCNDSKLSMCTMDEVCKAQAYILFYTQRVTENGHSKLLPPELLLGSQHPNEDADTSSNEILS

SEQ ID NO: 94968 - protein, 712 aa, Homo sapiens; identical to SEQ ID NO: 94967
  Payload ID: 18939
  Gene Name: ubiquitin specific peptidase 44
  Uniprot ID: Q9H0E7
  ENSP ID: ENSP00000376806

SEQ ID NO: 94969 - protein, 712 aa, Homo sapiens; identical to SEQ ID NO: 94967
  Payload ID: 18939
  Gene Name: ubiquitin specific peptidase 44
  Uniprot ID: Q9H0E7
  ENSP ID: ENSP00000442629

SEQ ID NO: 94970 - protein, 164 aa, Homo sapiens
  Payload ID: 18939
  Gene Name: ubiquitin specific peptidase 44
  ENSP ID: ENSP00000448601
MLAMDTCKHVGQLQLAQDHSSLNPQKWHCVDCNTTESIWACLSCSHVACGRYIEEHALKHFQESSHPVALEVNEMYVFCYLCDDYVLNDNTTGDLKLLRRTLSAIKSQNYHCTTRSGRFLRSMGTGDDSYFLHDGAQSLLQSEDQLYTALWHRRRILMGKIFRT

SEQ ID NO: 94971 - protein, 496 aa, Homo sapiens
  Payload ID: 18939
  Gene Name: ubiquitin specific peptidase 44
  ENSP ID: ENSP00000448670
MLAMDTCKHVGQLQLAQDHSSLNPQKWHCVDCNTTESIWACLSCSHVACGRYIEEHALKHFQESSHPVALEVNEMYVFCYLCDDYVLNDNTTGDLKLLRRTLSAIKSQNYHCTTRSGRFLRSMGTGDDSYFLHDGAQSLLQSEDQLYTALWHRRRILMGKIFRTWFEQSPIGRKKQEEPFQEKIVVKREVKKRRQELEYQVKAELESMPPRKSLRLQGLAQSTIIEIVSVQVPAQTPASPAKDKVLSTSENEISQKVSDSSVKRRPIVTPGVTGLRNLGNTCYMNSVLQVLSHLLIFRQCFLKLDLNQWLAMTASEKTRSCKHPPVTDTVVYQMNECQEKDTGFVCSRQSSLSSGLSGGASKGRKMELIQPKEPTSQYISLCHELHTLFQVMWSGKWALVSPFAMLHSVWRLIPAFRGYAQQDAQEFLCELLDKIQRELETTGTSLPALIPTSQRKLIKQVLNVVNNIFHGQLLSQQSVEGFPPNQLYSQKPRNNL

SEQ ID NO: 94972 - protein, 111 aa, Homo sapiens
  Payload ID: 18939
  Gene Name: ubiquitin specific peptidase 44
  ENSP ID: ENSP00000449635
MLAMDTCKHVGQLQLAQDHSSLNPQKWHCVDCNTTESIWACLSCSHVACGRYIEEHALKHFQESSHPVALEVNEMYVFCYLCDDYVLNDNTTGDLKLLRRTLSAIKSQNYH

SEQ ID NO: 94973 - protein, 289 aa, Homo sapiens
  Payload ID: 18940
  Gene Name: ubiquitin specific peptidase 45
  ENSP ID: ENSP00000330540
MRVKDPTKALPEKAKRSKRPTVPHDEDSSDDIAVGLTCQHVSHAISVNHVKRAIAENLWSVCSECLKERRFYDGQLVLTSDIWLCLKCGFQGCGKNSESQHSLKHFKSSRTEPHCIIINLSTWIIWCYECDEKLSTHCNKKVLAQIVDFLQKHASKTQTSAFSRIMKLCEEKCETDEIQKGGKCRNLSVRGITNLGNTCFFNAVMQNLAQTYTLTDLMNEIKESSTKLKIFPSSDSQLDPLVVELSRPGPLTSALFLFLHSMKETEKGPLSPKVLFNQLCQKWVHLHLI

SEQ ID NO: 94974 - protein, 814 aa, Homo sapiens
  Payload ID: 18940
  Gene Name: ubiquitin specific peptidase 45
  Uniprot ID: Q70EL2
  ENSP ID: ENSP00000333376
MRVKDPTKALPEKAKRSKRPTVPHDEDSSDDIAVGLTCQHVSHAISVNHVKRAIAENLWSVCSECLKERRFYDGQLVLTSDIWLCLKCGFQGCGKNSESQHSLKHFKSSRTEPHCIIINLSTWIIWCYECDEKLSTHCNKKVLAQIVDFLQKHASKTQTSAFSRIMKLCEEKCETDEIQKGGKCRNLSVRGITNLGNTCFFNAVMQNLAQTYTLTDLMNEIKESSTKLKIFPSSDSQLDPLVVELSRPGPLTSALFLFLHSMKETEKGPLSPKVLFNQLCQKAPRFKDFQQQDSQELLHYLLDAVRTEETKRIQASILKAFNNPTTKTADDETRKKVKAYGKEGVKMNFIDRIFIGELTSTVMCEECANISTVKDPFIDISLPIIEERVSKPLLWGRMNKYRSLRETDHDRYSGNVTIENIHQPRAAKKHSSSKDKSQLIHDRKCIRKLSSGETVTYQKNENLEMNGDSLMFASLMNSESRLNESPTDDSEKEASHSESNVDADSEPSESESASKQTGLFRSSSGSGVQPDGPLYPLSAGKLLYTKETDSGDKEMAEAISELRLSSTVTGDQDFDRENQPLNISNNLCFLEGKHLRSYSPQNAFQTLSQSYITTSKECSIQSCLYQFTSMELLMGNNKLLCENCTKNKQKYQEETSFAEKKVEGVYTNARKQLLISAVPAVLILHLKRFHQAGLSLRKVNRHVDFPLMLDLAPFCSATCKNASVGDKVLYGLYGIVEHSGSMREGHYTAYVKVRTPSRKLSEHNTKKKNVPGLKAADNESAGQWVHVSDTYLQVVPESRALSAQAYLLFYERVL

SEQ ID NO: 94975 - protein, 766 aa, Homo sapiens
  Payload ID: 18940
  Gene Name: ubiquitin specific peptidase 45
  ENSP ID: ENSP00000358236
MRVKDPTKALPEKAKRSKRPTVPHDEDSSDDIAVGLTCQHVSHAISVNHVKRAIAENLWSVCSECLKERRFYDGQLVLTSDIWLCLKCGFQGCGKNSESQHSLKHFKSSRTEPHCIIINLSTWIIWCYECDEKLSTHCNKKVLAQIVDFLQKHASKTQTSAFSRIMKLCEEKCETDEIQKGGKCRNLSVRGITNLGNTCFFNAVMQNLAQTYTLTDLMNEIKESSTKLKIFPSSDSQLDPLVVELSRPGPLTSALFLFLHSMKETEKGPLSPKVLFNQLCQKAPRFKDFQQQDSQELLHYLLDAVRTEETKRIQASILKAFNNPTTKTADDETRKKVKAYGKEGVKMNFIDRIFIGELTSTVMCEECANISTVKDPFIDISLPIIEERSQLIHDRKCIRKLSSGETVTYQKNENLEMNGDSLMFASLMNSESRLNESPTDDSEKEASHSESNVDADSEPSESESASKQTGLFRSSSGSGVQPDGPLYPLSAGKLLYTKETDSGDKEMAEAISELRLSSTVTGDQDFDRENQPLNISNNLCFLEGKHLRSYSPQNAFQTLSQSYITTSKECSIQSCLYQFTSMELLMGNNKLLCENCTKNKQKYQEETSFAEKKVEGVYTNARKQLLISAVPAVLILHLKRFHQAGLSLRKVNRHVDFPLMLDLAPFCSATCKNASVGDKVLYGLYGIVEHSGSMREGHYTAYVKVRTPSRKLSEHNTKKKNVPGLKAADNESAGQWVHVSDTYLQVVPESRALSAQAYLLFYERVL

SEQ ID NO: 94976 - protein, 209 aa, Homo sapiens
  Payload ID: 18940
  Gene Name: ubiquitin specific peptidase 45
  ENSP ID: ENSP00000421248
  MOD_RES (1)..(1): Any amino acid
XGLTCQHVSHAISVNHVKRAIAENLWSVCSECLKERRFYDGQLVLTSDIWLCLKCGFQGCGKNSESQHSLKHFKSSRTEPHCIIINLSTWIIWCYECDEKLSTHCNKKVLAQIVDFLQKHASKTQTSAFSRIMKLCEEKCETDEIQKGGKCRNLSVRGITNLGNTCFFNAVMQNLAQTYTLTDLMNEIKESSTKLKIFPSSDSQLGTSI

SEQ ID NO: 94977 - protein, 148 aa, Homo sapiens
  Payload ID: 18940
  Gene Name: ubiquitin specific peptidase 45
  ENSP ID: ENSP00000421706
  MOD_RES (1)..(1): Any amino acid
XQQDSQELLHYLLDAVRTEETKRIQASILKAFNNPTTKTADDETRKKVKAYGKEGVKMNFIDRIFIGELTSTVMCEECANISTVKDPFIDISLPIIEERVSKPLLWGRMNKYRSLRETDHDRYSGNVTIENIHQPRAAKKHSSSKDKR

SEQ ID NO: 94978 - protein, 345 aa, Homo sapiens
  Payload ID: 18940
  Gene Name: ubiquitin specific peptidase 45
  ENSP ID: ENSP00000422460
MRVKDPTKALPEKAKRSKRPTVPHDEDSSDDIAVGLTCQHVSHAISVNHVKRAIAENLWSVCSECLKERRFYDGQLVLTSDIWLCLKCGFQGCGKNSESQHSLKHFKSSRTEPHCIIINLSTWIIWCYECDEKLSTHCNKKVLAQIVDFLQKHASKTQTSAFSRIMKLCEEKCETDEIQKGGKCRNLSVRGITNLGNTCFFNAVMQNLAQTYTLTDLMNEIKESSTKLKIFPSSDSQLDPLVVELSRPGPLTSALFLFLHSMKETEKGPLSPKVLFNQLCQKAPRFKDFQQQDSQELLHYLLDAVRTEETKRIQASILKAFNNPTTKTADDETRKKVKDVTRQNV

SEQ ID NO: 94979 - protein, 135 aa, Homo sapiens
  Payload ID: 18940
  Gene Name: ubiquitin specific peptidase 45
  ENSP ID: ENSP00000423374
LSRPGPLTSALFLFLHSMKETEKGPLSPKVLFNQLCQKAPRFKDFQQQDSQELLHYLLDAVRTEETKISTVKDPFIDISLPIIEERVSKPLLWGRMNKYRSLRETDHDRYSGNVTIENIHQPRAAKKHSSSKDKR

SEQ ID NO: 94980 - protein, 289 aa, Homo sapiens; identical to SEQ ID NO: 94973
  Payload ID: 18940
  Gene Name: ubiquitin specific peptidase 45
  ENSP ID: ENSP00000423993

SEQ ID NO: 94981 - protein, 814 aa, Homo sapiens; identical to SEQ ID NO: 94974
  Payload ID: 18940
  Gene Name: ubiquitin specific peptidase 45
  Uniprot ID: Q70EL2
  ENSP ID: ENSP00000424372

SEQ ID NO: 94982 - protein, 191 aa, Homo sapiens
  Payload ID: 18940
  Gene Name: ubiquitin specific peptidase 45
  ENSP ID: ENSP00000425876
  MOD_RES (1)..(1): Any amino acid
XQTSAFSRIMKLCEEKCETDEIQKGGKCRNLSVRGITNLGNTCFFNAVMQNLAQTYTLTDLMNEIKESSTKLKIFPSSDSQLDPLVVELSRPGPLTSALFLFLHSMKETEKGPLSPKVLFNQLCQKAPRFKDFQQQDSQELLHYLLDAVRTEETKRIQASILKAFNNPTTKTADDETRKKVKDLHGERSIH

SEQ ID NO: 94983 - protein, 52 aa, Homo sapiens
  Payload ID: 18940
  Gene Name: ubiquitin specific peptidase 45
  ENSP ID: ENSP00000426861
MRVKDPTKALPEKAKRSKRPTVPHDEDSSDDIAVGLTCQHVSHAISVNHVKR

SEQ ID NO: 94984 - protein, 339 aa, Homo sapiens
  Payload ID: 18941
  Gene Name: ubiquitin specific peptidase 46
  ENSP ID: ENSP00000390102
MTVRNIASICNMFGNTCYCNSVLQALYFCRPFRENVLAYKAQQKKKENLLTCLADLFHSIATQKKKVGVIPPKKFISRLRKENDLFDNYMQQDAHEFLNYLLNTIADILQEEKKQEKQNGKLKNGNMNEPAENNKPELTWVHEIFQGTLTNETRCLNCETVSSKDEDFLDLSVDVEQNTSITHCLRDFSNTETLCSEQKYYCETCCSKQEAQKRMRVKKLPMILALHLKRFKYMEQLHRYTKLSYRVVFPLELRLFNTSSDAVNLDRMYDLVAVVVHCGSGPNRGHYITIVKSHGFWLLFDDDIVEKIDAQAIEEFYGLTSDISKNSESGYILFYQSRE

SEQ ID NO: 94985 - protein, 366 aa, Homo sapiens
  Payload ID: 18941
  Gene Name: ubiquitin specific peptidase 46
  Uniprot ID: P62068
  ENSP ID: ENSP00000407818
MTVRNIASICNMGTNASALEKDIGPEQFPINEHYFGLVNFGNTCYCNSVLQALYFCRPFRENVLAYKAQQKKKENLLTCLADLFHSIATQKKKVGVIPPKKFISRLRKENDLFDNYMQQDAHEFLNYLLNTIADILQEEKKQEKQNGKLKNGNMNEPAENNKPELTWVHEIFQGTLTNETRCLNCETVSSKDEDFLDLSVDVEQNTSITHCLRDFSNTETLCSEQKYYCETCCSKQEAQKRMRVKKLPMILALHLKRFKYMEQLHRYTKLSYRVVFPLELRLFNTSSDAVNLDRMYDLVAVVVHCGSGPNRGHYITIVKSHGFWLLFDDDIVEKIDAQAIEEFYGLTSDISKNSESGYILFYQSRE

SEQ ID NO: 94986 - protein, 40 aa, Homo sapiens
  Payload ID: 18941
  Gene Name: ubiquitin specific peptidase 46
  ENSP ID: ENSP00000422018
MTVRNIASICNMEEPPALGSPGWTLLAPPLVRAFGELRLE

SEQ ID NO: 94987 - protein, 359 aa, Homo sapiens
  Payload ID: 18941
  Gene Name: ubiquitin specific peptidase 46
  Uniprot ID: P62068
  ENSP ID: ENSP00000423244
MNCFQGTNASALEKDIGPEQFPINEHYFGLVNFGNTCYCNSVLQALYFCRPFRENVLAYKAQQKKKENLLTCLADLFHSIATQKKKVGVIPPKKFISRLRKENDLFDNYMQQDAHEFLNYLLNTIADILQEEKKQEKQNGKLKNGNMNEPAENNKPELTWVHEIFQGTLTNETRCLNCETVSSKDEDFLDLSVDVEQNTSITHCLRDFSNTETLCSEQKYYCETCCSKQEAQKRMRVKKLPMILALHLKRFKYMEQLHRYTKLSYRVVFPLELRLFNTSSDAVNLDRMYDLVAVVVHCGSGPNRGHYITIVKSHGFWLLFDDDIVEKIDAQAIEEFYGLTSDISKNSESGYILFYQSRE

SEQ ID NO: 94988 - protein, 56 aa, Homo sapiens
  Payload ID: 18941
  Gene Name: ubiquitin specific peptidase 46
  ENSP ID: ENSP00000425806
MNCFQGTNASALEKDIGPEQFPINEHYFGLVNELSTELGPSVTEGCLGKVWKHMLL

SEQ ID NO: 94989 - protein, 40 aa, Homo sapiens; identical to SEQ ID NO: 94986
  Payload ID: 18941
  Gene Name: ubiquitin specific peptidase 46
  ENSP ID: ENSP00000426970

SEQ ID NO: 94990 - protein, 1287 aa, Homo sapiens
  Payload ID: 18942
  Gene Name: ubiquitin specific peptidase 47
  Uniprot ID: Q96K76
  ENSP ID: ENSP00000339957
MVPGEENQLVPKEAPLDHTSDKSLLDANFEPGKKNFLHLTDKDGEQPQILLEDSSAGEDSVHDRFIGPLPREGSGGSTSDYVSQSYSYSSILNKSETGYVGLVNQAMTCYLNSLLQTLFMTPEFRNALYKWEFEESEEDPVTSIPYQLQRLFVLLQTSKKRAIETTDVTRSFGWDSSEAWQQHDVQELCRVMFDALEQKWKQTEQADLINELYQGKLKDYVRCLECGYEGWRIDTYLDIPLVIRPYGSSQAFASVEEALHAFIQPEILDGPNQYFCERCKKKCDARKGLRFLHFPYLLTLQLKRFDFDYTTMHRIKLNDRMTFPEELDMSTFIDVEDEKSPQTESCTDSGAENEGSCHSDQMSNDFSNDDGVDEGICLETNSGTEKISKSGLEKNSLIYELFSVMVHSGSAAGGHYYACIKSFSDEQWYSFNDQHVSRITQEDIKKTHGGSSGSRGYYSSAFASSTNAYMLIYRLKDPARNAKFLEVDEYPEHIKNLVQKERELEEQEKRQREIERNTCKIKLFCLHPTKQVMMENKLEVHKDKTLKEAVEMAYKMMDLEEVIPLDCCRLVKYDEFHDYLERSYEGEEDTPMGLLLGGVKSTYMFDLLLETRKPDQVFQSYKPGEVMVKVHVVDLKAESVAAPITVRAYLNQTVTEFKQLISKAIHLPAETMRIVLERCYNDLRLLSVSSKTLKAEGFFRSNKVFVESSETLDYQMAFADSHLWKLLDRHANTIRLFVLLPEQSPVSYSKRTAYQKAGGDSGNVDDDCERVKGPVGSLKSVEAILEESTEKLKSLSLQQQQDGDNGDSSKSTETSDFENIESPLNERDSSASVDNRELEQHIQTSDPENFQSEERSDSDVNNDRSTSSVDSDILSSSHSSDTLCNADNAQIPLANGLDSHSITSSRRTKANEGKKETWDTAEEDSGTDSEYDESGKSRGEMQYMYFKAEPYAADEGSGEGHKWLMVHVDKRITLAAFKQHLEPFVGVLSSHFKVFRVYASNQEFESVRLNETLSSFSDDNKITIRLGRALKKGEYRVKVYQLLVNEQEPCKFLLDAVFAKGMTVRQSKEELIPQLREQCGLELSIDRFRLRKKTWKNPGTVFLDYHIYEEDINISSNWEVFLEVLDGVEKMKSMSQLAVLSRRWKPSEMKLDPFQEVVLESSSVDELREKLSEISGIPLDDIEFAKGRGTFPCDISVLDIHQDLDWNPKVSTLNVWPLYICDDGAVIFYRDKTEELMELTDEQRNELMKKESSRLQKTGHRVTYSPRKEKALKIYLDGAPNKDLTQD

SEQ ID NO: 94991 - protein, 1375 aa, Homo sapiens
  Payload ID: 18942
  Gene Name: ubiquitin specific peptidase 47
  Uniprot ID: Q96K76
  ENSP ID: ENSP00000382382
MVPGEENQLVPKEDVFWRCRQNIFDEMKKKFLQIENAAEEPRVLCIIQDTTNSKTVNERITLNLPASTPVRKLFEDVANKVGYINGTFDLVWGNGINTADMAPLDHTSDKSLLDANFEPGKKNFLHLTDKDGEQPQILLEDSSAGEDSVHDRFIGPLPREGSGGSTSDYVSQSYSYSSILNKSETGYVGLVNQAMTCYLNSLLQTLFMTPEFRNALYKWEFEESEEDPVTSIPYQLQRLFVLLQTSKKRAIETTDVTRSFGWDSSEAWQQHDVQELCRVMFDALEQKWKQTEQADLINELYQGKLKDYVRCLECGYEGWRIDTYLDIPLVIRPYGSSQAFASVEEALHAFIQPEILDGPNQYFCERCKKKCDARKGLRFLHFPYLLTLQLKRFDFDYTTMHRIKLNDRMTFPEELDMSTFIDVEDEKSPQTESCTDSGAENEGSCHSDQMSNDFSNDDGVDEGICLETNSGTEKISKSGLEKNSLIYELFSVMVHSGSAAGGHYYACIKSFSDEQWYSFNDQHVSRITQEDIKKTHGGSSGSRGYYSSAFASSTNAYMLIYRLKDPARNAKFLEVDEYPEHIKNLVQKERELEEQEKRQREIERNTCKIKLFCLHPTKQVMMENKLEVHKDKTLKEAVEMAYKMMDLEEVIPLDCCRLVKYDEFHDYLERSYEGEEDTPMGLLLGGVKSTYMFDLLLETRKPDQVFQSYKPGEVMVKVHVVDLKAESVAAPITVRAYLNQTVTEFKQLISKAIHLPAETMRIVLERCYNDLRLLSVSSKTLKAEGFFRSNKVFVESSETLDYQMAFADSHLWKLLDRHANTIRLFVLLPEQSPVSYSKRTAYQKAGGDSGNVDDDCERVKGPVGSLKSVEAILEESTEKLKSLSLQQQQDGDNGDSSKSTETSDFENIESPLNERDSSASVDNRELEQHIQTSDPENFQSEERSDSDVNNDRSTSSVDSDILSSSHSSDTLCNADNAQIPLANGLDSHSITSSRRTKANEGKKETWDTAEEDSGTDSEYDESGKSRGEMQYMYFKAEPYAADEGSGEGHKWLMVHVDKRITLAAFKQHLEPFVGVLSSHFKVFRVYASNQEFESVRLNETLSSFSDDNKITIRLGRALKKGEYRVKVYQLLVNEQEPCKFLLDAVFAKGMTVRQSKEELIPQLREQCGLELSIDRFRLRKKTWKNPGTVFLDYHIYEEDINISSNWEVFLEVLDGVEKMKSMSQLAVLSRRWKPSEMKLDPFQEVVLESSSVDELREKLSEISGIPLDDIEFAKGRGTFPCDISVLDIHQDLDWNPKVSTLNVWPLYICDDGAVIFYRDKTEELMELTDEQRNELMKKESSRLQKTGHRVTYSPRKEKALKIYLDGAPNKDLTQD

SEQ ID NO: 94992 - protein, 1355 aa, Homo sapiens
  Payload ID: 18942
  Gene Name: ubiquitin specific peptidase 47
  Uniprot ID: Q96K76
  ENSP ID: ENSP00000433146
MVPGEENQLVPKEIENAAEEPRVLCIIQDTTNSKTVNERITLNLPASTPVRKLFEDVANKVGYINGTFDLVWGNGINTADMAPLDHTSDKSLLDANFEPGKKNFLHLTDKDGEQPQILLEDSSAGEDSVHDRFIGPLPREGSGGSTSDYVSQSYSYSSILNKSETGYVGLVNQAMTCYLNSLLQTLFMTPEFRNALYKWEFEESEEDPVTSIPYQLQRLFVLLQTSKKRAIETTDVTRSFGWDSSEAWQQHDVQELCRVMFDALEQKWKQTEQADLINELYQGKLKDYVRCLECGYEGWRIDTYLDIPLVIRPYGSSQAFASVEEALHAFIQPEILDGPNQYFCERCKKKCDARKGLRFLHFPYLLTLQLKRFDFDYTTMHRIKLNDRMTFPEELDMSTFIDVEDEKSPQTESCTDSGAENEGSCHSDQMSNDFSNDDGVDEGICLETNSGTEKISKSGLEKNSLIYELFSVMVHSGSAAGGHYYACIKSFSDEQWYSFNDQHVSRITQEDIKKTHGGSSGSRGYYSSAFASSTNAYMLIYRLKDPARNAKFLEVDEYPEHIKNLVQKERELEEQEKRQREIERNTCKIKLFCLHPTKQVMMENKLEVHKDKTLKEAVEMAYKMMDLEEVIPLDCCRLVKYDEFHDYLERSYEGEEDTPMGLLLGGVKSTYMFDLLLETRKPDQVFQSYKPGEVMVKVHVVDLKAESVAAPITVRAYLNQTVTEFKQLISKAIHLPAETMRIVLERCYNDLRLLSVSSKTLKAEGFFRSNKVFVESSETLDYQMAFADSHLWKLLDRHANTIRLFVLLPEQSPVSYSKRTAYQKAGGDSGNVDDDCERVKGPVGSLKSVEAILEESTEKLKSLSLQQQQDGDNGDSSKSTETSDFENIESPLNERDSSASVDNRELEQHIQTSDPENFQSEERSDSDVNNDRSTSSVDSDILSSSHSSDTLCNADNAQIPLANGLDSHSITSSRRTKANEGKKETWDTAEEDSGTDSEYDESGKSRGEMQYMYFKAEPYAADEGSGEGHKWLMVHVDKRITLAAFKQHLEPFVGVLSSHFKVFRVYASNQEFESVRLNETLSSFSDDNKITIRLGRALKKGEYRVKVYQLLVNEQEPCKFLLDAVFAKGMTVRQSKEELIPQLREQCGLELSIDRFRLRKKTWKNPGTVFLDYHIYEEDINISSNWEVFLEVLDGVEKMKSMSQLAVLSRRWKPSEMKLDPFQEVVLESSSVDELREKLSEISGIPLDDIEFAKGRGTFPCDISVLDIHQDLDWNPKVSTLNVWPLYICDDGAVIFYRDKTEELMELTDEQRNELMKKESSRLQKTGHRVTYSPRKEKALKIYLDGAPNKDLTQD

SEQ ID NO: 94993 - protein, 1035 aa, Homo sapiens
  Payload ID: 18943
  Gene Name: ubiquitin specific peptidase 48
  Uniprot ID: Q86UV5
  ENSP ID: ENSP00000309262
MAPRLQLEKAAWRWAETVRPEEVSQEHIETAYRIWLEPCIRGVCRRNCKGNPNCLVGIGEHIWLGEIDENSFHNIDDPNCERRKKNSFVGLTNLGATCYVNTFLQVWFLNLELRQALYLCPSTCSDYMLGDGIQEEKDYEPQTICEHLQYLFALLQNSNRRYIDPSGFVKALGLDTGQQQDAQEFSKLFMSLLEDTLSKQKNPDVRNIVQQQFCGEYAYVTVCNQCGRESKLLSKFYELELNIQGHKQLTDCISEFLKEEKLEGDNRYFCENCQSKQNATRKIRLLSLPCTLNLQLMRFVFDRQTGHKKKLNTYIGFSEILDMEPYVEHKGGSYVYELSAVLIHRGVSAYSGHYIAHVKDPQSGEWYKFNDEDIEKMEGKKLQLGIEEDLAEPSKSQTRKPKCGKGTHCSRNAYMLVYRLQTQEKPNTTVQVPAFLQELVDRDNSKFEEWCIEMAEMRKQSVDKGKAKHEEVKELYQRLPAGAEPYEFVSLEWLQKWLDESTPTKPIDNHACLCSHDKLHPDKISIMKRISEYAADIFYSRYGGGPRLTVKALCKECVVERCRILRLKNQLNEDYKTVNNLLKAAVKGSDGFWVGKSSLRSWRQLALEQLDEQDGDAEQSNGKMNGSTLNKDESKEERKEEEELNFNEDILCPHGELCISENERRLVSKEAWSKLQQYFPKAPEFPSYKECCSQCKILEREGEENEALHKMIANEQKTSLPNLFQDKNRPCLSNWPEDTDVLYIVSQFFVEEWRKFVRKPTRCSPVSSVGNSALLCPHGGLMFTFASMTKEDSKLIALIWPSEWQMIQKLFVVDHVIKITRIEVGDVNPSETQYISEPKLCPECREGLLCQQQRDLREYTQATIYVHKVVDNKKVMKDSAPELNVSSSETEEDKEEAKPDGEKDPDFNQSNGGTKRQKISHQNYIAYQKQVIRRSMRHRKVRGEKALLVSANQTLKELKIQIMHAFSVAPFDQNLSIDGKILSDDCATLGTLGVIPESVILLKADEPIADYAAMDDVMQVCMPEEGFKGTGLLGH

SEQ ID NO: 94994 - protein, 115 aa, Homo sapiens
  Payload ID: 18943
  Gene Name: ubiquitin specific peptidase 48
  ENSP ID: ENSP00000363862
  MOD_RES (1)..(1): Any amino acid
XLSLPCTLNLQLMRFVFDRQTGHKKKLNTYIGFSEILDMEPYVEHKGGSYVYELSAVLIHRGVSAYSGHYIAHVKDPQSGEWYKFNDEDIEKMEGKKLQLGIEEDLGKTFKFRTF

SEQ ID NO: 94995 - protein, 521 aa, Homo sapiens
  Payload ID: 18943
  Gene Name: ubiquitin specific peptidase 48
  ENSP ID: ENSP00000363864
MNVSLSQKTVKIHRLFPMLAFSEPYEFVSLEWLQKWLDESTPTKPIDNHACLCSHDKLHPDKISIMKRISEYAADIFYSRYGGGPRLTVKALCKECVVERCRILRLKNQLNEDYKTVNNLLKAAVKGDGFWVGKSSLRSWRQLALEQLDEQDGDAEQSNGKMNGSTLNKDESKEERKEEEELNFNEDILCPHGELCISENERRLVSKEAWSKLQQYFPKAPEFPSYKECCSQCKILEREGEENEALHKMIANEQKTSLPNLFQDKNRPCLSNWPEDTDVLYIVSQFFVEEWRKFVRKPTRCSPVSSVGNSALLCPHGGLMFTFASMTKEDSKLIALIWPSEWQMIQKLFVVDHVIKITRIEVGDVNPSETQYISEPKLCPECREGLLCQQQRDLREYTQATIYVHKVVDNKKVMKDSAPELNVSSSETEEDKEEAKPDGEKDPDFNQIMHAFSVAPFDQNLSIDGKILSDDCATLGTLGVIPESVILLKADEPIADYAAMDDVMQVCMPEEGFKGTGLLGH

SEQ ID NO: 94996 - protein, 983 aa, Homo sapiens
  Payload ID: 18943
  Gene Name: ubiquitin specific peptidase 48
  Uniprot ID: Q86UV5
  ENSP ID: ENSP00000383157
MAPRLQLEKAAWRWAETVRPEEVSQEHIETAYRIWLEPCIRGVCRRNCKGNPNCLVGIGEHIWLGEIDENSFHNIDDPNCERRKKNSFVGLTNLGATCYVNTFLQVWFLNLELRQALYLCPSTCSDYMLGDGIQEEKDYEPQTICEHLQYLFALLQNSNRRYIDPSGFVKALGLDTGQQQDAQEFSKLFMSLLEDTLSKQKNPDVRNIVQQQFCGEYAYVTVCNQCGRESKLLSKFYELELNIQGHKQLTDCISEFLKEEKLEGDNRYFCENCQSKQNATRKIRLLSLPCTLNLQLMRFVFDRQTGHKKKLNTYIGFSEILDMEPYVEHKGGSYVYELSAVLIHRGVSAYSGHYIAHVKDPQSGEWYKFNDEDIEKMEGKKLQLGIEEDLAEPSKSQTRKPKCGKGTHCSRNAYMLVYRLQTQEKPNTTVQVPAFLQELVDRDNSKFEEWCIEMAEMRKQSVDKGKAKHEEVKELYQRLPAGAEPYEFVSLEWLQKWLDESTPTKPIDNHACLCSHDKLHPDKISIMKRISEYAADIFYSRYGGGPRLTVKALCKECVVERCRILRLKNQLNEDYKTVNNLLKAAVKGSDGFWVGKSSLRSWRQLALEQLDEQDGDAEQSNGKMNGSTLNKDESKEERKEEEELNFNEDILCPHGELCISENERRLVSKEAWSKLQQYFPKAPEFPSYKECCSQCKILEREGEENEALHKMIANEQKTSLPNLFQDKNRPCLSNWPEDTDVLYIVSQFFVEEWRKFVRKPTRCSPVSSVGNSALLCPHGGLMFTFASMTKEDSKLIALIWPSEWQMIQKLFVVDHVIKITRIEVGDVNPSETQYISEPKLCPECREGLLCQQQRDLREYTQATIYVHKVVDNKKVMKDSAPELNVSSSETEEDKEEAKPDGEKDPDFNQIMHAFSVAPFDQNLSIDGKILSDDCATLGTLGVIPESVILLKADEPIADYAAMDDVMQVCMPEEGFKGTGLLGH

SEQ ID NO: 94997 - protein, 485 aa, Homo sapiens
  Payload ID: 18943
  Gene Name: ubiquitin specific peptidase 48
  Uniprot ID: Q86UV5
  ENSP ID: ENSP00000406256
MAPRLQLEKAAWRWAETVRPEEVSQEHIETAYRIWLEPCIRGVCRRNCKGNPNCLVGIGEHIWLGEIDENSFHNIDDPNCERRKKNSFVGLTNLGATCYVNTFLQVWFLNLELRQALYLCPSTCSDYMLGDGIQEEKDYEPQTICEHLQYLFALLQNSNRRYIDPSGFVKALGLDTGQQQDAQEFSKLFMSLLEDTLSKQKNPDVRNIVQQQFCGEYAYVTVCNQCGRESKLLSKFYELELNIQGHKQLTDCISEFLKEEKLEGDNRYFCENCQSKQNATRKIRLLSLPCTLNLQLMRFVFDRQTGHKKKLNTYIGFSEILDMEPYVEHKGGSYVYELSAVLIHRGVSAYSGHYIAHVKDPQSGEWYKFNDEDIEKMEGKKLQLGIEEDLAEPSKSQTRKPKCGKGTHCSRNAYMLVYRLQTQEKPNTTVQVPAFLQELVDRDNSKFEEWCIEMAEMRKQSVDKGKAKHEEVKELYQRLPAGAGL

SEQ ID NO: 94998 - protein, 135 aa, Homo sapiens
  Payload ID: 18943
  Gene Name: ubiquitin specific peptidase 48
  ENSP ID: ENSP00000431832
MLVYRLQTQEKPNTTVQVPAFLQELVDRDNSKFEEWCIEMAEMRKQSVDKGKAKHEEVKELYQRLPAGAEPYEFVSLEWLQKWLDESTPTKPIDNHACLCSHDKLHPDKISIMKRISEYAADIFYSRYGGGPRLT

SEQ ID NO: 94999 - protein, 1047 aa, Homo sapiens
  Payload ID: 18943
  Gene Name: ubiquitin specific peptidase 48
  Uniprot ID: Q86UV5
  ENSP ID: ENSP00000431949
MAPRLQLEKAAWRWAETVRPEEVSQEHIETAYRIWLEPCIRGVCRRNCKGNPNCLVGIGEHIWLGEIDENSFHNIDDPNCERRKKNSFVGLTNLGATCYVNTFLQVWFLNLELRQALYLCPSTCSDYMLGDGIQEEKDYEPQTICEHLQYLFALLQNSNRRYIDPSGFVKALGLDTGQQQDAQEFSKLFMSLLEDTLSKQKNPDVRNIVQQQFCGEYAYVTVCNQCGRESKLLSKFYELELNIQGHKQLTDCISEFLKEEKLEGDNRYFCENCQSKQNATRKIRLLSLPCTLNLQLMRFVFDRQTGHKKKLNTYIGFSEILDMEPYVEHKGGSYVYELSAVLIHRGVSAYSGHYIAHVKDPQSGEWYKFNDEDIEKMEGKKLQLGIEEDLEPSKSQTRKPKCGKGTHCSRNAYMLVYRLQTQEKPNTTVQVPAFLQELVDRDNSKFEEWCIEMAEMRKQSVDKGKAKHEEVKELYQRLPAGAEPYEFVSLEWLQKWLDESTPTKPIDNHACLCSHDKLHPDKISIMKRISEYAADIFYSRYGGGPRLTVKALCKECVVERCRILRLKNQLNEDYKTVNNLLKAAVKGSDGFWVGKSSLRSWRQLALEQLDEQDGDAEQSNGKMNGSTLNKDESKEERKEEEELNFNEDILCPHAVFFFSKYIFLNSGELCISENERRLVSKEAWSKLQQYFPKAPEFPSYKECCSQCKILEREGEENEALHKMIANEQKTSLPNLFQDKNRPCLSNWPEDTDVLYIVSQFFVEEWRKFVRKPTRCSPVSSVGNSALLCPHGGLMFTFASMTKEDSKLIALIWPSEWQMIQKLFVVDHVIKITRIEVGDVNPSETQYISEPKLCPECREGLLCQQQRDLREYTQATIYVHKVVDNKKVMKDSAPELNVSSSETEEDKEEAKPDGEKDPDFNQSNGGTKRQKISHQNYIAYQKQVIRRSMRHRKVRGEKALLVSANQTLKELKIQIMHAFSVAPFDQNLSIDGKILSDDCATLGTLGVIPESVILLKADEPIADYAAMDDVMQVCMPEEGFKGTGLLGH

SEQ ID NO: 95000 - protein, 48 aa, Homo sapiens
  Payload ID: 18943
  Gene Name: ubiquitin specific peptidase 48
  ENSP ID: ENSP00000434073
MLGDGIQEEKDYEPQTICEHLQYLFALLQNSNRRYIDPSGFVKALGLD

SEQ ID NO: 95001 - protein, 146 aa, Homo sapiens
  Payload ID: 18943
  Gene Name: ubiquitin specific peptidase 48
  ENSP ID: ENSP00000435604
MFTLQNFILMEYTEPSKSQTRKPKCGKGTHCSRNAYMLVYRLQTQEKPNTTVQVPAFLQELVDRDNSKFEEWCIEMAEMRKQSVDKGKAKHEEVKELYQRLPAGAEPYEFVSLEWLQKWLDESTPTKPIDNHACLCSHDKLHPDKI

SEQ ID NO: 95002 - protein, 38 aa, Homo sapiens
  Payload ID: 18943
  Gene Name: ubiquitin specific peptidase 48
  ENSP ID: ENSP00000435612
MLGDGIQEEKDYEPQTICEHLQYLFALLQNSNRRYIDP

SEQ ID NO: 95003 - protein, 640 aa, Homo sapiens
  Payload ID: 18944
  Gene Name: ubiquitin specific peptidase 49
  Uniprot ID: Q70CQ1
  ENSP ID: ENSP00000362097
MDRCKHVGRLRLAQDHSILNPQKWCCLECATTESVWACLKCSHVACGRYIEDHALKHFEETGHPLAMEVRDLYVFCYLCKDYVLNDNPEGDLKLLRSSLLAVRGQKQDTPVRRGRTLRSMASGEDVVLPQRAPQGQPQMLTALWYRRQRLLARTLRLWFEKSSRGQAKLEQRRQEEALERKKEEARRRRREVKRRLLEELASTPPRKSARLLLHTPRDAGPAASRPAALPTSRRVPAATLKLRRQPAMAPGVTGLRNLGNTCYMNSILQVLSHLQKFRECFLNLDPSKTEHLFPKATNGKTQLSGKPTNSSATELSLRNDRAEACEREGFCWNGRASISRSLELIQNKEPSSKHISLCRELHTLFRVMWSGKWALVSPFAMLHSVWSLIPAFRGYDQQDAQEFLCELLHKVQQELESEGTTRRILIPFSQRKLTKQVLKVVNTIFHGQLLSQVTCISCNYKSNTIEPFWDLSLEFPERYHCIEKGFVPLNQTECLLTEMLAKFTETEALEGRIYACDQCNSKRRKSNPKPLVLSEARKQLMIYRLPQVLRLHLKRFRWSGRNHREKIGVHVVFDQVLTMEPYCCRDMLSSLDKETFAYDLSAVVMHHGKGFGSGHYTAYCYNTEGGACALLCGVGDTERG

SEQ ID NO: 95004 - protein, 688 aa, Homo sapiens
  Payload ID: 18944
  Gene Name: ubiquitin specific peptidase 49
  Uniprot ID: Q70CQ1
  ENSP ID: ENSP00000362100
MDRCKHVGRLRLAQDHSILNPQKWCCLECATTESVWACLKCSHVACGRYIEDHALKHFEETGHPLAMEVRDLYVFCYLCKDYVLNDNPEGDLKLLRSSLLAVRGQKQDTPVRRGRTLRSMASGEDVVLPQRAPQGQPQMLTALWYRRQRLLARTLRLWFEKSSRGQAKLEQRRQEEALERKKEEARRRRREVKRRLLEELASTPPRKSARLLLHTPRDAGPAASRPAALPTSRRVPAATLKLRRQPAMAPGVTGLRNLGNTCYMNSILQVLSHLQKFRECFLNLDPSKTEHLFPKATNGKTQLSGKPTNSSATELSLRNDRAEACEREGFCWNGRASISRSLELIQNKEPSSKHISLCRELHTLFRVMWSGKWALVSPFAMLHSVWSLIPAFRGYDQQDAQEFLCELLHKVQQELESEGTTRRILIPFSQRKLTKQVLKVVNTIFHGQLLSQVTCISCNYKSNTIEPFWDLSLEFPERYHCIEKGFVPLNQTECLLTEMLAKFTETEALEGRIYACDQCNSKRRKSNPKPLVLSEARKQLMIYRLPQVLRLHLKRFRWSGRNHREKIGVHVVFDQVLTMEPYCCRDMLSSLDKETFAYDLSAVVMHHGKGFGSGHYTAYCYNTEGGFWVHCNDSKLNVCSVEEVCKTQAYILFYTQRTVQGNARISETHLQAQVQSSNNDEGRPQTFS

SEQ ID NO: 95005 - protein, 585 aa, Homo sapiens
  Payload ID: 18944
  Gene Name: ubiquitin specific peptidase 49
  ENSP ID: ENSP00000362101
MDRCKHVGRLRLAQDHSILNPQKWCCLECATTESVWACLKCSHVACGRYIEDHALKHFEETGHPLAMEVRDLYVFCYLCKDYVLNDNPEGDLKLLRSSLLAVRGQKQDTPVRRGRTLRSMASGEDVVLPQRAPQGQPQMLTALWYRRQRLLARTLRLWFEKSSRGQAKLEQRRQEEALERKKEEARRRRREVKRRLLEELASTPPRKSARLLLHTPRDAGPAASRPAALPTSRRVPAATLKLRRQPAMAPGVTGLRNLGNTCYMNSILQVLSHLQKFRECFLNLDPSKTEHLFPKATNGKTQLSGKPTNSSATELSLRNDRAEACEREGFCWNGRASISRSLELIQNKEPSSKHISLCRELHTLFRVMWSGKWALVSPFAMLHSVWSLIPAFRGYDQQDAQEFLCELLHKVQQELESEGTTRRILIPFSQRKLTKQVLKVVNTIFHGQLLSQVTCISCNYKSNTIEPFWDLSLEFPERYHCIEKGFVPLNQTECLLTEMLAKFTETEALEGRIYACDQCNSKRRKSNPKPLVLSEARKQLMIYRLPQVLRLHLKRFRWSGRNHREKIGVHVVFDQVFGSTAMTQS

SEQ ID NO: 95006 - protein, 688 aa, Homo sapiens; identical to SEQ ID NO: 95004
  Payload ID: 18944
  Gene Name: ubiquitin specific peptidase 49
  Uniprot ID: Q70CQ1
  ENSP ID: ENSP00000377797

SEQ ID NO: 95007 - protein, 52 aa, Homo sapiens
  Payload ID: 18944
  Gene Name: ubiquitin specific peptidase 49
  ENSP ID: ENSP00000389842
  MOD_RES (1)..(1): Any amino acid
XELESEGTTRRILIPFSQRKLTKQVLKVVNTIFHGQLLSQANDENPIPNPLF

SEQ ID NO: 95008 - protein, 15 aa, Homo sapiens
  Payload ID: 18944
  Gene Name: ubiquitin specific peptidase 49
  ENSP ID: ENSP00000411603
MDRCKHVGRLRLAQD

SEQ ID NO: 95009 - protein, 858 aa, Homo sapiens
  Payload ID: 18945
  Gene Name: ubiquitin specific peptidase 5 (isopeptidase T)
  Uniprot ID: P45974
  ENSP ID: ENSP00000229268
MAELSEEALLSVLPTIRVPKAGDRVHKDECAFSFDTPESEGGLYICMNTFLGFGKQYVERHFNKTGQRVYLHLRRTRRPKEEDPATGTGDPPRKKPTRLAIGVEGGFDLSEEKFELDEDVKIVILPDYLEIARDGLGGLPDIVRDRVTSAVEALLSADSASRKQEVQAWDGEVRQVSKHAFSLKQLDNPARIPPCGWKCSKCDMRENLWLNLTDGSILCGRRYFDGSGGNNHAVEHYRETGYPLAVKLGTITPDGADVYSYDEDDMVLDPSLAEHLSHFGIDMLKMQKTDKTMTELEIDMNQRIGEWELIQESGVPLKPLFGPGYTGIRNLGNSCYLNSVVQVLFSIPDFQRKYVDKLEKIFQNAPTDPTQDFSTQVAKLGHGLLSGEYSKPVPESGDGERVPEQKEVQDGIAPRMFKALIGKGHPEFSTNRQQDAQEFFLHLINMVERNCRSSENPNEVFRFLVEEKIKCLATEKVKYTQRVDYIMQLPVPMDAALNKEELLEYEEKKRQAEEEKMALPELVRAQVPFSSCLEAYGAPEQVDDFWSTALQAKSVAVKTTRFASFPDYLVIQIKKFTFGLDWVPKKLDVSIEMPEELDISQLRGTGLQPGEEELPDIAPPLVTPDEPKGSLGFYGNEDEDSFCSPHFSSPTSPMLDESVIIQLVEMGFPMDACRKAVYYTGNSGAEAAMNWVMSHMDDPDFANPLILPGSSGPGSTSAAADPPPEDCVTTIVSMGFSRDQALKALRATNNSLERAVDWIFSHIDDLDAEAAMDISEGRSAADSISESVPVGPKVRDGPGKYQLFAFISHMGTSTMCGHYVCHIKKEGRWVIYNDQKVCASEKPPKDLGYIYFYQRVAS

SEQ ID NO: 95010 - protein, 835 aa, Homo sapiens
  Payload ID: 18945
  Gene Name: ubiquitin specific peptidase 5 (isopeptidase T)
  Uniprot ID: P45974
  ENSP ID: ENSP00000373883
MAELSEEALLSVLPTIRVPKAGDRVHKDECAFSFDTPESEGGLYICMNTFLGFGKQYVERHFNKTGQRVYLHLRRTRRPKEEDPATGTGDPPRKKPTRLAIGVEGGFDLSEEKFELDEDVKIVILPDYLEIARDGLGGLPDIVRDRVTSAVEALLSADSASRKQEVQAWDGEVRQVSKHAFSLKQLDNPARIPPCGWKCSKCDMRENLWLNLTDGSILCGRRYFDGSGGNNHAVEHYRETGYPLAVKLGTITPDGADVYSYDEDDMVLDPSLAEHLSHFGIDMLKMQKTDKTMTELEIDMNQRIGEWELIQESGVPLKPLFGPGYTGIRNLGNSCYLNSVVQVLFSIPDFQRKYVDKLEKIFQNAPTDPTQDFSTQVAKLGHGLLSGEYSKPVPESGDGERVPEQKEVQDGIAPRMFKALIGKGHPEFSTNRQQDAQEFFLHLINMVERNCRSSENPNEVFRFLVEEKIKCLATEKVKYTQRVDYIMQLPVPMDAALNKEELLEYEEKKRQAEEEKMALPELVRAQVPFSSCLEAYGAPEQVDDFWSTALQAKSVAVKTTRFASFPDYLVIQIKKFTFGLDWVPKKLDVSIEMPEELDISQLRGTGLQPGEEELPDIAPPLVTPDEPKAPMLDESVIIQLVEMGFPMDACRKAVYYTGNSGAEAAMNWVMSHMDDPDFANPLILPGSSGPGSTSAAADPPPEDCVTTIVSMGFSRDQALKALRATNNSLERAVDWIFSHIDDLDAEAAMDISEGRSAADSISESVPVGPKVRDGPGKYQLFAFISHMGTSTMCGHYVCHIKKEGRWVIYNDQKVCASEKPPKDLGYIYFYQRVAS

SEQ ID NO: 95011 - protein, 137 aa, Homo sapiens
  Payload ID: 18945
  Gene Name: ubiquitin specific peptidase 5 (isopeptidase T)
  ENSP ID: ENSP00000444668
MAELSEEALLSVLPTIRVPKAGDRVHKDECAFSFDTPESEGGLYICMNTFLGFGKQYVERHFNKTGQRVYLHLRRTRRPKEEDPATGTGDPPRKKPTRLAIGVEGGFDLSEEKFELDEDVKYTQRVDYIMQLPVPMD

SEQ ID NO: 95012 - protein, 85 aa, Homo sapiens
  Payload ID: 18946
  Gene Name: ubiquitin specific peptidase 50
  ENSP ID: ENSP00000434014
FFQQDALTWNNEIHCSFCETKQETAVRASISKAPKIIIFHLKRSMRRFVSNIYRASVVGLLEGKFTKCGPPVTGFFGVFNSQTLH

SEQ ID NO: 95013 - protein, 334 aa, Homo sapiens
  Payload ID: 18946
  Gene Name: ubiquitin specific peptidase 50
  Uniprot ID: Q70EL3
  ENSP ID: ENSP00000434676
MTSQPSLPADDFDIYHVLAECTDYYDTLPVKEADGNQPHFQGVTGLWNLGNTCCVNAISQCLCSILPLVEYFLTGKYITALQNDCSEVATAFAYLMTDMWLGDSDCVSPEIFWSALGNLYPAFTKKMQQDAQEFLICVLNELHEALKKYHYSRRRSYEKGSTQRCCRKWITTETSIITQLFEEQLNYSIVCLKCEKCTYKNEVFTVFSLPIPSKYECSLRDCLQCFFQQDALTWNNEIHCSFCETKQETAVRASISKAPKIIIFHLKRFDIQGTTKRKLRTDIHYPLTNLDLTPYICSIFRKYPKYNLCAVVNHFGDLDGGHYTAFCKNSVTQA

SEQ ID NO: 95014 - protein, 61 aa, Homo sapiens
  Payload ID: 18946
  Gene Name: ubiquitin specific peptidase 50
  ENSP ID: ENSP00000453946
MTSQPSLPADDFDIYHVLTTTPGEDHMRKDLLRDAAGSGLPLRHPSSPSCLKSSSIIASYV

SEQ ID NO: 95015 - protein, 343 aa, Homo sapiens
  Payload ID: 18946
  Gene Name: ubiquitin specific peptidase 50
  ENSP ID: ENSP00000483490
MTSQPSLPADDFDIYHVLAECTDYYDTLPVKEADGNQPHFQGVTGLWNLGNTCCVNAISQCLCSILPLVEYFLTGKYITALQNKTYPFLLPSDCSEVATAFAYLMTDMWLGDSDCVSPEIFWSALGNLYPAFTKKMQQDAQEFLICVLNELHEALKKYHYSRRRSYEKGSTQRCCRKWITTETSIITQLFEEQLNYSIVCLKCEKCTYKNEVFTVFSLPIPSKYECSLRDCLQCFFQQDALTWNNEIHCSFCETKQETAVRASISKAPKIIIFHLKRFDIQGTTKRKLRTDIHYPLTNLDLTPYICSIFRKYPKYNLCAVVNHFGDLDGGHYTAFCKNSVTQA

SEQ ID NO: 95016 - protein, 711 aa, Homo sapiens
  Payload ID: 18947
  Gene Name: ubiquitin specific peptidase 51
  Uniprot ID: Q70EK9
  ENSP ID: ENSP00000423333
MAQVRETSLPSGSGVRWISGGGGGASPEEAVEKAGKMEEAAAGATKASSRREAEEMKLEPLQEREPAPEENLTWSSSGGDEKVLPSIPLRCHSSSSPVCPRRKPRPRPQPRARSRSQPGLSAPPPPPARPPPPPPPPPPPAPRPRAWRGSRRRSRPGSRPQTRRSCSGDLDGSGDPGGLGDWLLEVEFGQGPTGCSHVESFKVGKNWQKNLRLIYQRFVWSGTPETRKRKAKSCICHVCSTHMNRLHSCLSCVFFGCFTEKHIHKHAETKQHHLAVDLYHGVIYCFMCKDYVYDKDIEQIAKETKEKILRLLTSTSTDVSHQQFMTSGFEDKQSTCETKEQEPKLVKPKKKRRKKSVYTVGLRGLINLGNTCFMNCIVQALTHIPLLKDFFLSDKHKCIMTSPSLCLVCEMSSLFHAMYSGSRTPHIPYKLLHLIWIHAEHLAGYRQQDAHEFLIAILDVLHRHSKDDSGGQEANNPNCCNCIIDQIFTGGLQSDVTCQACHSVSTTIDPCWDISLDLPGSCATFDSQNPERADSTVSRDDHIPGIPSLTDCLQWFTRPEHLGSSAKIKCNSCQSYQESTKQLTMKKLPIVACFHLKRFEHVGKQRRKINTFISFPLELDMTPFLASTKESRMKEGQPPTDCVPNENKYSLFAVINHHGTLESGHYTSFIRQQKDQWFSCDDAIITKATIEDLLYSEGYLLFYHKQGLEKD

SEQ ID NO: 95017 - protein, 1073 aa, Homo sapiens
  Payload ID: 18948
  Gene Name: ubiquitin specific peptidase 53
  Uniprot ID: Q70EK8
  ENSP ID: ENSP00000274030
MAWVKFLRKPGGNLGKVYQPGSMLSLAPTKGLLNEPGQNSCFLNSAVQVLWQLDIFRRSLRVLTGHVCQGDACIFCALKTIFAQFQHSREKALPSDNIRHALAESFKDEQRFQLGLMDDAAECFENMLERIHFHIVPSRDADMCTSKSCITHQKFAMTLYEQCVCRSCGASSDPLPFTEFVRYISTTALCNEVERMLERHERFKPEMFAELLQAANTTDDYRKCPSNCGQKIKIRRVLMNCPEIVTIGLVWDSEHSDLTEAVVRNLATHLYLPGLFYRVTDENAKNSELNLVGMICYTSQHYCAFAFHTKSSKWVFFDDANVKEIGTRWKDVVSKCIRCHFQPLLLFYANPDGTAVSTEDALRQVISWSHYKSVAENMGCEKPVIHKSDNLKENGFGDQAKQRENQKFPTDNISSSNRSHSHTGVGKGPAKLSHIDQREKIKDISRECALKAIEQKNLLSSQRKDLEKGQRKDLGRHRDLVDEDLSHFQSGSPPAPNGFKQHGNPHLYHSQGKGSYKHDRVVPQSRASAQIISSSKSQILAPGEKITGKVKSDNGTGYDTDSSQDSRDRGNSCDSSSKSRNRGWKPMRETLNVDSIFSESEKRQHSPRHKPNISNKPKSSKDPSFSNWPKENPKQKGLMTIYEDEMKQEIGSRSSLESNGKGAEKNKGLVEGKVHGDNWQMQRTESGYESSDHISNGSTNLDSPVIDGNGTVMDISGVKETVCFSDQITTSNLNKERGDCTSLQSQHHLEGFRKELRNLEAGYKSHEFHPESHLQIKNHLIKRSHVHEDNGKLFPSSSLQIPKDHNAREHIHQSDEQKLEKPNECKFSEWLNIENSERTGLPFHVDNSASGKRVNSNEPSSLWSSHLRTVGLKPETAPLIQQQNIMDQCYFENSLSTECIIRSASRSDGCQMPKLFCQNLPPPLPPKKYAITSVPQSEKSESTPDVKLTEVFKATSHLPKHSLSTASEPSLEVSTHMNDERHKETFQVRECFGNTPNCPSSSSTNDFQANSGAIDAFCQPELDSISTCPNETVSLTTYFSVDSCMTDTYRLKYHQRPKLSFPESSGFCNNSLS

SEQ ID NO: 95018 - protein, 1073 aa, Homo sapiens; identical to SEQ ID NO: 95017
  Payload ID: 18948
  Gene Name: ubiquitin specific peptidase 53
  Uniprot ID: Q70EK8
  ENSP ID: ENSP00000409906

SEQ ID NO: 95019 - protein, 64 aa, Homo sapiens
  Payload ID: 18948
  Gene Name: ubiquitin specific peptidase 53
  ENSP ID: ENSP00000421729
HYCAFAFHTKSSKWVFFDDANVKEIGTRWKDVVSKCIRCHFQPLLLFYANPDGTAVSTEDALRM

SEQ ID NO: 95020 - protein, 327 aa, Homo sapiens
  Payload ID: 18948
  Gene Name: ubiquitin specific peptidase 53
  ENSP ID: ENSP00000426628
MAWVKFLRKPGGNLGKVYQPGSMLSLAPTKGLLNEPGQNSCFLNSAVQVLWQLDIFRRSLRVLTGHVCQGDACIFCALKTIFAQFQHSREKALPSDNIRHALAESFKDEQRFQLGLMDDAAECFENMLERIHFHIVPSRDADMCTSKSCITHQKFAMTLYEQCVCRSCGASSDPLPFTEFVRYISTTALCNEVERMLERHERFKPEMFAELLQAANTTDDYRKCPSNCGQKIKIRRVLMNCPEIVTIGLVWDSEHSDLTEAVVRNLATHLYLPGLFYRVTDENAKNSELNLVGMICYTSQHYCAFAFHTKSSKWVFFDDANVKEIIP

SEQ ID NO: 95021 - protein, 1684 aa, Homo sapiens
  Payload ID: 18949
  Gene Name: ubiquitin specific peptidase 54
  Uniprot ID: Q70EL1
  ENSP ID: ENSP00000345216
MSWKRNYFSGGRGSVQGMFAPRSSTSIAPSKGLSNEPGQNSCFLNSALQVLWHLDIFRRSFRQLTTHKCMGDSCIFCALKGIFNQFQCSSEKVLPSDTLRSALAKTFQDEQRFQLGIMDDAAECFENLLMRIHFHIADETKEDICTAQHCISHQKFAMTLFEQCVCTSCGATSDPLPFIQMVHYISTTSLCNQAICMLERREKPSPSMFGELLQNASTMGDLRNCPSNCGERIRIRRVLMNAPQIITIGLVWDSDHSDLAEDVIHSLGTCLKLGDLFFRVTDDRAKQSELYLVGMICYYGKHYSTFFFQTKIRKWMYFDDAHVKEIGPKWKDVVTKCIKGHYQPLLLLYADPQGTPVSTQDLPPQAEFQSYSRTCYDSEDSGREPSISSDTRTDSSTESYPYKHSHHESVVSHFSSDSQGTVIYNVENDSMSQSSRDTGHLTDSECNQKHTSKKGSLIERKRSSGRVRRKGDEPQASGYHSEGETLKEKQAPRNASKPSSSTNRLRDFKETVSNMIHNRPSLASQTNVGSHCRGRGGDQPDKKPPRTLPLHSRDWEIESTSSESKSSSSSKYRPTWRPKRESLNIDSIFSKDKRKHCGYTQLSPFSEDSAKEFIPDEPSKPPSYDIKFGGPSPQYKRWGPARPGSHLLEQHPRLIQRMESGYESSERNSSSPVSLDAALPESSNVYRDPSAKRSAGLVPSWRHIPKSHSSSILEVDSTASMGGWTKSQPFSGEEISSKSELDELQEEVARRAQEQELRRKREKELEAAKGFNPHPSRFMDLDELQNQGRSDGFERSLQEAESVFEESLHLEQKGDCAAALALCNEAISKLRLALHGASCSTHSRALVDKKLQISIRKARSLQDRMQQQQSPQQPSQPSACLPTQAGTLSQPTSEQPIPLQVLLSQEAQLESGMDTEFGASSFFHSPASCHESHSSLSPESSAPQHSSPSRSALKLLTSVEVDNIEPSAFHRQGLPKAPGWTEKNSHHSWEPLDAPEGKLQGSRCDNSSCSKLPPQEGRGIAQEQLFQEKKDPANPSPVMPGIATSERGDEHSLGCSPSNSSAQPSLPLYRTCHPIMPVASSFVLHCPDPVQKTNQCLQGQSLKTSLTLKVDRGSEETYRPEFPSTKGLVRSLAEQFQRMQGVSMRDSTGFKDRSLSGSLRKNSSPSDSKPPFSQGQEKGHWPWAKQQSSLEGGDRPLSWEESTEHSSLALNSGLPNGETSSGGQPRLAEPDIYQEKLSQVRDVRSKDLGSSTDLGTSLPLDSWVNITRFCDSQLKHGAPRPGMKSSPHDSHTCVTYPERNHILLHPHWNQDTEQETSELESLYQASLQASQAGCSGWGQQDTAWHPLSQTGSADGMGRRLHSAHDPGLSKTSTAEMEHGLHEARTVRTSQATPCRGLSRECGEDEQYSAENLRRISRSLSGTVVSEREEAPVSSHSFDSSNVRKPLETGHRCSSSSSLPVIHDPSVFLLGPQLYLPQPQFLSPDVLMPTMAGEPNRLPGTSRSVQQFLAMCDRGETSQGAKYTGRTLNYQSLPHRSRTDNSWAPWSETNQHIGTRFLTTPGCNPQLTYTATLPERSKGLQVPHTQSWSDLFHSPSHPPIVHPVYPPSSSLHVPLRSAWNSDPVPGSRTPGPRRVDMPPDDDWRQSSYASHSGHRRTVGEGFLFVLSDAPRREQIRARVLQHSQW

SEQ ID NO: 95022 - protein, 1684 aa, Homo sapiens; identical to SEQ ID NO: 95021
  Payload ID: 18949
  Gene Name: ubiquitin specific peptidase 54
  Uniprot ID: Q70EL1
  ENSP ID: ENSP00000386080

SEQ ID NO: 95023 - protein, 635 aa, Homo sapiens
  Payload ID: 18949
  Gene Name: ubiquitin specific peptidase 54
  ENSP ID: ENSP00000399972
  MOD_RES (1)..(1): Any amino acid
XPSPSMFGELLQNASTMGDLRNCPSNCGERIRIRRVLMNAPQIITIGLVWDSDHSDLAEDVIHSLGTCLKLGDLFFRVTDDRAKQSELYLVGMICYYGKHYSTFFFQTKIRKWMYFDDAHVKEIGPKWKDVVTKCIKGHYQPLLLLYADPQGTPVSTQDLPPQAEFQSYSRTCYDSEDSGREPSISSDTRTDSSTESYPYKHSHHESVVSHFSSDSQGTVIYNVENDSMSQSSRDTGHLTDSECNQKHTSKKGSLIERKRSSGRVRRKGDEPQASGYHSEGETLKEKQAPRNASKPSSSTNRLRDFKETVSNMIHNRPSLASQTNVGSHCRGRGGDQPDKKPPRTLPLHSRDWEIESTSSESKSSSSSKYRPTWRPKRESLNIDSIFSKDKRKHCGYTQLSPFSEDSAKEFIPDEPSKPPSYDIKFGGPSPQYKRWGPARPGSHLLEQHPRLIQRMESGYESSERNSSSPVSLDAALPESSNVYRDPSAKRSAGLVPSWRHIPKSHSSSILEVDSTASMGGWTKSQPFSGEEISSKSELDELQEEVARRAQEQELRRKREKELEAAKGFNPHPSRFMDLDELQNQGRSDGFERSLQEAESVFEESLHLEQKGDCAAALALCNEAILNSLSRSKYC

SEQ ID NO: 95024 - protein, 143 aa, Homo sapiens
  Payload ID: 18949
  Gene Name: ubiquitin specific peptidase 54
  ENSP ID: ENSP00000402435
MSWKRNYFSGGRGSVQGMFAPRSSTSIAPSKGLSNEPGQNSCFLNSALQVLWHLDIFRRSFRQLTTHKCMGDSCIFCALKGIFNQFQCSSEKVLPSDTLRSALAKTFQDEQRFQLGIMDDAAECFLFFRVTDDRAKQSELYLV

SEQ ID NO: 95025 - protein, 358 aa, Homo sapiens
  Payload ID: 18949
  Gene Name: ubiquitin specific peptidase 54
  ENSP ID: ENSP00000404644
  MOD_RES (1)..(1): Any amino acid
XLTDSECNQKHTSKKGSLIERKRSSGRVRRKGDEPQASGYHSEGETLKEKQAPRNASKPSSSTNRLRDFKETVSNMIHNRPSLASQTNVGSHCRGRGGDQPDKKPPRTLPLHSRDWEIESTSSESKSSSSSKYRPTWRPKRESLNIDSIFSKDKRKHCGYTQLSPFSEDSAKEFIPDEPSKPPSYDIKFGGPSPQYKRWGPARPGSHLLEQHPRLIQRMESGYESSERNSSSPVSLDAALPESSNVYRDPSAKRSAGLVPSWRHIPKSHSSSILEVDSTASMGGWTKSQPFSGEEISSKSELDELQEEVARRAQEQELRRKREKELEAAKGFNPHPSRFMDLDELQNQVNSLSRSKYC

SEQ ID NO: 95026 - protein, 153 aa, Homo sapiens
  Payload ID: 18949
  Gene Name: ubiquitin specific peptidase 54
  ENSP ID: ENSP00000404710
MSWKRNYFSGGRGSVQGMFAPRSSTSIAPSKGLSNEPGQNSCFLNSALQVLWHLDIFRRSFRQLTTHKCMGDSCIFCALKGIFNQFQCSSEKVLPSDTLRSALAKTFQDEQRFQLGIMDDAAECFENLLMRIHFHIADETKEDICTAQHCISH

SEQ ID NO: 95027 - protein, 80 aa, Homo sapiens
  Payload ID: 18949
  Gene Name: ubiquitin specific peptidase 54
  ENSP ID: ENSP00000407245
MSWKRNYFSGGRGSVQGMFAPRSSTSIAPSKGLSNEPGQNSCFLNSALQVLWHLDIFRRSFRQLTTHKCMGDSCIFCALK

SEQ ID NO: 95028 - protein, 725 aa, Homo sapiens
  Payload ID: 18949
  Gene Name: ubiquitin specific peptidase 54
  Uniprot ID: Q70EL1
  ENSP ID: ENSP00000407368
MDTEFGASSFFHSPASCHESHSSLSPESSAPQHSSPSRSALKLLTSVEVDNIEPSAFHRQGLPKAPGWTEKNSHHSWEPLDAPEGKLQGSRCDNSSCSKLPPQEGRGIAQEQLFQEKKDPANPSPVMPGIATSERGDEHSLGCSPSNSSAQPSLPLYRTCHPIMPVASSFVLHCPDPVQKTNQCLQGQSLKTSLTLKVDRGSEETYRPEFPSTKGLVRSLAEQFQRMQGVSMRDSTGFKDRSLSGSLRKNSSPSDSKPPFSQGQEKGHWPWAKQQSSLEGGDRPLSWEESTEHSSLALNSGLPNGETSSGGQPRLAEPDIYQEKLSQVRDVRSKDLGSSTDLGTSLPLDSWVNITRFCDSQLKHGAPRPGMKSSPHDSHTCVTYPERNHILLHPHWNQDTEQETSELESLYQASLQASQAGCSGWGQQDTAWHPLSQTGSADGMGRRLHSAHDPGLSKTSTAEMEHGLHEARTVRTSQDSSNVRKPLETGHRCSSSSSLPVIHDPSVFLLGPQLYLPQPQFLSPDVLMPTMAGEPNRLPGTSRSVQQFLAMCDRGETSQGAKYTGRTLNYQSLPHRSRTDNSWAPWSETNQHIGTRFLTTPGCNPQLTYTATLPERSKGLQVPHTQSWSDLFHSPSHPPIVHPVYPPSSSLHVPLRSAWNSDPVPGSRTPGPRRVDMPPDDDWRQSSYASHSGHRRTVGEGFLFVLSDAPRREQIRARVLQHSQW

SEQ ID NO: 95029 - protein, 412 aa, Homo sapiens
  Payload ID: 18949
  Gene Name: ubiquitin specific peptidase 54
  ENSP ID: ENSP00000473466
  MOD_RES (1)..(1): Any amino acid
XREPSISSDTRTDSSTESYPYKHSHHESVVSHFSSDSQGTVIYNVENDSMSQSSRDTGETLKEKQAPRNASKPSSSTNRLRDFKETVSNMIHNRPSLASQTNVGSHCRGRGGDQPDKKPPRTLPLHSRDWEIESTSSESKSSSSSKYRPTWRPKRESLNIDSIFSKDKRKHCGYTQLSPFSEDSAKEFIPDEPSKPPSYDIKFGGPSPQYKRWGPARPGSHLLEQHPRLIQRMESGYESSERNSSSPVSLDAALPESSNVYRDPSAKRSAGLVPSWRHIPKSHSSSILEVDSTASMGGWTKSQPFSGEEISSKSELDELQEEVARRAQEQELRRKREKELEAAKGFNPHPSRFMDLDELQNQGRSDGFERSLQEAESVFEESLHLEQKGDCAAALALCNEAILNSLSRSKYC

SEQ ID NO: 95030 - protein, 1406 aa, Homo sapiens
  Payload ID: 18950
  Gene Name: ubiquitin specific peptidase 6
  Uniprot ID: P35125
  ENSP ID: ENSP00000250066
MDMVENADSLQAQERKDILMKYDKGHRAGLPEDKGPEPVGINSSIDRFGILHETELPPVTAREAKKIRREMTRTSKWMEMLGEWETYKHSSKLIDRVYKGIPMNIRGPVWSVLLNIQEIKLKNPGRYQIMKERGKRSSEHIHHIDLDVRTTLRNHVFFRDRYGAKQRELFYILLAYSEYNPEVGYCRDLSHITALFLLYLPEEDAFWALVQLLASERHSLPGFHSPNGGTVQGLQDQQEHVVPKSQPKTMWHQDKEGLCGQCASLGCLLRNLIDGISLGLTLRLWDVYLVEGEQVLMPITSIALKVQQKRLMKTSRCGLWARLRNQFFDTWAMNDDTVLKHLRASTKKLTRKQGDLPPPAKREQGSLAPRPVPASRGGKTLCKGYRQAPPGPPAQFQRPICSASPPWASRFSTPCPGGAVREDTYPVGTQGVPSLALAQGGPQGSWRFLEWKSMPRLPTDLDIGGPWFPHYDFEWSCWVRAISQEDQLATCWQAEHCGEVHNKDMSWPEEMSFTANSSKIDRQKVPTEKGATGLSNLGNTCFMNSSIQCVSNTQPLTQYFISGRHLYELNRTNPIGMKGHMAKCYGDLVQELWSGTQKSVAPLKLRRTIAKYAPKFDGFQQQDSQELLAFLLDGLHEDLNRVHEKPYVELKDSDGRPDWEVAAEAWDNHLRRNRSIIVDLFHGQLRSQVKCKTCGHISVRFDPFNFLSLPLPMDSYMDLEITVIKLDGTTPVRYGLRLNMDEKYTGLKKQLRDLCGLNSEQILLAEVHDSNIKNFPQDNQKVQLSVSGFLCAFEIPVPSSPISASSPTQIDFSSSPSTNGMFTLTTNGDLPKPIFIPNGMPNTVVPCGTEKNFTNGMVNGHMPSLPDSPFTGYIIAVHRKMMRTELYFLSPQENRPSLFGMPLIVPCTVHTRKKDLYDAVWIQVSWLARPLPPQEASIHAQDRDNCMGYQYPFTLRVVQKDGNSCAWCPQYRFCRGCKIDCGEDRAFIGNAYIAVDWHPTALHLRYQTSQERVVDKHESVEQSRRAQAEPINLDSCLRAFTSEEELGESEMYYCSKCKTHCLATKKLDLWRLPPFLIIHLKRFQFVNDQWIKSQKIVRFLRESFDPSAFLVPRDPALCQHKPLTPQGDELSKPRILAREVKKVDAQSSAGKEDMLLSKSPSSLSANISSSPKGSPSSSRKSGTSCPSSKNSSPNSSPRTLGRSKGRLRLPQIGSKNKPSSSKKNLDASKENGAGQICELADALSRGHMRGGSQPELVTPQDHEVALANGFLYEHEACGNGCGDGYSNGQLGNHSEEDSTDDQREDTHIKPIYNLYAISCHSGILSGGHYITYAKNPNCKWYCYNDSSCEELHPDEIDTDSAYILFYEQQGIDYAQFLPKIDGKKMADTSSTDEDSESDYEKYSMLQ

SEQ ID NO: 95031 - protein, 1406 aa, Homo sapiens; identical to SEQ ID NO: 95030
  Payload ID: 18950
  Gene Name: ubiquitin specific peptidase 6
  Uniprot ID: P35125
  ENSP ID: ENSP00000460380

SEQ ID NO: 95032 - protein, 786 aa, Homo sapiens
  Payload ID: 18950
  Gene Name: ubiquitin specific peptidase 6
  Uniprot ID: P35125
  ENSP ID: ENSP00000461581
MDMVENADSLQAQERKDILMKYDKGHRAGLPEDKGPEPVGINSSIDRFGILHETELPPVTAREAKKIRREMTRTSKWMEMLGEWETYKHSSKLIDRVYKGIPMNIRGPVWSVLLNIQEIKLKNPGRYQIMKERGKRSSEHIHHIDLDVRTTLRNHVFFRDRYGAKQRELFYILLAYSEYNPEVGYCRDLSHITALFLLYLPEEDAFWALVQLLASERHSLPGFHSPNGGTVQGLQDQQEHVVPKSQPKTMWHQDKEGLCGQCASLGCLLRNLIDGISLGLTLRLWDVYLVEGEQVLMPITSIALKVQQKRLMKTSRCGLWARLRNQFFDTWAMNDDTVLKHLRASTKKLTRKQGDLPPPAKREQGSLAPRPVPASRGGKTLCKGYRQAPPGPPAQFQRPICSASPPWASRFSTPCPGGAVREDTYPVGTQGVPSLALAQGGPQGSWRFLEWKSMPRLPTDLDIGGPWFPHYDFEWSCWVRAISQEDQLATCWQAEHCGEVHNKDMSWPEEMSFTANSSKIDRQKVPTEKGATGLSNLGNTCFMNSSIQCVSNTQPLTQYFISGRHLYELNRTNPIGMKGHMAKCYGDLVQELWSGTQKSVAPLKLRRTIAKYAPKFDGFQQQDSQELLAFLLDGLHEDLNRVHEKPYVELKDSDGRPDWEVAAEAWDNHLRRNRSIIVDLFHGQLRSQVKCKTCGHISVRFDPFNFLSLPLPMDSYMDLEITVIKLDGTTPVRYGLRLNMDEKYTGLKKQLRDLCGLNSEQILLAEVHDSNIKISPLHHLQMECSP

SEQ ID NO: 95033 - protein, 376 aa, Homo sapiens
  Payload ID: 18950
  Gene Name: ubiquitin specific peptidase 6
  ENSP ID: ENSP00000461817
MDMVENADSLQAQERKDILMKYDKGHRAGLPEDKGPEPVGINSSIDRFGILHETELPPVTAREAKKIRREMTRTSKWMEMLGEWETYKHSSKLIDRVYKGIPMNIRGPVWSVLLNIQEIKLKNPGRYQIMKERGKRSSEHIHHIDLDVRTTLRNHVFFRDRYGAKQRELFYILLAYSEYNPEVGYCRDLSHITALFLLYLPEEDAFWALVQLLASERHSLPGFHSPNGGTVQGLQDQQEHVVPKSQPKTMWHQDKEGLCGQCASLGCLLRNLIDGISLGLTLRLWDVYLVEGEQVLMPITSIALKVQQKRLMKTSRCGLWARLRNQFFDTWAMNDDTVLKHLRASTKKLTRKQGDLPPPGPTALGRRCVAGSPQPV

SEQ ID NO: 95034 - protein, 1102 aa, Homo sapiens
  Payload ID: 18951
  Gene Name: ubiquitin specific peptidase 7 (herpes virus-associated)
  Uniprot ID: Q93009
  ENSP ID: ENSP00000343535
MNHQQQQQQQKAGEQQLSEPEDMEMEAGDTDDPPRITQNPVINGNVALSDGHNTAEEDMEDDTSWRSEATFQFTVERFSRLSESVLSPPCFVRNLPWKIMVMPRFYPDRPHQKSVGFFLQCNAESDSTSWSCHAQAVLKIINYRDDEKSFSRRISHLFFHKENDWGFSNFMAWSEVTDPEKGFIDDDKVTFEVFVQADAPHGVAWDSKKHTGYVGLKNQGATCYMNSLLQTLFFTNQLRKAVYMMPTEGDDSSKSVPLALQRVFYELQHSDKPVGTKKLTKSFGWETLDSFMQHDVQELCRVLLDNVENKMKGTCVEGTIPKLFRGKMVSYIQCKEVDYRSDRREDYYDIQLSIKGKKNIFESFVDYVAVEQLDGDNKYDAGEHGLQEAEKGVKFLTLPPVLHLQLMRFMYDPQTDQNIKINDRFEFPEQLPLDEFLQKTDPKDPANYILHAVLVHSGDNHGGHYVVYLNPKGDGKWCKFDDDVVSRCTKEEAIEHNYGGHDDDLSVRHCTNAYMLVYIRESKLSEVLQAVTDHDIPQQLVERLQEEKRIEAQKRKERQEAHLYMQVQIVAEDQFCGHQGNDMYDEEKVKYTVFKVLKNSSLAEFVQSLSQTMGFPQDQIRLWPMQARSNGTKRPAMLDNEADGNKTMIELSDNENPWTIFLETVDPELAASGATLPKFDKDHDVMLFLKMYDPKTRSLNYCGHIYTPISCKIRDLLPVMCDRAGFIQDTSLILYEEVKPNLTERIQDYDVSLDKALDELMDGDIIVFQKDDPENDNSELPTAKEYFRDLYHRVDVIFCDKTIPNDPGFVVTLSNRMNYFQVAKTVAQRLNTDPMLLQFFKSQGYRDGPGNPLRHNYEGTLRDLLQFFKPRQPKKLYYQQLKMKITDFENRRSFKCIWLNSQFREEEITLYPDKHGCVRDLLEECKKAVELGEKASGKLRLLEIVSYKIIGVHQEDELLECLSPATSRTFRIEEIPLDQVDIDKENEMLVTVAHFHKEVFGTFGIPFLLRIHQGEHFREVMKRIQSLLDIQEKEFEKFKFAIVMMGRHQYINEDEYEVNLKDFEPQPGNMSHPRPWLGLDHFNKAPKRSRYTYLEKAIKIHN

SEQ ID NO: 95035 - protein, 1086 aa, Homo sapiens
  Payload ID: 18951
  Gene Name: ubiquitin specific peptidase 7 (herpes virus-associated)
  Uniprot ID: Q93009
  ENSP ID: ENSP00000371310
MAGNHRLGLEAGDTDDPPRITQNPVINGNVALSDGHNTAEEDMEDDTSWRSEATFQFTVERFSRLSESVLSPPCFVRNLPWKIMVMPRFYPDRPHQKSVGFFLQCNAESDSTSWSCHAQAVLKIINYRDDEKSFSRRISHLFFHKENDWGFSNFMAWSEVTDPEKGFIDDDKVTFEVFVQADAPHGVAWDSKKHTGYVGLKNQGATCYMNSLLQTLFFTNQLRKAVYMMPTEGDDSSKSVPLALQRVFYELQHSDKPVGTKKLTKSFGWETLDSFMQHDVQELCRVLLDNVENKMKGTCVEGTIPKLFRGKMVSYIQCKEVDYRSDRREDYYDIQLSIKGKKNIFESFVDYVAVEQLDGDNKYDAGEHGLQEAEKGVKFLTLPPVLHLQLMRFMYDPQTDQNIKINDRFEFPEQLPLDEFLQKTDPKDPANYILHAVLVHSGDNHGGHYVVYLNPKGDGKWCKFDDDVVSRCTKEEAIEHNYGGHDDDLSVRHCTNAYMLVYIRESKLSEVLQAVTDHDIPQQLVERLQEEKRIEAQKRKERQEAHLYMQVQIVAEDQFCGHQGNDMYDEEKVKYTVFKVLKNSSLAEFVQSLSQTMGFPQDQIRLWPMQARSNGTKRPAMLDNEADGNKTMIELSDNENPWTIFLETVDPELAASGATLPKFDKDHDVMLFLKMYDPKTRSLNYCGHIYTPISCKIRDLLPVMCDRAGFIQDTSLILYEEVKPNLTERIQDYDVSLDKALDELMDGDIIVFQKDDPENDNSELPTAKEYFRDLYHRVDVIFCDKTIPNDPGFVVTLSNRMNYFQVAKTVAQRLNTDPMLLQFFKSQGYRDGPGNPLRHNYEGTLRDLLQFFKPRQPKKLYYQQLKMKITDFENRRSFKCIWLNSQFREEEITLYPDKHGCVRDLLEECKKAVELGEKASGKLRLLEIVSYKIIGVHQEDELLECLSPATSRTFRIEEIPLDQVDIDKENEMLVTVAHFHKEVFGTFGIPFLLRIHQGEHFREVMKRIQSLLDIQEKEFEKFKFAIVMMGRHQYINEDEYEVNLKDFEPQPGNMSHPRPWLGLDHFNKAPKRSRYTYLEKAIKIHN

SEQ ID NO: 95036 - protein, 509 aa, Homo sapiens
  Payload ID: 18951
  Gene Name: ubiquitin specific peptidase 7 (herpes virus-associated)
  ENSP ID: ENSP00000439272
MEDDTSWRSEATFQFTVERFSRLSESVLSPPCFVRNLPWKIMVMPRFYPDRPHQKSVGFFLQCNAESDSTSWSCHAQAVLKIINYRDDEKSFSRRISHLFFHKENDWGFSNFMAWSEVTDPEKGFIDDDKVTFEVFVQADAPHGVAWDSKKHTGYVGLKNQGATCYMNSLLQTLFFTNQLRKAVYMMPTEGDDSSKSVPLALQRVFYELQHSDKPVGTKKLTKSFGWETLDSFMQHDVQELCRVLLDNVENKMKGTCVEGTIPKLFRGKMVSYIQCKEVDYRSDRREDYYDIQLSIKGKKNIFESFVDYVAVEQLDGDNKYDAGEHGLQEAEKGVKFLTLPPVLHLQLMRFMYDPQTDQNIKINDRFEFPEQLPLDEFLQKTDPKDPANYILHAVLVHSGDNHGGHYVVYLNPKGDGKWCKFDDDVVSRCTKEEAIEHNYGGHDDDLSVRHCTNAYMLVYIRESKLTVGGAITRREKDRGSEAEGAAGSPSLYASADSRRGPVLWPPRE

SEQ ID NO: 95037 - protein, 91 aa, Homo sapiens
  Payload ID: 18951
  Gene Name: ubiquitin specific peptidase 7 (herpes virus-associated)
  ENSP ID: ENSP00000454362
MNHQQQQQQQKAGEQQLSEPEDMEMEAGDTDDPPRITQNPVINGNVALSDGHNTAEEDMEDDTSWRSEATFQFTVERFSRLSHGLAMHKQC

SEQ ID NO: 95038 - protein, 909 aa, Homo sapiens
  Payload ID: 18951
  Gene Name: ubiquitin specific peptidase 7 (herpes virus-associated)
  ENSP ID: ENSP00000454795
MVMPRFYPDRPHQKSVGFFLQCNAESDSTSWSCHAQAVLKIINYRDDEKSFSRRISHLFFHKENDWGFSNFMAWSEVTDPEKGFIDDDKVTFEVFVQADAPHGVAWDSKKHTGYVGLKNQGATCYMNSLLQTLFFTNQLRKAVYMMPTEGDDSSKSVPLALQRVFYELQHSDKPVGTKKLTKSFGWETLDSFMQHDVQELCRVLLDNVENKMKGTCVEGTIPKLFRGKMVSYIQCKEVDYRSDRREDYYDIQLSIKGKKNIFESFVDYVAVEQLDGDNKYDAGEHGLQEAEKGVKFLTLPPVLHLQLMRFMYDPQTDQNIKINDRFEFPEQLPLDEFLQKTDPKDPANYILHAVLVHSGDNHGGHYVVYLNPKGDGKWCKFDDDVVSRCTKEEAIEHNYGGHDDDLSVRHCTNAYMLVYIRESKLSEVLQAVTDHDIPQQLVERLQEEKRIEAQKRKERQEAHLYMQVQIVAEDQFCGHQGNDMYDEEKVKYTVFKVLKNSSLAEFVQSLSQTMGFPQDQIRLWPMQARSNGTKRPAMLDNEADGNKTMIELSDNENPWTIFLETVDPELAASGATLPKFDKDHDVMLFLKMYDPKTRSLNYCGHIYTPISCKIRDLLPVMCDRAGFIQDTSLILYEEVKPNLTERIQDYDVSLDKALDELMDGDIIVFQKDDPENDNSELPTAKEYFRDLYHRVDVIFCDKTIPNDPGFVVTLSNRMNYFQVAKTVAQRLNTDPMLLQFFKSQGYRDGPGNPLRHNYEGTLRDLLQFFKPRQPKKLYYQQLKMKITDFENRRSFKCIWLNSQFREEEITLYPDKHGCVRDLLEECKKAVELGEKASGKLRLLEIVSYKIIGVHQEDELLECLSPATSRTFRIEEIPLDQVDIDKENEMLVTVAHFHKEVFGTFGIPFL

SEQ ID NO: 95039 - protein, 159 aa, Homo sapiens
  Payload ID: 18951
  Gene Name: ubiquitin specific peptidase 7 (herpes virus-associated)
  ENSP ID: ENSP00000455719
MAACIRIKPDSKAGDTDDPPRITQNPVINGNVALSDGHNTAEEDMEDDTSWRSEATFQFTVERFSRLSESVLSPPCFVRNLPWKIMVMPRFYPDRPHQKSVGFFLQCNAESDSTSWSCHAQAVLKIINYRDDEKSFSRRISHLFFHKENDWGFSNFMAW

SEQ ID NO: 95040 - protein, 130 aa, Homo sapiens
  Payload ID: 18951
  Gene Name: ubiquitin specific peptidase 7 (herpes virus-associated)
  ENSP ID: ENSP00000456150
MEDDTSWRSEATFQFTVERFSRLSESVLSPPCFVRNLPWKIMVMPRFYPDRPHQKSVGFFLQCNAESDSTSWSCHAQAVLKIINYRDDEKSFSRRISHLFFHKENDWGFSNFMAWSEVTDPEKGFIDDDK

SEQ ID NO: 95041 - protein, 47 aa, Homo sapiens
  Payload ID: 18951
  Gene Name: ubiquitin specific peptidase 7 (herpes virus-associated)
  ENSP ID: ENSP00000456258
MAGNHRLGLEAGDTDDPPRITQNPVINGNVALSDGHNTAEEDMEDGE

SEQ ID NO: 95042 - protein, 117 aa, Homo sapiens
  Payload ID: 18951
  Gene Name: ubiquitin specific peptidase 7 (herpes virus-associated)
  ENSP ID: ENSP00000457237
MEDDTSWRSEATFQFTVERFSRLSESVLSPPCFVRNLPWKIMVMPRFYPDRPHQKSVGFFLQCNAESDSTSWSCHAQAVLKIINYRDDEKSFSRRISHLFFHKENDWGFSNFMAWSE

SEQ ID NO: 95043 - protein, 109 aa, Homo sapiens
  Payload ID: 18951
  Gene Name: ubiquitin specific peptidase 7 (herpes virus-associated)
  ENSP ID: ENSP00000457815
MEDDTSWRSEATFQFTVERFSRLSESVLSPPCFVRNLPWKIMVMPRFYPDRPHQKSVGFFLQCNAESDSTSWSCHAQAVLKIINYRDDEKSFSRRISHLFFHKENDWGF

SEQ ID NO: 95044 - protein, 17 aa, Homo sapiens
  Payload ID: 18951
  Gene Name: ubiquitin specific peptidase 7 (herpes virus-associated)
  ENSP ID: ENSP00000458027
  MOD_RES (1)..(1): Any amino acid
XNYCGHIYTPISCKIRS

SEQ ID NO: 95045 - protein, 68 aa, Homo sapiens
  Payload ID: 18951
  Gene Name: ubiquitin specific peptidase 7 (herpes virus-associated)
  ENSP ID: ENSP00000459594
DPKTRSLNYCGHIYTPISCKIRMTLKMITVNYPPQRSISEISTTALMSFSVIKQSLMILDLWLRYQIE

SEQ ID NO: 95046 - protein, 1118 aa, Homo sapiens
  Payload ID: 18952
  Gene Name: ubiquitin specific peptidase 8
  Uniprot ID: P40818
  ENSP ID: ENSP00000302239
MPAVASVPKELYLSSSLKDLNKKTEVKPEKISTKSYVHSALKIFKTAEECRLDRDEERAYVLYMKYVTVYNLIKKRPDFKQQQDYFHSILGPGNIKKAVEEAERLSESLKLRYEEAEVRKKLEEKDRQEEAQRLQQKRQETGREDGGTLAKGSLENVLDSKDKTQKSNGEKNEKCETKEKGAITAKELYTMMTDKNISLIIMDARRMQDYQDSCILHSLSVPEEAISPGVTASWIEAHLPDDSKDTWKKRGNVEYVVLLDWFSSAKDLQIGTTLRSLKDALFKWESKTVLRNEPLVLEGGYENWLLCYPQYTTNAKVTPPPRRQNEEVSISLDFTYPSLEESIPSKPAAQTPPASIEVDENIELISGQNERMGPLNISTPVEPVAASKSDVSPIIQPVPSIKNVPQIDRTKKPAVKLPEEHRIKSESTNHEQQSPQSGKVIPDRSTKPVVFSPTLMLTDEEKARIHAETALLMEKNKQEKELRERQQEEQKEKLRKEEQEQKAKKKQEAEENEITEKQQKAKEEMEKKESEQAKKEDKETSAKRGKEITGVKRQSKSEHETSDAKKSVEDRGKRCPTPEIQKKSTGDVPHTSVTGDSGSGKPFKIKGQPESGILRTGTFREDTDDTERNKAQREPLTRARSEEMGRIVPGLPSGWAKFLDPITGTFRYYHSPTNTVHMYPPEMAPSSAPPSTPPTHKAKPQIPAERDREPSKLKRSYSSPDITQAIQEEEKRKPTVTPTVNRENKPTCYPKAEISRLSASQIRNLNPVFGGSGPALTGLRNLGNTCYMNSILQCLCNAPHLADYFNRNCYQDDINRSNLLGHKGEVAEEFGIIMKALWTGQYRYISPKDFKITIGKINDQFAGYSQQDSQELLLFLMDGLHEDLNKADNRKRYKEENNDHLDDFKAAEHAWQKHKQLNESIIVALFQGQFKSTVQCLTCHKKSRTFEAFMYLSLPLASTSKCTLQDCLRLFSKEEKLTDNNRFYCSHCRARRDSLKKIEIWKLPPVLLVHLKRFSYDGRWKQKLQTSVDFPLENLDLSQYVIGPKNNLKKYNLFSVSNHYGGLDGGHYTAYCKNAARQRWFKFDDHEVSDISVSSVKSSAAYILFYTSLGPRVTDVAT

SEQ ID NO: 95047 - protein, 1118 aa, Homo sapiens; identical to SEQ ID NO: 95046
  Payload ID: 18952
  Gene Name: ubiquitin specific peptidase 8
  Uniprot ID: P40818
  ENSP ID: ENSP00000379721

SEQ ID NO: 95048 - protein, 1012 aa, Homo sapiens
  Payload ID: 18952
  Gene Name: ubiquitin specific peptidase 8
  Uniprot ID: P40818
  ENSP ID: ENSP00000412682
MPAVASVPKELYLSSSLKDLNKKTEVKPEKISTKRYEEAEVRKKLEEKDRQEEAQRLQQKRQETGREDGGTLAKGSLENVLDSKDKTQKSNGEKNEKCETKEKGAITAKELYTMMTDKNISLIIMDARRMQDYQDSCILHSLSVPEEAISPGVTASWIEAHLPDDSKDTWKKRGNVEYVVLLDWFSSAKDLQIGTTLRSLKDALFKWESKTVLRNEPLVLEGGYENWLLCYPQYTTNAKVTPPPRRQNEEVSISLDFTYPSLEESIPSKPAAQTPPASIEVDENIELISGQNERMGPLNISTPVEPVAASKSDVSPIIQPVPSIKNVPQIDRTKKPAVKLPEEHRIKSESTNHEQQSPQSGKVIPDRSTKPVVFSPTLMLTDEEKARIHAETALLMEKNKQEKELRERQQEEQKEKLRKEEQEQKAKKKQEAEENEITEKQQKAKEEMEKKESEQAKKEDKETSAKRGKEITGVKRQSKSEHETSDAKKSVEDRGKRCPTPEIQKKSTGDVPHTSVTGDSGSGKAQREPLTRARSEEMGRIVPGLPSGWAKFLDPITGTFRYYHSPTNTVHMYPPEMAPSSAPPSTPPTHKAKPQIPAERDREPSKLKRSYSSPDITQAIQEEEKRKPTVTPTVNRENKPTCYPKAEISRLSASQIRNLNPVFGGSGPALTGLRNLGNTCYMNSILQCLCNAPHLADYFNRNCYQDDINRSNLLGHKGEVAEEFGIIMKALWTGQYRYISPKDFKITIGKINDQFAGYSQQDSQELLLFLMDGLHEDLNKADNRKRYKEENNDHLDDFKAAEHAWQKHKQLNESIIVALFQGQFKSTVQCLTCHKKSRTFEAFMYLSLPLASTSKCTLQDCLRLFSKEEKLTDNNRFYCSHCRARRDSLKKIEIWKLPPVLLVHLKRFSYDGRWKQKLQTSVDFPLENLDLSQYVIGPKNNLKKYNLFSVSNHYGGLDGGHYTAYCKNAARQRWFKFDDHEVSDISVSSVKSSAAYILFYTSLGPRVTDVAT

SEQ ID NO: 95049 - protein, 136 aa, Homo sapiens
  Payload ID: 18952
  Gene Name: ubiquitin specific peptidase 8
  ENSP ID: ENSP00000452950
MPAVASVPKELYLSSSLKDLNKKTEVKPEKISTKSYVHSALKIFKTAEECRLDRDEERAYVLYMKYVTVYNLIKKRPDFKQQQDYFHSILGPGNIKKAVEEAERLSESLKLRAMVKRMKNVRPKRKEQSQQRNYTQ

SEQ ID NO: 95050 - protein, 96 aa, Homo sapiens
  Payload ID: 18952
  Gene Name: ubiquitin specific peptidase 8
  ENSP ID: ENSP00000453206
MPAVASVPKELYLSSSLKDLNKKTEVKPEKISTKSYVHSALKIFKTAEECRLDRDEERAYVLYMKYVTVYNLIKKRPDFKQQQDYFHSILGPGNIK

SEQ ID NO: 95051 - protein, 62 aa, Homo sapiens
  Payload ID: 18952
  Gene Name: ubiquitin specific peptidase 8
  ENSP ID: ENSP00000453320
MPAVASVPKELYLSSSLKDLNKKTEVKPEKISTKRIISIQYLDLETSKKLSKKLKDSLKALN

SEQ ID NO: 95052 - protein, 73 aa, Homo sapiens
  Payload ID: 18952
  Gene Name: ubiquitin specific peptidase 8
  ENSP ID: ENSP00000453427
MPAVASVPKELYLSSSLKDLNKKTEVKPEKISTKSYVHSALKIFKTAEECRLDRDEERAYVLYMKYVTVYNLI

SEQ ID NO: 95053 - protein, 125 aa, Homo sapiens
  Payload ID: 18952
  Gene Name: ubiquitin specific peptidase 8
  ENSP ID: ENSP00000453460
MPAVASVPKELYLSSSLKDLNKKTEVKPEKISTKSYVHSALKIFKTAEECRLDRDEERAYVLYMKYVTVYNLIKKRPDFKQQQDYFHSILGPGNIKKAVEEAERLSESLKLSGFYLSLIGRINSF

SEQ ID NO: 95054 - protein, 480 aa, Homo sapiens
  Payload ID: 18952
  Gene Name: ubiquitin specific peptidase 8
  ENSP ID: ENSP00000454003
MPAVASVPKELYLSSSLKDLNKKTEVKPEKISTKSYVHSALKIFKTAEECRLDRDEERAYVLYMKYVTVYNLIKKRPDFKQQQDYFHSILGPGNIKKAVEEAERLSESLKLRYEEAEVRKKLEEKDRQEEAQRLQQKRQETGREDGGTLAKGSLENVLDSKDKTQKSNGEKNEKCETKEKGAITAKELYTMMTDKNISLIIMDARRMQDYQDSCILHSLSVPEEAISPGVTASWIEAHLPDDSKDTWKKRGNVEYVVLLDWFSSAKDLQIGTTLRSLKDALFKWESKTVLRNEPLVLEGGYENWLLCYPQYTTNAKVTPPPRRQNEEVSISLDFTYPSLEESIPSKPAAQTPPASIEVDENIELISGQNERMGPLNISTPVEPVAASKSDVSPIIQPVPSIKNVPQIDRTKKPAVKLPEEHRIKSESTNHEQQSPQSGKVIPDRSTKPVVFSPTLMLTDEEKARIHAETALLMEKNKQEK

SEQ ID NO: 95055 - protein, 135 aa, Homo sapiens
  Payload ID: 18952
  Gene Name: ubiquitin specific peptidase 8
  ENSP ID: ENSP00000454059
MPAVASVPKELYLSSSLKDLNKKTEVKPEKISTKSYVHSALKIFKTAEECRLDRDEERAYVLYMKYVTVYNLIKKRPDFKQQQDYFHSILGPGNIKKAVEEAERLSESLKLRYEEAEVRKKLEEKDRQEEAQRLQ

SEQ ID NO: 95056 - protein, 62 aa, Homo sapiens; identical to SEQ ID NO: 95051
  Payload ID: 18952
  Gene Name: ubiquitin specific peptidase 8
  ENSP ID: ENSP00000457345

SEQ ID NO: 95057 - protein, 62 aa, Homo sapiens; identical to SEQ ID NO: 95051
  Payload ID: 18952
  Gene Name: ubiquitin specific peptidase 8
  ENSP ID: ENSP00000485810

SEQ ID NO: 95058 - protein, 2570 aa, Homo sapiens
  Payload ID: 18953
  Gene Name: ubiquitin specific peptidase 9, X-linked
  Uniprot ID: Q93008
  ENSP ID: ENSP00000316357
MTATTRGSPVGGNDNQGQAPDGQSQPPLQQNQTSSPDSSNENSPATPPDEQGQGDAPPQLEDEEPAFPHTDLAKLDDMINRPRWVVPVLPKGELEVLLEAAIDLSKKGLDVKSEACQRFFRDGLTISFTKILTDEAVSGWKFEIHRCIINNTHRLVELCVAKLSQDWFPLLELLAMALNPHCKFHIYNGTRPCESVSSSVQLPEDELFARSPDPRSPKGWLVDLLNKFGTLNGFQILHDRFINGSALNVQIIAALIKPFGQCYEFLTLHTVKKYFLPIIEMVPQFLENLTDEELKKEAKNEAKNDALSMIIKSLKNLASRVPGQEETVKNLEIFRLKMILRLLQISSFNGKMNALNEVNKVISSVSYYTHRHGNPEEEEWLTAERMAEWIQQNNILSIVLRDSLHQPQYVEKLEKILRFVIKEKALTLQDLDNIWAAQAGKHEAIVKNVHDLLAKLAWDFSPEQLDHLFDCFKASWTNASKKQREKLLELIRRLAEDDKDGVMAHKVLNLLWNLAHSDDVPVDIMDLALSAHIKILDYSCSQDRDTQKIQWIDRFIEELRTNDKWVIPALKQIREICSLFGEAPQNLSQTQRSPHVFYRHDLINQLQHNHALVTLVAENLATYMESMRLYARDHEDYDPQTVRLGSRYSHVQEVQERLNFLRFLLKDGQLWLCAPQAKQIWKCLAENAVYLCDREACFKWYSKLMGDEPDLDPDINKDFFESNVLQLDPSLLTENGMKCFERFFKAVNCREGKLVAKRRAYMMDDLELIGLDYLWRVVIQSNDDIASRAIDLLKEIYTNLGPRLQVNQVVIHEDFIQSCFDRLKASYDTLCVLDGDKDSVNCARQEAVRMVRVLTVLREYINECDSDYHEERTILPMSRAFRGKHLSFVVRFPNQGRQVDDLEVWSHTNDTIGSVRRCILNRIKANVAHTKIELFVGGELIDPADDRKLIGQLNLKDKSLITAKLTQISSNMPSSPDSSSDSSTGSPGNHGNHYSDGPNPEVESCLPGVIMSLHPRYISFLWQVADLGSSLNMPPLRDGARVLMKLMPPDSTTIEKLRAICLDHAKLGESSLSPSLDSLFFGPSASQVLYLTEVVYALLMPAGAPLADDSSDFQFHFLKSGGLPLVLSMLTRNNFLPNADMETRRGAYLNALKIAKLLLTAIGYGHVRAVAEACQPGVEGVNPMTQINQVTHDQAVVLQSALQSIPNPSSECMLRNVSVRLAQQISDEASRYMPDICVIRAIQKIIWASGCGSLQLVFSPNEEITKIYEKTNAGNEPDLEDEQVCCEALEVMTLCFALIPTALDALSKEKAWQTFIIDLLLHCHSKTVRQVAQEQFFLMCTRCCMGHRPLLFFITLLFTVLGSTARERAKHSGDYFTLLRHLLNYAYNSNINVPNAEVLLNNEIDWLKRIRDDVKRTGETGIEETILEGHLGVTKELLAFQTSEKKFHIGCEKGGANLIKELIDDFIFPASNVYLQYMRNGELPAEQAIPVCGSPPTINAGFELLVALAVGCVRNLKQIVDSLTEMYYIGTAITTCEALTEWEYLPPVGPRPPKGFVGLKNAGATCYMNSVIQQLYMIPSIRNGILAIEGTGSDVDDDMSGDEKQDNESNVDPRDDVFGYPQQFEDKPALSKTEDRKEYNIGVLRHLQVIFGHLAASRLQYYVPRGFWKQFRLWGEPVNLREQHDALEFFNSLVDSLDEALKALGHPAMLSKVLGGSFADQKICQGCPHRYECEESFTTLNVDIRNHQNLLDSLEQYVKGDLLEGANAYHCEKCNKKVDTVKRLLIKKLPPVLAIQLKRFDYDWERECAIKFNDYFEFPRELDMEPYTVAGVAKLEGDNVNPESQLIQQSEQSESETAGSTKYRLVGVLVHSGQASGGHYYSYIIQRNGGDGERNRWYKFDDGDVTECKMDDDEEMKNQCFGGEYMGEVFDHMMKRMSYRRQKRWWNAYILFYERMDTIDQDDELIRYISELAITTRPHQIIMPSAIERSVRKQNVQFMHNRMQYSMEYFQFMKKLLTCNGVYLNPPPGQDHLLPEAEEITMISIQLAARFLFTTGFHTKKVVRGSASDWYDALCILLRHSKNVRFWFAHNVLFNVSNRFSEYLLECPSAEVRGAFAKLIVFIAHFSLQDGPCPSPFASPGPSSQAYDNLSLSDHLLRAVLNLLRREVSEHGRHLQQYFNLFVMYANLGVAEKTQLLKLSVPATFMLVSLDEGPGPPIKYQYAELGKLYSVVSQLIRCCNVSSRMQSSINGNPPLPNPFGDPNLSQPIMPIQQNVADILFVRTSYVKKIIEDCSNSEETVKLLRFCCWENPQFSSTVLSELLWQVAYSYTYELRPYLDLLLQILLIEDSWQTHRIHNALKGIPDDRDGLFDTIQRSKNHYQKRAYQCIKCMVALFSNCPVAYQILQGNGDLKRKWTWAVEWLGDELERRPYTGNPQYTYNNWSPPVQSNETSNGYFLERSHSARMTLAKACELCPEEVKKATSVQQIEMEESKEPDDQDAPDEHESPPPEDAPLYPHSPGSQYQQNNHVHGQPYTGPAAHHMNNPQRTGQRAQENYEGSEEVSPPQTKDQ

SEQ ID NO: 95059 - protein, 2554 aa, Homo sapiens
  Payload ID: 18953
  Gene Name: ubiquitin specific peptidase 9, X-linked
  Uniprot ID: Q93008
  ENSP ID: ENSP00000367558
MTATTRGSPVGGNDNQGQAPDGQSQPPLQQNQTSSPDSSNENSPATPPDEQGQGDAPPQLEDEEPAFPHTDLAKLDDMINRPRWVVPVLPKGELEVLLEAAIDLSKKGLDVKSEACQRFFRDGLTISFTKILTDEAVSGWKFEIHRCIINNTHRLVELCVAKLSQDWFPLLELLAMALNPHCKFHIYNGTRPCESVSSSVQLPEDELFARSPDPRSPKGWLVDLLNKFGTLNGFQILHDRFINGSALNVQIIAALIKPFGQCYEFLTLHTVKKYFLPIIEMVPQFLENLTDEELKKEAKNEAKNDALSMIIKSLKNLASRVPGQEETVKNLEIFRLKMILRLLQISSFNGKMNALNEVNKVISSVSYYTHRHGNPEEEEWLTAERMAEWIQQNNILSIVLRDSLHQPQYVEKLEKILRFVIKEKALTLQDLDNIWAAQAGKHEAIVKNVHDLLAKLAWDFSPEQLDHLFDCFKASWTNASKKQREKLLELIRRLAEDDKDGVMAHKVLNLLWNLAHSDDVPVDIMDLALSAHIKILDYSCSQDRDTQKIQWIDRFIEELRTNDKWVIPALKQIREICSLFGEAPQNLSQTQRSPHVFYRHDLINQLQHNHALVTLVAENLATYMESMRLYARDHEDYDPQTVRLGSRYSHVQEVQERLNFLRFLLKDGQLWLCAPQAKQIWKCLAENAVYLCDREACFKWYSKLMGDEPDLDPDINKDFFESNVLQLDPSLLTENGMKCFERFFKAVNCREGKLVAKRRAYMMDDLELIGLDYLWRVVIQSNDDIASRAIDLLKEIYTNLGPRLQVNQVVIHEDFIQSCFDRLKASYDTLCVLDGDKDSVNCARQEAVRMVRVLTVLREYINECDSDYHEERTILPMSRAFRGKHLSFVVRFPNQGRQVDDLEVWSHTNDTIGSVRRCILNRIKANVAHTKIELFVGGELIDPADDRKLIGQLNLKDKSLITAKLTQISSNMPSSPDSSSDSSTGSPGNHGNHYSDGPNPEVESCLPGVIMSLHPRYISFLWQVADLGSSLNMPPLRDGARVLMKLMPPDSTTIEKLRAICLDHAKLGESSLSPSLDSLFFGPSASQVLYLTEVVYALLMPAGAPLADDSSDFQFHFLKSGGLPLVLSMLTRNNFLPNADMETRRGAYLNALKIAKLLLTAIGYGHVRAVAEACQPGVEGVNPMTQINQVTHDQAVVLQSALQSIPNPSSECMLRNVSVRLAQQISDEASRYMPDICVIRAIQKIIWASGCGSLQLVFSPNEEITKIYEKTNAGNEPDLEDEQVCCEALEVMTLCFALIPTALDALSKEKAWQTFIIDLLLHCHSKTVRQVAQEQFFLMCTRCCMGHRPLLFFITLLFTVLGSTARERAKHSGDYFTLLRHLLNYAYNSNINVPNAEVLLNNEIDWLKRIRDDVKRTGETGIEETILEGHLGVTKELLAFQTSEKKFHIGCEKGGANLIKELIDDFIFPASNVYLQYMRNGELPAEQAIPVCGSPPTINAGFELLVALAVGCVRNLKQIVDSLTEMYYIGTAITTCEALTEWEYLPPVGPRPPKGFVGLKNAGATCYMNSVIQQLYMIPSIRNGILAIEGTGSDVDDDMSGDEKQDNESNVDPRDDVFGYPQQFEDKPALSKTEDRKEYNIGVLRHLQVIFGHLAASRLQYYVPRGFWKQFRLWGEPVNLREQHDALEFFNSLVDSLDEALKALGHPAMLSKVLGGSFADQKICQGCPHRYECEESFTTLNVDIRNHQNLLDSLEQYVKGDLLEGANAYHCEKCNKKVDTVKRLLIKKLPPVLAIQLKRFDYDWERECAIKFNDYFEFPRELDMEPYTVAGVAKLEGDNVNPESQLIQQSEQSESETAGSTKYRLVGVLVHSGQASGGHYYSYIIQRNGGDGERNRWYKFDDGDVTECKMDDDEEMKNQCFGGEYMGEVFDHMMKRMSYRRQKRWWNAYILFYERMDTIDQDDELIRYISELAITTRPHQIIMPSAIERSVRKQNVQFMHNRMQYSMEYFQFMKKLLTCNGVYLNPPPGQDHLLPEAEEITMISIQLAARFLFTTGFHTKKVVRGSASDWYDALCILLRHSKNVRFWFAHNVLFNVSNRFSEYLLECPSAEVRGAFAKLIVFIAHFSLQDGPCPSPFASPGPSSQAYDNLSLSDHLLRAVLNLLRREVSEHGRHLQQYFNLFVMYANLGVAEKTQLLKLSVPATFMLVSLDEGPGPPIKYQYAELGKLYSVVSQLIRCCNVSSRMQSSINGNPPLPNPFGDPNLSQPIMPIQQNVADILFVRTSYVKKIIEDCSNSEETVKLLRFCCWENPQFSSTVLSELLWQVAYSYTYELRPYLDLLLQILLIEDSWQTHRIHNALKGIPDDRDGLFDTIQRSKNHYQKRAYQCIKCMVALFSNCPVAYQILQGNGDLKRKWTWAVEWLGDELERRPYTGNPQYTYNNWSPPVQSNETSNGYFLERSHSARMTLAKACELCPEEEPDDQDAPDEHESPPPEDAPLYPHSPGSQYQQNNHVHGQPYTGPAAHHMNNPQRTGQRAQENYEGSEEVSPPQTKDQ

SEQ ID NO: 95060 - protein, 46 aa, Homo sapiens
  Payload ID: 18953
  Gene Name: ubiquitin specific peptidase 9, X-linked
  ENSP ID: ENSP00000420570
  MOD_RES (1)..(1): Any amino acid
XILWKAKKMHKVIVVEHLVYRGTFPACSKKEVLEELFVRWHRSSSF

SEQ ID NO: 95061 - protein, 2555 aa, Homo sapiens
  Payload ID: 18954
  Gene Name: ubiquitin specific peptidase 9, Y-linked
  Uniprot ID: O00507
  ENSP ID: ENSP00000342812
MTAITHGSPVGGNDSQGQVLDGQSQHLFQQNQTSSPDSSNENSVATPPPEEQGQGDAPPQHEDEEPAFPHTELANLDDMINRPRWVVPVLPKGELEVLLEAAIDLSVKGLDVKSEACQRFFRDGLTISFTKILMDEAVSGWKFEIHRCIINNTHRLVELCVAKLSQDWFPLLELLAMALNPHCKFHIYNGTRPCELISSNAQLPEDELFARSSDPRSPKGWLVDLINKFGTLNGFQILHDRFFNGSALNIQIIAALIKPFGQCYEFLSQHTLKKYFIPVIEIVPHLLENLTDEELKKEAKNEAKNDALSMIIKSLKNLASRISGQDETIKNLEIFRLKMILRLLQISSFNGKMNALNEINKVISSVSYYTHRHSNPEEEEWLTAERMAEWIQQNNILSIVLQDSLHQPQYVEKLEKILRFVIKEKALTLQDLDNIWAAQAGKHEAIVKNVHDLLAKLAWDFSPGQLDHLFDCFKASWTNASKKQREKLLELIRRLAEDDKDGVMAHKVLNLLWNLAQSDDVPVDIMDLALSAHIKILDYSCSQDRDAQKIQWIDHFIEELRTNDKWVIPALKQIREICSLFGEASQNLSQTQRSPHIFYRHDLINQLQQNHALVTLVAENLATYMNSIRLYAGDHEDYDPQTVRLGSRYSHVQEVQERLNFLRFLLKDGQLWLCAPQAKQIWKCLAENAVYLCDREACFKWYSKLMGDEPDLDPDINKDFFESNVLQLDPSLLTENGMKCFERFFKAVNCRERKLIAKRRSYMMDDLELIGLDYLWRVVIQSSDEIANRAIDLLKEIYTNLGPRLKANQVVIHEDFIQSCFDRLKASYDTLCVFDGDKNSINCARQEAIRMVRVLTVIKEYINECDSDYHKERMILPMSRAFRGKHLSLIVRFPNQGRQVDELDIWSHTNDTIGSVRRCIVNRIKANVAHKKIELFVGGELIDSEDDRKLIGQLNLKDKSLITAKLTQINFNMPSSPDSSSDSSTASPGNHRNHYNDGPNLEVESCLPGVIMSVHPRYISFLWQVADLGSNLNMPPLRDGARVLMKLMPPDRTAVEKLRAVCLDHAKLGEGKLSPPLDSLFFGPSASQVLYLTEVVYALLMPAGVPLTDGSSDFQVHFLKSGGLPLVLSMLIRNNFLPNTDMETRRGAYLNALKIAKLLLTAIGYGHVRAVAEACQPVVDGTDPITQINQVTHDQAVVLQSALQSIPNPSSECVLRNESILLAQEISNEASRYMPDICVIRAIQKIIWASACGALGLVFSPNEEITKIYQMTTNGSNKLEVEDEQVCCEALEVMTLCFALLPTALDALSKEKAWQTFIIDLLLHCPSKTVRQLAQEQFFLMCTRCCMGHRPLLFFITLLFTILGSTAREKGKYSGDYFTLLRHLLNYAYNGNINIPNAEVLLVSEIDWLKRIRDNVKNTGETGVEEPILEGHLGVTKELLAFQTSEKKYHFGCEKGGANLIKELIDDFIFPASKVYLQYLRSGELPAEQAIPVCSSPVTINAGFELLVALAIGCVRNLKQIVDCLTEMYYMGTAITTCEALTEWEYLPPVGPRPPKGFVGLKNAGATCYMNSVIQQLYMIPSIRNSILAIEGTGSDLHDDMFGDEKQDSESNVDPRDDVFGYPHQFEDKPALSKTEDRKEYNIGVLRHLQVIFGHLAASQLQYYVPRGFWKQFRLWGEPVNLREQHDALEFFNSLVDSLDEALKALGHPAILSKVLGGSFADQKICQGCPHRYECEESFTTLNVDIRNHQNLLDSLEQYIKGDLLEGANAYHCEKCDKKVDTVKRLLIKKLPRVLAIQLKRFDYDWERECAIKFNDYFEFPRELDMGPYTVAGVANLERDNVNSENELIEQKEQSDNETAGGTKYRLVGVLVHSGQASGGHYYSYIIQRNGKDDQTDHWYKFDDGDVTECKMDDDEEMKNQCFGGEYMGEVFDHMMKRMSYRRQKRWWNAYILFYEQMDMIDEDDEMIRYISELTIARPHQIIMSPAIERSVRKQNVKFMHNRLQYSLEYFQFVKKLLTCNGVYLNPAPGQDYLLPEAEEITMISIQLAARFLFTTGFHTKKIVRGPASDWYDALCVLLRHSKNVRFWFTHNVLFNVSNRFSEYLLECPSAEVRGAFAKLIVFIAHFSLQDGSCPSPFASPGPSSQACDNLSLSDHLLRATLNLLRREVSEHGHHLQQYFNLFVMYANLGVAEKTQLLKLNVPATFMLVSLDEGPGPPIKYQYAELGKLYSVVSQLIRCCNVSSTMQSSINGNPPLPNPFGDLNLSQPIMPIQQNVLDILFVRTSYVKKIIEDCSNSEDTIKLLRFCSWENPQFSSTVLSELLWQVAYSYTYELRPYLDLLFQILLIEDSWQTHRIHNALKGIPDDRDGLFDTIQRSKNHYQKRAYQCIKCMVALFSSCPVAYQILQGNGDLKRKWTWAVEWLGDELERRPYTGNPQYSYNNWSPPVQSNETANGYFLERSHSARMTLAKACELCPEEEPDDQDAPDEHEPSPSEDAPLYPHSPASQYQQNNHVHGQPYTGPAAHHLNNPQKTGQRTQENYEGNEEVSSPQMKDQ

SEQ ID NO: 95062 - protein, 237 aa, Homo sapiens
  Payload ID: 18954
  Gene Name: ubiquitin specific peptidase 9, Y-linked
  ENSP ID: ENSP00000406876
  MOD_RES (1)..(1): Any amino acid
XLLKTAVTQRIPSNYFAFALGRILSSHLLSSANFSGRIHNALKGIPDDRDGLFDTIQRSKNHYQKRAYQCIKCMVALFSSCPVAYQILQGNGDLKRKWTWAVEWLGDELERRPYTGNPQYSYNNWSPPVQSNETANGYFLERSHSARMTLAKACELCPEEEPDDQDAPDEHEPSPSEDAPLYPHSPASQYQQNNHVHGQPYTGPAAHHLNNPQKTGQRTQENYEGNEEVSSPQMKDQ

SEQ ID NO: 95063 - protein, 1092 aa, Homo sapiens
  Payload ID: 18955
  Gene Name: ubiquitin specific peptidase like 1
  Uniprot ID: Q5W0Q7
  ENSP ID: ENSP00000255304
MMDSPKIGNGLPVIGPGTDIGISSLHMVGYLGKNFDSAKVPSDEYCPACREKGKLKALKTYRISFQESIFLCEDLQCIYPLGSKSLNNLISPDLEECHTPHKPQKRKSLESSYKDSLLLANSKKTRNYIAIDGGKVLNSKHNGEVYDETSSNLPDSSGQQNPIRTADSLERNEILEADTVDMATTKDPATVDVSGTGRPSPQNEGCTSKLEMPLESKCTSFPQALCVQWKNAYALCWLDCILSALVHSEELKNTVTGLCSKEESIFWRLLTKYNQANTLLYTSQLSGVKDGDCKKLTSEIFAEIETCLNEVRDEIFISLQPQLRCTLGDMESPVFAFPLLLKLETHIEKLFLYSFSWDFECSQCGHQYQNRHMKSLVTFTNVIPEWHPLNAAHFGPCNNCNSKSQIRKMVLEKVSPIFMLHFVEGLPQNDLQHYAFHFEGCLYQITSVIQYRANNHFITWILDADGSWLECDDLKGPCSERHKKFEVPASEIHIVIWERKISQVTDKEAACLPLKKTNDQHALSNEKPVSLTSCSVGDAASAETASVTHPKDISVAPRTLSQDTAVTHGDHLLSGPKGLVDNILPLTLEETIQKTASVSQLNSEAFLLENKPVAENTGILKTNTLLSQESLMASSVSAPCNEKLIQDQFVDISFPSQVVNTNMQSVQLNTEDTVNTKSVNNTDATGLIQGVKSVEIEKDAQLKQFLTPKTEQLKPERVTSQVSNLKKKETTADSQTTTSKSLQNQSLKENQKKPFVGSWVKGLISRGASFMPLCVSAHNRNTITDLQPSVKGVNNFGGFKTKGINQKASHVSKKARKSASKPPPISKPPAGPPSSNGTAAHPHAHAASEVLEKSGSTSCGAQLNHSSYGNGISSANHEDLVEGQIHKLRLKLRKKLKAEKKKLAALMSSPQSRTVRSENLEQVPQDGSPNDCESIEDLLNELPYPIDIASESACTTVPGVSLYSSQTHEEILAELLSPTPVSTELSENGEGDFRYLGMGDSHIPPPVPSEFNDVSQNTHLRQDHNYCSPTKKNPCEVQPDSLTNNACVRTLNLESPMKTDIFDEFFSSSALNALANDTLDLPHFDEYLFENY

SEQ ID NO: 95064 - protein, 763 aa, Homo sapiens
  Payload ID: 18955
  Gene Name: ubiquitin specific peptidase like 1
  Uniprot ID: Q5W0Q7
  ENSP ID: ENSP00000480656
MESPVFAFPLLLKLETHIEKLFLYSFSWDFECSQCGHQYQNRHMKSLVTFTNVIPEWHPLNAAHFGPCNNCNSKSQIRKMVLEKVSPIFMLHFVEGLPQNDLQHYAFHFEGCLYQITSVIQYRANNHFITWILDADGSWLECDDLKGPCSERHKKFEVPASEIHIVIWERKISQVTDKEAACLPLKKTNDQHALSNEKPVSLTSCSVGDAASAETASVTHPKDISVAPRTLSQDTAVTHGDHLLSGPKGLVDNILPLTLEETIQKTASVSQLNSEAFLLENKPVAENTGILKTNTLLSQESLMASSVSAPCNEKLIQDQFVDISFPSQVVNTNMQSVQLNTEDTVNTKSVNNTDATGLIQGVKSVEIEKDAQLKQFLTPKTEQLKPERVTSQVSNLKKKETTADSQTTTSKSLQNQSLKENQKKPFVGSWVKGLISRGASFMPLCVSAHNRNTITDLQPSVKGVNNFGGFKTKGINQKASHVSKKARKSASKPPPISKPPAGPPSSNGTAAHPHAHAASEVLEKSGSTSCGAQLNHSSYGNGISSANHEDLVEGQIHKLRLKLRKKLKAEKKKLAALMSSPQSRTVRSENLEQVPQDGSPNDCESIEDLLNELPYPIDIASESACTTVPGVSLYSSQTHEEILAELLSPTPVSTELSENGEGDFRYLGMGDSHIPPPVPSEFNDVSQNTHLRQDHNYCSPTKKNPCEVQPDSLTNNACVRTLNLESPMKTDIFDEFFSSSALNALANDTLDLPHFDEYLFENY

SEQ ID NO: 95065 - protein, 1066 aa, Homo sapiens
  Payload ID: 18956
  Gene Name: ubiquitination factor E4A
  Uniprot ID: Q14139
  ENSP ID: ENSP00000252108
MTDQENNNNISSNPFAALFGSLADAKQFAAIQKEQLKQQSDELPASPDDSDNSVSESLDEFDYSVAEISRSFRSQQEICEQLNINHMIQRIFLITLDNSDPSLKSGNGIPSRCVYLEEMAVELEDQDWLDMSNVEQALFARLLLQDPGNHLINMTSSTTLNLSADRDAGERHIFCYLYSCFQRAKEEITKVPENLLPFAVQCRNLTVSNTRTVLLTPEIYVDQNIHEQLVDLMLEAIQGAHFEDVTEFLEEVIEALILDEEVRTFPEVMIPVFDILLGRIKDLELCQILLYAYLDILLYFTRQKDMAKVFVEYIQPKDPTNGQMYQKTLLGVILSISCLLKTPGVVENHGYFLNPSRSSPQEIKVQEANIHQFMAQFHEKIYQMLKNLLQLSPETKHCILSWLGNCLHANAGRTKIWANQMPEIFFQMYASDAFFLNLGAALLKLCQPFCKPRSSRLLTFNPTYCALKELNDEERKIKNVHMRGLDKETCLIPAVQEPKFPQNYNLVTENLALTEYTLYLGFHRLHDQMVKINQNLHRLQVAWRDAQQSSSPAADNLREQFERLMTIYLSTKTAMTEPQMLQNCLNLQVSMAVLLVQLAIGNEGSQPIELTFPLPDGYSSLAYVPEFFADNLGDFLIFLRRFADDILETSADSLEHVLHFITIFTGSIERMKNPHLRAKLAEVLEAVMPHLDQTPNPLVSSVFHRKRVFCNFQYAPQLAEALIKVFVDIEFTGDPHQFEQKFNYRRPMYPILRYMWGTDTYRESIKDLADYASKNLEAMNPPLFLRFLNLLMNDAIFLLDEAIQYLSKIKIQQIEKDRGEWDSLTPEARREKEAGLQMFGQLARFHNIMSNETIGTLAFLTSEIKSLFVHPFLAERIISMLNYFLQHLVGPKMGALKVKDFSEFDFKPQQLVSDICTIYLNLGDEENFCATVPKDGRSYSPTLFAQTVRVLKKINKPGNMIMAFSNLAERIKSLADLQQQEEETYADACDEFLDPIMSTLMCDPVVLPSSRVTVDRSTIARHLLSDQTDPFNRSPLTMDQIRPNTELKEKIQRWLAERKQQKEQLE

SEQ ID NO: 95066 - protein, 1073 aa, Homo sapiens
  Payload ID: 18956
  Gene Name: ubiquitination factor E4A
  Uniprot ID: Q14139
  ENSP ID: ENSP00000387362
MTDQENNNNISSNPFAALFGSLADAKQFAAIQKEQLKQQSDELPASPDDSDNSVSESLDEFDYSVAEISRSFRSQQEICEQLNINHMIQRIFLITLDNSDPSLKSGNGIPSRCVYLEEMAVELEDQDWLDMSNVEQALFARLLLQDPGNHLINMTSSTTLNLSADRDAGERHIFCYLYSCFQRAKEEITKVPENLLPFAVQCRNLTVSNTRTVLLTPEIYVDQNIHEQLVDLMLEAIQGAREYMNKIYFEDVTEFLEEVIEALILDEEVRTFPEVMIPVFDILLGRIKDLELCQILLYAYLDILLYFTRQKDMAKVFVEYIQPKDPTNGQMYQKTLLGVILSISCLLKTPGVVENHGYFLNPSRSSPQEIKVQEANIHQFMAQFHEKIYQMLKNLLQLSPETKHCILSWLGNCLHANAGRTKIWANQMPEIFFQMYASDAFFLNLGAALLKLCQPFCKPRSSRLLTFNPTYCALKELNDEERKIKNVHMRGLDKETCLIPAVQEPKFPQNYNLVTENLALTEYTLYLGFHRLHDQMVKINQNLHRLQVAWRDAQQSSSPAADNLREQFERLMTIYLSTKTAMTEPQMLQNCLNLQVSMAVLLVQLAIGNEGSQPIELTFPLPDGYSSLAYVPEFFADNLGDFLIFLRRFADDILETSADSLEHVLHFITIFTGSIERMKNPHLRAKLAEVLEAVMPHLDQTPNPLVSSVFHRKRVFCNFQYAPQLAEALIKVFVDIEFTGDPHQFEQKFNYRRPMYPILRYMWGTDTYRESIKDLADYASKNLEAMNPPLFLRFLNLLMNDAIFLLDEAIQYLSKIKIQQIEKDRGEWDSLTPEARREKEAGLQMFGQLARFHNIMSNETIGTLAFLTSEIKSLFVHPFLAERIISMLNYFLQHLVGPKMGALKVKDFSEFDFKPQQLVSDICTIYLNLGDEENFCATVPKDGRSYSPTLFAQTVRVLKKINKPGNMIMAFSNLAERIKSLADLQQQEEETYADACDEFLDPIMSTLMCDPVVLPSSRVTVDRSTIARHLLSDQTDPFNRSPLTMDQIRPNTELKEKIQRWLAERKQQKEQLE

SEQ ID NO: 95067 - protein, 538 aa, Homo sapiens
  Payload ID: 18956
  Gene Name: ubiquitination factor E4A
  ENSP ID: ENSP00000438918
MVKINQNLHRLQVAWRDAQQSSSPAADNLREQFERLMTIYLSTKTAMTEPQMLQNCLNLQVSMAVLLVQLAIGNEGSQPIELTFPLPDGYSSLAYVPEFFADNLGDFLIFLRRFADDILETSADSLEHVLHFITIFTGSIERMKNPHLRAKLAEVLEAVMPHLDQTPNPLVSSVFHRKRVFCNFQYAPQLAEALIKVFVDIEFTGDPHQFEQKFNYRRPMYPILRYMWGTDTYRESIKDLADYASKNLEAMNPPLFLRFLNLLMNDAIFLLDEAIQYLSKIKIQQIEKDRGEWDSLTPEARREKEAGLQMFGQLARFHNIMSNETIGTLAFLTSEIKSLFVHPFLAERIISMLNYFLQHLVGPKMGALKVKDFSEFDFKPQQLVSDICTIYLNLGDEENFCATVPKDGRSYSPTLFAQTVRVLKKINKPGNMIMAFSNLAERIKSLADLQQQEEETYADACDEFLDPIMSTLMCDPVVLPSSRVTVDRSTIARHLLSDQTDPFNRSPLTMDQIRPNTELKEKIQRWLAERKQQKEQLE

SEQ ID NO: 95068 - protein, 1173 aa, Homo sapiens
  Payload ID: 18957
  Gene Name: ubiquitination factor E4B
  Uniprot ID: O95155
  ENSP ID: ENSP00000253251
MEELSADEIRRRRLARLAGGQTSQPTTPLTSPQRENPPGPPIAASAPGPSQSLGLNVHNMTPATSPIGASGVAHRSQSSEGVSSLSSSPSNSLETQSQSLSRSQSMDIDGVSCEKSMSQVDVDSGIENMEVDENDRREKRSLSDKEPSSGPEVSEEQALQLVCKIFRVSWKDRDRDVIFLSSLSAQFKQNPKEVFSDFKDLIGQILMEVLMMSTQTRDENPFASLTATSQPIAAAARSPDRNLLLNTGSNPGTSPMFCSVASFGASSLSSLGASGGASNWDSYSDHFTIETCKETDMLNYLIECFDRVGIEEKKAPKMCSQPAVSQLLSNIRSQCISHTALVLQGSLTQPRSLQQPSFLVPYMLCRNLPYGFIQELVRTTHQDEEVFKQIFIPILQGLALAAKECSLDSDYFKYPLMALGELCETKFGKTHPVCNLVASLRLWLPKSLSPGCGRELQRLSYLGAFFSFSVFAEDDVKVVEKYFSGPAITLENTRVVSQSLQHYLELGRQELFKILHSILLNGETREAALSYMAAVVNANMKKAQMQTDDRLVSTDGFMLNFLWVLQQLSTKIKLETVDPTYIFHPRCRITLPNDETRVNATMEDVNDWLTELYGDQPPFSEPKFPTECFFLTLHAHHLSILPSCRRYIRRLRAIRELNRTVEDLKNNESQWKDSPLATRHREMLKRCKTQLKKLVRCKACADAGLLDESFLRRCLNFYGLLIQLLLRILDPAYPDITLPLNSDVPKVFAALPEFYVEDVAEFLFFIVQYSPQALYEPCTQDIVMFLVVMLCNQNYIRNPYLVAKLVEVMFMTNPAVQPRTQKFFEMIENHPLSTKLLVPSLMKFYTDVEHTGATSEFYDKFTIRYHISTIFKSLWQNIAHHGTFMEEFNSGKQFVRYINMLINDTTFLLDESLESLKRIHEVQEEMKNKEQWDQLPRDQQQARQSQLAQDERVSRSYLALATETVDMFHILTKQVQKPFLRPELGPRLAAMLNFNLQQLCGPKCRDLKVENPEKYGFEPKKLLDQLTDIYLQLDCARFAKAIADDQRSYSKELFEEVISKMRKAGIKSTIAIEKFKLLAEKVEEIVAKNARAEIDYSDAPDEFRDPLMDTLMTDPVRLPSGTIMDRSIILRHLLNSPTDPFNRQTLTESMLEPVPELKEQIQAWMREKQNSDH

SEQ ID NO: 95069 - protein, 1302 aa, Homo sapiens
  Payload ID: 18957
  Gene Name: ubiquitination factor E4B
  Uniprot ID: O95155
  ENSP ID: ENSP00000343001
MEELSADEIRRRRLARLAGGQTSQPTTPLTSPQRENPPGPPIAASAPGPSQSLGLNVHNMTPATSPIGASGVAHRSQSSEGVSSLSSSPSNSLETQSQSLSRSQSMDIDGVSCEKSMSQVDVDSGIENMEVDENDRREKRSLSDKEPSSGPEVSEEQALQLVCKIFRVSWKDRDRDVIFLSSLSAQFKQNPKEVFSDFKDLIGQILMEVLMMSTQTRDENPFASLTATSQPIAAAARSPDRNLLLNTGSNPGTSPMFCSVASFGASSLSSLYESSPAPTPSFWSSVPVMGPSLASPSRAASQLAVPSTPLSPHSAASGTAAGSQPSSPRYRPYTVTHPWASSGVSILSSSPSPPALASSPQAVPASSSRQRPSSTGPPLPPASPSATSRRPSSLRISPSLGASGGASNWDSYSDHFTIETCKETDMLNYLIECFDRVGIEEKKAPKMCSQPAVSQLLSNIRSQCISHTALVLQGSLTQPRSLQQPSFLVPYMLCRNLPYGFIQELVRTTHQDEEVFKQIFIPILQGLALAAKECSLDSDYFKYPLMALGELCETKFGKTHPVCNLVASLRLWLPKSLSPGCGRELQRLSYLGAFFSFSVFAEDDVKVVEKYFSGPAITLENTRVVSQSLQHYLELGRQELFKILHSILLNGETREAALSYMAAVVNANMKKAQMQTDDRLVSTDGFMLNFLWVLQQLSTKIKLETVDPTYIFHPRCRITLPNDETRVNATMEDVNDWLTELYGDQPPFSEPKFPTECFFLTLHAHHLSILPSCRRYIRRLRAIRELNRTVEDLKNNESQWKDSPLATRHREMLKRCKTQLKKLVRCKACADAGLLDESFLRRCLNFYGLLIQLLLRILDPAYPDITLPLNSDVPKVFAALPEFYVEDVAEFLFFIVQYSPQALYEPCTQDIVMFLVVMLCNQNYIRNPYLVAKLVEVMFMTNPAVQPRTQKFFEMIENHPLSTKLLVPSLMKFYTDVEHTGATSEFYDKFTIRYHISTIFKSLWQNIAHHGTFMEEFNSGKQFVRYINMLINDTTFLLDESLESLKRIHEVQEEMKNKEQWDQLPRDQQQARQSQLAQDERVSRSYLALATETVDMFHILTKQVQKPFLRPELGPRLAAMLNFNLQQLCGPKCRDLKVENPEKYGFEPKKLLDQLTDIYLQLDCARFAKAIADDQRSYSKELFEEVISKMRKAGIKSTIAIEKFKLLAEKVEEIVAKNARAEIDYSDAPDEFRDPLMDTLMTDPVRLPSGTIMDRSIILRHLLNSPTDPFNRQTLTESMLEPVPELKEQIQAWMREKQNSDH

SEQ ID NO: 95070 - protein, 100 aa, Homo sapiens
  Payload ID: 18957
  Gene Name: ubiquitination factor E4B
  ENSP ID: ENSP00000366358
MEELSADEIRRRRLARLAGGQTSQPTTPLTSPQRENPPGPPIAASAPGPSQSLGLNVHNMTPATSPIGASGLGIISDDKMIKTEFGSADFMNLVDGFKIK

SEQ ID NO: 95071 - protein, 276 aa, Homo sapiens
  Payload ID: 18957
  Gene Name: ubiquitination factor E4B
  ENSP ID: ENSP00000467258
  MOD_RES (1)..(1): Any amino acid
XTTHQDEEVFKQIFIPILQGLALAAKECSLDSDYFKYPLMALGELCETKFGKTHPVCNLVKVVEKYFSGPAITLENTRVVSQSLQHYLELGRQELFKILHSILLNGETREAALSYMAAVVNANMKKAQMQTDDRLVSTDGFMLNFLWVLQQLSTKIKLETVDPTYIFHPRCRITLPNDETRVNATMEDVNDWLTELYGDQPPFSEPKFPTECFFLTLHAHHLSILPSCRRYIRRLRAIRELNRTVEDLKNNESQWKDSPLATRHREMLKRCKTQLK

SEQ ID NO: 95072 - protein, 98 aa, Homo sapiens
  Payload ID: 18957
  Gene Name: ubiquitination factor E4B
  ENSP ID: ENSP00000468178
  MOD_RES (1)..(1): Any amino acid
XDVEHTGATSEFYDKFTIRYHISTIFKSLWQNIAHHGTFMEEFNSGKQFVRYINMLINDTTFLLDESLESLKRIHEVQEEMKNKEQWDQLPRSLQCST

SEQ ID NO: 95073 - protein, 170 aa, Homo sapiens
  Payload ID: 18958
  Gene Name: ubiquitin-conjugating enzyme E2 variant 1
  Uniprot ID: Q13404
  ENSP ID: ENSP00000340305
MPGEVQASYLKSQSKLSDEGRLEPRKFHCKGVKVPRNFRLLEELEEGQKGVGDGTVSWGLEDDEDMTLTRWTGMIIGPPRTIYENRIYSLKIECGPKYPEAPPFVRFVTKINMNGVNSSNGVVDPRAISVLAKWQNSYSIKVVLQELRRLMMSKENMKLPQPPEGQCYSN

SEQ ID NO: 95074 - protein, 105 aa, Homo sapiens
  Payload ID: 18958
  Gene Name: ubiquitin-conjugating enzyme E2 variant 1
  Uniprot ID: Q13404
  ENSP ID: ENSP00000360720
MAATTGSGVKVPRNFRLLEELEEGQKGVGDGTVSWGLEDDEDMTLTRWTGMIIGPPRVDPRAISVLAKWQNSYSIKVVLQELRRLMMSKENMKLPQPPEGQCYSN

SEQ ID NO: 95075 - protein, 147 aa, Homo sapiens
  Payload ID: 18958
  Gene Name: ubiquitin-conjugating enzyme E2 variant 1
  Uniprot ID: Q13404
  ENSP ID: ENSP00000360739
MAATTGSGVKVPRNFRLLEELEEGQKGVGDGTVSWGLEDDEDMTLTRWTGMIIGPPRTIYENRIYSLKIECGPKYPEAPPFVRFVTKINMNGVNSSNGVVDPRAISVLAKWQNSYSIKVVLQELRRLMMSKENMKLPQPPEGQCYSN

SEQ ID NO: 95076 - protein, 170 aa, Homo sapiens; identical to SEQ ID NO: 95073
  Payload ID: 18958
  Gene Name: ubiquitin-conjugating enzyme E2 variant 1
  Uniprot ID: Q13404
  ENSP ID: ENSP00000360742

SEQ ID NO: 95077 - protein, 103 aa, Homo sapiens [sequence omitted]

SEQ ID NO: 95078 - protein, 103 aa, Homo sapiens
  Payload ID: 18958
  Gene Name: ubiquitin-conjugating enzyme E2 variant 1
  Uniprot ID: Q13404
  ENSP ID: ENSP00000407770
MKEDLNLENFTAKTIYENRIYSLKIECGPKYPEAPPFVRFVTKINMNGVNSSNGVVDPRAISVLAKWQNSYSIKVVLQELRRLMMSKENMKLPQPPEGQCYSN

SEQ ID NO: 95079 - protein, 89 aa, Homo sapiens
  Payload ID: 18958
  Gene Name: ubiquitin-conjugating enzyme E2 variant 1
  ENSP ID: ENSP00000421351
MPGEVQASYLKSQSKLSDEGRLEPRKFHCKGVKVPRNFRLLEELEEGQKGVGDGTVSWGLEDDEDMTLTRWTGMIIGPPRFQFIYLNLL

SEQ ID NO: 95080 - protein, 105 aa, Homo sapiens
  Payload ID: 18958
  Gene Name: ubiquitin-conjugating enzyme E2 variant 1
  ENSP ID: ENSP00000450635
MTLTRWTGMIIGPPRTIYENRIYSLKIECGPKYPEAPPFVRFVTKINMNGVNSSNGVVDPRAISVLAKWQNSYSIKVVLQELRRLMMSKENMKLPQPPEGQCYSN

SEQ ID NO: 95081 - protein, 105 aa, Homo sapiens; identical to SEQ ID NO: 95080
  Payload ID: 18958
  Gene Name: ubiquitin-conjugating enzyme E2 variant 1
  ENSP ID: ENSP00000484828

SEQ ID NO: 95082 - protein, 105 aa, Homo sapiens; identical to SEQ ID NO: 95080
  Payload ID: 18958
  Gene Name: ubiquitin-conjugating enzyme E2 variant 1
  ENSP ID: ENSP00000485599

SEQ ID NO: 95083 - protein, 145 aa, Homo sapiens
  Payload ID: 18959
  Gene Name: ubiquitin-conjugating enzyme E2 variant 2
  Uniprot ID: Q15819
  ENSP ID: ENSP00000428209
MAVSTGVKVPRNFRLLEELEEGQKGVGDGTVSWGLEDDEDMTLTRWTGMIIGPPRTNYENRIYSLKVECGPKYPEAPPSVRFVTKINMNGINNSSGMVDARSIPVLAKWQNSYSIKVVLQELRRLMMSKENMKLPQPPEGQTYNN

SEQ ID NO: 95084 - protein, 105 aa, Homo sapiens
  Payload ID: 18959
  Gene Name: ubiquitin-conjugating enzyme E2 variant 2
  ENSP ID: ENSP00000428818
MTLTRWTGMIIGPPRTNYENRIYSLKVECGPKYPEAPPSVRFVTKINMNGINNSSGMVDARSIPVLAKWQNSYSIKVVLQELRRLMMSKENMKLPQPPEGQTYNN

SEQ ID NO: 95085 - protein, 105 aa, Homo sapiens; identical to SEQ ID NO: 95084
  Payload ID: 18959
  Gene Name: ubiquitin-conjugating enzyme E2 variant 2
  ENSP ID: ENSP00000429419

SEQ ID NO: 95086 - protein, 105 aa, Homo sapiens; identical to SEQ ID NO: 95084
  Payload ID: 18959
  Gene Name: ubiquitin-conjugating enzyme E2 variant 2
  ENSP ID: ENSP00000429886

SEQ ID NO: 95087 - protein, 109 aa, Homo sapiens
  Payload ID: 18959
  Gene Name: ubiquitin-conjugating enzyme E2 variant 2
  ENSP ID: ENSP00000430019
  MOD_RES (1)..(1): Any amino acid
XACVRAAASGCRRRWRSPQTNYENRIYSLKVECGPKYPEAPPSVRFVTKINMNGINNSSGMVDARSIPVLAKWQNSYSIKVVLQELRRLMMSKENMKLPQPPEGQTYNN

SEQ ID NO: 95088 - protein, 154 aa, Homo sapiens
  Payload ID: 18959
  Gene Name: ubiquitin-conjugating enzyme E2 variant 2
  ENSP ID: ENSP00000430491
  MOD_RES (1)..(1): Any amino acid
XLQEKMAVSTGVKVPRNFRLLEELEEGQKGVGDGTVSWGLEDDEDMTLTRWTGMIIGPPRTNYENRIYSLKVECGPKYPEAPPSVRFVTKINMNGINNSSGMSLTLSPRLEYNCAILAHCNLCLPASSDSPASTSRVAGITGTCHHAQLIFVFL

SEQ ID NO: 95089 - protein, 52 aa, Homo sapiens
  Payload ID: 18959
  Gene Name: ubiquitin-conjugating enzyme E2 variant 2
  ENSP ID: ENSP00000430741
  MOD_RES (1)..(1): Any amino acid
XVKVPRNFRLLEELEEGQKGVGDGTVSWGLEDDEDMTLTRWTGMIIGPPRLE

SEQ ID NO: 95090 - protein, 318 aa, Homo sapiens
  Payload ID: 18960
  Gene Name: ubiquitin-conjugating enzyme E2, J1
  Uniprot ID: Q9Y385
  ENSP ID: ENSP00000451261
METRYNLKSPAVKRLMKEAAELKDPTDHYHAQPLEDNLFEWHFTVRGPPDSDFDGGVYHGRIVLPPEYPMKPPSIILLTANGRFEVGKKICLSISGHHPETWQPSWSIRTALLAIIGFMPTKGEGAIGSLDYTPEERRALAKKSQDFCCEGCGSAMKDVLLPLKSGSDSSQADQEAKELARQISFKAEVNSSGKTISESDLNHSFSLTDLQDDIPTTFQGATASTSYGLQNSSAASFHQPTQPVAKNTSMSPRQRRAQQQSQRRLSTSPDVIQGHQPRDNHTDHGGSAVLIVILTLALAALIFRRIYLANEYIFDFEL

SEQ ID NO: 95091 - protein, 259 aa, Homo sapiens
  Payload ID: 18961
  Gene Name: ubiquitin-conjugating enzyme E2, J2
  Uniprot ID: Q8N2K1
  ENSP ID: ENSP00000305826
MSSTSSKRAPTTATQRLKQDYLRIKKDPVPYICAEPLPSNILEWHYVVRGPEMTPYEGGYYHGKLIFPREFPFKPPSIYMITPNGRFKCNTRLCLSITDFHPDTWNPAWSVSTILTGLLSFMVEKGPTLGSIETSDFTKRQLAVQSLAFNLKDKVFCELFPEVVEEIKQKQKAQDELSSRPQTLPLPDVVPDGETHLVQNGIQLLNGHAPGAVPNLAGLQQANRHHGLLGGALANLFVIVGFAAFAYTVKYVLRSIAQE

SEQ ID NO: 95092 - protein, 207 aa, Homo sapiens
  Payload ID: 18961
  Gene Name: ubiquitin-conjugating enzyme E2, J2
  ENSP ID: ENSP00000344857
MTPYEGGYYHGKLIFPREFPFKPPSIYMITPNGRFKCNTRLCLSITDFHPDTWNPAWSVSTILTGLLSFMVEKGPTLGSIETSDFTKRQLAVQSLAFNLKDKVFCELFPEVVEEIKQKQKAQDELSSRPQTLPLPDVVPDGETHLVQNGIQLLNGHAPGAVPNLAGLQQANRHHGLLGGALANLFVIVGFAAFAYTVKYVLRSIAQE

SEQ ID NO: 95093 - protein, 259 aa, Homo sapiens; identical to SEQ ID NO: 95091
  Payload ID: 18961
  Gene Name: ubiquitin-conjugating enzyme E2, J2
  Uniprot ID: Q8N2K1
  ENSP ID: ENSP00000353653

SEQ ID NO: 95094 - protein, 207 aa, Homo sapiens; identical to SEQ ID NO: 95092
  Payload ID: 18961
  Gene Name: ubiquitin-conjugating enzyme E2, J2
  ENSP ID: ENSP00000383718

SEQ ID NO: 95095 - protein, 275 aa, Homo sapiens
  Payload ID: 18961
  Gene Name: ubiquitin-conjugating enzyme E2, J2
  Uniprot ID: Q8N2K1
  ENSP ID: ENSP00000383719
MSSTSSKRAPTTATQRLKQDYLRIKKDPVPYICAEPLPSNILEWFKRFSWLSLLSSWDYRHYVVRGPEMTPYEGGYYHGKLIFPREFPFKPPSIYMITPNGRFKCNTRLCLSITDFHPDTWNPAWSVSTILTGLLSFMVEKGPTLGSIETSDFTKRQLAVQSLAFNLKDKVFCELFPEVVEEIKQKQKAQDELSSRPQTLPLPDVVPDGETHLVQNGIQLLNGHAPGAVPNLAGLQQANRHHGLLGGALANLFVIVGFAAFAYTVKYVLRSIAQE

SEQ ID NO: 95096 - protein, 196 aa, Homo sapiens
  Payload ID: 18961
  Gene Name: ubiquitin-conjugating enzyme E2, J2
  ENSP ID: ENSP00000393301
MSSTSSKRAPTTATQRLKQDYLRIKKDPVPYICAEPLPSNILEWHYVVRGPEMTPYEGGYYHGKLIFPREFPFKPPSIYMITPNGRFKCNTRLCLSITDFHPDTWNPAWSVSTILTGLLSFMVEKGPTLGSIETSDFTKRQLAVQSLAFNLKDKVFCELFPEVVEEIKQKQKAQDELSSRPQTLPLPDVVPDGETH

SEQ ID NO: 95097 - protein, 101 aa, Homo sapiens
  Payload ID: 18961
  Gene Name: ubiquitin-conjugating enzyme E2, J2
  ENSP ID: ENSP00000401898
MSSTSSKRAPTTATQRLKQDYLRIKKDPVPYICAEPLPSNILEWFKRFSWLSLLSSWDYRHYVVRGPEMTPYEGGYYHGKLIFPREFPFKPPSIYMITPNG

SEQ ID NO: 95098 - protein, 43 aa, Homo sapiens
  Payload ID: 18961
  Gene Name: ubiquitin-conjugating enzyme E2, J2
  ENSP ID: ENSP00000407565
MSSTSSKRAPTTATQRLKQDYLRIKKDPVPYICAEPLPSNILE

SEQ ID NO: 95099 - protein, 44 aa, Homo sapiens
  Payload ID: 18961
  Gene Name: ubiquitin-conjugating enzyme E2, J2
  ENSP ID: ENSP00000422103
MSSTSSKRAPTTATQRLKQDYLRIKKDPVPYICAEPLPSNILEW

SEQ ID NO: 95100 - protein, 100 aa, Homo sapiens
  Payload ID: 18961
  Gene Name: ubiquitin-conjugating enzyme E2, J2
  ENSP ID: ENSP00000423480
MSSTSSKRAPTTATQRLKQDYLRIKKDPVPYICAEPLPSNILEWHYVVRGPEMTPYEGIPVLDHLQLGQPECGSTSVGWALHHRVIAHDQRWGCQQAVVR

SEQ ID NO: 95101 - protein, 105 aa, Homo sapiens
  Payload ID: 18961
  Gene Name: ubiquitin-conjugating enzyme E2, J2
  ENSP ID: ENSP00000423880
MSSTSSKRAPTTATQRLKQDYLRIKKDPVPYICAEPLPSNILEWHYVVRGPEMTPYEGIPVLDHLQLGQPECGSTSVGWALHHRVIAHDQRWGCQQAVVAIIMEN

SEQ ID NO: 95102 - protein, 71 aa, Homo sapiens
  Payload ID: 18961
  Gene Name: ubiquitin-conjugating enzyme E2, J2
  ENSP ID: ENSP00000424342
MSSTSSKRAPTTATQRLKQDYLRIKKDPVPYICAEPLPSNILEWHYVVRGPEMTPYEGGYYHGKLIFPREF

SEQ ID NO: 95103 - protein, 60 aa, Homo sapiens
  Payload ID: 18961
  Gene Name: ubiquitin-conjugating enzyme E2, J2
  ENSP ID: ENSP00000425419
MVEKGPTLGSIETSDFTKRQLAVQSLAFNLKDKVFCELFPEVVEEIKQKQKAQDELSSRP

SEQ ID NO: 95104 - protein, 44 aa, Homo sapiens; identical to SEQ ID NO: 95099
  Payload ID: 18961
  Gene Name: ubiquitin-conjugating enzyme E2, J2
  ENSP ID: ENSP00000425543

SEQ ID NO: 95105 - protein, 44 aa, Homo sapiens; identical to SEQ ID NO: 95099
  Payload ID: 18961
  Gene Name: ubiquitin-conjugating enzyme E2, J2
  ENSP ID: ENSP00000427024

SEQ ID NO: 95106 - protein, 43 aa, Homo sapiens; identical to SEQ ID NO: 95098
  Payload ID: 18961
  Gene Name: ubiquitin-conjugating enzyme E2, J2
  ENSP ID: ENSP00000427244

SEQ ID NO: 95107 - protein, 149 aa, Homo sapiens
  Payload ID: 18962
  Gene Name: ubiquitin-conjugating enzyme E2A
  ENSP ID: ENSP00000335027
MSTPARRRLMRDFKRLQEDPPAGVSGAPSENNIMVWNAVIFGPEGTPFEDGTFKLTIEFTEEYPNKPPTVRFVSKMFHPNDGSICLDILQNRWSPTYDVSSILTSIQSLLDEPNPNSPANSQAAQLYQENKREYEKRVSAIVEQSWRDC

SEQ ID NO: 95108 - protein, 152 aa, Homo sapiens
  Payload ID: 18962
  Gene Name: ubiquitin-conjugating enzyme E2A
  Uniprot ID: P49459
  ENSP ID: ENSP00000360613
MSTPARRRLMRDFKRLQEDPPAGVSGAPSENNIMVWNAVIFGPEGTPFEDGTFKLTIEFTEEYPNKPPTVRFVSKMFHPNVYADGSICLDILQNRWSPTYDVSSILTSIQSLLDEPNPNSPANSQAAQLYQENKREYEKRVSAIVEQSWRDC

SEQ ID NO: 95109 - protein, 123 aa, Homo sapiens
  Payload ID: 18962
  Gene Name: ubiquitin-conjugating enzyme E2A
  ENSP ID: ENSP00000486153
MSTPARRRLMRDFKRLQEDPPAGVSGAPSENNIMVWNAVIFGPEGTPFEDGTFKLTIEFTEEYPNKPPTVRFVSKMFHPNVYADGSICLDILQNRWSPTYDVSSILTSIQILWVKSLYGIVNF

SEQ ID NO: 95110 - protein, 64 aa, Homo sapiens
  Payload ID: 18962
  Gene Name: ubiquitin-conjugating enzyme E2A
  ENSP ID: ENSP00000486347
MSTPARRRLMRDFKRLQEDPPAGVSGAPSENNIMVWNAVIFGPEGTPFEDDGVAPCHPGWSAMV

SEQ ID NO: 95111 - protein, 77 aa, Homo sapiens
  Payload ID: 18962
  Gene Name: ubiquitin-conjugating enzyme E2A
  Uniprot ID: P49459
  ENSP ID: ENSP00000486550
MFHPNVYADGSICLDILQNRWSPTYDVSSILTSIQSLLDEPNPNSPANSQAAQLYQENKREYEKRVSAIVEQSWRDC

SEQ ID NO: 95112 - protein, 122 aa, Homo sapiens
  Payload ID: 18962
  Gene Name: ubiquitin-conjugating enzyme E2A
  Uniprot ID: P49459
  ENSP ID: ENSP00000486599
MSTPARRRLMRDFKRLQEDPPAGVSGAPSENNIMVWNAVIFGPEGTPFEDVYADGSICLDILQNRWSPTYDVSSILTSIQSLLDEPNPNSPANSQAAQLYQENKREYEKRVSAIVEQSWRDC

SEQ ID NO: 95113 - protein, 119 aa, Homo sapiens
  Payload ID: 18962
  Gene Name: ubiquitin-conjugating enzyme E2A
  ENSP ID: ENSP00000487203
MVWNAVIFGPEGTPFEDGTFKLTIEFTEEYPNKPPTVRFVSKMFHPNVYADGSICLDILQNRWSPTYDVSSILTSIQSLLDEPNPNSPANSQAAQLYQENKREYEKRVSAIVEQSWRDC

SEQ ID NO: 95114 - protein, 152 aa, Homo sapiens
  Payload ID: 18963
  Gene Name: ubiquitin-conjugating enzyme E2B
  Uniprot ID: P63146
  ENSP ID: ENSP00000265339
MSTPARRRLMRDFKRLQEDPPVGVSGAPSENNIMQWNAVIFGPEGTPFEDGTFKLVIEFSEEYPNKPPTVRFLSKMFHPNVYADGSICLDILQNRWSPTYDVSSILTSIQSLLDEPNPNSPANSQAAQLYQENKREYEKRVSAIVEQSWNDS

SEQ ID NO: 95115 - protein, 141 aa, Homo sapiens
  Payload ID: 18963
  Gene Name: ubiquitin-conjugating enzyme E2B
  ENSP ID: ENSP00000425137
  MOD_RES (1)..(1): Any amino acid
XPARRRLMRDFKRLQEDPPVGVSGAPSENNIMQWNAVIFGPEGTPFEDGTFKLVIEFSEEYPNKPPTVRFLSKMFHPNDILQNRWSPTYDVSSILTSIQSLLDEPNPNSPANSQAAQLYQENKREYEKRVSAIVEQSWNDS

SEQ ID NO: 95116 - protein, 44 aa, Homo sapiens
  Payload ID: 18963
  Gene Name: ubiquitin-conjugating enzyme E2B
  ENSP ID: ENSP00000425237
MSTPARRRLMRDFKRLQEDPPVGVSGAPSENNIMQWNAVIFGVC

SEQ ID NO: 95117 - protein, 138 aa, Homo sapiens
  Payload ID: 18963
  Gene Name: ubiquitin-conjugating enzyme E2B
  ENSP ID: ENSP00000426364
STPARRRLMRDFKRLQEDPPVGVSGAPSENNIMQWNAVIFGPEGTPFEDGTFKLVIEFSEEYPNKPPTVRFLSKMFHPNVYADGSICLDILQNRWSPTYDVSSILTSIQCLALLPRLECNGTILAHRNLCLPGSISAG

SEQ ID NO: 95118 - protein, 50 aa, Homo sapiens
  Payload ID: 18964
  Gene Name: ubiquitin-conjugating enzyme E2C
  ENSP ID: ENSP00000243893
MASQNRDPAATSVAAARKGAEPSGGAARGPVGKRLQQELMTLMNPTLIVP

SEQ ID NO: 95119 - protein, 150 aa, Homo sapiens
  Payload ID: 18964
  Gene Name: ubiquitin-conjugating enzyme E2C
  Uniprot ID: O00762
  ENSP ID: ENSP00000333975
MASQNRDPAATSVAAARKGAEPSGGAARGPVGKRLQQELMTLMVYEDLRYKLSLEFPSGYPYNAPTVKFLTPCYHPNVDTQGNICLDILKEKWSALYDVRTILLSIQSLLGEPNIDSPLNTHAAELWKNPTAFKKYLQETYSKQVTSQEP

SEQ ID NO: 95120 - protein, 161 aa, Homo sapiens
  Payload ID: 18964
  Gene Name: ubiquitin-conjugating enzyme E2C
  Uniprot ID: O00762
  ENSP ID: ENSP00000335674
MASQNRDPAATSVAAARKGAEPSGGAARGPVGKRLQQELMTLMMSGDKGISAFPESDNLFKWVGTIHGAAGTAVGSIRTSSTVCLLSGPRETQDSSKPLVWGLGWDMRLLLELTLQLFLQMPEPNIDSPLNTHAAELWKNPTAFKKYLQETYSKQVTSQEP

SEQ ID NO: 95121 - protein, 179 aa, Homo sapiens
  Payload ID: 18964
  Gene Name: ubiquitin-conjugating enzyme E2C
  Uniprot ID: O00762
  ENSP ID: ENSP00000348838
MASQNRDPAATSVAAARKGAEPSGGAARGPVGKRLQQELMTLMMSGDKGISAFPESDNLFKWVGTIHGAAGTVYEDLRYKLSLEFPSGYPYNAPTVKFLTPCYHPNVDTQGNICLDILKEKWSALYDVRTILLSIQSLLGEPNIDSPLNTHAAELWKNPTAFKKYLQETYSKQVTSQEP

SEQ ID NO: 95122 - protein, 140 aa, Homo sapiens
  Payload ID: 18964
  Gene Name: ubiquitin-conjugating enzyme E2C
  Uniprot ID: O00762
  ENSP ID: ENSP00000361649
MTLMMSGDKGISAFPESDNLFKWVGTIHGAAGTVYEDLRYKLSLEFPSGYPYNAPTVKFLTPCYHPNVDTQGNICLDILKEKWSALYDVRTILLSIQSLLGEPNIDSPLNTHAAELWKNPTAFKKYLQETYSKQVTSQEP

SEQ ID NO: 95123 - protein, 79 aa, Homo sapiens
  Payload ID: 18964
  Gene Name: ubiquitin-conjugating enzyme E2C
  ENSP ID: ENSP00000385878
MASQNRDPAATSVAAARKGAEPSGGAARGPVGKRLQQELMTLMMSGDKGISAFPESDNLFKWVGTIHGAAGTNPTLIVP

SEQ ID NO: 95124 - protein, 132 aa, Homo sapiens
  Payload ID: 18964
  Gene Name: ubiquitin-conjugating enzyme E2C
  ENSP ID: ENSP00000479486
MASQNRDPAATSVAAARKGAEPSGGAARGPVGKRLQQELMTLMAVGSIRTSSTVCLLSGPRETQDSSKPLVWGLGWDMRLLLELTLQLFLQMPEPNIDSPLNTHAAELWKNPTAFKKYLQETYSKQVTSQEP

SEQ ID NO: 95125 - protein, 147 aa, Homo sapiens
  Payload ID: 18965
  Gene Name: ubiquitin-conjugating enzyme E2D 1
  Uniprot ID: P51668
  ENSP ID: ENSP00000363019
MALKRIQKELSDLQRDPPAHCSAGPVGDDLFHWQATIMGPPDSAYQGGVFFLTVHFPTDYPFKPPKIAFTTKIYHPNINSNGSICLDILRSQWSPALTVSKVLLSICSLLCDPNPDDPLVPDIAQIYKSDKEKYNRHAREWTQKYAM

SEQ ID NO: 95126 - protein, 109 aa, Homo sapiens
  Payload ID: 18965
  Gene Name: ubiquitin-conjugating enzyme E2D 1
  ENSP ID: ENSP00000479814
MTPDSAYQGGVFFLTVHFPTDYPFKPPKIAFTTKIYHPNINSNGSICLDILRSQWSPALTVSKVLLSICSLLCDPNPDDPLVPDIAQIYKSDKEKYNRHAREWTQKYAM

SEQ ID NO: 95127 - protein, 147 aa, Homo sapiens
  Payload ID: 18966
  Gene Name: ubiquitin-conjugating enzyme E2D 2
  ENSP ID: ENSP00000253815
LSLLKIQKELNDLARDPPAQCSAGPVGDDMFHWQATIMGPNDSPYQGGVFFLTIHFPTDYPFKPPKVAFTTRIYHPNINSNGSICLDILRSQWSPALTISKVLLSICSLLCDPNPDDPLVPEIARIYKTDREKYNRIAREWTQKYAM

SEQ ID NO: 95128 - protein, 147 aa, Homo sapiens
  Payload ID: 18966
  Gene Name: ubiquitin-conjugating enzyme E2D 2
  Uniprot ID: P62837
  ENSP ID: ENSP00000381717
MALKRIHKELNDLARDPPAQCSAGPVGDDMFHWQATIMGPNDSPYQGGVFFLTIHFPTDYPFKPPKVAFTTRIYHPNINSNGSICLDILRSQWSPALTISKVLLSICSLLCDPNPDDPLVPEIARIYKTDREKYNRIAREWTQKYAM

SEQ ID NO: 95129 - protein, 147 aa, Homo sapiens; identical to SEQ ID NO: 95128
  Payload ID: 18966
  Gene Name: ubiquitin-conjugating enzyme E2D 2
  Uniprot ID: P62837
  ENSP ID: ENSP00000381718

SEQ ID NO: 95130 - protein, 118 aa, Homo sapiens
  Payload ID: 18966
  Gene Name: ubiquitin-conjugating enzyme E2D 2
  Uniprot ID: P62837
  ENSP ID: ENSP00000424941
MFHWQATIMGPNDSPYQGGVFFLTIHFPTDYPFKPPKVAFTTRIYHPNINSNGSICLDILRSQWSPALTISKVLLSICSLLCDPNPDDPLVPEIARIYKTDREKYNRIAREWTQKYAM

SEQ ID NO: 95131 - protein, 98 aa, Homo sapiens
  Payload ID: 18966
  Gene Name: ubiquitin-conjugating enzyme E2D 2
  ENSP ID: ENSP00000426523
MFHWQATIMGPNDSPYQGGVFFLTIHFPTDYPFKPPKVAFTTRIYHPNINSNGSICLDILRSQWSPALTISKVLLSICSLLCDPNPDDPLVPEIARIY

SEQ ID NO: 95132 - protein, 118 aa, Homo sapiens; identical to SEQ ID NO: 95130
  Payload ID: 18966
  Gene Name: ubiquitin-conjugating enzyme E2D 2
  Uniprot ID: P62837
  ENSP ID: ENSP00000429613

SEQ ID NO: 95133 - protein, 147 aa, Homo sapiens
  Payload ID: 18967
  Gene Name: ubiquitin-conjugating enzyme E2D 3
  Uniprot ID: P61077
  ENSP ID: ENSP00000318494
MALKRINKELSDLARDPPAQCSAGPVGDDMFHWQATIMGPNDSPYQGGVFFLTIHFPTDYPFKPPKVAFTTRIYHPNINSNGSICLDILRSQWSPALTISKVLLSICSLLCDPNPDDPLVPEIARIYKTDRDKYNRISREWTQKYAM

SEQ ID NO: 95134 - protein, 147 aa, Homo sapiens; identical to SEQ ID NO: 95133
  Payload ID: 18967
  Gene Name: ubiquitin-conjugating enzyme E2D 3
  Uniprot ID: P61077
  ENSP ID: ENSP00000337208

SEQ ID NO: 95135 - protein, 141 aa, Homo sapiens
  Payload ID: 18967
  Gene Name: ubiquitin-conjugating enzyme E2D 3
  ENSP ID: ENSP00000337262
MAELSDLARDPPAQCSAGPVGDDMFHWQATIMGPNDSPYQGGVFFLTIHFPTDYPFKPPKVAFTTRIYHPNINSNGSICLDILRSQWSPALTISKVLLSICSLLCDPNPDDPLVPEIARIYKTDRDKYNRISREWTQKYAM

SEQ ID NO: 95136 - protein, 147 aa, Homo sapiens; identical to SEQ ID NO: 95133
  Payload ID: 18967
  Gene Name: ubiquitin-conjugating enzyme E2D 3
  Uniprot ID: P61077
  ENSP ID: ENSP00000344069

SEQ ID NO: 95137 - protein, 148 aa, Homo sapiens
  Payload ID: 18967
  Gene Name: ubiquitin-conjugating enzyme E2D 3
  Uniprot ID: P61077
  ENSP ID: ENSP00000345285
MALKRINKELSDLARDPPAQCSAGPVGDDMFHWQATIMGPNDSPYQGGVFFLTIHFPTDYPFKPPKVAFTTRIYHPNINSNGSICLDILRSQWSPALTISKVLLSICSLLCDPNPDDPLVPEIARIYKTDRDKYNRLAREWTEKYAML

SEQ ID NO: 95138 - protein, 149 aa, Homo sapiens
  Payload ID: 18967
  Gene Name: ubiquitin-conjugating enzyme E2D 3
  Uniprot ID: P61077
  ENSP ID: ENSP00000349722
MLSNRKCLSKELSDLARDPPAQCSAGPVGDDMFHWQATIMGPNDSPYQGGVFFLTIHFPTDYPFKPPKVAFTTRIYHPNINSNGSICLDILRSQWSPALTISKVLLSICSLLCDPNPDDPLVPEIARIYKTDRDKYNRISREWTQKYAM

SEQ ID NO: 95139 - protein, 147 aa, Homo sapiens; identical to SEQ ID NO: 95133
  Payload ID: 18967
  Gene Name: ubiquitin-conjugating enzyme E2D 3
  Uniprot ID: P61077
  ENSP ID: ENSP00000378280

SEQ ID NO: 95140 - protein, 147 aa, Homo sapiens; identical to SEQ ID NO: 95133
  Payload ID: 18967
  Gene Name: ubiquitin-conjugating enzyme E2D 3
  Uniprot ID: P61077
  ENSP ID: ENSP00000378282

SEQ ID NO: 95141 - protein, 147 aa, Homo sapiens; identical to SEQ ID NO: 95133
  Payload ID: 18967
  Gene Name: ubiquitin-conjugating enzyme E2D 3
  Uniprot ID: P61077
  ENSP ID: ENSP00000378283

SEQ ID NO: 95142 - protein, 147 aa, Homo sapiens; identical to SEQ ID NO: 95133
  Payload ID: 18967
  Gene Name: ubiquitin-conjugating enzyme E2D 3
  Uniprot ID: P61077
  ENSP ID: ENSP00000396901

SEQ ID NO: 95143 - protein, 49 aa, Homo sapiens
  Payload ID: 18967
  Gene Name: ubiquitin-conjugating enzyme E2D 3
  ENSP ID: ENSP00000421310
MALKRINKELSDLARDPPAQCSAGPVGDDMFHWQATIMGPNDSPYQGGV

SEQ ID NO: 95144 - protein, 35 aa, Homo sapiens
  Payload ID: 18967
  Gene Name: ubiquitin-conjugating enzyme E2D 3
  ENSP ID: ENSP00000421794
MALKRINKELSDLARDPPAQCSAGPVGDDKFFFFF

SEQ ID NO: 95145 - protein, 118 aa, Homo sapiens
  Payload ID: 18967
  Gene Name: ubiquitin-conjugating enzyme E2D 3
  ENSP ID: ENSP00000421904
MFHWQATIMGPNDSPYQGGVFFLTIHFPTDYPFKPPKVAFTTRIYHPNINSNGSICLDILRSQWSPALTISKVLLSICSLLCDPNPDDPLVPEIARIYKTDRDKYNRISREWTQKYAM

SEQ ID NO: 95146 - protein, 35 aa, Homo sapiens; identical to SEQ ID NO: 95144
  Payload ID: 18967
  Gene Name: ubiquitin-conjugating enzyme E2D 3
  ENSP ID: ENSP00000422134

SEQ ID NO: 95147 - protein, 48 aa, Homo sapiens
  Payload ID: 18967
  Gene Name: ubiquitin-conjugating enzyme E2D 3
  ENSP ID: ENSP00000422939
MALKRINKELSDLARDPPAQCSAGPVGDDMFHWQATIMGPISNYMLDN

SEQ ID NO: 95148 - protein, 55 aa, Homo sapiens
  Payload ID: 18967
  Gene Name: ubiquitin-conjugating enzyme E2D 3
  ENSP ID: ENSP00000423324
MALKRINKELSDLARDPPAQCSAGPVGDDMFHWQATIMGPQNSFLSWVDKQLYAG

SEQ ID NO: 95149 - protein, 96 aa, Homo sapiens
  Payload ID: 18967
  Gene Name: ubiquitin-conjugating enzyme E2D 3
  ENSP ID: ENSP00000423487
MALKRINKELSDLARDPPAQCSAGPVGDDMFHWQATIMGPNDSPYQGGVFFLTIHFPTDYPFKPPKVAFTTRIYHPNINSNGSICLDILRSQWSPA

SEQ ID NO: 95150 - protein, 48 aa, Homo sapiens; identical to SEQ ID NO: 95147
  Payload ID: 18967
  Gene Name: ubiquitin-conjugating enzyme E2D 3
  ENSP ID: ENSP00000423692

SEQ ID NO: 95151 - protein, 48 aa, Homo sapiens; identical to SEQ ID NO: 95147
  Payload ID: 18967
  Gene Name: ubiquitin-conjugating enzyme E2D 3
  ENSP ID: ENSP00000423869

SEQ ID NO: 95152 - protein, 118 aa, Homo sapiens; identical to SEQ ID NO: 95145
  Payload ID: 18967
  Gene Name: ubiquitin-conjugating enzyme E2D 3
  ENSP ID: ENSP00000424359

SEQ ID NO: 95153 - protein, 72 aa, Homo sapiens
  Payload ID: 18967
  Gene Name: ubiquitin-conjugating enzyme E2D 3
  ENSP ID: ENSP00000424710
MFHWQATIMGPNDSPYQGGVFFLTIHFPTDYPFKPPKVAFTTRIYHPNINSNGSICLDILRSQWSPALTISK

SEQ ID NO: 95154 - protein, 78 aa, Homo sapiens
  Payload ID: 18967
  Gene Name: ubiquitin-conjugating enzyme E2D 3
  ENSP ID: ENSP00000425762
MALKRINKELSDLARDPPAQCSAGPVGDDMFHWQATIMGPNDSPYQGGVFFLTIHFPTDYPFKPPKVAFTTRIYHPNI

SEQ ID NO: 95155 - protein, 118 aa, Homo sapiens; identical to SEQ ID NO: 95145
  Payload ID: 18967
  Gene Name: ubiquitin-conjugating enzyme E2D 3
  ENSP ID: ENSP00000426586

SEQ ID NO: 95156 - protein, 118 aa, Homo sapiens; identical to SEQ ID NO: 95145
  Payload ID: 18967
  Gene Name: ubiquitin-conjugating enzyme E2D 3
  ENSP ID: ENSP00000426620

SEQ ID NO: 95157 - protein, 19 aa, Homo sapiens
  Payload ID: 18967
  Gene Name: ubiquitin-conjugating enzyme E2D 3
  ENSP ID: ENSP00000427270
MFHWQATIMGPISNYMLDN

SEQ ID NO: 95158 - protein, 148 aa, Homo sapiens
  Payload ID: 18967
  Gene Name: ubiquitin-conjugating enzyme E2D 3
  ENSP ID: ENSP00000481600
MLSLKKKKKELSDLARDPPAQCSAGPVGDDMFHWQATIMGPNDSPYQGGVFFLTIHFPTDYPFKPPKVAFTTRIYHPNINSNGSICLDILRSQWSPALTISKVLLSICSLLCDPNPDDPLVPEIARIYKTDRDKYNRISREWTQKYAM

SEQ ID NO: 95159 - protein, 147 aa, Homo sapiens
  Payload ID: 18968
  Gene Name: ubiquitin-conjugating enzyme E2D 4 (putative)
  Uniprot ID: Q9Y2X8
  ENSP ID: ENSP00000222402
MALKRIQKELTDLQRDPPAQCSAGPVGDDLFHWQATIMGPNDSPYQGGVFFLTIHFPTDYPFKPPKVAFTTKIYHPNINSNGSICLDILRSQWSPALTVSKVLLSICSLLCDPNPDDPLVPEIAHTYKADREKYNRLAREWTQKYAM

SEQ ID NO: 95160 - protein, 42 aa, Homo sapiens
  Payload ID: 18968
  Gene Name: ubiquitin-conjugating enzyme E2D 4 (putative)
  ENSP ID: ENSP00000391678
MALKRIQKAVQEAWCQHLLLVRPQEAYNHGRKQRRSRRVTWN

SEQ ID NO: 95161 - protein, 122 aa, Homo sapiens
  Payload ID: 18968
  Gene Name: ubiquitin-conjugating enzyme E2D 4 (putative)
  ENSP ID: ENSP00000397406
MALKRIQKELTDLQRDPPAQCSAGPVGDDLFHWQATIMGPNDSPYQGGVFFLTIHFPTDYPFKPPKVAFTTKIYHPNINSNGSICLDILRSQWSPALTVSKGRDADGMLCVLFYTCFYPSTD

SEQ ID NO: 95162 - protein, 39 aa, Homo sapiens
  Payload ID: 18968
  Gene Name: ubiquitin-conjugating enzyme E2D 4 (putative)
  ENSP ID: ENSP00000401824
MALKRIQKELTDLQRDPPAQCSAGPVGDDCCFHNQNLSP

SEQ ID NO: 95163 - protein, 42 aa, Homo sapiens; identical to SEQ ID NO: 95160
  Payload ID: 18968
  Gene Name: ubiquitin-conjugating enzyme E2D 4 (putative)
  ENSP ID: ENSP00000407196

SEQ ID NO: 95164 - protein, 42 aa, Homo sapiens; identical to SEQ ID NO: 95160
  Payload ID: 18968
  Gene Name: ubiquitin-conjugating enzyme E2D 4 (putative)
  ENSP ID: ENSP00000410897

SEQ ID NO: 95165 - protein, 42 aa, Homo sapiens; identical to SEQ ID NO: 95160
  Payload ID: 18968
  Gene Name: ubiquitin-conjugating enzyme E2D 4 (putative)
  ENSP ID: ENSP00000411738

SEQ ID NO: 95166 - protein, 74 aa, Homo sapiens
  Payload ID: 18968
  Gene Name: ubiquitin-conjugating enzyme E2D 4 (putative)
  ENSP ID: ENSP00000414331
MALKRIQKELTDLQRDPPAQCSAGPVGDDLFHWQATIMGPNDSPYQGGVFFLTIHFPTDYPFKPPKVRSLSQLP

SEQ ID NO: 95167 - protein, 31 aa, Homo sapiens
  Payload ID: 18968
  Gene Name: ubiquitin-conjugating enzyme E2D 4 (putative)
  ENSP ID: ENSP00000442350
ELTDLQRDPPAQCSAGPVGDDCCFHNQNLSP

SEQ ID NO: 95168 - protein, 193 aa, Homo sapiens
  Payload ID: 18969
  Gene Name: ubiquitin-conjugating enzyme E2E 1
  Uniprot ID: P51965
  ENSP ID: ENSP00000303709
MSDDDSRASTSSSSSSSSNQQTEKETNTPKKKESKVSMSKNSKLLSTSAKRIQKELADITLDPPPNCSAGPKGDNIYEWRSTILGPPGSVYEGGVFFLDITFTPEYPFKPPKVTFRTRIYHCNINSQGVICLDILKDNWSPALTISKVLLSICSLLTDCNPADPLVGSIATQYMTNRAEHDRMARQWTKRYAT

SEQ ID NO: 95169 - protein, 176 aa, Homo sapiens
  Payload ID: 18969
  Gene Name: ubiquitin-conjugating enzyme E2E 1
  Uniprot ID: P51965
  ENSP ID: ENSP00000329113
MSDDDSRASTSSSSSSSSNQQTEKETNTPKKKESKVSMSKNSKLLSTSAKSAGPKGDNIYEWRSTILGPPGSVYEGGVFFLDITFTPEYPFKPPKVTFRTRIYHCNINSQGVICLDILKDNWSPALTISKVLLSICSLLTDCNPADPLVGSIATQYMTNRAEHDRMARQWTKRYAT

SEQ ID NO: 95170 - protein, 151 aa, Homo sapiens
  Payload ID: 18969
  Gene Name: ubiquitin-conjugating enzyme E2E 1
  ENSP ID: ENSP00000393088
RIQKELADITLDPPPNCSAGPKGDNIYEWRSTILGPPGSVYEGGVFFLDITFTPEYPFKPPKASVFFLGQVTFRTRIYHCNINSQGVICLDILKDNWSPALTISKVLLSICSLLTDCNPADPLVGSIATQYMTNRAEHDRMARQWTKRYAT

SEQ ID NO: 95171 - protein, 147 aa, Homo sapiens
  Payload ID: 18969
  Gene Name: ubiquitin-conjugating enzyme E2E 1
  ENSP ID: ENSP00000410652
MSDDDSRASTSSSSSSSSNQQTEKETNTPKKKESKVSMSKNSKLLSTSAKRIQKELADITLDPPPNCSAGPKGDNIYEWRSTILGPPGSVYEGGVFFLDITFTPEYPFKPPKVTFRTRIYHCNINSQGVICLDILKDNWSPALTISK

SEQ ID NO: 95172 - protein, 160 aa, Homo sapiens
  Payload ID: 18969
  Gene Name: ubiquitin-conjugating enzyme E2E 1
  Uniprot ID: P51965
  ENSP ID: ENSP00000411351
MKEVGRPREVRGRPGKSRIQKELADITLDPPPNCSAGPKGDNIYEWRSTILGPPGSVYEGGVFFLDITFTPEYPFKPPKVTFRTRIYHCNINSQGVICLDILKDNWSPALTISKVLLSICSLLTDCNPADPLVGSIATQYMTNRAEHDRMARQWTKRYAT

SEQ ID NO: 95173 - protein, 167 aa, Homo sapiens
  Payload ID: 18969
  Gene Name: ubiquitin-conjugating enzyme E2E 1
  ENSP ID: ENSP00000475890
MKEVGRPREVRGRPGKSRIQKELADITLDPPPNCSAGPKGDNIYEWRSTILGPPGSVYEGGVFFLDITFTPEYPFKPPKVTFRTRIYHCNINSQGVICLDILKDNWSPALTISKVLLSICSLLTDCNPGKVHNSLPCFILPYLKNTCFQKLSKDKTNFSAQVCEYKN

SEQ ID NO: 95174 - protein, 92 aa, Homo sapiens
  Payload ID: 18970
  Gene Name: ubiquitin-conjugating enzyme E2E 2
  ENSP ID: ENSP00000338340
MSTEAQRVDDSPSTSGGSSDGDQRESVQQEPEREQVQPKKKEGKISSKTAAKLSTSAKRIQKELAEITLDPPPNCRLPSEQESITVILTAKV

SEQ ID NO: 95175 - protein, 201 aa, Homo sapiens
  Payload ID: 18970
  Gene Name: ubiquitin-conjugating enzyme E2E 2
  Uniprot ID: Q96LR5
  ENSP ID: ENSP00000379931
MSTEAQRVDDSPSTSGGSSDGDQRESVQQEPEREQVQPKKKEGKISSKTAAKLSTSAKRIQKELAEITLDPPPNCSAGPKGDNIYEWRSTILGPPGSVYEGGVFFLDITFSPDYPFKPPKVTFRTRIYHCNINSQGVICLDILKDNWSPALTISKVLLSICSLLTDCNPADPLVGSIATQYMTNRAEHDRMARQWTKRYAT

SEQ ID NO: 95176 - protein, 164 aa, Homo sapiens
  Payload ID: 18970
  Gene Name: ubiquitin-conjugating enzyme E2E 2
  ENSP ID: ENSP00000392800
MSTEAQRVDDSPSTSGGSSDGDQRESVQQEPEREQVQPKKKEGKISSKTAAKLSTSAKRIQKELAEITLDPPPNCSTNITLKGNAHSILNWIFGFWMPTSAGPKGDNIYEWRSTILGPPGSVYEGGVFFLDITFSPDYPFKPPKVTFRTRIYHCNINSQGVICL

SEQ ID NO: 95177 - protein, 201 aa, Homo sapiens; identical to SEQ ID NO: 95175
  Payload ID: 18970
  Gene Name: ubiquitin-conjugating enzyme E2E 2
  Uniprot ID: Q96LR5
  ENSP ID: ENSP00000401053

SEQ ID NO: 95178 - protein, 89 aa, Homo sapiens
  Payload ID: 18970
  Gene Name: ubiquitin-conjugating enzyme E2E 2
  ENSP ID: ENSP00000407501
MSTEAQRVDDSPSTSGGSSDGDQRESVQQEPEREQVQPKKKEGKISSKTAAKLSTSAKRIQKELAEITLDPPPNCRLFLIRSACISSNL

SEQ ID NO: 95179 - protein, 94 aa, Homo sapiens
  Payload ID: 18970
  Gene Name: ubiquitin-conjugating enzyme E2E 2
  ENSP ID: ENSP00000484777
SAGPKGDNIYEWRSTILGPPGSVYEGGVFFLDITFSPDYPFKPPKVTFRTRIYHCNINSQGVICLDILKDNWSPALTISKVLLSICSLLTDCNP

SEQ ID NO: 95180 - protein, 89 aa, Homo sapiens; identical to SEQ ID NO: 95178
  Payload ID: 18970
  Gene Name: ubiquitin-conjugating enzyme E2E 2
  ENSP ID: ENSP00000486775

SEQ ID NO: 95181 - protein, 207 aa, Homo sapiens
  Payload ID: 18971
  Gene Name: ubiquitin-conjugating enzyme E2E 3
  Uniprot ID: Q969T4
  ENSP ID: ENSP00000376215
MSSDRQRSDDESPSTSSGSSDADQRDPAAPEPEEQEERKPSATQQKKNTKLSSKTTAKLSTSAKRIQKELAEITLDPPPNCSAGPKGDNIYEWRSTILGPPGSVYEGGVFFLDITFSSDYPFKPPKVTFRTRIYHCNINSQGVICLDILKDNWSPALTISKVLLSICSLLTDCNPADPLVGSIATQYLTNRAEHDRIARQWTKRYAT

SEQ ID NO: 95182 - protein, 207 aa, Homo sapiens; identical to SEQ ID NO: 95181
  Payload ID: 18971
  Gene Name: ubiquitin-conjugating enzyme E2E 3
  Uniprot ID: Q969T4
  ENSP ID: ENSP00000386788

SEQ ID NO: 95183 - protein, 111 aa, Homo sapiens
  Payload ID: 18971
  Gene Name: ubiquitin-conjugating enzyme E2E 3
  ENSP ID: ENSP00000473264
MSSDRQRSDDESPSTSSGSSDADQRDPAAPEPEEQEERKPSATQQKKNTKLSSKTTAKLSTSAKRIQKELAEITLDPPPNCRKISKSCIECKDIQIENEELVLSVSSSLSI

SEQ ID NO: 95184 - protein, 174 aa, Homo sapiens
  Payload ID: 18971
  Gene Name: ubiquitin-conjugating enzyme E2E 3
  ENSP ID: ENSP00000473345
MSSDRQRSDDESPSTSSGSSDADQRDPAAPEPEEQEERKPSATQQKKNTKLSSKTTAKLSTSAKRIQKELAEITLDPPPNCSAGPKGDNIYEWRSTILGPPGSVYEGGVFFLDITFSSDYPFKPPKVTFRTRIYHCNINSQGVICLDILKDNWSPALTISKVLLSICSLLTDCN

SEQ ID NO: 95185 - protein, 123 aa, Homo sapiens
  Payload ID: 18971
  Gene Name: ubiquitin-conjugating enzyme E2E 3
  ENSP ID: ENSP00000473521
MSSDRQRSDDESPSTSSGSSDADQRDPAAPEPEEQEERKPSATQQKKNTKLSSKTTAKLSTSAKRIQKELAEITLDPPPNCSAGPKGDNIYEWRSTILGPPGSVYEGGVFFLDITFSSDYPFK

SEQ ID NO: 95186 - protein, 175 aa, Homo sapiens
  Payload ID: 18971
  Gene Name: ubiquitin-conjugating enzyme E2E 3
  ENSP ID: ENSP00000473525
MSSDRQRSDDESPSTSSGSSDADQRDPAAPEPEEQEERKPSATQQKKNTKLSSKTTAKLSTSAKRIQKELAEITLDPPPNCSAGPKGDNIYEWRSTILGPPGSVYEGGVFFLDITFSSDYPFKPPKVTFRTRIYHCNINSQGVICLDILKDNWSPALTISKVLLSICSLLTDCNP

SEQ ID NO: 95187 - protein, 174 aa, Homo sapiens; identical to SEQ ID NO: 95184
  Payload ID: 18971
  Gene Name: ubiquitin-conjugating enzyme E2E 3
  ENSP ID: ENSP00000473591

SEQ ID NO: 95188 - protein, 207 aa, Homo sapiens; identical to SEQ ID NO: 95181
  Payload ID: 18971
  Gene Name: ubiquitin-conjugating enzyme E2E 3
  Uniprot ID: Q969T4
  ENSP ID: ENSP00000473623

SEQ ID NO: 95189 - protein, 207 aa, Homo sapiens; identical to SEQ ID NO: 95181
  Payload ID: 18971
  Gene Name: ubiquitin-conjugating enzyme E2E 3
  Uniprot ID: Q969T4
  ENSP ID: ENSP00000473639

SEQ ID NO: 95190 - protein, 130 aa, Homo sapiens
  Payload ID: 18971
  Gene Name: ubiquitin-conjugating enzyme E2E 3
  ENSP ID: ENSP00000473642
MSSDRQRSDDESPSTSSGSSDADQRDPAAPEPEEQEERKPSATQQKKNTKLSSKTTAKLSTSAKRIQKELAEITLDPPPNCRGCPCPLLVTTCANSESLERKISKSCIECKDIQIENEELVLSVSSSLSI

SEQ ID NO: 95191 - protein, 185 aa, Homo sapiens
  Payload ID: 18972
  Gene Name: ubiquitin-conjugating enzyme E2F (putative)
  Uniprot ID: Q969M7
  ENSP ID: ENSP00000272930
MLTLASKLKRDDGLKGSRTAATASDSTRRVSVRDKLLVKEVAELEANLPCTCKVHFPDPNKLHCFQLTVTPDEGYYQGGKFQFETEVPDAYNMVPPKVKCLTKIWHPNITETGEICLSLLREHSIDGTGWAPTRTLKDVVWGLNSLFTDLLNFDDPLNIEAAEHHLRDKEDFRNKVDDYIKRYAR

SEQ ID NO: 95192 - protein, 161 aa, Homo sapiens
  Payload ID: 18972
  Gene Name: ubiquitin-conjugating enzyme E2F (putative)
  Uniprot ID: Q969M7
  ENSP ID: ENSP00000386680
MVLGAGPASPVSGSPEVAELEANLPCTCKVHFPDPNKLHCFQLTVTPDEGYYQGGKFQFETEVPDAYNMVPPKVKCLTKIWHPNITETGEICLSLLREHSIDGTGWAPTRTLKDVVWGLNSLFTDLLNFDDPLNIEAAEHHLRDKEDFRNKVDDYIKRYAR

SEQ ID NO: 95193 - protein, 163 aa, Homo sapiens
  Payload ID: 18972
  Gene Name: ubiquitin-conjugating enzyme E2F (putative)
  ENSP ID: ENSP00000387060
MLTLASKLKRDDGLKGSRTAATASDSTRRVSVRDKLLVKEVAELEANLPYEGYYQGGKFQFETEVPDAYNMVPPKVKCLTKIWHPNITETGEICLSLLREHSIDGTGWAPTRTLKDVVWGLNSLFTDLLNFDDPLNIEAAEHHLRDKEDFRNKVDDYIKRYAR

SEQ ID NO: 95194 - protein, 164 aa, Homo sapiens
  Payload ID: 18972
  Gene Name: ubiquitin-conjugating enzyme E2F (putative)
  Uniprot ID: Q969M7
  ENSP ID: ENSP00000387299
MLTLASKLKRDDGLKGSRTAATASDSTRRVSVRDKLLVKEVAELEANLPCTCKVHFPDPNKLHCFQLTVTPDEGYYQGGKFQFETEVPDAYNMVPPKVKCLTKIWHPNITETGEICLSLLREHSIDGTGWAPTRTLKDVVWGLNSLFTEDFRNKVDDYIKRYAR

SEQ ID NO: 95195 - protein, 101 aa, Homo sapiens
  Payload ID: 18972
  Gene Name: ubiquitin-conjugating enzyme E2F (putative)
  ENSP ID: ENSP00000389685
MLTLASKLKRDDGLKGSRTAATASDSTRRVSVRDKLLVKEVAELEANLPCTCKVHFPDPNKLHCFQLTVTPDEGYYQGGKFQFETEVPDAYNMVFIERTFN

SEQ ID NO: 95196 - protein, 139 aa, Homo sapiens
  Payload ID: 18972
  Gene Name: ubiquitin-conjugating enzyme E2F (putative)
  ENSP ID: ENSP00000390813
MLTLASKLKRDDGLKGSRTAATASDSTRRVSVRDKLLVKDEGYYQGGKFQFETEVPDAYNMVPPKVKCLTKIWHPNITETGEICLSLLREHSIDGTGWAPTRTLKDVVWGLNSLFTDLLNFDDPLNIEAAEHHLRDKED

SEQ ID NO: 95197 - protein, 120 aa, Homo sapiens
  Payload ID: 18972
  Gene Name: ubiquitin-conjugating enzyme E2F (putative)
  Uniprot ID: Q969M7
  ENSP ID: ENSP00000393515
MLTLASKLKRDDGLKGSRTAATASDSTRRVSVRDKLLVKEVAELEANLPCTCKVHFPDPNKLHCFQLTVTPDEGYYQGGKFQFETEVPDAYNMVPPKVKCLTKIWHPNITETGEICLRIF

SEQ ID NO: 95198 - protein, 142 aa, Homo sapiens
  Payload ID: 18972
  Gene Name: ubiquitin-conjugating enzyme E2F (putative)
  ENSP ID: ENSP00000396003
MLTLASKLKRDDGLKGSRTAATASDSTRRVSVRDKLLVKEVAELEANLPCTCKVHFPDPNKLHCFQLTVTPGFFCFVLCFLIDEGYYQGGKFQFETEVPDAYNMVPPKVKCLTKIWHPNITETGEICLSLLREHSIDGTGWA

SEQ ID NO: 95199 - protein, 78 aa, Homo sapiens
  Payload ID: 18972
  Gene Name: ubiquitin-conjugating enzyme E2F (putative)
  ENSP ID: ENSP00000396296
MVLGAGPASPVSGSPEVAELEANLPCTCKVHFPDPNKLHCFQLTVTPASQSEMPDQDLAPQHHRDRGNMSEFIERTFN

SEQ ID NO: 95200 - protein, 123 aa, Homo sapiens
  Payload ID: 18972
  Gene Name: ubiquitin-conjugating enzyme E2F (putative)
  ENSP ID: ENSP00000396630
MLTLASKLKRDDGLKGSRTAATASDSTRRVSVRDKLLVKEVAELEANLPCTCKVHFPDPNKLHCFQLTVTPDEGYYQGGKFQFETEVPDAYNMVPPKVKCLTKIWHPNITETGEICLRMSFGD

SEQ ID NO: 95201 - protein, 153 aa, Homo sapiens
  Payload ID: 18972
  Gene Name: ubiquitin-conjugating enzyme E2F (putative)
  Uniprot ID: Q969M7
  ENSP ID: ENSP00000399183
MLTLASKLKRDDGLKGSRTAATASDSTRRVSVRDKLLVKDEGYYQGGKFQFETEVPDAYNMVPPKVKCLTKIWHPNITETGEICLSLLREHSIDGTGWAPTRTLKDVVWGLNSLFTDLLNFDDPLNIEAAEHHLRDKEDFRNKVDDYIKRYAR

SEQ ID NO: 95202 - protein, 171 aa, Homo sapiens
  Payload ID: 18972
  Gene Name: ubiquitin-conjugating enzyme E2F (putative)
  ENSP ID: ENSP00000406113
MLTLASKLKRDDGLKGSRTAATASDSTRRVSVRDKLLVKEVAELEANLPCTCKVHFPDPNKLHCFQLTVTPDEGYYQGGKFQFETEVPDAYNMVPPKVKCLTKIWHPNITETGEICLSLLREHSIDGTGWAPTRTLKDVVWGLNSLFTDLLNFDDPLNIEAAEHHLRDKED

SEQ ID NO: 95203 - protein, 47 aa, Homo sapiens
  Payload ID: 18972
  Gene Name: ubiquitin-conjugating enzyme E2F (putative)
  ENSP ID: ENSP00000408676
MLTLASKLKRDDGLKGSRTAATASDSTRRVSVRDKLLVKGQSLRRIL

SEQ ID NO: 95204 - protein, 47 aa, Homo sapiens; identical to SEQ ID NO: 95203
  Payload ID: 18972
  Gene Name: ubiquitin-conjugating enzyme E2F (putative)
  ENSP ID: ENSP00000408823

SEQ ID NO: 95205 - protein, 102 aa, Homo sapiens
  Payload ID: 18972
  Gene Name: ubiquitin-conjugating enzyme E2F (putative)
  Uniprot ID: Q969M7
  ENSP ID: ENSP00000409749
MLTLASKLKRDDGLKGSRTAATASDSTRRVSVRDKLLVKEVAELEANLPCTCKVHFPDPNKLHCFQLTVTPASQSEMPDQDLAPQHHRDRGNMSEFIERTFN

SEQ ID NO: 95206 - protein, 63 aa, Homo sapiens
  Payload ID: 18972
  Gene Name: ubiquitin-conjugating enzyme E2F (putative)
  ENSP ID: ENSP00000410345
MLTLASKLKRDDGLKGSRTAATASDSTRRVSVRDKLLVKEVAELEANLPYRVSLCCPSWSTVA

SEQ ID NO: 95207 - protein, 86 aa, Homo sapiens
  Payload ID: 18972
  Gene Name: ubiquitin-conjugating enzyme E2F (putative)
  ENSP ID: ENSP00000410867
MLTLASKLKRDDGLKGSRTAATASDSTRRVSVRDKLLVKEVAELEANLPCTCKVHFPDPNKLHCFQLTVTPEFGWCDASLLTVPTE

SEQ ID NO: 95208 - protein, 48 aa, Homo sapiens
  Payload ID: 18972
  Gene Name: ubiquitin-conjugating enzyme E2F (putative)
  ENSP ID: ENSP00000412965
MLTLASKLKRDDGLKGSRTAATASDSTRRVSVRDKLLVKDGVSLCHVE

SEQ ID NO: 95209 - protein, 153 aa, Homo sapiens
  Payload ID: 18972
  Gene Name: ubiquitin-conjugating enzyme E2F (putative)
  ENSP ID: ENSP00000414619
MLTLASKLKRDDGLKGSRTAATASDSTRRVSVRDKLLVKGTCKVHFPDPNKLHCFQLTVTPDEGYYQGGKFQFETEVPDAYNMVPPKVKCLTKIWHPNITETGEICLSLLREHSIDGTGWAPTRTLKDVVWGLNSLFTDLLNFDDPLNIEAAE

SEQ ID NO: 95210 - protein, 185 aa, Homo sapiens; identical to SEQ ID NO: 95191
  Payload ID: 18972
  Gene Name: ubiquitin-conjugating enzyme E2F (putative)
  Uniprot ID: Q969M7
  ENSP ID: ENSP00000478474

SEQ ID NO: 95211 - protein, 170 aa, Homo sapiens
  Payload ID: 18973
  Gene Name: ubiquitin-conjugating enzyme E2G 1
  Uniprot ID: P62253
  ENSP ID: ENSP00000380178
MTELQSALLLRRQLAELNKNPVEGFSAGLIDDNDLYRWEVLIIGPPDTLYEGGVFKAHLTFPKDYPLRPPKMKFITEIWHPNVDKNGDVCISILHEPGEDKYGYEKPEERWLPIHTVETIMISVISMLADPNGDSPANVDAAKEWREDRNGEFKRKVARCVRKSQETAFE

SEQ ID NO: 95212 - protein, 49 aa, Homo sapiens
  Payload ID: 18973
  Gene Name: ubiquitin-conjugating enzyme E2G 1
  ENSP ID: ENSP00000458253
MTELQSALLLRRQLAELNKNPVEGFSAGLIDDNDLYRWEVLIIGPPDTL

SEQ ID NO: 95213 - protein, 6 aa, Homo sapiens
  Payload ID: 18973
  Gene Name: ubiquitin-conjugating enzyme E2G 1
  ENSP ID: ENSP00000459485
MKFITE

SEQ ID NO: 95214 - protein, 99 aa, Homo sapiens
  Payload ID: 18973
  Gene Name: ubiquitin-conjugating enzyme E2G 1
  ENSP ID: ENSP00000459691
MKFITEIWHPNVDKNGDVCISILHEPGEDKYGYEKPEERWLPIHTVETIMISVISMLADPNGDSPANVDAAKEWREDRNGEFKRKVARCVRKSQETAFE

SEQ ID NO: 95215 - protein, 50 aa, Homo sapiens
  Payload ID: 18973
  Gene Name: ubiquitin-conjugating enzyme E2G 1
  ENSP ID: ENSP00000459847
MTELQSALLLRRQLAELNKNPVEGFSAGLIDDNDLYRWEVLIIGPPDTLY

SEQ ID NO: 95216 - protein, 78 aa, Homo sapiens
  Payload ID: 18973
  Gene Name: ubiquitin-conjugating enzyme E2G 1
  ENSP ID: ENSP00000467502
MKFITEIWHPNVDKNGDVCISILHEPGEDKYGYEKPEERWLPIHTVETIMISVISMLADPNGDSPANVDAAKEWREDR

SEQ ID NO: 95217 - protein, 137 aa, Homo sapiens
  Payload ID: 18974
  Gene Name: ubiquitin-conjugating enzyme E2G 2
  Uniprot ID: P60604
  ENSP ID: ENSP00000331384
MNEENFFEWEALIMGPEDTCFEFGVFPAILSFPLDYPLSPPKMRFTCEMFHPNIYPDGRVCISILHAPGDDPMGYESSAERWSPVQSVEKILLSVVSMLAEPNDESGANVDASKMWRDDREQFYKIAKQIVQKSLGL

SEQ ID NO: 95218 - protein, 165 aa, Homo sapiens
  Payload ID: 18974
  Gene Name: ubiquitin-conjugating enzyme E2G 2
  Uniprot ID: P60604
  ENSP ID: ENSP00000338348
MAGTALKRLMAEYKQLTLNPPEGIVAGPMNEENFFEWEALIMGPEDTCFEFGVFPAILSFPLDYPLSPPKMRFTCEMFHPNIYPDGRVCISILHAPGDDPMGYESSAERWSPVQSVEKILLSVVSMLAEPNDESGANVDASKMWRDDREQFYKIAKQIVQKSLGL

SEQ ID NO: 95219 - protein, 48 aa, Homo sapiens
  Payload ID: 18974
  Gene Name: ubiquitin-conjugating enzyme E2G 2
  ENSP ID: ENSP00000418423
MAGTALKRLMAEYKQLTLNPPEGIVAGPMNEENFFEWEALIISALLGP

SEQ ID NO: 95220 - protein, 99 aa, Homo sapiens
  Payload ID: 18974
  Gene Name: ubiquitin-conjugating enzyme E2G 2
  ENSP ID: ENSP00000420671
MAGTALKRLMAEYKQLTLNPPEGIVAGPMNEENFFEWEALIMGPEDTCFEFGVFPAILSFPLDYPLSPPKMRFTCEMFHPNSGQPDVQGKYASSFFHSP

SEQ ID NO: 95221 - protein, 183 aa, Homo sapiens
  Payload ID: 18975
  Gene Name: ubiquitin-conjugating enzyme E2H
  Uniprot ID: P62256
  ENSP ID: ENSP00000347836
MSSPSPGKRRMDTDVVKLIESKHEVTILGGLNEFVVKFYGPQGTPYEGGVWKVRVDLPDKYPFKSPSIGFMNKIFHPNIDEASGTVCLDVINQTWTALYDLTNIFESFLPQLLAYPNPIDPLNGDAAAMYLHRPEEYKQKIKEYIQKYATEEALKEQEEGTGDSSSESSMSDFSEDEAQDMEL

SEQ ID NO: 95222 - protein, 149 aa, Homo sapiens
  Payload ID: 18975
  Gene Name: ubiquitin-conjugating enzyme E2H
  ENSP ID: ENSP00000417681
MDHKEVSTCVAPYEGGVWKVRVDLPDKYPFKSPSIGFMNKIFHPNIDEASGTVCLDVINQTWTALYDLTNIFESFLPQLLAYPNPIDPLNGDAAAMYLHRPEEYKQKIKEYIQKYATEEALKEQEEGTGDSSSESSMSDFSEDEAQDME

SEQ ID NO: 95223 - protein, 62 aa, Homo sapiens
  Payload ID: 18975
  Gene Name: ubiquitin-conjugating enzyme E2H
  ENSP ID: ENSP00000417709
RRMDTDVVKLIESKHEVTILGGLNEFVVKFYGPQGTPYEGGVWKVRVDLPDKYPFKSPSIEL

SEQ ID NO: 95224 - protein, 152 aa, Homo sapiens
  Payload ID: 18975
  Gene Name: ubiquitin-conjugating enzyme E2H
  Uniprot ID: P62256
  ENSP ID: ENSP00000419097
MSSPSPGKRRMDTDVVKLIESKHEVTILGGLNEFVVKFYGPQGTPYEGGVWKVRVDLPDKYPFKSPSIDLTNIFESFLPQLLAYPNPIDPLNGDAAAMYLHRPEEYKQKIKEYIQKYATEEALKEQEEGTGDSSSESSMSDFSEDEAQDMEL

SEQ ID NO: 95225 - protein, 123 aa, Homo sapiens
  Payload ID: 18975
  Gene Name: ubiquitin-conjugating enzyme E2H
  ENSP ID: ENSP00000419689
MSSPSPGKRRMDTDVVKLIESKHEVTILGGLNEFVVKFYGPQGTPYEGGVWKVRVDLPDKYPFKSPSIGFMNKIFHPNIDEASGTVCLDVINQTWTALYDPLNGDAAAMYLHRPEEYKQKIKG

SEQ ID NO: 95226 - protein, 103 aa, Homo sapiens
  Payload ID: 18975
  Gene Name: ubiquitin-conjugating enzyme E2H
  ENSP ID: ENSP00000419750
MQAKGRRHRSSALIGRPVTTRKRRRGGATKQLMDIESKHEVTILGGLNEFVVKFYGPQGTPYEGGVWKVRVDLPDKYPFKSPSIGFMNKIFHPNIDEASGTVC

SEQ ID NO: 95227 - protein, 158 aa, Homo sapiens [sequence omitted]

SEQ ID NO: 95228 - protein, 158 aa, Homo sapiens [sequence omitted]

SEQ ID NO: 95229 - protein, 158 aa, Homo sapiens [sequence omitted]

SEQ ID NO: 95230 - protein, 158 aa, Homo sapiens [sequence omitted]

SEQ ID NO: 95231 - protein, 184 aa, Homo sapiens
  Payload ID: 18976
  Gene Name: ubiquitin-conjugating enzyme E2I
  ENSP ID: ENSP00000384361
MSGIALSRLAQERKAWRKDHPFGFVAVPTKNPDGTMNLMNWECAIPGKKGTPWEGGLFKLRMLFKDDYPSSPPKCKFEPPLFHPNVYPSGTVCLSILEEDKDWRPAITIKQILLGIQELLNEPNIQDPAQAEAYTIYWLVAALAPLVAAPPRPSQGRLAGREWRTQAHPTDSQGPRLCGEGRGA

SEQ ID NO: 95232 - protein, 158 aa, Homo sapiens [sequence omitted]

SEQ ID NO: 95233 - protein, 158 aa, Homo sapiens [sequence omitted]

SEQ ID NO: 95234 - protein, 70 aa, Homo sapiens
  Payload ID: 18976
  Gene Name: ubiquitin-conjugating enzyme E2I
  ENSP ID: ENSP00000455252
  MOD_RES (1)..(1): Any amino acid
XLSRLAQERKAWRKDHPFGFVAVPTKNPDGTMNLMNWECAIPGKKGTPWEGGLFKLRMLFKDDYPSSPPK

SEQ ID NO: 95235 - protein, 137 aa, Homo sapiens
  Payload ID: 18976
  Gene Name: ubiquitin-conjugating enzyme E2I
  ENSP ID: ENSP00000455893
MSGIALSRLAQERKAWRKDHPFGFVAVPTKNPDGTMNLMNWECAIPGKKGTPWEGGLFKLRMLFKDDYPSSPPKCKFEPPLFHPNVYPSGTVCLSILEEDKDWRPAITIKQILLGIQELLNEPNIQDPAQAEAYTIY

SEQ ID NO: 95236 - protein, 29 aa, Homo sapiens
  Payload ID: 18976
  Gene Name: ubiquitin-conjugating enzyme E2I
  ENSP ID: ENSP00000456188
MSGIALSRLAQERKAWRKDHPFGFVAVPT

SEQ ID NO: 95237 - protein, 158 aa, Homo sapiens [sequence omitted]

SEQ ID NO: 95238 - protein, 200 aa, Homo sapiens
  Payload ID: 18977
  Gene Name: ubiquitin-conjugating enzyme E2K
  Uniprot ID: P61086
  ENSP ID: ENSP00000261427
MANIAVQRIKREFKEVLKSEETSKNQIKVDLVDENFTELRGEIAGPPDTPYEGGRYQLEIKIPETYPFNPPKVRFITKIWHPNISSVTGAICLDILKDQWAAAMTLRTVLLSLQALLAAAEPDDPQDAVVANQYKQNPEMFKQTARLWAHVYAGAPVSSPEYTKKIENLCAMGFDRNAVIVALSSKSWDVETATELLLSN

SEQ ID NO: 95239 - protein, 157 aa, Homo sapiens
  Payload ID: 18977
  Gene Name: ubiquitin-conjugating enzyme E2K
  Uniprot ID: P61086
  ENSP ID: ENSP00000390483
MANIAVQRIKREFKEVLKSEETSKNQIKVDLVDENFTELRGEIAGPPDTPYEGGRYQLEIKIPETYPFNPPKVRFITKIWHPNISSVTGAICLDILKDQWAAAMTLRTVLLSLQALLAAAEPDDPQDAVVANQNAVIVALSSKSWDVETATELLLSN

SEQ ID NO: 95240 - protein, 149 aa, Homo sapiens
  Payload ID: 18977
  Gene Name: ubiquitin-conjugating enzyme E2K
  Uniprot ID: P61086
  ENSP ID: ENSP00000421203
MANIAVQRIKREFKEVLKSEEVRFITKIWHPNISSVTGAICLDILKDQWAAAMTLRTVLLSLQALLAAAEPDDPQDAVVANQYKQNPEMFKQTARLWAHVYAGAPVSSPEYTKKIENLCAMGFDRNAVIVALSSKSWDVETATELLLSN

SEQ ID NO: 95241 - protein, 44 aa, Homo sapiens
  Payload ID: 18977
  Gene Name: ubiquitin-conjugating enzyme E2K
  ENSP ID: ENSP00000421422
MANIAVQRIKREFKEVLKSEEGSCNDSPHGIIVIASTIGSCRAR

SEQ ID NO: 95242 - protein, 123 aa, Homo sapiens
  Payload ID: 18977
  Gene Name: ubiquitin-conjugating enzyme E2K
  ENSP ID: ENSP00000425301
MANIAVQRIKREFKEVLKSEETSKNQIKVDLVDENFTELRGEIAGPPDTPYEGGRYQLEIKIPETYPFNPPKYKQNPEMFKQTARLWAHVYAGAPVSSPEYTKKIENLCAMGFDRNAVIVALS

SEQ ID NO: 95243 - protein, 154 aa, Homo sapiens [sequence omitted]

SEQ ID NO: 95244 - protein, 212 aa, Homo sapiens
  Payload ID: 18978
  Gene Name: ubiquitin-conjugating enzyme E2L 3
  Uniprot ID: P68036
  ENSP ID: ENSP00000400906
MQVAAGTRGDTRLQEVALLPQLFDLLVLGQRRARLLRQVPSALAGKDLAQLQAGATLAGYRRAHGPEELEEIRKCGMKNFRNIQVDEANLLTWQGLIVPDNPPYDKGAFRIEINFPAEYPFKPPKITFKTKIYHPNIDEKGQVCLPVISAENWKPATKTDQVIQSLIALVNDPQPEHPLRADLAEEYSKDRKKFCKNAEEFTKKYGEKRPVD

SEQ ID NO: 95245 - protein, 122 aa, Homo sapiens
  Payload ID: 18978
  Gene Name: ubiquitin-conjugating enzyme E2L 3
  Uniprot ID: P68036
  ENSP ID: ENSP00000445931
MAASRRLMKDNPPYDKGAFRIEINFPAEYPFKPPKITFKTKIYHPNIDEKGQVCLPVISAENWKPATKTDQVIQSLIALVNDPQPEHPLRADLAEEYSKDRKKFCKNAEEFTKKYGEKRPVD

SEQ ID NO: 95246 - protein, 153 aa, Homo sapiens
  Payload ID: 18979
  Gene Name: ubiquitin-conjugating enzyme E2L 6
  Uniprot ID: O14933
  ENSP ID: ENSP00000287156
MMASMRVVKELEDLQKKPPPYLRNLSSDDANVLVWHALLLPDQPPYHLKAFNLRISFPPEYPFKPPMIKFTTKIYHPNVDENGQICLPIISSENWKPCTKTCQVLEALNVLVNRPNIREPLRMDLADLLTQNPELFRKNAEEFTLRFGVDRPS

SEQ ID NO: 95247 - protein, 87 aa, Homo sapiens
  Payload ID: 18979
  Gene Name: ubiquitin-conjugating enzyme E2L 6
  Uniprot ID: O14933
  ENSP ID: ENSP00000341980
MIKFTTKIYHPNVDENGQICLPIISSENWKPCTKTCQVLEALNVLVNRPNIREPLRMDLADLLTQNPELFRKNAEEFTLRFGVDRPS

SEQ ID NO: 95248 - protein, 127 aa, Homo sapiens
  Payload ID: 18979
  Gene Name: ubiquitin-conjugating enzyme E2L 6
  ENSP ID: ENSP00000434348
MRRWTWKASWSRWLAFELEDLQKKPPPYLRNLSSDDANVLVWHALLLPDQPPYHLKAFNLRISFPPEYPFKPPMIKFTTKIYHPNVDENGQICLPIISSENWKPCTKTCQVLEALNVLVNRPNIREP

SEQ ID NO: 95249 - protein, 65 aa, Homo sapiens
  Payload ID: 18979
  Gene Name: ubiquitin-conjugating enzyme E2L 6
  ENSP ID: ENSP00000435265
MIKFTTKIYHPNVDENGQICLPIISSENWKPCTKTCQVLEALNVLVNRPNIREPLRMDLADLLTQ

SEQ ID NO: 95250 - protein, 183 aa, Homo sapiens
  Payload ID: 18980
  Gene Name: ubiquitin-conjugating enzyme E2M
  Uniprot ID: P61081
  ENSP ID: ENSP00000253023
MIKLFSLKQQKKEEESAGGTKGSSKKASAAQLRIQKDINELNLPKTCDISFSDPDDLLNFKLVICPDEGFYKSGKFVFSFKVGQGYPHDPPKVKCETMVYHPNIDLEGNVCLNILREDWKPVLTINSIIYGLQYLFLEPNPEDPLNKEAAEVLQNNRRLFEQNVQRSMRGGYIGSTYFERCLK

SEQ ID NO: 95251 - protein, 69 aa, Homo sapiens
  Payload ID: 18980
  Gene Name: ubiquitin-conjugating enzyme E2M
  ENSP ID: ENSP00000468940
MVYHPNIDLEGNVCLNILREDWKPVLTINSIIYGLQYLFLEPNPEDPLNKEAAEVLQNNRRLFEQNVQR

SEQ ID NO: 95252 - protein, 114 aa, Homo sapiens
  Payload ID: 18980
  Gene Name: ubiquitin-conjugating enzyme E2M
  ENSP ID: ENSP00000469855
FKLVICPDEGFYKSGKFVFSFKVGQGYPHDPPKVKCETMVYHPNIDLEGNVCLNILREDWKPVLTINSIIYGLQYLFLVSRNRWLGLGRLAFCPSGLLTPPTCTGHRSPTPRTH

SEQ ID NO: 95253 - protein, 152 aa, Homo sapiens
  Payload ID: 18981
  Gene Name: ubiquitin-conjugating enzyme E2N
  Uniprot ID: P61088
  ENSP ID: ENSP00000316176
MAGLPRRIIKETQRLLAEPVPGIKAEPDESNARYFHVVIAGPQDSPFEGGTFKLELFLPEEYPMAAPKVRFMTKIYHPNVDKLGRICLDILKDKWSPALQIRTVLLSIQALLSAPNPDDPLANDVAEQWKTNEAQAIETARAWTRLYAMNNI

SEQ ID NO: 95254 - protein, 87 aa, Homo sapiens
  Payload ID: 18981
  Gene Name: ubiquitin-conjugating enzyme E2N
  ENSP ID: ENSP00000447009
MAGLPRRIIKETQRLLAEPVPGIKAEPDESNARYFHVVIAGPQDSPFEGGTFKLELFLPEEYPMAAPKISGPQHCRSAQFCYRSRPC

SEQ ID NO: 95255 - protein, 105 aa, Homo sapiens
  Payload ID: 18981
  Gene Name: ubiquitin-conjugating enzyme E2N
  ENSP ID: ENSP00000448352
MAGLPRRIIKETQRLLAEPVPGIKAEPDESNARYFHVVIAGPQDSPFEGGTFKLELFLPEEYPMAAPKVRFMTKIYHPNVDKLGRICLDILKARAWTRLYAMNNI

SEQ ID NO: 95256 - protein, 152 aa, Homo sapiens
  Payload ID: 18981
  Gene Name: ubiquitin-conjugating enzyme E2N
  ENSP ID: ENSP00000449352
MAGLPRRIIKETQRLLAEPVPGIKAEPDESNARYFHVVIAGPQDSPFEGGTFKLELFLPEEYPMAAPKVRFMTKIYHPNVDKLGRICLDILKGKCYLYQHMLLLSFLLFLLSIPCLECKHYTKIREVCGREVKQFWACFFHALSYWACCLHR

SEQ ID NO: 95257 - protein, 89 aa, Homo sapiens
  Payload ID: 18981
  Gene Name: ubiquitin-conjugating enzyme E2N
  ENSP ID: ENSP00000450260
MAAPKVRFMTKIYHPNVDKLGRICLDILKDKWSPALQIRTVLLSIQALLSAPNPDDPLANDVAEQWKTNEAQAIETARAWTRLYAMNNI

SEQ ID NO: 95258 - protein, 152 aa, Homo sapiens
  Payload ID: 18982
  Gene Name: ubiquitin-conjugating enzyme E2N-like (gene/pseudogene)
  ENSP ID: ENSP00000488314
MAELPHRIIKETQRLLAEPVPGIKAEPDESNARYFHVVIAGESKDSPFEGGTFKRELLLAEEYPMAAPKVRFMTKIYHPNVDKLERISDILKDKWSPALQIRTVLLSIQALLNAPNPDDPLANDVVEQWKTNEAQAIETARAWTRLYAMNSI

SEQ ID NO: 95259 - protein, 1292 aa, Homo sapiens
  Payload ID: 18983
  Gene Name: ubiquitin-conjugating enzyme E2O
  Uniprot ID: Q9C0C9
  ENSP ID: ENSP00000323687
MADPAAPTPAAPAPAQAPAPAPEAVPAPAAAPVPAPAPASDSASGPSSDSGPEAGSQRLLFSHDLVSGRYRGSVHFGLVRLIHGEDSDSEGEEEGRGSSGCSEAGGAGHEEGRASPLRRGYVRVQWYPEGVKQHVKETKLKLEDRSVVPRDVVRHMRSTDSQCGTVIDVNIDCAVKLIGTNCIIYPVNSKDLQHIWPFMYGDYIAYDCWLGKVYDLKNQIILKLSNGARCSMNTEDGAKLYDVCPHVSDSGLFFDDSYGFYPGQVLIGPAKIFSSVQWLSGVKPVLSTKSKFRVVVEEVQVVELKVTWITKSFCPGGTDSVSPPPSVITQENLGRVKRLGCFDHAQRQLGERCLYVFPAKVEPAKIAWECPEKNCAQGEGSMAKKVKRLLKKQVVRIMSCSPDTQCSRDHSMEDPDKKGESKTKSEAESASPEETPDGSASPVEMQDEGAEEPHEAGEQLPPFLLKEGRDDRLHSAEQDADDEAADDTDDTSSVTSSASSTTSSQSGSGTSRKKSIPLSIKNLKRKHKRKKNKITRDFKPGDRVAVEVVTTMTSADVMWQDGSVECNIRSNDLFPVHHLDNNEFCPGDFVVDKRVQSCPDPAVYGVVQSGDHIGRTCMVKWFKLRPSGDDVELIGEEEDVSVYDIADHPDFRFRTTDIVIRIGNTEDGAPHKEDEPSVGQVARVDVSSKVEVVWADNSKTIILPQHLYNIESEIEESDYDSVEGSTSGASSDEWEDDSDSWETDNGLVEDEHPKIEEPPIPPLEQPVAPEDKGVVISEEAATAAVQGAVAMAAPMAGLMEKAGKDGPPKSFRELKEAIKILESLKNMTVEQLLTGSPTSPTVEPEKPTREKKFLDDIKKLQENLKKTLDNVAIVEEEKMEAVPDVERKEDKPEGQSPVKAEWPSETPVLCQQCGGKPGVTFTSAKGEVFSVLEFAPSNHSFKKIEFQPPEAKKFFSTVRKEMALLATSLPEGIMVKTFEDRMDLFSALIKGPTRTPYEDGLYLFDIQLPNIYPAVPPHFCYLSQCSGRLNPNLYDNGKVCVSLLGTWIGKGTERWTSKSSLLQVLISIQGLILVNEPYYNEAGFDSDRGLQEGYENSRCYNEMALIRVVQSMTQLVRRPPEVFEQEIRQHFSTGGWRLVNRIESWLETHALLEKAQALPNGVPKASSSPEPPAVAELSDSGQQEPEDGGPAPGEASQGSDSEGGAQGLASASRDHTDQTSETAPDASVPPSVKPKKRRKSYRSFLPEKSGYPDIGFPLFPLSKGFIKSIRGVLTQFRAALLEAGMPECTEDK

SEQ ID NO: 95260 - protein, 189 aa, Homo sapiens
  Payload ID: 18983
  Gene Name: ubiquitin-conjugating enzyme E2O
  ENSP ID: ENSP00000467623
  MOD_RES (1)..(1): Any amino acid
XKNQIILKLSNGARCSMNTEDGAKLYDVCPHVSDSGLFFDDSYGFYPGQVLIGPAKIFSSVQWLSGVKPVLSTKSKFRVVVEEVQVVELKVTWITKSFCPGGTDSVSPPPSVITQENLGRVKRLGCFDHAQRQLGERCLYVFPAKVKRLLKKQVVRIMSCSPDTQCSRDHSMEDPDKKGESKTKSEAES

SEQ ID NO: 95261 - protein, 807 aa, Homo sapiens
  Payload ID: 18983
  Gene Name: ubiquitin-conjugating enzyme E2O
  ENSP ID: ENSP00000468498
  MOD_RES (1)..(1): Any amino acid
XTDDTSSVTSSASSTTSSQSGSGTSRKKSIPLSIKNLKRKHKRKKNKITRDFKPGDRVAVEVVTTMTSADVMWQDGSVECNIRSNDLFPVHHLDNNEFCPGDFVVDKRVQSCPDPAVYGVVQSGDHIGRTCMVKWFKLRPSGDDVELIGEEEDVSVYDIADHPDFRFRTTDIVIRIGNTEDGAPHKEDEQPSVGQVARVDVSSKVEVVWADNSKTIILPQHLYNIESEIEESDYDSVEGSTSGASSDEWEDDSDSWETDNGLVEDEHPKIEEPPIPPLEQPVAPEDKGVVISEEAATAAVQGAVAMAAPMAGLMEKAGKDGPPKSFRELKEAIKILESLKNMTVEQLLTGSPTSPTVEPEKPTREKKFLDDIKKLQENLKKTLDNVAIVEEEKMEAVPDVERKEDKPEGQSPVKAEWPSETPVLCQQCGGKPGVTFTSAKGEVFSVLEFAPSNHSFKKIEFQPPEAKKFFSTVRKEMALLATSLPEGIMVKTFEDRMDLFSALIKGPTRTPYEDGLYLFDIQLPNIYPAVPPHFCYLSQCSGRLNPNLYDNGKVCVSLLGTWIGKGTERWTSKSSLLQVLISIQGLILVNEPYYNEAGFDSDRGLQEGYENSRCYNEMALIRVVQSMTQLVRRPPEVFEQEIRQHFSTGGWRLVNRIESWLETHALLEKAQALPNGVPKASSSPEPPAVAELSDSGQQEPEDGGPAPGEASQGSDSEGGAQGLASASRDHTDQTSETAPDASVPPSVKPKKRRKSYRSFLPEKSGYPDIGFPLFPLSKGFIKSIRGVLTQFRAALLEAGMPECTEDK

SEQ ID NO: 95262 - protein, 422 aa, Homo sapiens
  Payload ID: 18984
  Gene Name: ubiquitin-conjugating enzyme E2Q family member 1
  Uniprot ID: Q7Z7E8
  ENSP ID: ENSP00000292211
MQQPQPQGQQQPGPGQQLGGQGAAPGAGGGPGGGPGPGPCLRRELKLLESIFHRGHERFRIASACLDELSCEFLLAGAGGAGAGAAPGPHLPPRGSVPGDPVRIHCNITESYPAVPPIWSVESDDPNLAAVLERLVDIKKGNTLLLQHLKRIISDLCKLYNLPQHPDVEMLDQPLPAEQCTQEDVSSEDEDEEMPEDTEDLDHYEMKEEEPAEGKKSEDDGIGKENLAILEKIKKNQRQDYLNGAVSGSVQATDRLMKELRDIYRSQSFKGGNYAVELVNDSLYDWNVKLLKVDQDSALHNDLQILKEKEGADFILLNFSFKDNFPFDPPFVRVVSPVLSGGYVLGGGAICMELLTKQGWSSAYSIESVIMQISATLVKGKARVQFGANKSQYSLTRAQQSYKSLVQIHEKNGWYTPPKEDG

SEQ ID NO: 95263 - protein, 375 aa, Homo sapiens
  Payload ID: 18985
  Gene Name: ubiquitin-conjugating enzyme E2Q family member 2
  Uniprot ID: Q8WVN8
  ENSP ID: ENSP00000267938
MSVSGLKAELKFLASIFDKNHERFRIVSWKLDELHCQFLVPQQGSPHSLPPPLTLHCNITESYPSSSPIWFVDSEDPNLTSVLERLEDTKNNNLLRQQLKWLICELCSLYNLPKHLDVEMLDQPLPTGQNGTTEEVTSEEEEEEEEMAEDIEDLDHYEMKEEEPISGKKSEDEGIEKENLAILEKIRKTQRQDHLNGAVSGSVQASDRLMKELRDIYRSQSYKTGIYSVELINDSLYDWHVKLQKVDPDSPLHSDLQILKEKEGIEYILLNFSFKDNFPFDPPFVRVVLPVLSGGYVLGGGALCMELLTKQGWSSAYSIESVIMQINATLVKGKARVQFGANKNQYNLARAQQSYNSIVQIHEKNGWYTPPKEDG

SEQ ID NO: 95264 - protein, 200 aa, Homo sapiens
  Payload ID: 18985
  Gene Name: ubiquitin-conjugating enzyme E2Q family member 2
  ENSP ID: ENSP00000400960
  MOD_RES (1)..(1): Any amino acid
XLDVEMLDQPLPTGQNGTTEEVTSEEEEEEEEMAEDIEDLDHYEMKEEEPISGKKSEDEGIEKENLAILEKIRKTQRQDHLNGAVSGSVQASDRLMKELRDIYRSQSYKTGIYSVELINDSLYDWHVKLQKVDPDSPLHSDLQILKEKEGIEYILLNFSFKDNFPFDPPFVRVVLPVLSGGLVHPSKGRWLNVLTVVCLD

SEQ ID NO: 95265 - protein, 91 aa, Homo sapiens
  Payload ID: 18985
  Gene Name: ubiquitin-conjugating enzyme E2Q family member 2
  ENSP ID: ENSP00000454742
NGTTEEVTSEEEEEEEEMAEDIEDLDHYEMKEEEPISGKKSEDEGIEKENLAILEKIRKTQRQDHLNDNFPFDPPFVRVVLPVLSGGINII

SEQ ID NO: 95266 - protein, 359 aa, Homo sapiens
  Payload ID: 18985
  Gene Name: ubiquitin-conjugating enzyme E2Q family member 2
  Uniprot ID: Q8WVN8
  ENSP ID: ENSP00000456229
MRMDSLTEEKLECRLWCCLSDPSPPGLAARCCVLERSIVPSLRQESYPSSSPIWFVDSEDPNLTSVLERLEDTKNNNLLRQQLKWLICELCSLYNLPKHLDVEMLDQPLPTGQNGTTEEVTSEEEEEEEEMAEDIEDLDHYEMKEEEPISGKKSEDEGIEKENLAILEKIRKTQRQDHLNGAVSGSVQASDRLMKELRDIYRSQSYKTGIYSVELINDSLYDWHVKLQKVDPDSPLHSDLQILKEKEGIEYILLNFSFKDNFPFDPPFVRVVLPVLSGGYVLGGGALCMELLTKQGWSSAYSIESVIMQINATLVKGKARVQFGANKNQYNLARAQQSYNSIVQIHEKNGWYTPPKEDG

SEQ ID NO: 95267 - protein, 340 aa, Homo sapiens
  Payload ID: 18985
  Gene Name: ubiquitin-conjugating enzyme E2Q family member 2
  Uniprot ID: Q8WVN8
  ENSP ID: ENSP00000456324
MSVSGLKAELKFLASIFDKNHERFRIVSWKLDELHCQFLVPQQGSPHSLPPPLTLHCNITESYPSSSPIWFVDSEDPNLTSVLERLEDTKNNNLNGTTEEVTSEEEEEEEEMAEDIEDLDHYEMKEEEPISGKKSEDEGIEKENLAILEKIRKTQRQDHLNGAVSGSVQASDRLMKELRDIYRSQSYKTGIYSVELINDSLYDWHVKLQKVDPDSPLHSDLQILKEKEGIEYILLNFSFKDNFPFDPPFVRVVLPVLSGGYVLGGGALCMELLTKQGWSSAYSIESVIMQINATLVKGKARVQFGANKNQYNLARAQQSYNSIVQIHEKNGWYTPPKEDG

SEQ ID NO: 95268 - protein, 118 aa, Homo sapiens
  Payload ID: 18985
  Gene Name: ubiquitin-conjugating enzyme E2Q family member 2
  ENSP ID: ENSP00000458006
MSVSGLKAELKFLASIFDKNHERFRIVSWKLDELHCQFLVPQQGSPHSLPPPLTLHCNITESYPSSSPIWFVDSEDPNLTSVLERLEDTKNNNLDNFPFDPPFVRVVLPVLSGGINII

SEQ ID NO: 95269 - protein, 131 aa, Homo sapiens
  Payload ID: 18986
  Gene Name: ubiquitin-conjugating enzyme E2Q family member 2-like
  Uniprot ID: H0YL09
  ENSP ID: ENSP00000453012
MGPAVLGQGQEGQPEARACSGLLQPPKRPIVFKEKLTMKTDSLMEEKLECSLWCCLSDPSIPGRCCVLERRIVPWMQQESYSSSSPIWSVDSDEPNLTSVLERLEDTKENSSVRKETKLFSLFLMNIIFRN

SEQ ID NO: 95270 - protein, 161 aa, Homo sapiens
  Payload ID: 18987
  Gene Name: ubiquitin-conjugating enzyme E2Q family-like 1
  Uniprot ID: A1L167
  ENSP ID: ENSP00000382713
MKELQDIARLSDRFISVELVDESLFDWNVKLHQVDKDSVLWQDMKETNTEFILLNLTFPDNFPFSPPFMRVLSPRLENGYVLDGGAICMELLTPRGWSSAYTVEAVMRQFAASLVKGQGRICRKAGKSKKSFSRKEAEATFKSLVKTHEKYGWVTPPVSDG

SEQ ID NO: 95271 - protein, 238 aa, Homo sapiens
  Payload ID: 18988
  Gene Name: ubiquitin-conjugating enzyme E2R 2
  Uniprot ID: Q712K3
  ENSP ID: ENSP00000263228
MAQQQMTSSQKALMLELKSLQEEPVEGFRITLVDESDLYNWEVAIFGPPNTLYEGGYFKAHIKFPIDYPYSPPTFRFLTKMWHPNIYENGDVCISILHPPVDDPQSGELPSERWNPTQNVRTILLSVISLLNEPNTFSPANVDASVMFRKWRDSKGKDKEYAEIIRKQVSATKAEAEKDGVKVPTTLAEYCIKTKVPSNDNSSDLLYDDLYDDDIDDEDEEEEDADCYDDDDSGNEES

SEQ ID NO: 95272 - protein, 222 aa, Homo sapiens
  Payload ID: 18989
  Gene Name: ubiquitin-conjugating enzyme E2S
  Uniprot ID: Q16763
  ENSP ID: ENSP00000264552
MNSNVENLPPHIIRLVYKEVTTLTADPPDGIKVFPNEEDLTDLQVTIEGPEGTPYAGGLFRMKLLLGKDFPASPPKGYFLTKIFHPNVGANGEICVNVLKRDWTAELGIRHVLLTIKCLLIHPNPESALNEEAGRLLLENYEEYAARARLLTEIHGGAGGPSGRAEAGRALASGTEASSTDPGAPGGPGGAEGPMAKKHAGERDKKLAAKKKTDKKRALRRL

SEQ ID NO: 95273 - protein, 79 aa, Homo sapiens
  Payload ID: 18989
  Gene Name: ubiquitin-conjugating enzyme E2S
  ENSP ID: ENSP00000466388
MNSNVENLPPHIIRLVYKEVTTLTADPPDGIKVFPNEEDLTDLQVTIEGPGLLPDQDLPPERGRQWRDLRQRAQEGLDG

SEQ ID NO: 95274 - protein, 204 aa, Homo sapiens
  Payload ID: 18989
  Gene Name: ubiquitin-conjugating enzyme E2S
  ENSP ID: ENSP00000467409
MNSNVENLPPHIIRLVYKEVTTLTADPPDGIKVFPNEEDLTDLQVTIEGPEGTPYAGGLFRMKLLLGKDFPASPPKGYFLTKIFHPNVGANGEICVNVLKRDWTAELGIRHVLLLSWKDKQCQTQDTQVLLRSAQEHLTMQRVTIKCLLIHPNPESALNEEAGRLLLENYEEYAARARLLTEIHGGAGGPSGRAEAGRALASGT

SEQ ID NO: 95275 - protein, 197 aa, Homo sapiens
  Payload ID: 18990
  Gene Name: ubiquitin-conjugating enzyme E2T
  Uniprot ID: Q9NPD8
  ENSP ID: ENSP00000356243
MQRASRLKRELHMLATEPPPGITCWQDKDQMDDLRAQILGGANTPYEKGVFKLEVIIPERYPFEPPQIRFLTPIYHPNIDSAGRICLDVLKLPPKGAWRPSLNIATVLTSIQLLMSEPNPDDPLMADISSEFKYNKPAFLKNARQWTEKHARQKQKADEEEMLDNLPEAGDSRVHNSTQKRKASQLVGIEKKFHPDV

SEQ ID NO: 95276 - protein, 226 aa, Homo sapiens
  Payload ID: 18991
  Gene Name: ubiquitin-conjugating enzyme E2U (putative)
  Uniprot ID: Q5VVX9
  ENSP ID: ENSP00000360116
MHGRAYLLLHRDFCDLKENNYKGITAKPVSEDMMEWEVEIEGLQNSVWQGLVFQLTIHFTSEYNYAPPVVKFITIPFHPNVDPHTGQPCIDFLDNPEKWNTNYTLSSILLALQVMLSNPVLENPVNLEAARILVKDESLYRTILRLFNRPLQMKDDSQELPKDPRKCIRPIKTTSFSDYYQTWSRIATSKATEYYRTPLLKVPNFIGQYYKWKKMDLQHQKEWNLK

SEQ ID NO: 95277 - protein, 256 aa, Homo sapiens
  Payload ID: 18991
  Gene Name: ubiquitin-conjugating enzyme E2U (putative)
  ENSP ID: ENSP00000360117
MHGRAYLLLHRDFCDLKENNYKGITAKPVSEDMMEWEVEIEGLQNSVWQGLVFQLTIHFTSEYNYAPPVVKFITIPFHPNVDPHTGQPCIDFLDNPEKWNTNYTLSSILLALQVMLSNPVLENPVNLEAARILVKDESLYRTILRLFNRPLQMKDDSQELPKDPRKCIRPIKTTSFSDYYQTWSRIATSKATEYYRTPLLKVPNFIGQYYKWKKMDLQHQKEWNLKYSVIKCWLARKRMPHEVTHSMEEIKLCPTL

SEQ ID NO: 95278 - protein, 134 aa, Homo sapiens
  Payload ID: 18991
  Gene Name: ubiquitin-conjugating enzyme E2U (putative)
  ENSP ID: ENSP00000476556
  MOD_RES (1)..(1): Any amino acid
XMTARSYLKTHVNVSVLKVPNFIGQYYKWKKMDLQHQKEWNLKYSVIKCWLARKRMPHEVTHSMEEIKLCPTLNEIFLESPTAINSITDIYETEEEGWKSDTSLYENDTDEPREEEVEDLISWTNTLNTNTSED

SEQ ID NO: 95279 - protein, 204 aa, Homo sapiens
  Payload ID: 18991
  Gene Name: ubiquitin-conjugating enzyme E2U (putative)
  ENSP ID: ENSP00000477356
VMLSNPVLENPVNLEAARILVKDESLYRTILRLFNRPLQMKDDSQELPKDPRKCIRPIKTTSFSDYYQTWSRIATSKATEYYRTPLLKVPNFIGQYYKWKKMDLQHQKEWNLKYSVIKCWLARKRMPHEVTHSMEEIKLCPTLNEIFLESPTAINSITDIYETEEEGWKSDTSLYENDTDEPREEEVEDLISWTNTLNTNTSED

SEQ ID NO: 95280 - protein, 321 aa, Homo sapiens
  Payload ID: 18991
  Gene Name: ubiquitin-conjugating enzyme E2U (putative)
  Uniprot ID: Q5VVX9
  ENSP ID: ENSP00000481174
MHGRAYLLLHRDFCDLKENNYKGITAKPVSEDMMEWEVEIEGLQNSVWQGLVFQLTIHFTSEYNYAPPVVKFITIPFHPNVDPHTGQPCIDFLDNPEKWNTNYTLSSILLALQVMLSNPVLENPVNLEAARILVKDESLYRTILRLFNRPLQMKDDSQELPKDPRKCIRPIKTTSFSDYYQTWSRIATSKATEYYRTPLLKVPNFIGQYYKWKKMDLQHQKEWNLKYSVIKCWLARKRMPHEVTHSMEEIKLCPTLIPTTDEIFLESPTAINSITDIYETEEEGWKSDTSLYENDTDEPREEEVEDLISWTNTLNTNTSED

SEQ ID NO: 95281 - protein, 191 aa, Homo sapiens
  Payload ID: 18992
  Gene Name: ubiquitin-conjugating enzyme E2W (putative)
  ENSP ID: ENSP00000397453
MLSPRGVTRARQLLPLRLWPRRSWGDGSIMASMQTTGRRVEVWFPKRLQKELLALQNDPPPGMTLNEKSVQNSITQWIVDMEGAPGTLYEGEKFQLLFKFSSRYPFDSPQVMFTGENIPVHPHVYSNGHICLSILTEDWSPALSVQSVCLSIISMLSSCKEKRRPPDNSFYVRTCNKNPKKTKWWYHDDTC

SEQ ID NO: 95282 - protein, 60 aa, Homo sapiens
  Payload ID: 18992
  Gene Name: ubiquitin-conjugating enzyme E2W (putative)
  ENSP ID: ENSP00000414771
MASMQKRLQKELLALQNDPPPGMTLNEKSVQNSITQSCLLVKIFLFILMFIAMVISVYPF

SEQ ID NO: 95283 - protein, 180 aa, Homo sapiens
  Payload ID: 18992
  Gene Name: ubiquitin-conjugating enzyme E2W (putative)
  Uniprot ID: Q96B02
  ENSP ID: ENSP00000428813
MLSPRGVTRARQLLPLRLWPRRSWGDGSIMASMQKRLQKELLALQNDPPPGMTLNEKSVQNSITQWIVDMEGAPGTLYEGEKFQLLFKFSSRYPFDSPQVMFTGENIPVHPHVYSNGHICLSILTEDWSPALSVQSVCLSIISMLSSCKEKRRPPDNSFYVRTCNKNPKKTKWWYHDDTC

SEQ ID NO: 95284 - protein, 155 aa, Homo sapiens
  Payload ID: 18992
  Gene Name: ubiquitin-conjugating enzyme E2W (putative)
  ENSP ID: ENSP00000428835
  MOD_RES (1)..(1): Any amino acid
XKRLQKELLALQNDPPPGMTLNEKSVQNSITQWIVDMEGAPGTLYEGEKFQLLFKFSSRYPFDSPQVMFTGENIPVHPHVYSNGHICLSILTEDWSPALSVQSVCLSIISMLSSCKEKRRPPDNSFYVRTCNKNPKKTKWWYHELKSAFILSITD

SEQ ID NO: 95285 - protein, 60 aa, Homo sapiens; identical to SEQ ID NO: 95282
  Payload ID: 18992
  Gene Name: ubiquitin-conjugating enzyme E2W (putative)
  ENSP ID: ENSP00000429136

SEQ ID NO: 95286 - protein, 60 aa, Homo sapiens; identical to SEQ ID NO: 95282
  Payload ID: 18992
  Gene Name: ubiquitin-conjugating enzyme E2W (putative)
  ENSP ID: ENSP00000430254

SEQ ID NO: 95287 - protein, 151 aa, Homo sapiens
  Payload ID: 18992
  Gene Name: ubiquitin-conjugating enzyme E2W (putative)
  Uniprot ID: Q96B02
  ENSP ID: ENSP00000473561
MASMQKRLQKELLALQNDPPPGMTLNEKSVQNSITQWIVDMEGAPGTLYEGEKFQLLFKFSSRYPFDSPQVMFTGENIPVHPHVYSNGHICLSILTEDWSPALSVQSVCLSIISMLSSCKEKRRPPDNSFYVRTCNKNPKKTKWWYHDDTC

SEQ ID NO: 95288 - protein, 354 aa, Homo sapiens
  Payload ID: 18993
  Gene Name: ubiquitin-conjugating enzyme E2Z
  Uniprot ID: Q9H832
  ENSP ID: ENSP00000354201
MAESPTEEAATAGAGAAGPGASSVAGVVGVSGSGGGFGPPFLPDVWAAAAAAGGAGGPGSGLAPLPGLPPSAAAHGAALLSHWDPTLSSDWDGERTAPQCLLRIKRDIMSIYKEPPPGMFVVPDTVDMTKIHALITGPFDTPYEGGFFLFVFRCPPDYPIHPPRVKLMTTGNNTVRFNPNFYRNGKVCLSILGTWTGPAWSPAQSISSVLISIQSLMTENPYHNEPGFEQERHPGDSKNYNECIRHETIRVAVCDMMEGKCPCPEPLRGVMEKSFLEYYDFYEVACKDRLHLQGQTMQDPFGEKRGHFDYQSLLMRLGLIRQKVLERLHNENAEMDSDSSSSGTETDLHGSLRV

SEQ ID NO: 95289 - protein, 180 aa, Homo sapiens
  Payload ID: 18993
  Gene Name: ubiquitin-conjugating enzyme E2Z
  ENSP ID: ENSP00000424543
MAESPTEEAATAGAGAAGPGASSVAGVVGVSGSGGGFGPPFLPDVWAAAAAAGGAGGPGSGLAPLPGLPPSAAAHGAALLSHWDPTLSSDWDGERTAPQCLLRIKRTWTGPAWSPAQSISSVLISIQSLMTENPYHNEPGFEQERHPGDSKNYNECIRHETIRVAVCDMMEGKCPCPEPL

SEQ ID NO: 95290 - protein, 129 aa, Homo sapiens
  Payload ID: 18993
  Gene Name: ubiquitin-conjugating enzyme E2Z
  ENSP ID: ENSP00000425398
  MOD_RES (1)..(1): Any amino acid
XAAAHGAALLSHWDPTLSSDWDGERTAPQCLLRIKRDIMSIYKEPPPGMFVVPDTVDMTKIHALITGPFDTPYEGGFFLFVFRCPPDYPIHPPRVKLMTTGNNTYMDWTCLEPSPEHLLSAHLYPVPDD

SEQ ID NO: 95291 - protein, 70 aa, Homo sapiens
  Payload ID: 18993
  Gene Name: ubiquitin-conjugating enzyme E2Z
  ENSP ID: ENSP00000459473
RHETIRVAVCDMMEGKCPCPEPLRGVMEKSFLEYYDFYEVACKDRLHLQGQTMQVIQPLLLIAEALQLAM

SEQ ID NO: 95292 - protein, 47 aa, Homo sapiens
  Payload ID: 18993
  Gene Name: ubiquitin-conjugating enzyme E2Z
  ENSP ID: ENSP00000460759
MSIYKEPPPGMFVVPDTVDMTKYMDWTCLEPSPEHLLSAHLYPVPDD

SEQ ID NO: 95293 - protein, 100 aa, Homo sapiens
  Payload ID: 18993
  Gene Name: ubiquitin-conjugating enzyme E2Z
  ENSP ID: ENSP00000461147
MSIYKEPPPGMFVVPDTVDMTKIHALITGPFDTPYEGGFFLFVFRCPPDYPIHPPRVKLMTTGNNTVRFNPNFYRNGKVCLSILGTWTGPAWSPAQSISS

SEQ ID NO: 95294 - protein, 85 aa, Homo sapiens
  Payload ID: 18994
  Gene Name: ubiquitin-fold modifier 1
  Uniprot ID: P61960
  ENSP ID: ENSP00000239878
MSKVSFKITLTSDPRLPYKVLSVPESTPFTAVLKFAAEEFKVPAATSAIITNDGIGINPAQTAGNVFLKHGSELRIIPRDRVGSC

SEQ ID NO: 95295 - protein, 103 aa, Homo sapiens
  Payload ID: 18994
  Gene Name: ubiquitin-fold modifier 1
  Uniprot ID: P61960
  ENSP ID: ENSP00000368970
MIRAFPTTTPRSLHLFTSSTFLARALPGAFPTGACEERLSVPESTPFTAVLKFAAEEFKVPAATSAIITNDGIGINPAQTAGNVFLKHGSELRIIPRDRVGSC

SEQ ID NO: 95296 - protein, 81 aa, Homo sapiens
  Payload ID: 18994
  Gene Name: ubiquitin-fold modifier 1
  ENSP ID: ENSP00000402378
  MOD_RES (1)..(1): Any amino acid
XRSKVSFKITLTSDPRLPYKVLSVPESTPFTAVLKFAAEEFKVPAATSAIITNDGIGINPAQTAGEYLKTHRGVGGVIYVN

SEQ ID NO: 95297 - protein, 167 aa, Homo sapiens
  Payload ID: 18995
  Gene Name: ubiquitin-fold modifier conjugating enzyme 1
  Uniprot ID: Q9Y3C8
  ENSP ID: ENSP00000356982
MADEATRRVVSEIPVLKTNAGPRDRELWVQRLKEEYQSLIRYVENNKNADNDWFRLESNKEGTRWFGKCWYIHDLLKYEFDIEFDIPITYPTTAPEIAVPELDGKTAKMYRGGKICLTDHFKPLWARNVPKFGLAHLMALGLGPWLAVEIPDLIQKGVIQHKEKCNQ

SEQ ID NO: 95298 - protein, 117 aa, Homo sapiens
  Payload ID: 18996
  Gene Name: ubiquitin-like 3
  Uniprot ID: O95164
  ENSP ID: ENSP00000370055
MSSNVPADMINLRLILVSGKTKEFLFSPNDSASDIAKHVYDNWPMDWEEEQVSSPNILRLIYQGRFLHGNVTLGALKLPFGKTTVMHLVARETLPEPNSQGQRNREKTGESNCCVIL

SEQ ID NO: 95299 - protein, 180 aa, Homo sapiens
  Payload ID: 18997
  Gene Name: ubiquitin-like 4A
  ENSP ID: ENSP00000358667
MQLTVKALQGRECSLQVPEDELVSTLKQLVSEKLNVPVRQQRLLFKGKALADGKRLSDYSIGPNSKLNLVVKPLEKVLLEEGEAQRLADSPPPQVWQLISKVLARHFSAADASRVLEQLQRDYERSLSRLTLDDIERWAHHHHSWHVPGSGQVLGTPHSLTWVCFHTLRRGEPAQQRHRR

SEQ ID NO: 95300 - protein, 157 aa, Homo sapiens
  Payload ID: 18997
  Gene Name: ubiquitin-like 4A
  Uniprot ID: P11441
  ENSP ID: ENSP00000358674
MQLTVKALQGRECSLQVPEDELVSTLKQLVSEKLNVPVRQQRLLFKGKALADGKRLSDYSIGPNSKLNLVVKPLEKVLLEEGEAQRLADSPPPQVWQLISKVLARHFSAADASRVLEQLQRDYERSLSRLTLDDIERLASRFLHPEVTETMEKGFSK

SEQ ID NO: 95301 - protein, 33 aa, Homo sapiens
  Payload ID: 18997
  Gene Name: ubiquitin-like 4A
  ENSP ID: ENSP00000396237
MQLTVKALQGRECSLQMGNDSRIIASGPTPSST

SEQ ID NO: 95302 - protein, 103 aa, Homo sapiens
  Payload ID: 18997
  Gene Name: ubiquitin-like 4A
  ENSP ID: ENSP00000397223
MQLTVKALQGRECSLQVPEDELVSTLKQLVSEKLNVPVRQQRLLFKGKALAAGCRSAPLPPPEAASRPGPPPRRWRRRNPSICLWQMGNDSRIIASGPTPSST

SEQ ID NO: 95303 - protein, 33 aa, Homo sapiens; identical to SEQ ID NO: 95301
  Payload ID: 18997
  Gene Name: ubiquitin-like 4A
  ENSP ID: ENSP00000486867

SEQ ID NO: 95304 - protein, 174 aa, Homo sapiens
  Payload ID: 18998
  Gene Name: ubiquitin-like 4B
  Uniprot ID: Q8N7F7
  ENSP ID: ENSP00000334044
MFLTVKLLLGQRCSLKVSGQESVATLKRLVSRRLKVPEEQQHLLFRGQLLEDDKHLSDYCIGPNASINVIMQPLEKMALKEAHQPQTQPLWHQLGLVLAKHFEPQDAKAVLQLLRQEHEERLQKISLEHLEQLAQYLLAEEPHVEPAGERELEAKARPQSSCDMEEKEEAAADQ

SEQ ID NO: 95305 - protein, 73 aa, Homo sapiens
  Payload ID: 18999
  Gene Name: ubiquitin-like 5
  Uniprot ID: Q9BZL1
  ENSP ID: ENSP00000351492
MIEVVCNDRLGKKVRVKCNTDDTIGDLKKLIAAQTGTRWNKIVLKKWYTIFKDHVSLGDYEIHDGMNLELYYQ

SEQ ID NO: 95306 - protein, 73 aa, Homo sapiens; identical to SEQ ID NO: 95305
  Payload ID: 18999
  Gene Name: ubiquitin-like 5
  Uniprot ID: Q9BZL1
  ENSP ID: ENSP00000466910

SEQ ID NO: 95307 - protein, 36 aa, Homo sapiens
  Payload ID: 18999
  Gene Name: ubiquitin-like 5
  ENSP ID: ENSP00000467663
MIEVVCNDRLGKKVRVKCTRFLRTTCLWGTMKSTMG

SEQ ID NO: 95308 - protein, 73 aa, Homo sapiens; identical to SEQ ID NO: 95305
  Payload ID: 18999
  Gene Name: ubiquitin-like 5
  Uniprot ID: Q9BZL1
  ENSP ID: ENSP00000468656

SEQ ID NO: 95309 - protein, 380 aa, Homo sapiens
  Payload ID: 19000
  Gene Name: ubiquitin-like 7
  Uniprot ID: Q96S82
  ENSP ID: ENSP00000354883
MSLSDWHLAVKLADQPLTPKSILRLPETELGEYSLGGYSISFLKQLIAGKLQESVPDPELIDLIYCGRKLKDDQTLDFYGIQPGSTVHVLRKSWPEPDQKPEPVDKVAAMREFRVLHTALHSSSSYREAVFKMLSNKESLDQIIVATPGLSSDPIALGVLQDKDLFSVFADPNMLDTLVPAHPALVNAIVLVLHSVAGSAPMPGTDSSSRSMPSSSYRDMPGGFLFEGLSDDEDDFHPNTRSTPSSSTPSSRPASLGYSGAAGPRPITQSELATALALASTPESSSHTPTPGTQGHSSGTSPMSSGVQSGTPITNDLFSQALQHALQASGQPSLQSQWQPQLQQLRDMGIQDDELSLRALQATGGDIQAALELIFAGGAP

SEQ ID NO: 95310 - protein, 380 aa, Homo sapiens; identical to SEQ ID NO: 95309
  Payload ID: 19000
  Gene Name: ubiquitin-like 7
  Uniprot ID: Q96S82
  ENSP ID: ENSP00000378518

SEQ ID NO: 95311 - protein, 380 aa, Homo sapiens; identical to SEQ ID NO: 95309
  Payload ID: 19000
  Gene Name: ubiquitin-like 7
  Uniprot ID: Q96S82
  ENSP ID: ENSP00000454828

SEQ ID NO: 95312 - protein, 114 aa, Homo sapiens
  Payload ID: 19000
  Gene Name: ubiquitin-like 7
  ENSP ID: ENSP00000456662
PASLGYSGAAGPRPITQSELATALALASTPESSSHTPTPGTQSGTPITNDLFSQALQHALQASGQPSLQSQWQPQLQQLRDMGIQDDELSLRALQATGGDIQAALELIFAGGAP

SEQ ID NO: 95313 - protein, 182 aa, Homo sapiens
  Payload ID: 19000
  Gene Name: ubiquitin-like 7
  ENSP ID: ENSP00000456807
  MOD_RES (1)..(1): Any amino acid
XPVDKVAAMREFRVLHTALHSSSSYREAVFKMLSNKESLDQIIVATPGLSSDPIALGVLQDKDLFSVFADPNMLDTLVPAHPALVNAIVLVLHSVAGSAPMPGTDSSSRSMPSSSYRDMPGGFLFEGLSDDEDDFHPSQWQPQLQQLRDMGIQDDELSLRALQATGGDIQAALELIFAGGAP

SEQ ID NO: 95314 - protein, 380 aa, Homo sapiens; identical to SEQ ID NO: 95309
  Payload ID: 19000
  Gene Name: ubiquitin-like 7
  Uniprot ID: Q96S82
  ENSP ID: ENSP00000457703

SEQ ID NO: 95315 - protein, 380 aa, Homo sapiens; identical to SEQ ID NO: 95309
  Payload ID: 19000
  Gene Name: ubiquitin-like 7
  Uniprot ID: Q96S82
  ENSP ID: ENSP00000457708

SEQ ID NO: 95316 - protein, 224 aa, Homo sapiens
  Payload ID: 19000
  Gene Name: ubiquitin-like 7
  ENSP ID: ENSP00000457828
MSLSDWHLAVKLADQPLTPKSILRLPETELGEYSLGGYSISFLKQLIAGKLQESVPDPELIDLIYCGRKLKDDQTLDFYGIQPGSTVHVLRKSWPEPDQKPGVLQDKDLFSVFADPNMLDTLVPAHPALVNAIVLVLHSVAGSAPMPGTDSSSRSMPSSSYRDMPGGFLFEGLSDDEDDFHPNTRSTPSSSTPSSRPASLGYSGAAGPRPITQSELATALALAS

SEQ ID NO: 95317 - protein, 162 aa, Homo sapiens [sequence omitted]

SEQ ID NO: 95318 - protein, 318 aa, Homo sapiens
  Payload ID: 19001
  Gene Name: ubiquitin-like domain containing CTD phosphatase 1
  Uniprot ID: Q8WVY7
  ENSP ID: ENSP00000296786
MALPIIVKWGGQEYSVTTLSEDDTVLDLKQFLKTLTGVLPERQKLLGLKVKGKPAENDVKLGALKLKPNTKIMMMGTREESLEDVLGPPPDNDDVVNDFDIEDEVVEVENREENLLKISRRVKEYKVEILNPPREGKKLLVLDVDYTLFDHRSCAETGVELMRPYLHEFLTSAYEDYDIVIWSATNMKWIEAKMKELGVSTNANYKITFMLDSAAMITVHTPRRGLIDVKPLGVIWGKFSEFYSKKNTIMFDDIGRNFLMNPQNGLKIRPFMKAHLNRDKDKELLKLTQYLKEIAKLDDFLDLNHKYWERYLSKKQGQ

SEQ ID NO: 95319 - protein, 1058 aa, Homo sapiens
  Payload ID: 19002
  Gene Name: ubiquitin-like modifier activating enzyme 1
  Uniprot ID: P22314
  ENSP ID: ENSP00000338413
MSSSPLSKKRRVSGPDPKPGSNCSPAQSVLSEVPSVPTNGMAKNGSEADIDEGLYSRQLYVLGHEAMKRLQTSSVLVSGLRGLGVEIAKNIILGGVKAVTLHDQGTAQWADLSSQFYLREEDIGKNRAEVSQPRLAELNSYVPVTAYTGPLVEDFLSGFQVVVLTNTPLEDQLRVGEFCHNRGIKLVVADTRGLFGQLFCDFGEEMILTDSNGEQPLSAMVSMVTKDNPGVVTCLDEARHGFESGDFVSFSEVQGMVELNGNQPMEIKVLGPYTFSICDTSNFSDYIRGGIVSQVKVPKKISFKSLVASLAEPDFVVTDFAKFSRPAQLHIGFQALHQFCAQHGRPPRPRNEEDAAELVALAQAVNARALPAVQQNNLDEDLIRKLAYVAAGDLAPINAFIGGLAAQEVMKACSGKFMPIMQWLYFDALECLPEDKEVLTEDKCLQRQNRYDGQVAVFGSDLQEKLGKQKYFLVGAGAIGCELLKNFAMIGLGCGEGGEIIVTDMDTIEKSNLNRQFLFRPWDVTKLKSDTAAAAVRQMNPHIRVTSHQNRVGPDTERIYDDDFFQNLDGVANALDNVDARMYMDRRCVYYRKPLLESGTLGTKGNVQVVIPFLTESYSSSQDPPEKSIPICTLKNFPNAIEHTLQWARDEFEGLFKQPAENVNQYLTDPKFVERTLRLAGTQPLEVLEAVQRSLVLQRPQTWADCVTWACHHWHTQYSNNIRQLLHNFPPDQLTSSGAPFWSGPKRCPHPLTFDVNNPLHLDYVMAAANLFAQTYGLTGSQDRAAVATFLQSVQVPEFTPKSGVKIHVSDQELQSANASVDDSRLEELKATLPSPDKLPGFKMYPIDFEKDDDSNFHMDFIVAASNLRAENYDIPSADRHKSKLIAGKIIPAIATTTAAVVGLVCLELYKVVQGHRQLDSYKNGFLNLALPFFGFSEPLAAPRHQYYNQEWTLWDRFEVQGLQPNGEEMTLKQFLDYFKTEHKLEITMLSQGVSMLYSFFMPAAKLKERLDQPMTEIVSRVSKRKLGRHVRALVLELCCNDESGEDVEVPYVRYTIR

SEQ ID NO: 95320 - protein, 506 aa, Homo sapiens
  Payload ID: 19002
  Gene Name: ubiquitin-like modifier activating enzyme 1
  ENSP ID: ENSP00000366481
MGFHHVGQAGLEPLTSGDPSALASQSAGITGVSYCAWPGFSIEVGEWGRLEGFPTSRVAVRLVLALFTDGPSNNACGNPFCQLWPHVICLLCLQWARDEFEGLFKQPAENVNQYLTDPKFVERTLRLAGTQPLEVLEAVQRSLVLQRPQTWADCVTWACHHWHTQYSNNIRQLLHNFPPDQLTSSGAPFWSGPKRCPHPLTFDVNNPLHLDYVMAAANLFAQTYGLTGSQDRAAVATFLQSVQVPEFTPKSGVKIHVSDQELQSANASVDDSRLEELKATLPSPDKLPGFKMYPIDFEKDDDSNFHMDFIVAASNLRAENYDIPSADRHKSKLIAGKIIPAIATTTAAVVGLVCLELYKVVQGHRQLDSYKNGFLNLALPFFGFSEPLAAPRHQYYNQEWTLWDRFEVQGLQPNGEEMTLKQFLDYFKTEHKLEITMLSQGVSMLYSFFMPAAKLKERLDQPMTEIVSRVSKRKLGRHVRALVLELCCNDESGEDVEVPYVRYTIR

SEQ ID NO: 95321 - protein, 1058 aa, Homo sapiens; identical to SEQ ID NO: 95319
  Payload ID: 19002
  Gene Name: ubiquitin-like modifier activating enzyme 1
  Uniprot ID: P22314
  ENSP ID: ENSP00000366568

SEQ ID NO: 95322 - protein, 284 aa, Homo sapiens
  Payload ID: 19002
  Gene Name: ubiquitin-like modifier activating enzyme 1
  ENSP ID: ENSP00000389583
MLCVIYHLDNPVGKMSSSPLSKKRRVSGPDPKPGSNCSPAQSVLSEVPSVPTNGMAKNGSEADIDEGLYSRQLYVLGHEAMKRLQTSSVLVSGLRGLGVEIAKNIILGGVKAVTLHDQGTAQWADLSSQFYLREEDIGKNRAEVSQPRLAELNSYVPVTAYTGPLVEDFLSGFQVVVLTNTPLEDQLRVGEFCHNRGIKLVVADTRGLFGQLFCDFGEEMILTDSNGEQPLSAMVSMVTKDNPGVVTCLDEARHGFESGDFVSFSEVQGMVELNGNQPMEIKVL

SEQ ID NO: 95323 - protein, 173 aa, Homo sapiens
  Payload ID: 19002
  Gene Name: ubiquitin-like modifier activating enzyme 1
  ENSP ID: ENSP00000397816
MLCVIYHLDNPVGKMSSSPLSKKRRVSGPDPKPGSNCSPAQSVLSEVPSVPTNGMAKNGSEADIDEGLYSRQLYVLGHEAMKRLQTSSVLVSGLRGLGVEIAKNIILGGVKAVTLHDQGTAQWADLSSQFYLREEDIGKNRAEVSQPRLAELNSYVPVTAYTGPLVEDFLSGF

SEQ ID NO: 95324 - protein, 234 aa, Homo sapiens
  Payload ID: 19002
  Gene Name: ubiquitin-like modifier activating enzyme 1
  ENSP ID: ENSP00000401101
MSKPHFPPALPAPAAIPGIKGEENGCLLLPTYSVPGSMLCVIYHLDNPVGKMSSSPLSKKRRVSGPDPKPGSNCSPAQSVLSEVPSVPTNGMAKNGSEADIDEGLYSRQLYVLGHEAMKRLQTSSVLVSGLRGLGVEIAKNIILGGVKAVTLHDQGTAQWADLSSQFYLREEDIGKNRAEVSQPRLAELNSYVPVTAYTGPLVEDFLSGFQVVVLTNTPLEDQLRVGEFCHNRG

SEQ ID NO: 95325 - protein, 195 aa, Homo sapiens
  Payload ID: 19002
  Gene Name: ubiquitin-like modifier activating enzyme 1
  ENSP ID: ENSP00000404796
MSKPHFPPALPAPAAIPGIKGEENGCLLLPTYSVPGSMLCVIYHLDNPVGKMSSSPLSKKRRVSGPDPKPGSNCSPAQSVLSEVPSVPTNGMAKNGSEADIDEGLYSRQLYVLGHEAMKRLQTSSVLVSGLRGLGVEIAKNIILGGVKAVTLHDQGTAQWADLSSQFYLREEDIGKNRAEVSQPRLAELNSYVPV

SEQ ID NO: 95326 - protein, 270 aa, Homo sapiens
  Payload ID: 19002
  Gene Name: ubiquitin-like modifier activating enzyme 1
  ENSP ID: ENSP00000415033
MSSSPLSKKRRVSGPDPKPGSNCSPAQSVLSEVPSVPTNGMAKNGSEADIDEGLYSRQLYVLGHEAMKRLQTSSVLVSGLRGLGVEIAKNIILGGVKAVTLHDQGTAQWADLSSQFYLREEDIGKNRAEVSQPRLAELNSYVPVTAYTGPLVEDFLSGFQVVVLTNTPLEDQLRVGEFCHNRGIKLVVADTRGLFGQLFCDFGEEMILTDSNGEQPLSAMVSMVTKDNPGVVTCLDEARHGFESGDFVSFSEVQGMVELNGNQPMEIKVL

SEQ ID NO: 95327 - protein, 640 aa, Homo sapiens
  Payload ID: 19003
  Gene Name: ubiquitin-like modifier activating enzyme 2
  Uniprot ID: Q9UBT2
  ENSP ID: ENSP00000246548
MALSRGLPRELAEAVAGGRVLVVGAGGIGCELLKNLVLTGFSHIDLIDLDTIDVSNLNRQFLFQKKHVGRSKAQVAKESVLQFYPKANIVAYHDSIMNPDYNVEFFRQFILVMNALDNRAARNHVNRMCLAADVPLIESGTAGYLGQVTTIKKGVTECYECHPKPTQRTFPGCTIRNTPSEPIHCIVWAKYLFNQLFGEEDADQEVSPDRADPEAAWEPTEAEARARASNEDGDIKRISTKEWAKSTGYDPVKLFTKLFKDDIRYLLTMDKLWRKRKPPVPLDWAEVQSQGEETNASDQQNEPQLGLKDQQVLDVKSYARLFSKSIETLRVHLAEKGDGAELIWDKDDPSAMDFVTSAANLRMHIFSMNMKSRFDIKSMAGNIIPAIATTNAVIAGLIVLEGLKILSGKIDQCRTIFLNKQPNPRKKLLVPCALDPPNPNCYVCASKPEVTVRLNVHKVTVLTLQDKIVKEKFAMVAPDVQIEDGKGTILISSEEGETEANNHKKLSEFGIRNGSRLQADDFLQDYTLLINILHSEDLGKDVEFEVVGDAPEKVGPKQAEDAAKSITNGSDDGAQPSTSTAQEQDDVLIVDSDEEDSSNNADVSEEERSRKRKLDEKENLSAKRSRIEQKEELDDVIALD

SEQ ID NO: 95328 - protein, 544 aa, Homo sapiens
  Payload ID: 19003
  Gene Name: ubiquitin-like modifier activating enzyme 2
  Uniprot ID: Q9UBT2
  ENSP ID: ENSP00000437484
MNPDYNVEFFRQFILVMNALDNRAARNHVNRMCLAADVPLIESGTAGYLGQVTTIKKGVTECYECHPKPTQRTFPGCTIRNTPSEPIHCIVWAKYLFNQLFGEEDADQEVSPDRADPEAAWEPTEAEARARASNEDGDIKRISTKEWAKSTGYDPVKLFTKLFKDDIRYLLTMDKLWRKRKPPVPLDWAEVQSQGEETNASDQQNEPQLGLKDQQVLDVKSYARLFSKSIETLRVHLAEKGDGAELIWDKDDPSAMDFVTSAANLRMHIFSMNMKSRFDIKSMAGNIIPAIATTNAVIAGLIVLEGLKILSGKIDQCRTIFLNKQPNPRKKLLVPCALDPPNPNCYVCASKPEVTVRLNVHKVTVLTLQDKIVKEKFAMVAPDVQIEDGKGTILISSEEGETEANNHKKLSEFGIRNGSRLQADDFLQDYTLLINILHSEDLGKDVEFEVVGDAPEKVGPKQAEDAAKSITNGSDDGAQPSTSTAQEQDDVLIVDSDEEDSSNNADVSEEERSRKRKLDEKENLSAKRSRIEQKEELDDVIALD

SEQ ID NO: 95329 - protein, 262 aa, Homo sapiens
  Payload ID: 19003
  Gene Name: ubiquitin-like modifier activating enzyme 2
  ENSP ID: ENSP00000467433
MALSRGLPRELAEAVAGGRVLVVGAGGIGCELLKNLVLTGFSHIDLVAKESVLQFYPKANIVAYHDSIMNPDYNVEFFRQFILVMNALDNRAARNHVNRMCLAADVPLIESGTAGYLGQVTTIKKGVTECYECHPKPTQRTFPGCTIRNTPSEPIHCIVWAKYLFNQLFGEEDADQEVSPDRADPEAAWEPTEAEARARASNEDGDIKRISTKEWAKSTGYDPVKLFTKLFKDDIRYLLTMDKLWRKRKPPVPLDWAEVQSQ

SEQ ID NO: 95330 - protein, 74 aa, Homo sapiens
  Payload ID: 19003
  Gene Name: ubiquitin-like modifier activating enzyme 2
  ENSP ID: ENSP00000468538
MALSRGLPRELAEAVAGGRVLVVGAGGIGCELLKNLVLTGFSHIDLLPETMLIECAWQLMFLLLKVEQLGILDK

SEQ ID NO: 95331 - protein, 215 aa, Homo sapiens
  Payload ID: 19003
  Gene Name: ubiquitin-like modifier activating enzyme 2
  ENSP ID: ENSP00000468756
  MOD_RES (1)..(1): Any amino acid
XYLLTMDKLWRKRKPPVPLDWAEVQSQGEETNASDQQNEPQLGLKDQQVLDVKSYARLFSKSIETLRVHLAEKGDGAELIWDKDDPSAMDFVTSAANLRMHIFSMNMKSRFDIKSMAGNIIPAIATTNAVIAGLIVLEGLKILSGKIDQCRTIVKEKFAMVAPDVQIEDGKGTILISSEEGETEANNHKKLSEFGIRNGSRLQADDFLQDYTLLI

SEQ ID NO: 95332 - protein, 54 aa, Homo sapiens
  Payload ID: 19003
  Gene Name: ubiquitin-like modifier activating enzyme 2
  ENSP ID: ENSP00000475565
MALSRGLPRELAEAVAGGRVLVVGAGGIGCELLKNLVLTGFSHIDLPPGSHYFA

SEQ ID NO: 95333 - protein, 166 aa, Homo sapiens
  Payload ID: 19003
  Gene Name: ubiquitin-like modifier activating enzyme 2
  ENSP ID: ENSP00000475656
MVAPDVQIEDGKGTILISSEEGETEANNHKKLSEFGIRNGSRLQADDFLQDYTLLINILHSEDLGKDVEFEVVGDAPEKVGPKQAEDAAKSITNGSDDGAQPSTSTAQEQDDVLIVDSDEEDSSNNADVSEEERSRKRKLDEKENLSAKRSRIEQKEELDDVIALD

SEQ ID NO: 95334 - protein, 449 aa, Homo sapiens
  Payload ID: 19004
  Gene Name: ubiquitin-like modifier activating enzyme 3
  Uniprot ID: Q8TBC4
  ENSP ID: ENSP00000340041
MADGEEPMAVDGGCGDTGDWEGRWNHVKKFLERSGPFTHPDFEPSTESLQFLLDTCKVLVIGAGGLGCELLKNLALSGFRQIHVIDMDTIDVSNLNRQFLFRPKDIGRPKAEVAAEFLNDRVPNCNVVPHFNKIQDFNDTFYRQFHIIVCGLDSIIARRWINGMLISLLNYEDGVLDPSSIVPLIDGGTEGFKGNARVILPGMTACIECTLELYPPQVNFPMCTIASMPRLPEHCIEYVRMLQWPKEQPFGEGVPLDGDDPEHIQWIFQKSLERASQYNIRGVTYRLTQGVVKRIIPAVASTNAVIAAVCATEVFKIATSAYIPLNNYLVFNDVDGLYTYTFEAERKENCPACSQLPQNIQFSPSAKLQEVLDYLTNSASLQMKSPAITATLEGKNRTLYLQSVTSIEERTRPNLSKTLKELGLVDGQELAVADVTTPQTVLFKLHFTS

SEQ ID NO: 95335 - protein, 463 aa, Homo sapiens
  Payload ID: 19004
  Gene Name: ubiquitin-like modifier activating enzyme 3
  Uniprot ID: Q8TBC4
  ENSP ID: ENSP00000354340
MADGEEPEKKRRRIEELLAEKMAVDGGCGDTGDWEGRWNHVKKFLERSGPFTHPDFEPSTESLQFLLDTCKVLVIGAGGLGCELLKNLALSGFRQIHVIDMDTIDVSNLNRQFLFRPKDIGRPKAEVAAEFLNDRVPNCNVVPHFNKIQDFNDTFYRQFHIIVCGLDSIIARRWINGMLISLLNYEDGVLDPSSIVPLIDGGTEGFKGNARVILPGMTACIECTLELYPPQVNFPMCTIASMPRLPEHCIEYVRMLQWPKEQPFGEGVPLDGDDPEHIQWIFQKSLERASQYNIRGVTYRLTQGVVKRIIPAVASTNAVIAAVCATEVFKIATSAYIPLNNYLVFNDVDGLYTYTFEAERKENCPACSQLPQNIQFSPSAKLQEVLDYLTNSASLQMKSPAITATLEGKNRTLYLQSVTSIEERTRPNLSKTLKELGLVDGQELAVADVTTPQTVLFKLHFTS

SEQ ID NO: 95336 - protein, 422 aa, Homo sapiens
  Payload ID: 19004
  Gene Name: ubiquitin-like modifier activating enzyme 3
  ENSP ID: ENSP00000400294
MADGEEPMAVDGGCGDTGDWEGRWNHVKKFLERSGPFTHPDFEPSTEALSGFRQIHVIDMDTIDVSNLNRQFLFRPKDIGRPKAEVAAEFLNDRVPNCNVVPHFNKIQDFNDTFYRQFHIIVCGLDSIIARRWINGMLISLLNYEDGVLDPSSIVPLIDGGTEGFKGNARVILPGMTACIECTLELYPPQVNFPMCTIASMPRLPEHCIEYVRMLQWPKEQPFGEGVPLDGDDPEHIQWIFQKSLERASQYNIRGVTYRLTQGVVKRIIPAVASTNAVIAAVCATEVFKIATSAYIPLNNYLVFNDVDGLYTYTFEAERKENCPACSQLPQNIQFSPSAKLQEVLDYLTNSASLQMKSPAITATLEGKNRTLYLQSVTSIEERTRPNLSKTLKELGLVDGQELAVADVTTPQTVLFKLHFTS

SEQ ID NO: 95337 - protein, 64 aa, Homo sapiens
  Payload ID: 19004
  Gene Name: ubiquitin-like modifier activating enzyme 3
  ENSP ID: ENSP00000417547
MADGEEPMAVDGGCGDTGDWEGRWNHVKKFLERSGPFTHPDFEPSTENFILLYVDWTLSSPEDG

SEQ ID NO: 95338 - protein, 129 aa, Homo sapiens
  Payload ID: 19004
  Gene Name: ubiquitin-like modifier activating enzyme 3
  ENSP ID: ENSP00000419077
MADGEEPMAVDGGCGDTGDWEGRWNHVKKFLERSGPFTHPDFEPSTESLQFLLDTCKVLVIGAGGLGCELLKNLALSGFRQIHVIDMDTIDVSNLNRQFLFRISYYCMWTGLYHRQKMDKWHADISSKL

SEQ ID NO: 95339 - protein, 41 aa, Homo sapiens
  Payload ID: 19004
  Gene Name: ubiquitin-like modifier activating enzyme 3
  ENSP ID: ENSP00000486366
LIVSILRLECNGVILAHGNLCLPGSSDSPASASQVAGMTGA

SEQ ID NO: 95340 - protein, 129 aa, Homo sapiens; identical to SEQ ID NO: 95338
  Payload ID: 19004
  Gene Name: ubiquitin-like modifier activating enzyme 3
  ENSP ID: ENSP00000486985

SEQ ID NO: 95341 - protein, 348 aa, Homo sapiens
  Payload ID: 19005
  Gene Name: ubiquitin-like modifier activating enzyme 5
  Uniprot ID: Q9GZZ9
  ENSP ID: ENSP00000264991
MALKRMGIVSDYEKIRTFAVAIVGVGGVGSVTAEMLTRCGIGKLLLFDYDKVELANMNRLFFQPHQAGLSKVQAAEHTLRNINPDVLFEVHNYNITTVENFQHFMDRISNGGLEEGKPVDLVLSCVDNFEARMTINTACNELGQTWMESGVSENAVSGHIQLIIPGESACFACAPPLVVAANIDEKTLKREGVCAASLPTTMGVVAGILVQNVLKFLLNFGTVSFYLGYNAMQDFFPTMSMKPNPQCDDRNCRKQQEEYKKKVAALPKQEVIQEEEEIIHEDNEWGIELVSEVSEEELKNFSGPVPDLPEGITVAYTIPKKQEDSVTELTVEDSGESLEDLMAKMKNM

SEQ ID NO: 95342 - protein, 404 aa, Homo sapiens
  Payload ID: 19005
  Gene Name: ubiquitin-like modifier activating enzyme 5
  Uniprot ID: Q9GZZ9
  ENSP ID: ENSP00000348565
MAESVERLQQRVQELERELAQERSLQVPRSGDGGGGRVRIEKMSSEVVDSNPYSRLMALKRMGIVSDYEKIRTFAVAIVGVGGVGSVTAEMLTRCGIGKLLLFDYDKVELANMNRLFFQPHQAGLSKVQAAEHTLRNINPDVLFEVHNYNITTVENFQHFMDRISNGGLEEGKPVDLVLSCVDNFEARMTINTACNELGQTWMESGVSENAVSGHIQLIIPGESACFACAPPLVVAANIDEKTLKREGVCAASLPTTMGVVAGILVQNVLKFLLNFGTVSFYLGYNAMQDFFPTMSMKPNPQCDDRNCRKQQEEYKKKVAALPKQEVIQEEEEIIHEDNEWGIELVSEVSEEELKNFSGPVPDLPEGITVAYTIPKKQEDSVTELTVEDSGESLEDLMAKMKNM

SEQ ID NO: 95343 - protein, 377 aa, Homo sapiens
  Payload ID: 19005
  Gene Name: ubiquitin-like modifier activating enzyme 5
  ENSP ID: ENSP00000417879
MAESVERLQQRVQELERELAQERSLQVPRSGDGGGGRVRIEKMSSEVVDSNPYSRLMALKRMGIVSDYEKIRTFAVAIVGVGGVGSVTAEMLTRCGIGKLLLFDYDKVELANMNRLFFQPHQAGLSKVQAAEHTLRNINPDVLFEVHNYNITTVENFQHFMDRISNGGLEEGKPVDLVLSCVDNFEARMTINTACNELGQTWMESGVSENAVSGHIQLIIPGESACFACAPPLVVAANIDEKTLKREGVCAASLPTTMGVVAGILVQNVLKFLLNFGTVSFYLGYNAMQDFFPTMSMKPNPQCDDRNCRKQQEEYKKKVAALPKQEVIQEEEEIIHEDNEWGIELVSEVSEEELKNFSGPVPDLPEGITVAYTIPKK

SEQ ID NO: 95344 - protein, 108 aa, Homo sapiens
  Payload ID: 19005
  Gene Name: ubiquitin-like modifier activating enzyme 5
  ENSP ID: ENSP00000417905
MALKRMGIVSDYEKIRTFAVAIVGVGGVGSVTAEMLTRCGIGKLLLFDYDKVELANMNRLFFQPHQAGLSKVQAAEHTLRNINPDVLFEVHNYNITTVENFQHFMDRI

SEQ ID NO: 95345 - protein, 79 aa, Homo sapiens
  Payload ID: 19005
  Gene Name: ubiquitin-like modifier activating enzyme 5
  ENSP ID: ENSP00000418569
MALKRMGIVSDYEKIRTFAVAIVGVGGVGSVTAEMLTRCGIGKLLLFDYDKVELANMNRLFFQPHQAGLSKVQAAEHTL

SEQ ID NO: 95346 - protein, 348 aa, Homo sapiens; identical to SEQ ID NO: 95341
  Payload ID: 19005
  Gene Name: ubiquitin-like modifier activating enzyme 5
  Uniprot ID: Q9GZZ9
  ENSP ID: ENSP00000418807

SEQ ID NO: 95347 - protein, 110 aa, Homo sapiens
  Payload ID: 19005
  Gene Name: ubiquitin-like modifier activating enzyme 5
  ENSP ID: ENSP00000420055
MRSNIKPAKLLLFDYDKVELANMNRLFFQPHQAGLSKVQAAEHTLRNINPDVLFEVHNYNITTVENFQHFMDRISNGGLEEGKPVDLVLSCVDNFEARMTINTACNELGQ

SEQ ID NO: 95348 - protein, 347 aa, Homo sapiens
  Payload ID: 19005
  Gene Name: ubiquitin-like modifier activating enzyme 5
  ENSP ID: ENSP00000424984
MAESVERLQQRVQELERELAQERSLQVPRSGDGGGGRVRIEKMSSEVVDSNPYSRLMALKRMGIVSDYEKIRTFAVAIVGVGGVGSVTAEMLTRCGIGKLLLFDYDKVELANMNRLFFQPHQAGLSKVQAAEHTLRNINPDVLFEVHNYNITTVENFQHFMDRISNGGLEEGKPVDLVLSCVDNFEARMTINTACNELGQTWMESGVSENAVSGHIQLIIPGESACFACAPPLVVAANIDEKTLKREGVCAASLPTTMGVVAGILVQNVLKFLLNFGTVSFYLGYNAMQDFFPTMSMKPNPQCDDRNCRKQQEEYKKKVAALPKQEVIQEEEEIIHEDNEWARRFCH

SEQ ID NO: 95349 - protein, 64 aa, Homo sapiens
  Payload ID: 19005
  Gene Name: ubiquitin-like modifier activating enzyme 5
  ENSP ID: ENSP00000427233
MAESVERLQQRVQELERELAQERSLQVPRSGDGGGGRVRIEKMSSEVVDSNPYSCYSLIMTRWN

SEQ ID NO: 95350 - protein, 1052 aa, Homo sapiens
  Payload ID: 19006
  Gene Name: ubiquitin-like modifier activating enzyme 6
  Uniprot ID: A0AVT1
  ENSP ID: ENSP00000313454
MEGSEPVAAHQGEEASCSSWGTGSTNKNLPIMSTASVEIDDALYSRQRYVLGDTAMQKMAKSHVFLSGMGGLGLEIAKNLVLAGIKAVTIHDTEKCQAWDLGTNFFLSEDDVVNKRNRAEAVLKHIAELNPYVHVTSSSVPFNETTDLSFLDKYQCVVLTEMKLPLQKKINDFCRSQCPPIKFISADVHGIWSRLFCDFGDEFEVLDTTGEEPKEIFISNITQANPGIVTCLENHPHKLETGQFLTFREINGMTGLNGSIQQITVISPFSFSIGDTTELEPYLHGGIAVQVKTPKTVFFESLERQLKHPKCLIVDFSNPEAPLEIHTAMLALDQFQEKYSRKPNVGCQQDSEELLKLATSISETLEEKPDVNADIVHWLSWTAQGFLSPLAAAVGGVASQEVLKAVTGKFSPLCQWLYLEAADIVESLGKPECEEFLPRGDRYDALRACIGDTLCQKLQNLNIFLVGCGAIGCEMLKNFALLGVGTSKEKGMITVTDPDLIEKSNLNRQFLFRPHHIQKPKSYTAADATLKINSQIKIDAHLNKVCPTTETIYNDEFYTKQDVIITALDNVEARRYVDSRCLANLRPLLDSGTMGTKGHTEVIVPHLTESYNSHRDPPEEEIPFCTLKSFPAAIEHTIQWARDKFESSFSHKPSLFNKFWQTYSSAEEVLQKIQSGHSLEGCFQVIKLLSRRPRNWSQCVELARLKFEKYFNHKALQLLHCFPLDIRLKDGSLFWQSPKRPPSPIKFDLNEPLHLSFLQNAAKLYATVYCIPFAEEDLSADALLNILSEVKIQEFKPSNKVVQTDETARKPDHVPISSEDERNAIFQLEKAILSNEATKSDLQMAVLSFEKDDDHNGHIDFITAASNLRAKMYSIEPADRFKTKRIAGKIIPAIATTTATVSGLVALEMIKVTGGYPFEAYKNCFLNLAIPIVVFTETTEVRKTKIRNGISFTIWDRWTVHGKEDFTLLDFINAVKEKYGIEPTMVVQGVKMLYVPVMPGHAKRLKLTMHKLVKPTTEKKYVDLTVSFAPDIDGDEDLPGPPVRYYFSHDTD

SEQ ID NO: 95351 - protein, 389 aa, Homo sapiens
  Payload ID: 19006
  Gene Name: ubiquitin-like modifier activating enzyme 6
  Uniprot ID: A0AVT1
  ENSP ID: ENSP00000399234
MEGSEPVAAHQGEEASCSSWGTGSTNKNLPIMSTASVEIDDALYSRQRYVLGDTAMQKMAKSHVFLSGMGGLGLEIAKNLVLAGIKAVTIHDTEKCQAWDLGTNFFLSEDDVVNKRNRAEAVLKHIAELNPYVHVTSSSVPFNETTDLSFLDKYQCVVLTEMKLPLQKKINDFCRSQCPPIKFISADVHGIWSRLFCDFGDEFEVLDTTGEEPKEIFISNITQANPGIVTCLENHPHKLETGQFLTFREINGMTGLNGSIQQITVISPFSFSIGDTTELEPYLHGGIAVQVKTPKTVFFESLERQLKHPKCLIVDFSNPEAPLEIHTAMLALDQFQEKYSRKPNVGCQQDSEELLKLATSISETLEEKVTIEIYGCPNICLLIHKCSVY

SEQ ID NO: 95352 - protein, 271 aa, Homo sapiens
  Payload ID: 19006
  Gene Name: ubiquitin-like modifier activating enzyme 6
  ENSP ID: ENSP00000421984
  MOD_RES (1)..(1): Any amino acid
XCGAIGCEMLKNFALLGVGTSKEKGMITVTDPDLIEKSNLNRQFLFRPHHIQKPKSYTAADATLKINSQIKIDAHLNKVCPTTETIYNDEFYTKQDVIITALDNVEARRYVDSRCLANLRPLLDSGTMGTKGHTEVIVPHLTESYNSHRDPPEEEIPFCTLKSFPAAIEHTIQWARDKFESSFSHKPSLFNKFWQTYSSAEEVLQALQLLHCFPLDIRLKDGSLFWQSPKRPPSPIKFDLNEPLHLSFLQNAAKLYATVYCIPFAEEVRYS

SEQ ID NO: 95353 - protein, 88 aa, Homo sapiens
  Payload ID: 19006
  Gene Name: ubiquitin-like modifier activating enzyme 6
  ENSP ID: ENSP00000425091
KDDDHNGHIDFITAASNLRAKMYSIEPADRFKTKRIAGKIIPAIATTTATVSGLKWNIIYNLGSMDRTWKRRFHPLGFHKCSQREVWN

SEQ ID NO: 95354 - protein, 1012 aa, Homo sapiens
  Payload ID: 19007
  Gene Name: ubiquitin-like modifier activating enzyme 7
  Uniprot ID: P41226
  ENSP ID: ENSP00000333266
MDALDASKLLDEELYSRQLYVLGSPAMQRIQGARVLVSGLQGLGAEVAKNLVLMGVGSLTLHDPHPTCWSDLAAQFLLSEQDLERSRAEASQELLAQLNRAVQVVVHTGDITEDLLLDFQVVVLTAAKLEEQLKVGTLCHKHGVCFLAADTRGLVGQLFCDFGEDFTVQDPTEAEPLTAAIQHISQGSPGILTLRKGANTHYFRDGDLVTFSGIEGMVELNDCDPRSIHVREDGSLEIGDTTTFSRYLRGGAITEVKRPKTVRHKSLDTALLQPHVVAQSSQEVHHAHCLHQAFCALHKFQHLHGRPPQPWDPVDAETVVGLARDLEPLKRTEEEPLEEPLDEALVRTVALSSAGVLSPMVAMLGAVAAQEVLKAISRKFMPLDQWLYFDALDCLPEDGELLPSPEDCALRGSRYDGQIAVFGAGFQEKLRRQHYLLVGAGAIGCELLKVFALVGLGAGNSGGLTVVDMDHIERSNLSRQFLFRSQDVGRPKAEVAAAAARGLNPDLQVIPLTYPLDPTTEHIYGDNFFSRVDGVAAALDSFQARRYVAARCTHYLKPLLEAGTSGTWGSATVFMPHVTEAYRAPASAAASEDAPYPVCTVRYFPSTAEHTLQWARHEFEELFRLSAETINHHQQAHTSLADMDEPQTLTLLKPVLGVLRVRPQNWQDCVAWALGHWKLCFHYGIKQLLRHFPPNKVLEDGTPFWSGPKQCPQPLEFDTNQDTHLLYVLAAANLYAQMHGLPGSQDWTALRELLKLLPQPDPQQMAPIFASNLELASASAEFGPEQQKELNKALEVWSVGPPLKPLMFEKDDDSNFHVDFVVAAASLRCQNYGIPPVNRAQSKRIVGQIIPAIATTTAAVAGLLGLELYKVVSGPRPRSAFRHSYLHLAENYLIRYMPFAPAIQTFHHLKWTSWDRLKVPAGQPERTLESLLAHLQEQHGLRVRILLHGSALLYAAGWSPEKQAQHLPLRVTELVQQLTGQAPAPGQRVLVLELSCEGDDEDTAFPPLHYEL

SEQ ID NO: 95355 - protein, 857 aa, Homo sapiens
  Payload ID: 19008
  Gene Name: ubiquitin-like with PHD and ring finger domains 1
  ENSP ID: ENSP00000478171
MPSFRGKKIRAAGSAAGSVCRAGAPGRTQVRAGSGPRTRFHRHPQPGHARRQTSCSRRPESADTMWIQVRTMDGRQTHTVDSLSRLTKVEELRRKIQELFHVEPGLQRLFYRGKQMEDGHTLFDYEVRLNDTIQLLVRQSLVLPHSTKERDSELSDTDSGCCLGQSESDKSSTHGEAAAETDSRPADEDMWDETELGLYKVNEYVDARDTNMGAWFEAQVVRVTRKAPSRDEPCSSTSRPALEEDVIYHVKYDDYPENGVVQMNSRDVRARARTIIKWQDLEVGQVVMLNYNPDNPKERGFWYDAEISRKRETRTARELYANVVLGDDSLNDCRIIFVDEVFKIERPGEGSPMVDNPMRRKSGPSCKHCKDDVNRLCRVCACHLCGGRQDPDKQLMCDECDMAFHIYCLDPPLSSVPSEDEWYCPECRNDASEVVLAGERLRESKKKAKMASATSSSQRDWGKGMACVGRTKECTIVPSNHYGPIPGIPVGTMWRFRVQVSESGVHRPHVAGIHGRSNDGAYSLVLAGGYEDDVDHGNFFTYTGSGGRDLSGNKRTAEQSCDQKLTNTNRALALNCFAPINDQEGAEAKDWRSGKPVRVVRNVKGGKNSKYAPAEGNRYDGIYKVVKYWPEKGKSGFLVWRYLLRRDDDEPGPWTKEGKDRIKKLGLTMQYPEGYLEALANREREKENSKREEEEQQEGGFASPRTGKGKWKRKSAGGGPSRAGSPRRTSKKTKVEPYSLTAQQSSLIREDKSNAKLWNEVLASLKDRPASGSPFQLFLSKVEETFQCICCQELVFRPITTVCQHNVCKDCLDRSFRAQVFSCPACRYDLGRSYAMQVNQPLQTVLNQLFPGYGNGR

SEQ ID NO: 95356 - protein, 793 aa, Homo sapiens
  Payload ID: 19008
  Gene Name: ubiquitin-like with PHD and ring finger domains 1
  Uniprot ID: Q96T88
  ENSP ID: ENSP00000478348
MWIQVRTMDGRQTHTVDSLSRLTKVEELRRKIQELFHVEPGLQRLFYRGKQMEDGHTLFDYEVRLNDTIQLLVRQSLVLPHSTKERDSELSDTDSGCCLGQSESDKSSTHGEAAAETDSRPADEDMWDETELGLYKVNEYVDARDTNMGAWFEAQVVRVTRKAPSRDEPCSSTSRPALEEDVIYHVKYDDYPENGVVQMNSRDVRARARTIIKWQDLEVGQVVMLNYNPDNPKERGFWYDAEISRKRETRTARELYANVVLGDDSLNDCRIIFVDEVFKIERPGEGSPMVDNPMRRKSGPSCKHCKDDVNRLCRVCACHLCGGRQDPDKQLMCDECDMAFHIYCLDPPLSSVPSEDEWYCPECRNDASEVVLAGERLRESKKKAKMASATSSSQRDWGKGMACVGRTKECTIVPSNHYGPIPGIPVGTMWRFRVQVSESGVHRPHVAGIHGRSNDGAYSLVLAGGYEDDVDHGNFFTYTGSGGRDLSGNKRTAEQSCDQKLTNTNRALALNCFAPINDQEGAEAKDWRSGKPVRVVRNVKGGKNSKYAPAEGNRYDGIYKVVKYWPEKGKSGFLVWRYLLRRDDDEPGPWTKEGKDRIKKLGLTMQYPEGYLEALANREREKENSKREEEEQQEGGFASPRTGKGKWKRKSAGGGPSRAGSPRRTSKKTKVEPYSLTAQQSSLIREDKSNAKLWNEVLASLKDRPASGSPFQLFLSKVEETFQCICCQELVFRPITTVCQHNVCKDCLDRSFRAQVFSCPACRYDLGRSYAMQVNQPLQTVLNQLFPGYGNGR

SEQ ID NO: 95357 - protein, 793 aa, Homo sapiens; identical to SEQ ID NO: 95356
  Payload ID: 19008
  Gene Name: ubiquitin-like with PHD and ring finger domains 1
  Uniprot ID: Q96T88
  ENSP ID: ENSP00000478601

SEQ ID NO: 95358 - protein, 806 aa, Homo sapiens
  Payload ID: 19008
  Gene Name: ubiquitin-like with PHD and ring finger domains 1
  ENSP ID: ENSP00000479617
MGVFAVPPLSADTMWIQVRTMDGRQTHTVDSLSRLTKVEELRRKIQELFHVEPGLQRLFYRGKQMEDGHTLFDYEVRLNDTIQLLVRQSLVLPHSTKERDSELSDTDSGCCLGQSESDKSSTHGEAAAETDSRPADEDMWDETELGLYKVNEYVDARDTNMGAWFEAQVVRVTRKAPSRDEPCSSTSRPALEEDVIYHVKYDDYPENGVVQMNSRDVRARARTIIKWQDLEVGQVVMLNYNPDNPKERGFWYDAEISRKRETRTARELYANVVLGDDSLNDCRIIFVDEVFKIERPGEGSPMVDNPMRRKSGPSCKHCKDDVNRLCRVCACHLCGGRQDPDKQLMCDECDMAFHIYCLDPPLSSVPSEDEWYCPECRNDASEVVLAGERLRESKKKAKMASATSSSQRDWGKGMACVGRTKECTIVPSNHYGPIPGIPVGTMWRFRVQVSESGVHRPHVAGIHGRSNDGAYSLVLAGGYEDDVDHGNFFTYTGSGGRDLSGNKRTAEQSCDQKLTNTNRALALNCFAPINDQEGAEAKDWRSGKPVRVVRNVKGGKNSKYAPAEGNRYDGIYKVVKYWPEKGKSGFLVWRYLLRRDDDEPGPWTKEGKDRIKKLGLTMQYPEGYLEALANREREKENSKREEEEQQEGGFASPRTGKGKWKRKSAGGGPSRAGSPRRTSKKTKVEPYSLTAQQSSLIREDKSNAKLWNEVLASLKDRPASGSPFQLFLSKVEETFQCICCQELVFRPITTVCQHNVCKDCLDRSFRAQVFSCPACRYDLGRSYAMQVNQPLQTVLNQLFPGYGNGR

SEQ ID NO: 95359 - protein, 496 aa, Homo sapiens
  Payload ID: 19008
  Gene Name: ubiquitin-like with PHD and ring finger domains 1
  ENSP ID: ENSP00000480214
IRAAGSAAGSVCRAGAPGRTQVRAGSGPRTRFHRHPQPGHARRQTSCSRRPESSVPSEDEWYCPECRNDASEVVLAGERLRESKKKAKMASATSSSQRDWGKGMACVGRTKECTIVPSNHYGPIPGIPVGTMWRFRVQVSESGVHRPHVAGIHGRSNDGAYSLVLAGGYEDDVDHGNFFTYTGSGGRDLSGNKRTAEQSCDQKLTNTNRALALNCFAPINDQEGAEAKDWRSGKPVRVVRNVKGGKNSKYAPAEGNRYDGIYKVVKYWPEKGKSGFLVWRYLLRRDDDEPGPWTKEGKDRIKKLGLTMQYPEGYLEALANREREKENSKREEEEQQEGGFASPRTGKGKWKRKSAGGGPSRAGSPRRTSKKTKVEPYSLTAQQSSLIREDKSNAKLWNEVLASLKDRPASGSPFQLFLSKVEETFQCICCQELVFRPITTVCQHNVCKDCLDRSFRAQVFSCPACRYDLGRSYAMQVNQPLQTVLNQLFPGYGNGR

SEQ ID NO: 95360 - protein, 793 aa, Homo sapiens; identical to SEQ ID NO: 95356
  Payload ID: 19008
  Gene Name: ubiquitin-like with PHD and ring finger domains 1
  Uniprot ID: Q96T88
  ENSP ID: ENSP00000484739

SEQ ID NO: 95361 - protein, 793 aa, Homo sapiens; identical to SEQ ID NO: 95356
  Payload ID: 19008
  Gene Name: ubiquitin-like with PHD and ring finger domains 1
  Uniprot ID: Q96T88
  ENSP ID: ENSP00000485604

SEQ ID NO: 95362 - protein, 802 aa, Homo sapiens
  Payload ID: 19009
  Gene Name: ubiquitin-like with PHD and ring finger domains 2, E3 ubiquitin protein ligase
  Uniprot ID: Q96PU4
  ENSP ID: ENSP00000276893
MWIQVRTIDGSKTCTIEDVSRKATIEELRERVWALFDVRPECQRLFYRGKQLENGYTLFDYDVGLNDIIQLLVRPDPDHLPGTSTQIEAKPCSNSPPKVKKAPRVGPSNQPSTSARARLIDPGFGIYKVNELVDARDVGLGAWFEAHIHSVTRASDGQSRGKTPLKNGSSCKRTNGNIKHKSKENTNKLDSVPSTSNSDCVAADEDVIYHIQYDEYPESGTLEMNVKDLRPRARTILKWNELNVGDVVMVNYNVESPGQRGFWFDAEITTLKTISRTKKELRVKIFLGGSEGTLNDCKIISVDEIFKIERPGAHPLSFADGKFLRRNDPECDLCGGDPEKKCHSCSCRVCGGKHEPNMQLLCDECNVAYHIYCLNPPLDKVPEEEYWYCPSCKTDSSEVVKAGERLKMSKKKAKMPSASTESRRDWGRGMACVGRTRECTIVPSNHYGPIPGIPVGSTWRFRVQVSEAGVHRPHVGGIHGRSNDGAYSLVLAGGFADEVDRGDEFTYTGSGGKNLAGNKRIGAPSADQTLTNMNRALALNCDAPLDDKIGAESRNWRAGKPVRVIRSFKGRKISKYAPEEGNRYDGIYKVVKYWPEISSSHGFLVWRYLLRRDDVEPAPWTSEGIERSRRLCLRLQYPAGYPSDKEGKKPKGQSKKQPSGTTKRPISDDDCPSASKVYKASDSAEAIEAFQLTPQQQHLIREDCQNQKLWDEVLSHLVEGPNFLKKLEQSFMCVCCQELVYQPVTTECFHNVCKDCLQRSFKAQVFSCPACRHDLGQNYIMIPNEILQTLLDLFFPGYSKGR

SEQ ID NO: 95363 - protein, 136 aa, Homo sapiens
  Payload ID: 19009
  Gene Name: ubiquitin-like with PHD and ring finger domains 2, E3 ubiquitin protein ligase
  ENSP ID: ENSP00000370778
MWIQVRTIDGSKTCTIEDVSRKATIEELRERVWALFDVRPECQRLFYRGKQLENGYTLFDYDVGLNDIIQLLVRPDPDHLPGTSTQIEAKPCSNSPPKVKKAPRVGPSNQPSTSARARLIDPGFGIYKGLALSPRL

SEQ ID NO: 95364 - protein, 112 aa, Homo sapiens
  Payload ID: 19009
  Gene Name: ubiquitin-like with PHD and ring finger domains 2, E3 ubiquitin protein ligase
  ENSP ID: ENSP00000399217
MNVKDLRPRARTILKWNELNVGDVVMVNYNVESPGQRGFWFDAEITTLKTISRTKKELRVKIFLGGSEGTLNDCKIISVDEIFKIERPGAHPLSFADGKFLRRNDPECDLCG

SEQ ID NO: 95365 - protein, 503 aa, Homo sapiens
  Payload ID: 19009
  Gene Name: ubiquitin-like with PHD and ring finger domains 2, E3 ubiquitin protein ligase
  Uniprot ID: Q96PU4
  ENSP ID: ENSP00000434182
MWIQVRTIDGSKTCTIEDVSRKATIEELRERVWALFDVRPECQRLFYRGKQLENGYTLFDYDVGLNDIIQLLVRPDPDHLPGTSTQIEAKPCSNSPPKVKKAPRVGPSNQPSTSARARLIDPGFGIYKVNELVDARDVGLGAWFEAHIHSVTRASDGQSRGKTPLKNGSSCKRTNGNIKHKSKENTNKLDSVPSTSNSDCVAADEDVIYHIQYDEYPESGTLEMNVKDLRPRARTILKWNELNVGDVVMVNYNVESPGQRGFWFDAEITTLKTISRTKKELRVKIFLGGSEGTLNDCKIISVDEIFKIERPGAHPLSFADGKFLRRNDPECDLCGGDPEKKCHSCSCRVCGGKHEPNMQLLCDECNVAYHIYCLNPPLDKVPEEEYWYCPSCKTDSSEVVKAGERLKMSKKKAKMPSASTESRRDWGRGMACVGRTRECTIVPSNHYGPIPGIPVGSTWRFRVQVSEAGVHRPHVGGIHGRSNDGAYSLVLAGGFADEVLTEL

SEQ ID NO: 95366 - protein, 1347 aa, Homo sapiens
  Payload ID: 19010
  Gene Name: ubiquitously transcribed tetratricopeptide repeat containing, Y-linked
  Uniprot ID: O14607
  ENSP ID: ENSP00000328939
MKSCAVSLTTAAVAFGDEAKKMAEGKASRESEEESVSLTVEEREALGGMDSRLFGFVRLHEDGARTKTLLGKAVRCYESLILKAEGKVESDFFCQLGHFNLLLEDYSKALSAYQRYYSLQADYWKNAAFLYGLGLVYFYYNAFHWAIKAFQDVLYVDPSFCRAKEIHLRLGLMFKVNTDYKSSLKHFQLALIDCNPCTLSNAEIQFHIAHLYETQRKYHSAKEAYEQLLQTENLPAQVKATVLQQLGWMHHNMDLVGDKATKESYAIQYLQKSLEADPNSGQSWYFLGRCYSSIGKVQDAFISYRQSIDKSEASADTWCSIGVLYQQQNQPMDALQAYICAVQLDHGHAAAWMDLGTLYESCNQPQDAIKCYLNAARSKRCSNTSTLAARIKFLQNGSDNWNGGQSLSHHPVQQVYSLCLTPQKLQHLEQLRANRDNLNPAQKHQLEQLESQFVLMQQMRHKEVAQVRTTGIHNGAITDSSLPTNSVSNRQPHGALTRVSSVSQPGVRPACVEKLLSSGAFSAGCIPCGTSKILGSTDTILLGSNCIAGSESNGNVPYLQQNTHTLPHNHTDLNSSTEEPWRKQLSNSAQGLHKSQSSCLSGPNEEQPLFSTGSAQYHQATSTGIKKANEHLTLPSNSVPQGDADSHLSCHTATSGGQQGIMFTKESKPSKNRSLVPETSRHTGDTSNGCADVKGLSNHVHQLIADAVSSPNHGDSPNLLIADNPQLSALLIGKANGNVGTGTCDKVNNIHPAVHTKTDHSVASSPSSAISTATPSPKSTEQRSINSVTSLNSPHSGLHTVNGEGLGKSQSSTKVDLPLASHRSTSQILPSMSVSICPSSTEVLKACRNPGKNGLSNSCILLDKCPPPRPPTSPYPPLPKDKLNPPTPSIYLENKRDAFFPPLHQFCTNPKNPVTVIRGLAGALKLDLGLFSTKTLVEANNEHMVEVRTQLLQPADENWDPTGTKKIWRCESNRSHTTIAKYAQYQASSFQESLREENEKRTQHKDHSDNESTSSENSGRRRKGPFKTIKFGTNIDLSDNKKWKLQLHELTKLPAFARVVSAGNLLTHVGHTILGMNTVQLYMKVPGSRTPGHQENNNFCSVNINIGPGDCEWFVVPEDYWGVLNDFCEKNNLNFLMSSWWPNLEDLYEANVPVYRFIQRPGDLVWINAGTVHWVQAVGWCNNIAWNVGPLTACQYKLAVERYEWNKLKSVKSPVPMVHLSWNMARNIKVSDPKLFEMIKYCLLKILKQYQTLREALVAAGKEVIWHGRTNDEPAHYCSICEVEVFNLLFVTNESNTQKTYIVHCHDCARKTSKSLENFVVLEQYKMEDLIQVYDQFTLALSLSSSS

SEQ ID NO: 95367 - protein, 1079 aa, Homo sapiens
  Payload ID: 19010
  Gene Name: ubiquitously transcribed tetratricopeptide repeat containing, Y-linked
  Uniprot ID: O14607
  ENSP ID: ENSP00000330446
MKSCAVSLTTAAVAFGDEAKKMAEGKASRESEEESVSLTVEEREALGGMDSRLFGFVRLHEDGARTKTLLGKAVRCYESLILKAEGKVESDFFCQLGHFNLLLEDYSKALSAYQRYYSLQADYWKNAAFLYGLGLVYFYYNAFHWAIKAFQDVLYVDPSFCRAKEIHLRLGLMFKVNTDYKSSLKHFQLALIDCNPCTLSNAEIQFHIAHLYETQRKYHSAKEAYEQLLQTENLPAQVKATVLQQLGWMHHNMDLVGDKATKESYAIQYLQKSLEADPNSGQSWYFLGRCYSSIGKVQDAFISYRQSIDKSEASADTWCSIGVLYQQQNQPMDALQAYICAVQLDHGHAAAWMDLGTLYESCNQPQDAIKCYLNAARSKRCSNTSTLAARIKFLQNGSDNWNGGQSLSHHPVQQVYSLCLTPQKLQHLEQLRANRDNLNPAQKHQLEQLESQFVLMQQMRHKEVAQVRTTGIHNGAITDSSLPTNSVSNRQPHGALTRVSSVSQPGVRPACVEKLLSSGAFSAGCIPCGTSKILGSTDTILLGSNCIAGSESNGNVPYLQQNTHTLPHNHTDLNSSTEEPWRKQLSNSAQGLHKSQSSCLSGPNEEQPLFSTGSAQYHQATSTGIKKANEHLTLPSNSVPQGDADSHLSCHTATSGGQQGIMFTKESKPSKNRSLVPETSRHTGDTSNGCADVKGLSNHVHQLIADAVSSPNHGDSPNLLIADNPQLSALLIGKANGNVGTGTCDKVNNIHPAVHTKTDHSVASSPSSAISTATPSPKSTEQRSINSVTSLNSPHSGLHTVNGEGLGKSQSSTKVDLPLASHRSTSQILPSMSVSICPSSTEVLKACRNPGKNGLSNSCILLDKCPPPRPPTSPYPPLPKDKLNPPTPSIYLENKRDAFFPPLHQFCTNPKNPVTVIRGLAGALKLDLGLFSTKTLVEANNEHMVEVRTQLLQPADENWDPTGTKKIWRCESNRSHTTIAKYAQYQASSFQESLRAGMQWCDLSSLQPPPPGFKRFSHLSLPNSWNYRHLPSCPTNFCIFVETGFHHVGQACLELLTSGGLLASASQSAGITGVSHHAR

SEQ ID NO: 95368 - protein, 1240 aa, Homo sapiens
  Payload ID: 19010
  Gene Name: ubiquitously transcribed tetratricopeptide repeat containing, Y-linked
  Uniprot ID: O14607
  ENSP ID: ENSP00000355420
MKSCAVSLTTAAVAFGDEAKKMAEGKASRESEEESVSLTVEEREALGGMDSRLFGFVRLHEDGARTKTLLGKAVRCYESLILKAEGKVESDFFCQLGHFNLLLEDYSKALSAYQRYYSLQADYWKNAAFLYGLGLVYFYYNAFHWAIKAFQDVLYVDPSFCRAKEIHLRLGLMFKVNTDYKSSLKHFQLALIDCNPCTLSNAEIQFHIAHLYETQRKYHSAKEAYEQLLQTENLPAQVKATVLQQLGWMHHNMDLVGDKATKESYAIQYLQKSLEADPNSGQSWYFLGRCYSSIGKVQDAFISYRQSIDKSEASADTWCSIGVLYQQQNQPMDALQAYICAVQLDHGHAAAWMDLGTLYESCNQPQDAIKCYLNAARSKRCSNTSTLAARIKFLQNGSDNWNGGQSLSHHPVQQVYSLCLTPQKLQHLEQLRANRDNLNPAQKHQLEQLESQFVLMQQMRHKEVAQVRTTGIHNGAITDSSLPTNSVSNRQPHGALTRVSSVSQPGVRPACVEKLLSSGAFSAGCIPCGTSKILGSTDTILLGSNCIAGSESNGNVPYLQQNTHTLPHNHTDLNSSTEEPWRKQLSNSAQGLHKSQSSCLSGPNEEQPLFSTGSAQYHQATSTGIKKANEHLTLPSNSVPQGDADSHLSCHTATSGGQQGIMFTKESKPSKNRSLVPETSRHTGDTSNGCADVKGLSNHVHQLIADAVSSPNHGDSPNLLIADNPQLSALLIGKANGNVGTGTCDKVNNIHPAVHTKTDHSVASSPSSAISTATPSPKSTEQRSINSVTSLNSPHSGLHTVNGEGLGKSQSSTKVDLPLASHRSTSQILPSMSVSICPSSTEVLKACRNPGKNGLSNSCILLDKCPPPRPPTSPYPPLPKDKLNPPTPSIYLENKRDAFFPPLHQFCTNPKNPVTVIRGLAGALKLDLGLFSTKTLVEANNEHMVEVRTQLLQPADENWDPTGTKKIWRCESNRSHTTIAKYAQYQASSFQESLREENEKRTQHKDHSDNESTSSENSGRRRKGPFKTIKFGTNIDLSDNKKWKLQLHELTKLPAFARVVSAGNLLTHVGHTILGMNTVQLYMKVPGSRTPGHQENNNFCSVNINIGPGDCEWFVVPEDYWGVLNDFCEKNNLNFLMSSWWPNLEDLYEANVPVYRFIQRPGDLVWINAGTVHWVQAVGWCNNIAWNVGPLTACQYKLAVERYEWNKLKSVKSPVPMVHLSWNMARNIKVSDPKLFEMIK

SEQ ID NO: 95369 - protein, 207 aa, Homo sapiens
  Payload ID: 19010
  Gene Name: ubiquitously transcribed tetratricopeptide repeat containing, Y-linked
  ENSP ID: ENSP00000372349
MKSCAVSLTTAAVAFGDEAKKMAEGKASRESEEESVSLTVEEREALGGMDSRLFGFVRLHEDGARTKTLLGKAVRCYESLILKAEGKVESDFFCQLGHFNLLLEDYSKALSAYQRYYSLQADYWKNAAFLYGLGLVYFYYNAFHWAIKAFQDVLYVDPSFCRAKEIHLRLGLMFKVNTDYKSSLKHFQLALIDCNPCTLSNAESKYF

SEQ ID NO: 95370 - protein, 1392 aa, Homo sapiens
  Payload ID: 19010
  Gene Name: ubiquitously transcribed tetratricopeptide repeat containing, Y-linked
  Uniprot ID: O14607
  ENSP ID: ENSP00000372352
MKSCAVSLTTAAVAFGDEAKKMAEGKASRESEEESVSLTVEEREALGGMDSRLFGFVRLHEDGARTKTLLGKAVRCYESLILKAEGKVESDFFCQLGHFNLLLEDYSKALSAYQRYYSLQADYWKNAAFLYGLGLVYFYYNAFHWAIKAFQDVLYVDPSFCRAKEIHLRLGLMFKVNTDYKSSLKHFQLALIDCNPCTLSNAEIQFHIAHLYETQRKYHSAKEAYEQLLQTENLPAQVKATVLQQLGWMHHNMDLVGDKATKESYAIQYLQKSLEADPNSGQSWYFLGRCYSSIGKVQDAFISYRQSIDKSEASADTWCSIGVLYQQQNQPMDALQAYICAVQLDHGHAAAWMDLGTLYESCNQPQDAIKCYLNAARSKRCSNTSTLAARIKFLQAQLCNLPQSSLQNKTKLLPSIEEAWSLPIPAELTSRQGAMNTAQQNGSDNWNGGQSLSHHPVQQVYSLCLTPQKLQHLEQLRANRDNLNPAQKHQLEQLESQFVLMQQMRHKEVAQVRTTGIHNGAITDSSLPTNSVSNRQPHGALTRVSSVSQPGVRPACVEKLLSSGAFSAGCIPCGTSKILGSTDTILLGSNCIAGSESNGNVPYLQQNTHTLPHNHTDLNSSTEEPWRKQLSNSAQGLHKSQSSCLSGPNEEQPLFSTGSAQYHQATSTGIKKANEHLTLPSNSVPQGDADSHLSCHTATSGGQQGIMFTKESKPSKNRSLVPETSRHTGDTSNGCADVKGLSNHVHQLIADAVSSPNHGDSPNLLIADNPQLSALLIGKANGNVGTGTCDKVNNIHPAVHTKTDHSVASSPSSAISTATPSPKSTEQRSINSVTSLNSPHSGLHTVNGEGLGKSQSSTKVDLPLASHRSTSQILPSMSVSICPSSTEVLKACRNPGKNGLSNSCILLDKCPPPRPPTSPYPPLPKDKLNPPTPSIYLENKRDAFFPPLHQFCTNPKNPVTVIRGLAGALKLDLGLFSTKTLVEANNEHMVEVRTQLLQPADENWDPTGTKKIWRCESNRSHTTIAKYAQYQASSFQESLREENEKRTQHKDHSDNESTSSENSGRRRKGPFKTIKFGTNIDLSDNKKWKLQLHELTKLPAFARVVSAGNLLTHVGHTILGMNTVQLYMKVPGSRTPGHQENNNFCSVNINIGPGDCEWFVVPEDYWGVLNDFCEKNNLNFLMSSWWPNLEDLYEANVPVYRFIQRPGDLVWINAGTVHWVQAVGWCNNIAWNVGPLTACQYKLAVERYEWNKLKSVKSPVPMVHLSWNMARNIKVSDPKLFEMIKYCLLKILKQYQTLREALVAAGKEVIWHGRTNDEPAHYCSICEVEVFNLLFVTNESNTQKTYIVHCHDCARKTSKSLENFVVLEQYKMEDLIQVYDQFTLALSLSSSS

SEQ ID NO: 95371 - protein, 1335 aa, Homo sapiens
  Payload ID: 19010
  Gene Name: ubiquitously transcribed tetratricopeptide repeat containing, Y-linked
  ENSP ID: ENSP00000439922
MKSCAVSLTTAAVAFGDEAKKMAEGKASRESEEESVSLTVEEREALGGMDSRLFGFVRLHEDGARTKTLLGKAVRCYESLILKAEGKVESDFFCQLGHFNLLLEDYSKALSAYQRYYSLQADYWKNAAFLYGLGLVYFYYNAFHWAIKAFQDVLYVDPSFCRAKEIHLRLGLMFKVNTDYKSSLKHFQLALIDCNPCTLSNAEIQFHIAHLYETQRKYHSAKEAYEQLLQTENLPAQVKATVLQQLGWMHHNMDLVGDKATKESYAIQYLQKSLEADPNSGQSWYFLGRCYSSIGKVQDAFISYRQSIDKSEASADTWCSIGVLYQQQNQPMDALQAYICAVQLDHGHAAAWMDLGTLYESCNQPQDAIKCYLNAARSKRCSNTSTLAARIKFLQAQLCNLPQSSLQNKTKLLPSIEEAWSLPIPAELTSRQGAMNTAQQNGSDNWNGGQSLSHHPVQQVYSLCLTPQKLQHLEQLRANRDNLNPAQKHQLEQLESQFVLMQQMRHKEVAQVRTTGIHNGAITDSSLPTNSVSNRQPHGALTRVSSVSQPGVRPACVEKLLSSGAFSAGCIPCGTSKILGSTDTILLGSNCIAGSESNGNVPYLQQNTHTLPHNHTDLNSSTEEPWRKQLSNSAQGLHKSQSSCLSGPNEEQPLFSTGSAQYHQATSTGIKKANEHLTLPSNSVPQGDADSHLSCHTATSGGQQGIMFTKESKPSKNRSLVPETSRHTGDTSNGCADVKGLSNHVHQLIADAVSSPNHGDSPNLLIADNPQLSALLIGKANGNVGTGTCDKVNNIHPAVHTKTDHSVASSPSSAISTATPSPKSTEQRSINSVTSLNSPHSGLHTVNGEGLGKSQSSTKVDLPLASHRSTSQILPSMSVSICPSSTEVLKACRNPGKNGLSNSCILLDKCPPPRPPTSPYPPLPKDKLNPPTPSIYLENKRDAFFPPLHQFCTNPKNPVTVIRGLAGALKLDLGLFSTKTLVEANNEHMVEVRTQLLQPADENWDPTGTKKIWRCESNRSHTTIAKYAQYQASSFQESLREENEKRTQHKDHSDNESTSSENSGRRRKGPFKTIKFGTNIDLSDNKKWKLQLHELTKLPAFARVVSAGNLLTHVGHTILGMNTVQLYMKVPGSRTPGHQENNNFCSVNINIGPGDCEWFVVPEDYWGVLNDFCEKNNLNFLMSSWWPNLEDLYEANVPVYRFIQRPGDLVWINAGTVHWVQAVGWCNNIAWNVGPLTACQYKLAVERYEWNKLKSVKSPVPMVHLSWNMARNIKVSDPKLFEMIKYCLLKILKQYQTLREALVAAGKEVIWHGRTNDEPAHYCSICEALSLSSSS

SEQ ID NO: 95372 - protein, 1389 aa, Homo sapiens
  Payload ID: 19010
  Gene Name: ubiquitously transcribed tetratricopeptide repeat containing, Y-linked
  ENSP ID: ENSP00000441943
MKSCAVSLTTAAVAFGDEAKKMAEGKASRESEEESVSLTVEEREALGGMDSRLFGFVRLHEDGARTKTLLGKAVRCYESLILKAEGKVESDFFCQLGHFNLLLEDYSKALSAYQRYYSLQADYWKNAAFLYGLGLVYFYYNAFHWAIKAFQDVLYVDPSFCRAKEIHLRLGLMFKVNTDYKSSLKHFQLALIDCNPCTLSNAEIQFHIAHLYETQRKYHSAKEAYEQLLQTENLPAQVKATVLQQLGWMHHNMDLVGDKATKESYAIQYLQKSLEADPNSGQSWYFLGSVLYQQQNQPMDALQAYICAVQLDHGHAAAWMDLGTLYESCNQPQDAIKCYLNAARSKRCSNTSTLAARIKFLQAQLCNLPQSSLQNKTKLLPSIEEAWSLPIPAELTSRQGAMNTAQQQSLSLHMITSSQVEGLSSPAKKKRTSSPTKNGSDNWNGGQSLSHHPVQQVYSLCLTPQKLQHLEQLRANRDNLNPAQKHQLEQLESQFVLMQQMRHKEVAQVRTTGIHNGAITDSSLPTNSVSNRQPHGALTRVSSVSQPGVRPACVEKLLSSGAFSAGCIPCGTSKILGSTDTILLGSNCIAGSESNGNVPYLQQNTHTLPHNHTDLNSSTEEPWRKQLSNSAQGLHKSQSSCLSGPNEEQPLFSTGSAQYHQATSTGIKKANEHLTLPSNSVPQGDADSHLSCHTATSGGQQGIMFTKESKPSKNRSLVPETSRHTGDTSNGCADVKGLSNHVHQLIADAVSSPNHGDSPNLLIADNPQLSALLIGKANGNVGTGTCDKVNNIHPAVHTKTDHSVASSPSSAISTATPSPKSTEQRSINSVTSLNSPHSGLHTVNGEGLGKSQSSTKVDLPLASHRSTSQILPSMSVSICPSSTEVLKACRNPGKNGLSNSCILLDKCPPPRPPTSPYPPLPKDKLNPPTPSIYLENKRDAFFPPLHQFCTNPKNPVTVIRGLAGALKLDLGLFSTKTLVEANNEHMVEVRTQLLQPADENWDPTGTKKIWRCESNRSHTTIAKYAQYQASSFQESLREENEKRTQHKDHSDNESTSSENSGRRRKGPFKTIKFGTNIDLSDNKKWKLQLHELTKLPAFARVVSAGNLLTHVGHTILGMNTVQLYMKVPGSRTPGHQENNNFCSVNINIGPGDCEWFVVPEDYWGVLNDFCEKNNLNFLMSSWWPNLEDLYEANVPVYRFIQRPGDLVWINAGTVHWVQAVGWCNNIAWNVGPLTACQYKLAVERYEWNKLKSVKSPVPMVHLSWNMARNIKVSDPKLFEMIKYCLLKILKQYQTLREALVAAGKEVIWHGRTNDEPAHYCSICEVEVFNLLFVTNESNTQKTYIVHCHDCARKTSKSLENFVVLEQYKMEDLIQVYDQFTLALSLSSSS

SEQ ID NO: 95373 - protein, 1444 aa, Homo sapiens
  Payload ID: 19010
  Gene Name: ubiquitously transcribed tetratricopeptide repeat containing, Y-linked
  ENSP ID: ENSP00000442047
MKSCAVSLTTAAVAFGDEAKKMAEGKASRESEEESVSLTVEEREALGGMDSRLFGFVRLHEDGARTKTLLGKAVRCYESLILKAEGKVESDFFCQLGHFNLLLEDYSKALSAYQRYYSLQADYWKNAAFLYGLGLVYFYYNAFHWAIKAFQDVLYVDPSFCRAKEIHLRLGLMFKVNTDYKSSLKHFQLALIDCNPCTLSNAEIQFHIAHLYETQRKYHSAKEAYEQLLQTENLPAQVKATVLQQLGWMHHNMDLVGDKATKESYAIQYLQKSLEADPNSGQSWYFLGRCYSSIGKVQDAFISYRQSIDKSEASADTWCSIGVLYQQQNQPMDALQAYICAVQLDHGHAAAWMDLGTLYESCNQPQDAIKCYLNAARSKRCSNTSTLAARIKFLQAQLCNLPQSSLQNKTKLLPSIEEAWSLPIPAELTSRQGAMNTAQQAYRAHDPNTEHVLNHSQTPILQQSLSLHMITSSQVEGLSSPAKKKRTSSPTKNGSDNWNGGQSLSHHPVQQVYSLCLTPQKLQHLEQLRANRDNLNPAQKHQLEQLESQFVLMQQMRHKEVAQVRTTGIHNGAITDSSLPTNSVSNRQPHGALTRVSSVSQPGVRPACVEKLLSSGAFSAGCIPCGTSKILGSTDTILLGSNCIAGSESNGNVPYLQQNTHTLPHNHTDLNSSTEEPWRKQLSNSAQGLHKSQSSCLSGPNEEQPLFSTGSAQYHQATSTGIKKANEHLTLPSNSVPQGDADSHLSCHTATSGGQQGIMFTKESKPSKNRSLVPETSRHTGDTSNGCADVKGLSNHVHQLIADAVSSPNHGDSPNLLIADNPQLSALLIGKANGNVGTGTCDKVNNIHPAVHTKTDHSVASSPSSAISTATPSPKSTEQRSINSVTSLNSPHSGLHTVNGEGLGKSQSSTKVDLPLASHRSTSQILPSMSVSICPSSTEVLKACRNPGKNGLSNSCILLDKCPPPRPPTSPYPPLPKDKLNPPTPSIYLENKRDAFFPPLHQFCTNPKNPVTVIRGLAGALKLDLGLFSTKTLVEANNEHMVEVRTQLLQPADENWDPTGTKKIWRCESNRSHTTIAKYAQYQASSFQESLREENEKRTQHKDHSDNESTSSENSGRRRKGPFKTIKFGTNIDLSDNKKWKLQLHELTKLPAFARVVSAGNLLTHVGHTILGMNTVQLYMKVPGSRTPGHQENNNFCSVNINIGPGDCEWFVVPEDYWGVLNDFCEKNNLNFLMSSWWPNLEDLYEANVPVYRFIQRPGDLVWINAGTVHWVQAVGWCNNIAWNVGPLTACQYKLAVERYEWNKLKSVKSPVPMVHLSWNMARNIKVSDPKLFEMIKYCLLKILKQYQTLREALVAAGKEVIWHGRTNDEPAHYCSICEVEVFNLLFVTNESNTQKTYIVHCHDCARKTSKSLENFVVLEQYKMEDLIQVYDQFTLALSLSSSS

SEQ ID NO: 95374 - protein, 1363 aa, Homo sapiens
  Payload ID: 19010
  Gene Name: ubiquitously transcribed tetratricopeptide repeat containing, Y-linked
  ENSP ID: ENSP00000445274
MKSCAVSLTTAAVAFGDEAKKMAEGKASRESEEESVSLTVEEREALGGMDSRLFGFVRLHEDGARTKTLLGKAVRCYESLILKAEGKVESDFFCQLGHFNLLLEDYSKALSAYQRYYSLQADYWKNAAFLYGLGLVYFYYNAFHWAIKAFQDVLYVDPSFCRAKEIHLRLGLMFKVNTDYKSSLKHFQLALIDCNPCTLSNAEIQFHIAHLYETQRKYHSAKEAYEQLLQTENLPAQVKATVLQQLGWMHHNMDLVGDKATKESYAIQYLQKSLEADPNSGQSWYFLGRCYSSIGKVQDAFISYRQSIDKSEASADTWCSIGVLYQQQNQPMDALQAYICAVQLDHGHAAAWMDLGTLYESCNQPQDAIKCYLNAARSKRCSNTSTLAARIKFLQNGSDNWNGGQSLSHHPVQQVYSLCLTPQKLQHLEQLRANRDNLNPAQKHQLEQLESQFVLMQQMRHKEVAQVRTTGIHNGAITDSSLPTNSVSNRQPHGALTRVSSVSQPGVRPACVEKLLSSGAFSAGCIPCGTSKILGSTDTILLGSNCIAGSESNGNVPYLQQNTHTLPHNHTDLNSSTEEPWRKQLSNSAQAYLGHLTGFIQDNCNKGLHKSQSSCLSGPNEEQPLFSTGSAQYHQATSTGIKKANEHLTLPSNSVPQGDADSHLSCHTATSGGQQGIMFTKESKPSKNRSLVPETSRHTGDTSNGCADVKGLSNHVHQLIADAVSSPNHGDSPNLLIADNPQLSALLIGKANGNVGTGTCDKVNNIHPAVHTKTDHSVASSPSSAISTATPSPKSTEQRSINSVTSLNSPHSGLHTVNGEGLGKSQSSTKVDLPLASHRSTSQILPSMSVSICPSSTEVLKACRNPGKNGLSNSCILLDKCPPPRPPTSPYPPLPKDKLNPPTPSIYLENKRDAFFPPLHQFCTNPKNPVTVIRGLAGALKLDLGLFSTKTLVEANNEHMVEVRTQLLQPADENWDPTGTKKIWRCESNRSHTTIAKYAQYQASSFQESLREENEKRTQHKDHSDNESTSSENSGRRRKGPFKTIKFGTNIDLSDNKKWKLQLHELTKLPAFARVVSAGNLLTHVGHTILGMNTVQLYMKVPGSRTPGHQENNNFCSVNINIGPGDCEWFVVPEDYWGVLNDFCEKNNLNFLMSSWWPNLEDLYEANVPVYRFIQRPGDLVWINAGTVHWVQAVGWCNNIAWNVGPLTACQYKLAVERYEWNKLKSVKSPVPMVHLSWNMARNIKVSDPKLFEMIKYCLLKILKQYQTLREALVAAGKEVIWHGRTNDEPAHYCSICEVEVFNLLFVTNESNTQKTYIVHCHDCARKTSKSLENFVVLEQYKMEDLIQVYDQFTLALSLSSSS

SEQ ID NO: 95375 - protein, 1399 aa, Homo sapiens
  Payload ID: 19010
  Gene Name: ubiquitously transcribed tetratricopeptide repeat containing, Y-linked
  ENSP ID: ENSP00000483735
MKSCAVSLTTAAVAFGDEAKKMAEGKASRESEEESVSLTVEEREALGGMDSRLFGFVRLHEDGARTKTLLGKAVRCYESLILKAEGKVESDFFCQLGHFNLLLEDYSKALSAYQRYYSLQADYWKNAAFLYGLGLVYFYYNAFHWAIKAFQDVLYVDPSFCRAKEIHLRLGLMFKVNTDYKSSLKHFQLALIDCNPCTLSNAEIQFHIAHLYETQRKYHSAKEAYEQLLQTENLPAQVKATVLQQLGWMHHNMDLVGDKATKESYAIQYLQKSLEADPNSGQSWYFLGRCYSSIGKVQDAFISYRQSIDKSEASADTWCSIGVLYQQQNQPMDALQAYICAVQLDHGHAAAWMDLGTLYESCNQPQDAIKCYLNAARSKRCSNTSTLAARIKFLQAYRAHDPNTEHVLNHSQTPILQQSLSLHMITSSQVEGLSSPAKKKRTSSPTKNGSDNWNGGQSLSHHPVQQVYSLCLTPQKLQHLEQLRANRDNLNPAQKHQLEQLESQFVLMQQMRHKEVAQVRTTGIHNGAITDSSLPTNSVSNRQPHGALTRVSSVSQPGVRPACVEKLLSSGAFSAGCIPCGTSKILGSTDTILLGSNCIAGSESNGNVPYLQQNTHTLPHNHTDLNSSTEEPWRKQLSNSAQGLHKSQSSCLSGPNEEQPLFSTGSAQYHQATSTGIKKANEHLTLPSNSVPQGDADSHLSCHTATSGGQQGIMFTKESKPSKNRSLVPETSRHTGDTSNGCADVKGLSNHVHQLIADAVSSPNHGDSPNLLIADNPQLSALLIGKANGNVGTGTCDKVNNIHPAVHTKTDHSVASSPSSAISTATPSPKSTEQRSINSVTSLNSPHSGLHTVNGEGLGKSQSSTKVDLPLASHRSTSQILPSMSVSICPSSTEVLKACRNPGKNGLSNSCILLDKCPPPRPPTSPYPPLPKDKLNPPTPSIYLENKRDAFFPPLHQFCTNPKNPVTVIRGLAGALKLDLGLFSTKTLVEANNEHMVEVRTQLLQPADENWDPTGTKKIWRCESNRSHTTIAKYAQYQASSFQESLREENEKRTQHKDHSDNESTSSENSGRRRKGPFKTIKFGTNIDLSDNKKWKLQLHELTKLPAFARVVSAGNLLTHVGHTILGMNTVQLYMKVPGSRTPGHQENNNFCSVNINIGPGDCEWFVVPEDYWGVLNDFCEKNNLNFLMSSWWPNLEDLYEANVPVYRFIQRPGDLVWINAGTVHWVQAVGWCNNIAWNVGPLTACQYKLAVERYEWNKLKSVKSPVPMVHLSWNMARNIKVSDPKLFEMIKYCLLKILKQYQTLREALVAAGKEVIWHGRTNDEPAHYCSICEVEVFNLLFVTNESNTQKTYIVHCHDCARKTSKSLENFVVLEQYKMEDLIQVYDQFTLALSLSSSS

SEQ ID NO: 95376 - protein, 1264 aa, Homo sapiens
  Payload ID: 19010
  Gene Name: ubiquitously transcribed tetratricopeptide repeat containing, Y-linked
  ENSP ID: ENSP00000484698
MKSCAVSLTTAAVAFGDEAKKMAEGKASRESEEESVSLTVEEREALGGMDSRLFGFVRLHEDGARTKTLLGKNAAFLYGLGLVYFYYNAFHWAIKAFQDVLYVDPSFCRAKEIHLRLGLMFKVNTDYKSSLKRKYHSAKEAYEQLLQTENLPAQVKATVLQQLGWMHHNMDLVGDKATKESYAIQYLQKSLEADPNSGQSWYFLGRCYSSIGKVQDAFISYRQSIDKSEASADTWCSIGVLYQQQNQPMDALQAYICAVQLDHGHAAAWMDLGTLYESCNQPQDAIKCYLNAARSKRCSNTSTLAARIKFLQNGSDNWNGGQSLSHHPVQQVYSLCLTPQKLQHLEQLRANRDNLNPAQKHQLEQLESQFVLMQQMRHKEVAQVRTTGIHNGAITDSSLPTNSVSNRQPHGALTRVSSVSQPGVRPACVEKLLSSGAFSAGCIPCGTSKILGSTDTILLGSNCIAGSESNGNVPYLQQNTHTLPHNHTDLNSSTEEPWRKQLSNSAQGLHKSQSSCLSGPNEEQPLFSTGSAQYHQATSTGIKKANEHLTLPSNSVPQGDADSHLSCHTATSGGQQGIMFTKESKPSKNRSLVPETSRHTGDTSNGCADVKGLSNHVHQLIADAVSSPNHGDSPNLLIADNPQLSALLIGKANGNVGTGTCDKVNNIHPAVHTKTDHSVASSPSSAISTATPSPKSTEQRSINSVTSLNSPHSGLHTVNGEGLGKSQSSTKVDLPLASHRSTSQILPSMSVSICPSSTEVLKACRNPGKNGLSNSCILLDKCPPPRPPTSPYPPLPKDKLNPPTPSIYLENKRDAFFPPLHQFCTNPKNPVTVIRGLAGALKLDLGLFSTKTLVEANNEHMVEVRTQLLQPADENWDPTGTKKIWRCESNRSHTTIAKYAQYQASSFQESLREENEKRTQHKDHSDNESTSSENSGRRRKGPFKTIKFGTNIDLSDNKKWKLQLHELTKLPAFARVVSAGNLLTHVGHTILGMNTVQLYMKVPGSRTPGHQENNNFCSVNINIGPGDCEWFVVPEDYWGVLNDFCEKNNLNFLMSSWWPNLEDLYEANVPVYRFIQRPGDLVWINAGTVHWVQAVGWCNNIAWNVGPLTACQYKLAVERYEWNKLKSVKSPVPMVHLSWNMARNIKVSDPKLFEMIKYCLLKILKQYQTLREALVAAGKEVIWHGRTNDEPAHYCSICEVEVFNLLFVTNESNTQKTYIVHCHDCARKTSKSLENFVVLEQYKMEDLIQVYDQFTLALSLSSSS

SEQ ID NO: 95377 - protein, 1367 aa, Homo sapiens
  Payload ID: 19010
  Gene Name: ubiquitously transcribed tetratricopeptide repeat containing, Y-linked
  ENSP ID: ENSP00000485013
MKSCAVSLTTAAVAFGDEAKKMAEGKASRESEEESVSLTVEEREALGGMDSRLFGFVRLHEDGARTKTLLGKAVRCYESLILKAEGKVESDFFCQLGHFNLLLEDYSKALSAYQRYYSLQADYWKNAAFLYGLGLVYFYYNAFHWAIKAFQDVLYVDPSFCRAKEIHLRLGLMFKVNTDYKSSLKHFQLALIDCNPCTLSNAEIQFHIAHLYETQRKYHSAKEAYEQLLQTENLPAQVKATVLQQLGWMHHNMDLVGDKATKESYAIQYLQKSLEADPNSGQSWYFLGRCYSSIGKVQDAFISYRQSIDKSEASADTWCSIGVLYQQQNQPMDALQAYICAVQLDHGHAAAWMDLGTLYESCNQPQDAIKCYLNAARSKRCSNTSTLAARIKFLQAQLCNLPQSSLQNKTKLLPSIEEAWSLPIPAELTSRQGAMNTAQQNGSDNWNGGQSLSHHPVQQVYSLCLTPQKLQHLEQLRANRDNLNPAQKHQLEQLESQFVLMQQMRHKEVAQVRTTGIHNGAITDSSLPTNSVSNRQPHGALTRVSSVSQPGVRPACVEKLLSSGAFSAGCIPCGTSKILGSTDTILLGSNCIAGSESNGNVPYLQQNTHTLPHNHTDLNSSTEEPWRKQLSNSAQGLHKSQSSCLSGPNEEQPLFSTGSAQYHQATSTGIKKANEHLTLPSNSVPQGDADSHLSCHTATSGGQQGIMFTKESKPSKNRSLVPETSRHTGDTSNGCADVKGLSNHVHQLIADAVSSPNHGDSPNLLIADNPQLSALLIGKANGNVGTGTCDKVNNIHPAVHTKTDHSVASSPSSAISTATPSPKSTEQRSINSVTSLNSPHSGLHTVNGEGLGKSQSSTKVDLPLASHRSTSQILPSMSVSICPSSTEVLKACRNPGKNGLSNSCILLDKCPPPRPPTSPYPPLPKDKLNPPTPSIYLENKRDAFFPPLHQFCTNPKNPVTVIRGLAGALKLDLGLFSTKTLVEANNEHMVEVRTQLLQPADENWDPTGTKKIWRCESNRSHTTIAKYAQYQASSFQESLREENEKRTQHKDHSDNESTSSEKWKLQLHELTKLPAFARVVSAGNLLTHVGHTILGMNTVQLYMKVPGSRTPGHQENNNFCSVNINIGPGDCEWFVVPEDYWGVLNDFCEKNNLNFLMSSWWPNLEDLYEANVPVYRFIQRPGDLVWINAGTVHWVQAVGWCNNIAWNVGPLTACQYKLAVERYEWNKLKSVKSPVPMVHLSWNMARNIKVSDPKLFEMIKYCLLKILKQYQTLREALVAAGKEVIWHGRTNDEPAHYCSICEVEVFNLLFVTNESNTQKTYIVHCHDCARKTSKSLENFVVLEQYKMEDLIQVYDQFTLALSLSSSS

SEQ ID NO: 95378 - protein, 1211 aa, Homo sapiens
  Payload ID: 19010
  Gene Name: ubiquitously transcribed tetratricopeptide repeat containing, Y-linked
  Uniprot ID: O14607
  ENSP ID: ENSP00000485539
MKSCAVSLTTAAVAFGDEAKKMAEGKASRESEEESVSLTVEEREALGGMDSRLFGFVRLHEDGARTKTLLGKAVRCYESLILKAEGKVESDFFCQLGHFNLLLEDYSKALSAYQRYYSLQADYWKNAAFLYGLGLVYFYYNAFHWAIKAFQDVLYVDPSFCRAKEIHLRLGLMFKVNTDYKSSLKHFQLALIDCNPCTLSNAEIQFHIAHLYETQRKYHSAKEAYEQLLQTENLPAQVKATVLQQLGWMHHNMDLVGDKATKESYAIQYLQKSLEADPNSGQSWYFLGRCYSSIGKVQDAFISYRQSIDKSEASADTWCSIGVLYQQQNQPMDALQAYICAVQLDHGHAAAWMDLGTLYESCNQPQDAIKCYLNAARSKRCSNTSTLAARIKFLQAQLCNLPQSSLQNKTKLLPSIEEAWSLPIPAELTSRQGAMNTAQQNGSDNWNGGQSLSHHPVQQVYSLCLTPQKLQHLEQLRANRDNLNPAQKHQLEQLESQFVLMQQMRHKEVAQGLHKSQSSCLSGPNEEQPLFSTGSAQYHQATSTGIKKANEHLTLPSNSVPQGDADSHLSCHTATSGGQQGIMFTKESKPSKNRSLVPETSRHTGDTSNGCADVKGLSNHVHQLIADAVSSPNHGDSPNLLIADNPQLSALLIGKANGNVGTGTCDKVNNIHPAVHTKTDHSVASSPSSAISTATPSPKSTEQRSINSVTSLNSPHSGLHTVNGEGLGKSQSSTKVDLPLASHRSTSQILPSMSVSICPSSTEVLKACRNPGKNGLSNSCILLDKCPPPRPPTSPYPPLPKDKLNPPTPSIYLENKRDAFFPPLHQFCTNPKNPVTVIRGLAGALKLDLGLFSTKTLVEANNEHMVEVRTQLLQPADENWDPTGTKKIWRCESNRSHTTIAKYAQYQASSFQESLREENEKRTQHKDHSDNESTSSENSGRRRKGPFKTIKFGTNIDLSDNKKWKLQLHELTKLPAFARVVSAGNLLTHVGHTILGMNTVQLYMKVPGSRTPGHQENNNFCSVNINIGPGDCEWFVVPEDYWGVLNDFCEKNNLNFLMSSWWPNLEDLYEANVPVYRFIQRPGDLVWINAGTVHWVQAVGWCNNIAWNVGPLTACQYKLAVERYEWNKLKSVKSPVPMVHLSWNMARNIKVSDPKLFEMIKYCLLKILKQYQTLREALVAAGKEVIWHGRTNDEPAHYCSICEALSLSSSS

SEQ ID NO: 95379 - protein, 157 aa, Homo sapiens
  Payload ID: 19011
  Gene Name: ubiquitously-expressed, prefoldin-like chaperone
  Uniprot ID: Q9UBK9
  ENSP ID: ENSP00000327797
MATPPKRRAVEATGEKVLRYETFISDVLQRDLRKVLDHRDKVYEQLAKYLQLRNVIERLQEAKHSELYMQVDLGCNFFVDTVVPDTSRIYVALGYGFFLELTLAEALKFIDRKSSLLTELSNSLTKDSMNIKAHIHMLLEGLRELQGLQNFPEKPHH

SEQ ID NO: 95380 - protein, 169 aa, Homo sapiens
  Payload ID: 19011
  Gene Name: ubiquitously-expressed, prefoldin-like chaperone
  ENSP ID: ENSP00000337393
MVFPLPTPQEPIMATPPKRRAVEATGEKVLRYETFISDVLQRDLRKVLDHRDKVYEQLAKYLQLRNVIERLQEAKHSELYMQVDLGCNFFVDTVVPDTSRIYVALGYGFFLELTLAEALKFIDRKSSLLTELSNSLTKDSMNIKAHIHMLLEGLRELQGLQNFPEKPHH

SEQ ID NO: 95381 - protein, 99 aa, Homo sapiens
  Payload ID: 19011
  Gene Name: ubiquitously-expressed, prefoldin-like chaperone
  ENSP ID: ENSP00000473785
MVFPLPTPQEPIMATPPKRRAVEATGEKVLRYETFISDVLQRDLRKVLDHRDKVYEQLAKYLQLRNVIERLQPRYFTHLCGPGIWFFPGVDTGRSSQVH

SEQ ID NO: 95382 - protein, 541 aa, Homo sapiens
  Payload ID: 19012
  Gene Name: U-box domain containing 5
  Uniprot ID: O94941
  ENSP ID: ENSP00000217173
MVINLCLPQFRPRIHCNKISADGYEVENLISEDLTKRSHGFRTEYFIKPPVYVTVSFPFNVEICRINIDLTAGGGQNVTGLEMYTSASSSRVSWNTPQCRTLGPAEPSVPDKEAFTLVGKVLLKNQSQVVFSHRGFKARPPFGAMEATLPSPAVVAQELWNKGALSLSHVAHLRICITHVTGGGIPCIKRLEVWGQPAKTCSQEVIDSILLVTSENLPQDVALQAPALPMESDCDPGDQPESQQAPSSLQKLAEIIQDVPEEFLDPITLEIMPCPMLLPSGKVIDQSTLEKCNRSEATWGRVPSDPFTGVAFTPHSQPLPHPSLKARIDHFLLQHSIPGCHLLGRAQTALAVIPSSIVLPSQKRKIEQAEHVPDSNFGVNASCFSATSPLVLPTTSEHTAKKMKATNEPSLTHMDCSTGPLSHEQKLSQSLEIALASTLGSMPSFTARLTRGQLQHLGTRGSNTSWRPGTGSEQPGSILGPECASCKRVFSPYFKKEPVYQLPCGHLLCRPCLGEKQRSLPMTCTACQRPVASQDVLRVHF

SEQ ID NO: 95383 - protein, 487 aa, Homo sapiens
  Payload ID: 19012
  Gene Name: U-box domain containing 5
  Uniprot ID: O94941
  ENSP ID: ENSP00000311726
MVINLCLPQFRPRIHCNKISADGYEVENLISEDLTKRSHGFRTEYFIKPPVYVTVSFPFNVEICRINIDLTAGGGQNVTGLEMYTSASSSRVSWNTPQCRTLGPAEPSVPDKEAFTLVGKVLLKNQSQVVFSHRGFKARPPFGAMEATLPSPAVVAQELWNKGALSLSHVAHLRICITHVTGGGIPCIKRLEVWGQPAKTCSQEVIDSILLVTSENLPQDVALQAPALPMESDCDPGDQPESQQAPSSLQKLAEIIQDVPEEFLDPITLEIMPCPMLLPSGKVIDQSTLEKCNRSEATWGRVPSDPFTGVAFTPHSQPLPHPSLKARIDHFLLQHSIPGCHLLGRAQTALAVIPSSIVLPSQKRKIEQAEHVPDSNFGVNASCFSATSPLVLPTTSEHTAKKMKATNEPSLTHMDCSTEQPGSILGPECASCKRVFSPYFKKEPVYQLPCGHLLCRPCLGEKQRSLPMTCTACQRPVASQDVLRVHF

SEQ ID NO: 95384 - protein, 88 aa, Homo sapiens
  Payload ID: 19012
  Gene Name: U-box domain containing 5
  ENSP ID: ENSP00000404364
MVINLCLPQFRPRIHCNKISADGYEVENLISEDLTKRSHGFRTEYFIKPPVYVTVSFPFNVEICRINIDLTAGGGQNVTGLEMYTSAS

SEQ ID NO: 95385 - protein, 312 aa, Homo sapiens
  Payload ID: 19013
  Gene Name: UBX domain protein 1
  Uniprot ID: Q04323
  ENSP ID: ENSP00000294119
MAELTALESLIEMGFPRGRAEKALALTGNQGIEAAMDWLMEHEDDPDVDEPLETPLGHILGREPTSSEQGGLEGSGSAAGEGKPALSEEERQEQTKRMLELVAQKQREREEREEREALERERQRRRQGQELSAARQRLQEDEMRRAAEERRREKAEELAARQRVREKIERDKAERAKKYGGSVGSQPPPVAPEPGPVPSSPSQEPPTKREYDQCRIQVRLPDGTSLTQTFRAREQLAAVRLYVELHRGEELGGGQDPVQLLSGFPRRAFSEADMERPLQELGMAARLETRTRNWGSREACLGKGGMQREGAL

SEQ ID NO: 95386 - protein, 297 aa, Homo sapiens
  Payload ID: 19013
  Gene Name: UBX domain protein 1
  Uniprot ID: Q04323
  ENSP ID: ENSP00000303991
MAELTALESLIEMGFPRGRAEKALALTGNQGIEAAMDWLMEHEDDPDVDEPLETPLGHILGREPTSSEQGGLEGSGSAAGEGKPALSEEERQEQTKRMLELVAQKQREREEREEREALERERQRRRQGQELSAARQRLQEDEMRRAAEERRREKAEELAARQRVREKIERDKAERAKKYGGSVGSQPPPVAPEPGPVPSSPSQEPPTKREYDQCRIQVRLPDGTSLTQTFRAREQLAAVRLYVELHRGEELGGGQDPVQLLSGFPRRAFSEADMERPLQELGLVPSAVLIVAKKCPS

SEQ ID NO: 95387 - protein, 100 aa, Homo sapiens
  Payload ID: 19013
  Gene Name: UBX domain protein 1
  ENSP ID: ENSP00000432189
MRRAAEERRREKAEELAARQRVREKIERDKAERAKKYGGSVGSQPPPVAPEPGPVPSSPSQEPPTKREYDQCRIQDSCLLLFSLWPRNVPAEGLCPIVPL

SEQ ID NO: 95388 - protein, 290 aa, Homo sapiens
  Payload ID: 19013
  Gene Name: UBX domain protein 1
  ENSP ID: ENSP00000435625
MAELTALESLIEMGFPRGRAEKALALTGNQGIEAAMDWLMEHEDDPDVDEPLETPLGHILGREPTSSEQGGLEGSGSAAGEGKPALSEEERQEQTKRMLELVAQKQREREEREEREALERERQRRRQGQELSAARQRLQEDEMRRAAEERRREKAEELAARQRVREKIERDKAERAKKYGGSVGSQPPPVAPEPGPVPSSPSQEPPTKREYDQCRIQVRLPDGTSLTQTFRAREQLAAVRLYVELHRGEELGGGQDPVQLLSGFPRRAFSEADMERPLQELGLVPSAVLI

SEQ ID NO: 95389 - protein, 293 aa, Homo sapiens
  Payload ID: 19013
  Gene Name: UBX domain protein 1
  ENSP ID: ENSP00000435964
MAELTALESLIEMGFPRGRAEKALALTGNQGIEAAMDWLMEHEDDPDVDEPLETPLGHILGREPTSSEQGGLEGSGSAAGEGKPALSEEERQEQTKRMLELVAQKQREREEREEREALERERQRRRQGQELSAARQRLQEDEMRRAAEERRREKAEEQRVREKIERDKAERAKKYGGSVGSQPPPVAPEPGPVPSSPSQEPPTKREYDQCRIQVRLPDGTSLTQTFRAREQLAAVRLYVELHRGEELGGGQDPVQLLSGFPRRAFSEADMERPLQELGLVPSAVLIVAKKCPS

SEQ ID NO: 95390 - protein, 238 aa, Homo sapiens
  Payload ID: 19013
  Gene Name: UBX domain protein 1
  ENSP ID: ENSP00000478250
MAELTALESLIEMGFPRGRAEKALALTGNQGIEAAMDWMLELVAQKQREREEREEREALERERQRRRQGQELSAARQRLQEDEMRRAAEERRREKAEELAARQRVREKIERDKAERAKKYGGSVGSQPPPVAPEPGPVPSSPSQEPPTKREYDQCRIQVRLPDGTSLTQTFRAREQLAAVRLYVELHRGEELGGGQDPVQLLSGFPRRAFSEADMERPLQELGLVPSAVLIVAKKCPS

SEQ ID NO: 95391 - protein, 280 aa, Homo sapiens
  Payload ID: 19014
  Gene Name: UBX domain protein 10
  Uniprot ID: Q96LJ8
  ENSP ID: ENSP00000364240
MATEAPVNIAPPECSTVVSTAVDSLIWQPNSLNMHMIRPKSAKGRTRPSLQKSQGVEVCAHHIPSPPPAIPYELPSSQKPGACAPKSPNQGASDEIPELQQQVPTGASSSLNKYPVLPSINRKNLEEEAVETVAKKASSLQLSSIRALYQDETGTMKTSEEDSRARACAVERKFIVRTKKQGSSRAGNLEEPSDQEPRLLLAVRSPTGQRFVRHFRPTDDLQTIVAVAEQKNKTSYRHCSIETMEVPRRRFSDLTKSLQECRIPHKSVLGISLEDGEGWP

SEQ ID NO: 95392 - protein, 400 aa, Homo sapiens
  Payload ID: 19015
  Gene Name: UBX domain protein 11
  Uniprot ID: Q5T124
  ENSP ID: ENSP00000324721
MSSPLASLSKTRKVPLPSEPMNPGRRGIRIYGDEDEVDMLSDGCGSEEKISVPSCYGGIGAPVSRQGDSLAPPEVDFDRLLASLQDLSELVVEGDTQVTPVPGGARLRTLEPIPLKLYRNGIMMFDGPFQPFYDPSTQRCLRDILDGFFPSELQRLYPNGVPFKVSDLRNQVYLEDGLDPFPGEGRVVGRQLMHKALDRVEEHPGSRMTAEKFLNRLPKFVIRQGEVIDIRGPIRDTLQNCCPLPARIQEIVVETPTLAAERERSQESPNTPAPPLSMLRIKSENGEQAFLLMMQPDNTIGDVRALLAQARVMDASAFEIFSTFPPTLYQDDTLTLQAAGLVPKAALLLRARRAPKSSLKFSPGPCPGPGPGPSPGPGPGPSPGPGPGPSPCPGPSPSPQ

SEQ ID NO: 95393 - protein, 487 aa, Homo sapiens
  Payload ID: 19015
  Gene Name: UBX domain protein 11
  Uniprot ID: Q5T124
  ENSP ID: ENSP00000349601
MSSPLASLSKTRKVPLPSEPMNPGRRGIRIYGDVPASHDSELMAFMTRKLWDLEQQVKAQTDEILSKDQKIAALEDLVQTLRPHPAEATLQRQEELETMCVQLQRQVREMERFLSDYGLQWVGEPMDQEDSESKTVSEHGERDWMTAKKFWKPGDSLAPPEVDFDRLLASLQDLSELVVEGDTQVTPVPGGARLRTLEPIPLKLYRNGIMMFDGPFQPFYDPSTQRCLRDILDGFFPSELQRLYPNGVPFKVSDLRNQVYLEDGLDPFPGEGRVVGRQLMHKALDRVEEHPGSRMTAEKFLNRLPKFVIRQGEVIDIRGPIRDTLQNCCPLPARIQEIVVETPTLAAERERSQESPNTPAPPLSMLRIKSENGEQAFLLMMQPDNTIGDVRALLAQARVMDASAFEIFSTFPPTLYQDDTLTLQAAGLVPKAALLLRARRAPKSSLKFSPGPCPGPGPGPSPGPGPGPSPGPGPGPSPCPGPSPSPQ

SEQ ID NO: 95394 - protein, 247 aa, Homo sapiens
  Payload ID: 19015
  Gene Name: UBX domain protein 11
  ENSP ID: ENSP00000363332
MLSDGCGSEEKISVPSCYGGIGAPVSRQVPASHDSELMAFMTRKLWDLEQQVKAQTDEILSKDQKIAALEDLVQTLRPHPAEATLQRQEELETMCVQLQRQVREMERFLSDYGLQWVGEPMDQEDSESKTVSEHGERDWMTAKKFWKPGDSLAPPEVDFDRLLASLQDLSELVVEGDTQVTPVPGGARLRTLEPIPLKLYRNGIMMFDGPFQPFYDPSTQRCLRDILDGFFPSELQRLYPNGVPFKV

SEQ ID NO: 95395 - protein, 487 aa, Homo sapiens; identical to SEQ ID NO: 95393
  Payload ID: 19015
  Gene Name: UBX domain protein 11
  Uniprot ID: Q5T124
  ENSP ID: ENSP00000363334

SEQ ID NO: 95396 - protein, 520 aa, Homo sapiens
  Payload ID: 19015
  Gene Name: UBX domain protein 11
  Uniprot ID: Q5T124
  ENSP ID: ENSP00000363338
MSSPLASLSKTRKVPLPSEPMNPGRRGIRIYGDEDEVDMLSDGCGSEEKISVPSCYGGIGAPVSRQVPASHDSELMAFMTRKLWDLEQQVKAQTDEILSKDQKIAALEDLVQTLRPHPAEATLQRQEELETMCVQLQRQVREMERFLSDYGLQWVGEPMDQEDSESKTVSEHGERDWMTAKKFWKPGDSLAPPEVDFDRLLASLQDLSELVVEGDTQVTPVPGGARLRTLEPIPLKLYRNGIMMFDGPFQPFYDPSTQRCLRDILDGFFPSELQRLYPNGVPFKVSDLRNQVYLEDGLDPFPGEGRVVGRQLMHKALDRVEEHPGSRMTAEKFLNRLPKFVIRQGEVIDIRGPIRDTLQNCCPLPARIQEIVVETPTLAAERERSQESPNTPAPPLSMLRIKSENGEQAFLLMMQPDNTIGDVRALLAQARVMDASAFEIFSTFPPTLYQDDTLTLQAAGLVPKAALLLRARRAPKSSLKFSPGPCPGPGPGPSPGPGPGPSPGPGPGPSPCPGPSPSPQ

SEQ ID NO: 95397 - protein, 520 aa, Homo sapiens; identical to SEQ ID NO: 95396
  Payload ID: 19015
  Gene Name: UBX domain protein 11
  Uniprot ID: Q5T124
  ENSP ID: ENSP00000363339

SEQ ID NO: 95398 - protein, 277 aa, Homo sapiens
  Payload ID: 19015
  Gene Name: UBX domain protein 11
  ENSP ID: ENSP00000363340
MFDGPFQPFYDPSTQRCLRDILDGFFPSELQRLYPNGVPFKVSDLRNQVYLEDGLDPFPGEGRVVGRQLMHKALDRVEEHPGSRMTAEKFLNRLPKFVIRQGEVIDIRGPIRDTLQNCCPLPARIQEIVVETPTLAAERERSQESPNTPAPPLSMLRIKSENGEQAFLLMMQPDNTIGDVRALLAQARVMDASAFEIFSTFPPTLYQDDTLTLQAAGLVPKAALLLRARRAPKSSLKFSPGPCPGPGPGPSPGPGPGPSPGPGPGPSPCPGPSPSPQ

SEQ ID NO: 95399 - protein, 148 aa, Homo sapiens
  Payload ID: 19015
  Gene Name: UBX domain protein 11
  ENSP ID: ENSP00000394036
MLSDGCGSEEKISVPSCYGGIGAPVSRQVPASHDSELMAFMTRKLWDLEQQVKAQTDEILSKDQKIAALEDLVQTLRPHPAEATLQRQEELETMCVQLQRQVREMERFLSDYGLQWVGEPMDQEDSESKTVSEHGERDWMTAKKFWKP

SEQ ID NO: 95400 - protein, 134 aa, Homo sapiens
  Payload ID: 19015
  Gene Name: UBX domain protein 11
  ENSP ID: ENSP00000395165
MSSPLASLSKTRKVPLPSEPMNPGRRGIRIYGDEDEVDMLSDGCGSEEKISVPSCYGGIGAPVSRQVPASHDSELMAFMTRKLWDLEQQVKAQTDEILSKDQKIAALEDLVQTLRPHPAEATLQRQEELETMCV

SEQ ID NO: 95401 - protein, 185 aa, Homo sapiens
  Payload ID: 19015
  Gene Name: UBX domain protein 11
  ENSP ID: ENSP00000404956
MSSPLASLSKTRKVPLPSEPMNPGRRGIRIYGDVPASHDSELMAFMTRKLWDLEQQVKAQTDEILSKDQKIAALEDLVQTLRPHPAEATLQRQEELETMCVQLQRQVREMERFLSDYGLQWVGEPMDQEDSESKTVSEHGERDWMTAKKFWKPGDSLAPPEVDFDRLLASLQDLSELVVEGDTQV

SEQ ID NO: 95402 - protein, 207 aa, Homo sapiens
  Payload ID: 19015
  Gene Name: UBX domain protein 11
  ENSP ID: ENSP00000410357
MSSPLASLSKTRKVPLPSEPMNPGRRGIRIYGDVPASHDSELMAFMTRKLWDLEQQVKAQTDEILSKDQKIAALEDLVQTLRPHPAEATLQRQEELETMCVQLQRQVREMERFLSDYGLQWVGEPMDQEDSESKTVSEHGERDWMTAKKFWKPGDSLAPPEVDFDRLLASLQDLSELVVEGDTQVTPVPGGARLRTLEPIPLKLYRN

SEQ ID NO: 95403 - protein, 115 aa, Homo sapiens
  Payload ID: 19015
  Gene Name: UBX domain protein 11
  ENSP ID: ENSP00000413448
MAFMTRKLWDLEQQVKAQTDEILSKDQKIAALEDLVQTLRPHPAEATLQRQEELETMCVQLQRQVREMERFLSDYGLQWVGEPMDQEDSESKTVSEHGERDWMTAKKFWKPGRAG

SEQ ID NO: 95404 - protein, 259 aa, Homo sapiens
  Payload ID: 19016
  Gene Name: UBX domain protein 2A
  Uniprot ID: P68543
  ENSP ID: ENSP00000312107
MKDVDNLKSIKEEWVCETGSDNQPLGNNQQSNCEYFVDSLFEEAQKVSSKCVSPAEQKKQVDVNIKLWKNGFTVNDDFRSYSDGASQQFLNSIKKGELPSELQGIFDKEEVDVKVEDKKNEICLSTKPVFQPFSGQGHRLGSATPKIVSKAKNIEVENKNNLSAVPLNNLEPITNIQIWLANGKRIVQKFNITHRVSHIKDFIEKYQGSQRSPPFSLATALPVLRLLDETLTLEEADLQNAVIIQRLQKTASFRELSEH

SEQ ID NO: 95405 - protein, 259 aa, Homo sapiens; identical to SEQ ID NO: 95404
  Payload ID: 19016
  Gene Name: UBX domain protein 2A
  Uniprot ID: P68543
  ENSP ID: ENSP00000385525

SEQ ID NO: 95406 - protein, 206 aa, Homo sapiens
  Payload ID: 19016
  Gene Name: UBX domain protein 2A
  Uniprot ID: P68543
  ENSP ID: ENSP00000440533
MKDVDNLKSIKEEWVCETGSDNQPLGNNQQSNCEYFVDSLFEEAQKVSSKCVSPAEQKKQVDVNIKLWKNGFTVNDDFRSYSDGASQQFLNSIKKGELPSELQGIFDKEEVDVKVEDKKNEICLSTKPVFQPFSGQGHRLGRVSHIKDFIEKYQGSQRSPPFSLATALPVLRLLDETLTLEEADLQNAVIIQRLQKTASFRELSEH

SEQ ID NO: 95407 - protein, 331 aa, Homo sapiens
  Payload ID: 19017
  Gene Name: UBX domain protein 2B
  Uniprot ID: Q14CS0
  ENSP ID: ENSP00000382507
MAEGGGPEPGEQERRSSGPRPPSARDLQLALAELYEDEVKCKSSKSNRPKATVFKSPRTPPQRFYSSEHEYSGLNIVRPSTGKIVNELFKEAREHGAVPLNEATRASGDDKSKSFTGGGYRLGSSFCKRSEYIYGENQLQDVQILLKLWSNGFSLDDGELRPYNEPTNAQFLESVKRGEIPLELQRLVHGGQVNLDMEDHQDQEYIKPRLRFKAFSGEGQKLGSLTPEIVSTPSSPEEEDKSILNAVVLIDDSVPTTKIQIRLADGSRLIQRFNSTHRILDVRNFIVQSRPEFAALDFILVTSFPNKELTDESLTLLEADILNTVLLQQLK

SEQ ID NO: 95408 - protein, 104 aa, Homo sapiens
  Payload ID: 19017
  Gene Name: UBX domain protein 2B
  ENSP ID: ENSP00000427759
MAEGGGPEPGEQERRSSGPRPPSARDLQLALAELYEDEVKCKSSKSNRPKATVFKSPRTPPQRHLQVEDTDWVVLFVSGLNISMEKISCKMFRFCLNCGAMVSV

SEQ ID NO: 95409 - protein, 142 aa, Homo sapiens
  Payload ID: 19017
  Gene Name: UBX domain protein 2B
  ENSP ID: ENSP00000428241
  MOD_RES (1)..(1): Any amino acid
XSPRTPPQRFYSSEHEYSGLNIVRPSTGKIVNELFKEAREHGAVPLNEATRASGDDKSKSFTGGGYRLGSSFCKRSEYIYGENQLQDVQILLKLWSNGFSLDDGELRPYNEPTNAQFLESVKRGVTLIACMPEIQQLMLEIF

SEQ ID NO: 95410 - protein, 196 aa, Homo sapiens
  Payload ID: 19017
  Gene Name: UBX domain protein 2B
  ENSP ID: ENSP00000428314
MAEGGGPEPGEQERRSSGPRPPSARDLQLALAELYEDEVKCKSSKSNRPKATVFKSPRTPPQRFYSSEHEYSGLNIVRPSTGKIVNELFKEAREHGAVPLNEATRASGDDKSKSFTGGGYRLGSSFCKRSEYIYGENQLQDVQILLKLWSNGFSLDDGELRPYNEPTNAQFLESVKRGVTLIACMPEIQQLMLEIF

SEQ ID NO: 95411 - protein, 508 aa, Homo sapiens
  Payload ID: 19018
  Gene Name: UBX domain protein 4
  Uniprot ID: Q92575
  ENSP ID: ENSP00000272638
MLWFQGAIPAAIATAKRSGAVFVVFVAGDDEQSTQMAASWEDDKVTEASSNSFVAIKIDTKSEACLQFSQIYPVVCVPSSFFIGDSGIPLEVIAGSVSADELVTRIHKVRQMHLLKSETSVANGSQSESSVSTPSASFEPNNTCENSQSRNAELCEIPPTSDTKSDTATGGESAGHATSSQEPSGCSDQRPAEDLNIRVERLTKKLEERREEKRKEEEQREIKKEIERRKTGKEMLDYKRKQEEELTKRMLEERNREKAEDRAARERIKQQIALDRAERAARFAKTKEEVEAAKAAALLAKQAEMEVKRESYARERSTVARIQFRLPDGSSFTNQFPSDAPLEEARQFAAQTVGNTYGNFSLATMFPRREFTKEDYKKKLLDLELAPSASVVLLPAGRPTASIVHSSSGDIWTLLGTVLYPFLAIWRLISNFLFSNPPPTQTSVRVTSSEPPNPASSSKSEKREPVRKRVLEKRGDDFKKEGKIYRLRTQDDGEDENNTWNGNSTQQM

SEQ ID NO: 95412 - protein, 95 aa, Homo sapiens
  Payload ID: 19018
  Gene Name: UBX domain protein 4
  ENSP ID: ENSP00000391586
MLWFQGAIPAAIATAKRSGAVFVVFVAGDDEQSTQMAASWEDDKVTEASSNSFVAIKIDTKSEACLQFSQICILSVKNGLYIYIYLPSFWLIYEI

SEQ ID NO: 95413 - protein, 117 aa, Homo sapiens
  Payload ID: 19018
  Gene Name: UBX domain protein 4
  ENSP ID: ENSP00000401748
MLWFQGAIPAAIATAKRSGAVFVVFVADGLTVSPRLECSGAISAHCNFHLPSASNSPASASYVGDDEQSTQMAASWEDDKVTEASSNSFVAIKIDTKSEACLQFSQIYPVVCVPSSF

SEQ ID NO: 95414 - protein, 65 aa, Homo sapiens
  Payload ID: 19018
  Gene Name: UBX domain protein 4
  ENSP ID: ENSP00000410516
MLWFQGAIPAAIATAKRSGAVFVVFVAGDDEQSTQMAASWEDDKVTEASSNSFVAIKIDTKRCIC

SEQ ID NO: 95415 - protein, 441 aa, Homo sapiens
  Payload ID: 19019
  Gene Name: UBX domain protein 6
  Uniprot ID: Q9BZV1
  ENSP ID: ENSP00000301281
MKKFFQEFKADIKFKSAGPGQKLKESVGEKAHKEKPNQPAPRPPRQGPTNEAQMAAAAALARLEQKQSRAWGPTSQDTIRNQVRKELQAEATVSGSPEAPGTNVVSEPREEGSAHLAVPGVYFTCPLTGATLRKDQRDACIKEAILLHFSTDPVAASIMKIYTFNKDQDRVKLGVDTIAKYLDNIHLHPEEEKYRKIKLQNKVFQERINCLEGTHEFFEAIGFQKVLLPAQDQEDPEEFYVLSETTLAQPQSLERHKEQLLAAEPVRAKLDRQRRVFQPSPLASQFELPGDFFNLTAEEIKREQRLRSEAVERLSVLRTKAMREKEEQRGLRKYNYTLLRVRLPDGCLLQGTFYARERLGAVYGFVREALQSDWLPFELLASGGQKLSEDENLALNECGLVPSALLTFSWDMAVLEDIKAAGAEPDSILKPELLSAIEKLL

SEQ ID NO: 95416 - protein, 388 aa, Homo sapiens
  Payload ID: 19019
  Gene Name: UBX domain protein 6
  Uniprot ID: Q9BZV1
  ENSP ID: ENSP00000378246
MAAAAALARLEQKQSRAWGPTSQDTIRNQVRKELQAEATVSGSPEAPGTNVVSEPREEGSAHLAVPGVYFTCPLTGATLRKDQRDACIKEAILLHFSTDPVAASIMKIYTFNKDQDRVKLGVDTIAKYLDNIHLHPEEEKYRKIKLQNKVFQERINCLEGTHEFFEAIGFQKVLLPAQDQEDPEEFYVLSETTLAQPQSLERHKEQLLAAEPVRAKLDRQRRVFQPSPLASQFELPGDFFNLTAEEIKREQRLRSEAVERLSVLRTKAMREKEEQRGLRKYNYTLLRVRLPDGCLLQGTFYARERLGAVYGFVREALQSDWLPFELLASGGQKLSEDENLALNECGLVPSALLTFSWDMAVLEDIKAAGAEPDSILKPELLSAIEKLL

SEQ ID NO: 95417 - protein, 129 aa, Homo sapiens
  Payload ID: 19019
  Gene Name: UBX domain protein 6
  ENSP ID: ENSP00000464967
MRPGEKAHKEKPNQPAPRPPRQGPTNEAQMAAAAALARLEQKQSRAWGPTSQDTIRNQVRKELQAEATVSGSPEAPGTNVVSEPREEGSAHLAVPGVYFTCPLTGATLRKDQRDACIKEAILLHFSTDP

SEQ ID NO: 95418 - protein, 67 aa, Homo sapiens
  Payload ID: 19019
  Gene Name: UBX domain protein 6
  ENSP ID: ENSP00000466148
  MOD_RES (1)..(1): Any amino acid
XAKLDRQRRVFQPSPLASQFELPGDFFNLTAEEIKREQRLRHFLRSGAAGGGVRVRPGGPAERLAAF

SEQ ID NO: 95419 - protein, 371 aa, Homo sapiens
  Payload ID: 19019
  Gene Name: UBX domain protein 6
  ENSP ID: ENSP00000467206
  MOD_RES (1)..(1): Any amino acid
XEKAHKEKPNQPAPRPPRQGPTNEAQMAAAAALARLEQKQSRAWGPTSQDTIRNQVRKELQAEATVSGSPEAPGTNVHFSTDPVAASIMKIYTFNKDQDRVKLGVDTIAKYLDNIHLHPEEEKYRKIKLQNKVFQERINCLEGTHEFFEAIGFQKVLLPAQDQEDPEEFYVLSETTLAQPQSLERHKEQLLAAEPVRAKLDRQRRVFQPSPLASQFELPGDFFNLTAEEIKREQRLRSEAVERLSVLRTKAMREKEEQRGLRKYNYTLLRVRLPDGCLLQGTFYARERLGAVYGFVREALQSDWLPFELLASGGQKLSEDENLALNECGLVPSALLTFSWDMAVLEDIKAAGAEPDSILKPELLSAIEKLL

SEQ ID NO: 95420 - protein, 489 aa, Homo sapiens
  Payload ID: 19020
  Gene Name: UBX domain protein 7
  Uniprot ID: O94888
  ENSP ID: ENSP00000296328
MAAHGGSAASSALKGLIQQFTTITGASESVGKHMLEACNNNLEMAVTMFLDGGGIAEEPSTSSASVSTVRPHTEEEVRAPIPQKQEILVEPEPLFGAPKRRRPARSIFDGFRDFQTETIRQEQELRNGGAIDKKLTTLADLFRPPIDLMHKGSFETAKECGQMQNKWLMINIQNVQDFACQCLNRDVWSNEAVKNIIREHFIFWQVYHDSEEGQRYIQFYKLGDFPYVSILDPRTGQKLVEWHQLDVSSFLDQVTGFLGEHGQLDGLSSSPPKKCARSESLIDASEDSQLEAAIRASLQETHFDSTQTKQDSRSDEESESELFSGSEEFISVCGSDEEEEVENLAKSRKSPHKDLGHRKEENRRPLTEPPVRTDPGTATNHQGLPAVDSEILEMPPEKADGVVEGIDVNGPKAQLMLRYPDGKREQITLPEQAKLLALVKHVQSKGYPNERFELLTNFPRRKLSHLDYDITLQEAGLCPQETVFVQERN

SEQ ID NO: 95421 - protein, 125 aa, Homo sapiens
  Payload ID: 19020
  Gene Name: UBX domain protein 7
  ENSP ID: ENSP00000371311
  MOD_RES (1)..(1): Any amino acid
XAAHGGSAASSALKGLIQQFTTITGASESVGKHMLEACNNNLEMAVTMFLDGGGIAEEPSTSSASVSTVRPHTEEEVRAPIPQKQEILVEPEPLFGVRQEQELRNGGAIDKKLTTLADLFRPPID

SEQ ID NO: 95422 - protein, 75 aa, Homo sapiens
  Payload ID: 19020
  Gene Name: UBX domain protein 7
  ENSP ID: ENSP00000397238
MAAHGGSAASSALKGLIQQFTTITEKKFVPQFLKSRKYWWNQNHYLVLLKDDGLHVQFLMVSGIFRLKLFGKNKN

SEQ ID NO: 95423 - protein, 327 aa, Homo sapiens
  Payload ID: 19020
  Gene Name: UBX domain protein 7
  ENSP ID: ENSP00000397256
MQNKWLMINIQNVQDFACQCLNRDVWSNEAVKNIIREHFIFWQVYHDSEEGQRYIQFYKLGDFPYVSILDPRTGQKLVEWHQLDVSSFLDQVTGFLGEHGQLDGLSSSPPKKCARSESLIDASEDSQLEAAIRASLQETHFDSTQTKQDSRSDEESESELFSGSEEFISVCGSDEEEEVENLAKSRKSPHKDLGHRKEENRRPLTEPPVRTDPGTATNHQGLPAVDSEILEMPPEKADGVVEGIDVNGPKAQLMLRYPDGKREQITLPEQAKLLALVKHVQSKGYPNERFELLTNFPRRKLSHLDYDITLQEAGLCPQETVFVQERN

SEQ ID NO: 95424 - protein, 76 aa, Homo sapiens
  Payload ID: 19020
  Gene Name: UBX domain protein 7
  ENSP ID: ENSP00000404778
MLEACNNNLEMAVTMFLDGGGIAEEPSTSSASVSTVRPHTEEEVRAPIPQKQEILVEPEPLFGAPKRRRPARSIFD

SEQ ID NO: 95425 - protein, 310 aa, Homo sapiens
  Payload ID: 19021
  Gene Name: UBX domain protein 8
  ENSP ID: ENSP00000477532
MLYSGTWRTVGIRCPRKKAQICQQQECCIERPPLRLRGFGAALTTTPRLHRPCPPTSGADFTSRNLFPPGIKDFLLLCGRILLLLALLTLTISVTTSWLNSFKSPQVYLKEEEEKNEKRQKLVRKKQQEAQGEKASRYIENVLKPHQEMKLRKLEERFYQMTGEAWKLSSGHKLGGDEGTSQTSFETSNREAAKSQNLPKPLTEFPSPAEQPTCKEIPDLPEEPSQTAEEVVTVALRCPSGNVLRRRFLKSYSSQVLFDWMTRIGYHISLYSLSTSFPRRPLAVEGGQSLEDIGITVDTVLILEEKEQTN

SEQ ID NO: 95426 - protein, 229 aa, Homo sapiens
  Payload ID: 19021
  Gene Name: UBX domain protein 8
  ENSP ID: ENSP00000478502
MASRGVVGIFFLSAVPLVCLELRRGIPDIGIKDFLLLCGRILLLLALLTLTISVTTSWLNSFKSPQVYLKEEEEKNEKRQKLVRKKQQEAQGEKGDEGTSQTSFETSNREAAKSQNLPKPLTEFPSPAEQPTCKEIPDLPEEPSQTAEEVVTVALRCPSGNVLRRRFLKSYSSQVLFDWMTRIGYHISLYSLSTSFPRRPLAVEGGQSLEDIGITVDTVLILEEKEQTN

SEQ ID NO: 95427 - protein, 270 aa, Homo sapiens
  Payload ID: 19021
  Gene Name: UBX domain protein 8
  ENSP ID: ENSP00000479216
MASRGVVGIFFLSAVPLVCLELRRGIPDIGIKDFLLLCGRILLLLALLTLTISVTTSWLNSFKSPQVYLKEEEEKNEKRQKLVRKKQQEAQGEKASRYIENVLKPHQEMKLRKLEERFYQMTGEAWKLSSGHKLGGDEGTSQTSFETSNREAAKSQNLPKPLTEFPSPAEQPTCKEIPDLPEEPSQTAEEVVTVALRCPSGNVLRRRFLKSYSSQVLFDWMTRIGYHISLYSLSTSFPRRPLAVEGGQSLEDIGITVDTVLILEEKEQTN

SEQ ID NO: 95428 - protein, 94 aa, Homo sapiens
  Payload ID: 19021
  Gene Name: UBX domain protein 8
  ENSP ID: ENSP00000480065
  MOD_RES (1)..(1): Any amino acid
XIKDFLLLCGRILLLLALLTLTISVTTSWLNSFKSPQVYLKEEEEKNEKRQKLVRKKQQEAQGEKASRYIENVLKPHQEMKLRKLEERFYQMTG

SEQ ID NO: 95429 - protein, 233 aa, Homo sapiens
  Payload ID: 19021
  Gene Name: UBX domain protein 8
  Uniprot ID: O00124
  ENSP ID: ENSP00000481635
MASRGVVGIFFLSAVPLVCLELRRGIPDIVYLKEEEEKNEKRQKLVRKKQQEAQGEKASRYIENVLKPHQEMKLRKLEERFYQMTGEAWKLSSGHKLGGDEGTSQTSFETSNREAAKSQNLPKPLTEFPSPAEQPTCKEIPDLPEEPSQTAEEVVTVALRCPSGNVLRRRFLKSYSSQVLFDWMTRIGYHISLYSLSTSFPRRPLAVEGGQSLEDIGITVDTVLILEEKEQTN

SEQ ID NO: 95430 - protein, 42 aa, Homo sapiens
  Payload ID: 19021
  Gene Name: UBX domain protein 8
  ENSP ID: ENSP00000482772
MASRGVVGIFFLSAVPLVCLELRRGIPDIGKCDFFPSTVTAG

SEQ ID NO: 95431 - protein, 248 aa, Homo sapiens
  Payload ID: 19021
  Gene Name: UBX domain protein 8
  ENSP ID: ENSP00000483433
MCQREKRWQLGVLTQTVGPWPRPVAYLSKQLDGVFKGWPPCLRALAATALLVQEADKLTLGQNRNIKAPHAVVTLMNTKGHHWLMSARLTKYQSLLCENPRITIEVCNTLNPATLFPVSESPVEHDCVEVLDSVYSSRPDLRDQPWASVDWELYVDGSSFINPQGERFAGYAVVTLDTVVEARSLPQGTSAQKAELIALIRALELSEGIKDFLLLCGRILLLLALLTLTISVTTSWLNSFKSPQVYLK

SEQ ID NO: 95432 - protein, 533 aa, Homo sapiens
  Payload ID: 19022
  Gene Name: UDP glucuronosyltransferase 1 family, polypeptide A1
  Uniprot ID: P22309
  ENSP ID: ENSP00000304845
MAVESQGGRPLVLGLLLCVLGPVVSHAGKILLIPVDGSHWLSMLGAIQQLQQRGHEIVVLAPDASLYIRDGAFYTLKTYPVPFQREDVKESFVSLGHNVFENDSFLQRVIKTYKKIKKDSAMLLSGCSHLLHNKELMASLAESSFDVMLTDPFLPCSPIVAQYLSLPTVFFLHALPCSLEFEATQCPNPFSYVPRPLSSHSDHMTFLQRVKNMLIAFSQNFLCDVVYSPYATLASEFLQREVTVQDLLSSASVWLFRSDFVKDYPRPIMPNMVFVGGINCLHQNPLSQEFEAYINASGEHGIVVFSLGSMVSEIPEKKAMAIADALGKIPQTVLWRYTGTRPSNLANNTILVKWLPQNDLLGHPMTRAFITHAGSHGVYESICNGVPMVMMPLFGDQMDNAKRMETKGAGVTLNVLEMTSEDLENALKAVINDKSYKENIMRLSSLHKDRPVEPLDLAVFWVEFVMRHKGAPHLRPAAHDLTWYQYHSLDVIGFLLAVVLTVAFITFKCCAYGYRKCLGKKGRVKKAHKSKTH

SEQ ID NO: 95433 - protein, 444 aa, Homo sapiens
  Payload ID: 19022
  Gene Name: UDP glucuronosyltransferase 1 family, polypeptide A1
  Uniprot ID: P22309
  ENSP ID: ENSP00000353593
MAVESQGGRPLVLGLLLCVLGPVVSHAGKILLIPVDGSHWLSMLGAIQQLQQRGHEIVVLAPDASLYIRDGAFYTLKTYPVPFQREDVKESFVSLGHNVFENDSFLQRVIKTYKKIKKDSAMLLSGCSHLLHNKELMASLAESSFDVMLTDPFLPCSPIVAQYLSLPTVFFLHALPCSLEFEATQCPNPFSYVPRPLSSHSDHMTFLQRVKNMLIAFSQNFLCDVVYSPYATLASEFLQREVTVQDLLSSASVWLFRSDFVKDYPRPIMPNMVFVGGINCLHQNPLSQEFEAYINASGEHGIVVFSLGSMVSEIPEKKAMAIADALGKIPQTVLWRYTGTRPSNLANNTILVKWLPQNDLLGHPMTRAFITHAGSHGVYESICNGVPMVMMPLFGDQMDNAKRMETKGAGVTLNVLEMTSEDLENALKAVINDKRKKQQSGRQM

SEQ ID NO: 95434 - protein, 530 aa, Homo sapiens
  Payload ID: 19023
  Gene Name: UDP glucuronosyltransferase 1 family, polypeptide A10
  Uniprot ID: Q9HAW8
  ENSP ID: ENSP00000343838
MARAGWTSPVPLCVCLLLTCGFAEAGKLLVVPMDGSHWFTMQSVVEKLILRGHEVVVVMPEVSWQLERSLNCTVKTYSTSYTLEDQNREFMVFAHAQWKAQAQSIFSLLMSSSSGFLDLFFSHCRSLFNDRKLVEYLKESSFDAVFLDPFDTCGLIVAKYFSLPSVVFTRGIFCHHLEEGAQCPAPLSYVPNDLLGFSDAMTFKERVWNHIVHLEDHLFCQYLFRNALEIASEILQTPVTAYDLYSHTSIWLLRTDFVLDYPKPVMPNMIFIGGINCHQGKPLPMEFEAYINASGEHGIVVFSLGSMVSEIPEKKAMAIADALGKIPQTVLWRYTGTRPSNLANNTILVKWLPQNDLLGHPMTRAFITHAGSHGVYESICNGVPMVMMPLFGDQMDNAKRMETKGAGVTLNVLEMTSEDLENALKAVINDKSYKENIMRLSSLHKDRPVEPLDLAVFWVEFVMRHKGAPHLRPAAHDLTWYQYHSLDVIGFLLAVVLTVAFITFKCCAYGYRKCLGKKGRVKKAHKSKTH

SEQ ID NO: 95435 - protein, 441 aa, Homo sapiens
  Payload ID: 19023
  Gene Name: UDP glucuronosyltransferase 1 family, polypeptide A10
  Uniprot ID: Q9HAW8
  ENSP ID: ENSP00000362544
MARAGWTSPVPLCVCLLLTCGFAEAGKLLVVPMDGSHWFTMQSVVEKLILRGHEVVVVMPEVSWQLERSLNCTVKTYSTSYTLEDQNREFMVFAHAQWKAQAQSIFSLLMSSSSGFLDLFFSHCRSLFNDRKLVEYLKESSFDAVFLDPFDTCGLIVAKYFSLPSVVFTRGIFCHHLEEGAQCPAPLSYVPNDLLGFSDAMTFKERVWNHIVHLEDHLFCQYLFRNALEIASEILQTPVTAYDLYSHTSIWLLRTDFVLDYPKPVMPNMIFIGGINCHQGKPLPMEFEAYINASGEHGIVVFSLGSMVSEIPEKKAMAIADALGKIPQTVLWRYTGTRPSNLANNTILVKWLPQNDLLGHPMTRAFITHAGSHGVYESICNGVPMVMMPLFGDQMDNAKRMETKGAGVTLNVLEMTSEDLENALKAVINDKRKKQQSGRQM

SEQ ID NO: 95436 - protein, 534 aa, Homo sapiens
  Payload ID: 19024
  Gene Name: UDP glucuronosyltransferase 1 family, polypeptide A3
  Uniprot ID: P35503
  ENSP ID: ENSP00000418532
MATGLQVPLPWLATGLLLLLSVQPWAESGKVLVVPIDGSHWLSMREVLRELHARGHQAVVLTPEVNMHIKEENFFTLTTYAISWTQDEFDRHVLGHTQLYFETEHFLKKFFRSMAMLNNMSLVYHRSCVELLHNEALIRHLNATSFDVVLTDPVNLCAAVLAKYLSIPTVFFLRNIPCDLDFKGTQCPNPSSYIPRLLTTNSDHMTFMQRVKNMLYPLALSYICHAFSAPYASLASELFQREVSVVDILSHASVWLFRGDFVMDYPRPIMPNMVFIGGINCANRKPLSQEFEAYINASGEHGIVVFSLGSMVSEIPEKKAMAIADALGKIPQTVLWRYTGTRPSNLANNTILVKWLPQNDLLGHPMTRAFITHAGSHGVYESICNGVPMVMMPLFGDQMDNAKRMETKGAGVTLNVLEMTSEDLENALKAVINDKSYKENIMRLSSLHKDRPVEPLDLAVFWVEFVMRHKGAPHLRPAAHDLTWYQYHSLDVIGFLLAVVLTVAFITFKCCAYGYRKCLGKKGRVKKAHKSKTH

SEQ ID NO: 95437 - protein, 534 aa, Homo sapiens
  Payload ID: 19025
  Gene Name: UDP glucuronosyltransferase 1 family, polypeptide A4
  Uniprot ID: P22310
  ENSP ID: ENSP00000362508
MARGLQVPLPRLATGLLLLLSVQPWAESGKVLVVPTDGSPWLSMREALRELHARGHQAVVLTPEVNMHIKEEKFFTLTAYAVPWTQKEFDRVTLGYTQGFFETEHLLKRYSRSMAIMNNVSLALHRCCVELLHNEALIRHLNATSFDVVLTDPVNLCGAVLAKYLSIPAVFFWRYIPCDLDFKGTQCPNPSSYIPKLLTTNSDHMTFLQRVKNMLYPLALSYICHTFSAPYASLASELFQREVSVVDLVSYASVWLFRGDFVMDYPRPIMPNMVFIGGINCANGKPLSQEFEAYINASGEHGIVVFSLGSMVSEIPEKKAMAIADALGKIPQTVLWRYTGTRPSNLANNTILVKWLPQNDLLGHPMTRAFITHAGSHGVYESICNGVPMVMMPLFGDQMDNAKRMETKGAGVTLNVLEMTSEDLENALKAVINDKSYKENIMRLSSLHKDRPVEPLDLAVFWVEFVMRHKGAPHLRPAAHDLTWYQYHSLDVIGFLLAVVLTVAFITFKCCAYGYRKCLGKKGRVKKAHKSKTH

SEQ ID NO: 95438 - protein, 445 aa, Homo sapiens
  Payload ID: 19025
  Gene Name: UDP glucuronosyltransferase 1 family, polypeptide A4
  Uniprot ID: P22310
  ENSP ID: ENSP00000408608
MARGLQVPLPRLATGLLLLLSVQPWAESGKVLVVPTDGSPWLSMREALRELHARGHQAVVLTPEVNMHIKEEKFFTLTAYAVPWTQKEFDRVTLGYTQGFFETEHLLKRYSRSMAIMNNVSLALHRCCVELLHNEALIRHLNATSFDVVLTDPVNLCGAVLAKYLSIPAVFFWRYIPCDLDFKGTQCPNPSSYIPKLLTTNSDHMTFLQRVKNMLYPLALSYICHTFSAPYASLASELFQREVSVVDLVSYASVWLFRGDFVMDYPRPIMPNMVFIGGINCANGKPLSQEFEAYINASGEHGIVVFSLGSMVSEIPEKKAMAIADALGKIPQTVLWRYTGTRPSNLANNTILVKWLPQNDLLGHPMTRAFITHAGSHGVYESICNGVPMVMMPLFGDQMDNAKRMETKGAGVTLNVLEMTSEDLENALKAVINDKRKKQQSGRQM

SEQ ID NO: 95439 - protein, 534 aa, Homo sapiens
  Payload ID: 19026
  Gene Name: UDP glucuronosyltransferase 1 family, polypeptide A5
  Uniprot ID: P35504
  ENSP ID: ENSP00000362513
MATGLQVPLPQLATGLLLLLSVQPWAESGKVLVVPTDGSHWLSMREALRDLHARGHQVVVLTLEVNMYIKEENFFTLTTYAISWTQDEFDRLLLGHTQSFFETEHLLMKFSRRMAIMNNMSLIIHRSCVELLHNEALIRHLHATSFDVVLTDPFHLCAAVLAKYLSIPAVFFLRNIPCDLDFKGTQCPNPSSYIPRLLTTNSDHMTFLQRVKNMLYPLALSYLCHAVSAPYASLASELFQREVSVVDLVSHASVWLFRGDFVMDYPRPIMPNMVFIGGINCANGKPLSQEFEAYINASGEHGIVVFSLGSMVSEIPEKKAMAIADALGKIPQTVLWRYTGTRPSNLANNTILVKWLPQNDLLGHPMTRAFITHAGSHGVYESICNGVPMVMMPLFGDQMDNAKRMETKGAGVTLNVLEMTSEDLENALKAVINDKSYKENIMRLSSLHKDRPVEPLDLAVFWVEFVMRHKGAPHLRPAAHDLTWYQYHSLDVIGFLLAVVLTVAFITFKCCAYGYRKCLGKKGRVKKAHKSKTH

SEQ ID NO: 95440 - protein, 532 aa, Homo sapiens
  Payload ID: 19027
  Gene Name: UDP glucuronosyltransferase 1 family, polypeptide A6
  Uniprot ID: P19224
  ENSP ID: ENSP00000303174
MACLLRSFQRISAGVFFLALWGMVVGDKLLVVPQDGSHWLSMKDIVEVLSDRGHEIVVVVPEVNLLLKESKYYTRKIYPVPYDQEELKNRYQSFGNNHFAERSFLTAPQTEYRNNMIVIGLYFINCQSLLQDRDTLNFFKESKFDALFTDPALPCGVILAEYLGLPSVYLFRGFPCSLEHTFSRSPDPVSYIPRCYTKFSDHMTFSQRVANFLVNLLEPYLFYCLFSKYEELASAVLKRDVDIITLYQKVSVWLLRYDFVLEYPRPVMPNMVFIGGINCKKRKDLSQEFEAYINASGEHGIVVFSLGSMVSEIPEKKAMAIADALGKIPQTVLWRYTGTRPSNLANNTILVKWLPQNDLLGHPMTRAFITHAGSHGVYESICNGVPMVMMPLFGDQMDNAKRMETKGAGVTLNVLEMTSEDLENALKAVINDKSYKENIMRLSSLHKDRPVEPLDLAVFWVEFVMRHKGAPHLRPAAHDLTWYQYHSLDVIGFLLAVVLTVAFITFKCCAYGYRKCLGKKGRVKKAHKSKTH

SEQ ID NO: 95441 - protein, 265 aa, Homo sapiens
  Payload ID: 19027
  Gene Name: UDP glucuronosyltransferase 1 family, polypeptide A6
  Uniprot ID: P19224
  ENSP ID: ENSP00000362523
MPNMVFIGGINCKKRKDLSQEFEAYINASGEHGIVVFSLGSMVSEIPEKKAMAIADALGKIPQTVLWRYTGTRPSNLANNTILVKWLPQNDLLGHPMTRAFITHAGSHGVYESICNGVPMVMMPLFGDQMDNAKRMETKGAGVTLNVLEMTSEDLENALKAVINDKSYKENIMRLSSLHKDRPVEPLDLAVFWVEFVMRHKGAPHLRPAAHDLTWYQYHSLDVIGFLLAVVLTVAFITFKCCAYGYRKCLGKKGRVKKAHKSKTH

SEQ ID NO: 95442 - protein, 176 aa, Homo sapiens
  Payload ID: 19027
  Gene Name: UDP glucuronosyltransferase 1 family, polypeptide A6
  ENSP ID: ENSP00000386107
MPNMVFIGGINCKKRKDLSQEFEAYINASGEHGIVVFSLGSMVSEIPEKKAMAIADALGKIPQTVLWRYTGTRPSNLANNTILVKWLPQNDLLGHPMTRAFITHAGSHGVYESICNGVPMVMMPLFGDQMDNAKRMETKGAGVTLNVLEMTSEDLENALKAVINDKRKKQQSGRQM

SEQ ID NO: 95443 - protein, 189 aa, Homo sapiens
  Payload ID: 19027
  Gene Name: UDP glucuronosyltransferase 1 family, polypeptide A6
  ENSP ID: ENSP00000389637
MACLLRSFQRISAGVFFLALWGMVVGDKLLVVPQDGSHWLSMKDIVEVLSDRGHEIVVVVPEVNLLLKESKYYTRKIYPVPYDQEELKNRYQSFGNNHFAERSFLTAPQTEYRNNMIVIGLYFINCQSLLQDRDTLNFFKESKFDALFTDPALPCGVILAEYLGLPSVYLFRGFPCSLEHTFSRSPDPV

SEQ ID NO: 95444 - protein, 176 aa, Homo sapiens; identical to SEQ ID NO: 95442
  Payload ID: 19027
  Gene Name: UDP glucuronosyltransferase 1 family, polypeptide A6
  ENSP ID: ENSP00000401541

SEQ ID NO: 95445 - protein, 67 aa, Homo sapiens
  Payload ID: 19027
  Gene Name: UDP glucuronosyltransferase 1 family, polypeptide A6
  ENSP ID: ENSP00000419780
LFYCLFSKYEELASAVLKRDVDIITLYQKVSVWLLRYDFVLEYPRPVMPNMVFIGGINCKKRKDLSQ

SEQ ID NO: 95446 - protein, 530 aa, Homo sapiens
  Payload ID: 19028
  Gene Name: UDP glucuronosyltransferase 1 family, polypeptide A7
  Uniprot ID: Q9HAW7
  ENSP ID: ENSP00000362525
MARAGWTGLLPLYVCLLLTCGFAKAGKLLVVPMDGSHWFTMQSVVEKLILRGHEVVVVMPEVSWQLGRSLNCTVKTYSTSYTLEDQDREFMVFADARWTAPLRSAFSLLTSSSNGIFDLFFSNCRSLFNDRKLVEYLKESCFDAVFLDPFDACGLIVAKYFSLPSVVFARGIFCHYLEEGAQCPAPLSYVPRLLLGFSDAMTFKERVWNHIMHLEEHLFCPYFFKNVLEIASEILQTPVTAYDLYSHTSIWLLRTDFVLEYPKPVMPNMIFIGGINCHQGKPVPMEFEAYINASGEHGIVVFSLGSMVSEIPEKKAMAIADALGKIPQTVLWRYTGTRPSNLANNTILVKWLPQNDLLGHPMTRAFITHAGSHGVYESICNGVPMVMMPLFGDQMDNAKRMETKGAGVTLNVLEMTSEDLENALKAVINDKSYKENIMRLSSLHKDRPVEPLDLAVFWVEFVMRHKGAPHLRPAAHDLTWYQYHSLDVIGFLLAVVLTVAFITFKCCAYGYRKCLGKKGRVKKAHKSKTH

SEQ ID NO: 95447 - protein, 157 aa, Homo sapiens
  Payload ID: 19028
  Gene Name: UDP glucuronosyltransferase 1 family, polypeptide A7
  ENSP ID: ENSP00000420181
  MOD_RES (1)..(1): Any amino acid
XVFLDPFDACGLIVAKYFSLPSVVFARGIFCHYLEEGAQCPAPLSYVPRLLLGFSDAMTFKERVWNHIMHLEEHLFCPYFFKNVLEIASEILQTPVTAYDLYSHTSIWLLRTDFVLEYPKPVMPNMIFIGGINCHQGKPVPMGQDLLLSPHWNMSQA

SEQ ID NO: 95448 - protein, 530 aa, Homo sapiens
  Payload ID: 19029
  Gene Name: UDP glucuronosyltransferase 1 family, polypeptide A8
  Uniprot ID: Q9HAW9
  ENSP ID: ENSP00000362549
MARTGWTSPIPLCVSLLLTCGFAEAGKLLVVPMDGSHWFTMQSVVEKLILRGHEVVVVMPEVSWQLGKSLNCTVKTYSTSYTLEDLDREFMDFADAQWKAQVRSLFSLFLSSSNGFFNLFFSHCRSLFNDRKLVEYLKESSFDAVFLDPFDACGLIVAKYFSLPSVVFARGIACHYLEEGAQCPAPLSYVPRILLGFSDAMTFKERVRNHIMHLEEHLFCQYFSKNALEIASEILQTPVTAYDLYSHTSIWLLRTDFVLDYPKPVMPNMIFIGGINCHQGKPLPMEFEAYINASGEHGIVVFSLGSMVSEIPEKKAMAIADALGKIPQTVLWRYTGTRPSNLANNTILVKWLPQNDLLGHPMTRAFITHAGSHGVYESICNGVPMVMMPLFGDQMDNAKRMETKGAGVTLNVLEMTSEDLENALKAVINDKSYKENIMRLSSLHKDRPVEPLDLAVFWVEFVMRHKGAPHLRPAAHDLTWYQYHSLDVIGFLLAVVLTVAFITFKCCAYGYRKCLGKKGRVKKAHKSKTH

SEQ ID NO: 95449 - protein, 530 aa, Homo sapiens
  Payload ID: 19030
  Gene Name: UDP glucuronosyltransferase 1 family, polypeptide A9
  Uniprot ID: O60656
  ENSP ID: ENSP00000346768
MACTGWTSPLPLCVCLLLTCGFAEAGKLLVVPMDGSHWFTMRSVVEKLILRGHEVVVVMPEVSWQLGRSLNCTVKTYSTSYTLEDLDREFKAFAHAQWKAQVRSIYSLLMGSYNDIFDLFFSNCRSLFKDKKLVEYLKESSFDAVFLDPFDNCGLIVAKYFSLPSVVFARGILCHYLEEGAQCPAPLSYVPRILLGFSDAMTFKERVRNHIMHLEEHLLCHRFFKNALEIASEILQTPVTEYDLYSHTSIWLLRTDFVLDYPKPVMPNMIFIGGINCHQGKPLPMEFEAYINASGEHGIVVFSLGSMVSEIPEKKAMAIADALGKIPQTVLWRYTGTRPSNLANNTILVKWLPQNDLLGHPMTRAFITHAGSHGVYESICNGVPMVMMPLFGDQMDNAKRMETKGAGVTLNVLEMTSEDLENALKAVINDKSYKENIMRLSSLHKDRPVEPLDLAVFWVEFVMRHKGAPHLRPAAHDLTWYQYHSLDVIGFLLAVVLTVAFITFKCCAYGYRKCLGKKGRVKKAHKSKTH

SEQ ID NO: 95450 - protein, 527 aa, Homo sapiens
  Payload ID: 19031
  Gene Name: UDP glucuronosyltransferase 2 family, polypeptide A1, complex locus
  Uniprot ID: Q9Y4X1
  ENSP ID: ENSP00000286604
MLNNLLLFSLQISLIGTTLGGNVLIWPMEGSHWLNVKIIIDELIKKEHNVTVLVASGALFITPTSNPSLTFEIYKVPFGKERIEGVIKDFVLTWLENRPSPSTIWRFYQEMAKVIKDFHMVSQEICDGVLKNQQLMAKLKKSKFEVLVSDPVFPCGDIVALKLGIPFMYSLRFSPASTVEKHCGKVPYPPSYVPAVLSELTDQMSFTDRIRNFISYHLQDYMFETLWKSWDSYYSKALGGLLLCCPGWSAVADLGSLQPLLPGFKRFSRLSLHCSWDYRLPAGRPTTLCETMGKAEIWLIRTYWDFEFPRPYLPNFEFVGGLHCKPAKPLPKVLWRYKGKKPATLGNNTQLFDWIPQNDLLGHPKTKAFITHGGTNGIYEAIYHGVPMVGVPMFADQPDNIAHMKAKGAAVEVNLNTMTSVDLLSALRTVINEPSYKENAMRLSRIHHDQPVKPLDRAVFWIEFVMRHKGAKHLRVAAHDLTWFQYHSLDVIGFLLVCVTTAIFLVIQCCLFSCQKFGKIGKKKKRE

SEQ ID NO: 95451 - protein, 483 aa, Homo sapiens
  Payload ID: 19031
  Gene Name: UDP glucuronosyltransferase 2 family, polypeptide A1, complex locus
  ENSP ID: ENSP00000421432
MLNNLLLFSLQISLIGTTLGGNVLIWPMEGSHWLNVKIIIDELIKKEHNVTVLVASGALFITPTSNPSLTFEIYKVPFGKERIEGVIKDFVLTWLENRPSPSTIWRFYQEMAKVIKDFHMVSQEICDGVLKNQQLMAKLKKSKFEVLVSDPVFPCGDIVALKLGIPFMYSLRFSPASTVEKHCGKVPYPPSYVPAVLSELTDQMSFTDRIRNFISYHLQDYMFETLWKSWDSYYSKALGRPTTLCETMGKAEIWLIRTYWDFEFPRPYLPNFEFVGGLHCKPAKPLPKVLWRYKGKKPATLGNNTQLFDWIPQNDLLGHPKTKAFITHGGTNGIYEAIYHGVPMVGVPMFADQPDNIAHMKAKGAAVEVNLNTMTSVDLLSALRTVINEPSYKENAMRLSRIHHDQPVKPLDRAVFWIEFVMRHKGAKHLRVAAHDLTWFQYHSLDVIGFLLVCVTTAIFLVIQCCLFSCQKFGKIGKKKKRE

SEQ ID NO: 95452 - protein, 527 aa, Homo sapiens
  Payload ID: 19031
  Gene Name: UDP glucuronosyltransferase 2 family, polypeptide A1, complex locus
  Uniprot ID: Q9Y4X1
  ENSP ID: ENSP00000424478
MLNNLLLFSLQISLIGTTLGGNVLIWPMEGSHWLNVKIIIDELIKKEHNVTVLVASGALFITPTSNPSLTFEIYKVPFGKERIEGVIKDFVLTWLENRPSPSTIWRFYQEMAKVIKDFHMVSQEICDGVLKNQQLMAKLKKSKFEVLVSDPVFPCGDIVALKLGIPFMYSLRFSPASTVEKHCGKVPYPPSYVPAVLSELTDQMSFTDRIRNFISYHLQDYMFETLWKSWDSYYSKALGRPTTLCETMGKAEIWLIRTYWDFEFPRPYLPNFEFVGGLHCKPAKPLPKEMEEFIQSSGKNGVVVFSLGSMVKNLTEEKANLIASALAQIPQKVLWRYKGKKPATLGNNTQLFDWIPQNDLLGHPKTKAFITHGGTNGIYEAIYHGVPMVGVPMFADQPDNIAHMKAKGAAVEVNLNTMTSVDLLSALRTVINEPSYKENAMRLSRIHHDQPVKPLDRAVFWIEFVMRHKGAKHLRVAAHDLTWFQYHSLDVIGFLLVCVTTAIFLVIQCCLFSCQKFGKIGKKKKRE

SEQ ID NO: 95453 - protein, 693 aa, Homo sapiens
  Payload ID: 19031
  Gene Name: UDP glucuronosyltransferase 2 family, polypeptide A1, complex locus
  Uniprot ID: Q9Y4X1
  ENSP ID: ENSP00000425497
MLNNLLLFSLQISLIGTTLGGNVLIWPMEGSHWLNVKIIIDELIKKEHNVTVLVASGALFITPTSNPSLTFEIYKVPFGKERIEGVIKDFVLTWLENRPSPSTIWRFYQEMAKVIKDFHMVSQEICDGVLKNQQLMAKLKKSKFEVLVSDPVFPCGDIVALKLGIPFMYSLRFSPASTVEKHCGKVPYPPSYVPAVLSELTDQMSFTDRIRNFISYHLQDYMFETLWKSWDSYYSKALDGSHWLNIKIILEELIQRNHNVTVLASSATLFINSNPDSPVNFEVIPVSYKKSNIDSLIEHMIMLWIDHRPTPLTIWAFYKELGKLLDTFFQINIQLCDGVLKNPKLMARLQKGGFDVLVADPVTICGDLVALKLGIPFMYTLRFSPASTVERHCGKIPAPVSYVPAALSELTDQMTFGERIKNTISYSLQDYIFQSYWGEWNSYYSKILGRPTTLCETMGKAEIWLIRTYWDFEFPRPYLPNFEFVGGLHCKPAKPLPKVLWRYKGKKPATLGNNTQLFDWIPQNDLLGHPKTKAFITHGGTNGIYEAIYHGVPMVGVPMFADQPDNIAHMKAKGAAVEVNLNTMTSVDLLSALRTVINEPSYKENAMRLSRIHHDQPVKPLDRAVFWIEFVMRHKGAKHLRVAAHDLTWFQYHSLDVIGFLLVCVTTAIFLVIQCCLFSCQKFGKIGKKKKRE

SEQ ID NO: 95454 - protein, 158 aa, Homo sapiens
  Payload ID: 19031
  Gene Name: UDP glucuronosyltransferase 2 family, polypeptide A1, complex locus
  ENSP ID: ENSP00000427709
MLNNLLLFSLQISLIGTTLGGNVLIWPMEGSHWLNVKIIIDELIKKEHNVTVLVASGALFITPTSNPSLTFEIYKVPFGKERIEGVIKDFVLTWLENRPSPSTIWRFYQEMAKVIKDFHMVSQEICDGVLKNQQLMAKLKKSKFEVLVSDPVFPCGDI

SEQ ID NO: 95455 - protein, 492 aa, Homo sapiens
  Payload ID: 19032
  Gene Name: UDP glucuronosyltransferase 2 family, polypeptide A2
  Uniprot ID: Q9Y4X1
  ENSP ID: ENSP00000474383
MVSIRDFTMPKKFVQMLVFNLTLTEVVLSGNVLIWPTDGSHWLNIKIILEELIQRNHNVTVLASSATLFINSNPDSPVNFEVIPVSYKKSNIDSLIEHMIMLWIDHRPTPLTIWAFYKELGKLLDTFFQINIQLCDGVLKNPKLMARLQKGGFDVLVADPVTICGDLVALKLGIPFMYTLRFSPASTVERHCGKIPAPVSYVPAALSELTDQMTFGERIKNTISYSLQDYIFQSYWGEWNSYYSKILGRPTTLCETMGKAEIWLIRTYWDFEFPRPYLPNFEFVGGLHCKPAKPLPKVLWRYKGKKPATLGNNTQLFDWIPQNDLLGHPKTKAFITHGGTNGIYEAIYHGVPMVGVPMFADQPDNIAHMKAKGAAVEVNLNTMTSVDLLSALRTVINEPSYKENAMRLSRIHHDQPVKPLDRAVFWIEFVMRHKGAKHLRVAAHDLTWFQYHSLDVIGFLLVCVTTAIFLVIQCCLFSCQKFGKIGKKKKRE

SEQ ID NO: 95456 - protein, 536 aa, Homo sapiens
  Payload ID: 19032
  Gene Name: UDP glucuronosyltransferase 2 family, polypeptide A2
  Uniprot ID: Q9Y4X1
  ENSP ID: ENSP00000475028
MVSIRDFTMPKKFVQMLVFNLTLTEVVLSGNVLIWPTDGSHWLNIKIILEELIQRNHNVTVLASSATLFINSNPDSPVNFEVIPVSYKKSNIDSLIEHMIMLWIDHRPTPLTIWAFYKELGKLLDTFFQINIQLCDGVLKNPKLMARLQKGGFDVLVADPVTICGDLVALKLGIPFMYTLRFSPASTVERHCGKIPAPVSYVPAALSELTDQMTFGERIKNTISYSLQDYIFQSYWGEWNSYYSKILGRPTTLCETMGKAEIWLIRTYWDFEFPRPYLPNFEFVGGLHCKPAKPLPKEMEEFIQSSGKNGVVVFSLGSMVKNLTEEKANLIASALAQIPQKVLWRYKGKKPATLGNNTQLFDWIPQNDLLGHPKTKAFITHGGTNGIYEAIYHGVPMVGVPMFADQPDNIAHMKAKGAAVEVNLNTMTSVDLLSALRTVINEPSYKENAMRLSRIHHDQPVKPLDRAVFWIEFVMRHKGAKHLRVAAHDLTWFQYHSLDVIGFLLVCVTTAIFLVIQCCLFSCQKFGKIGKKKKRE

SEQ ID NO: 95457 - protein, 527 aa, Homo sapiens
  Payload ID: 19033
  Gene Name: UDP glucuronosyltransferase 2 family, polypeptide A3
  Uniprot ID: Q6UWM9
  ENSP ID: ENSP00000251566
MRSDKSALVFLLLQLFCVGCGFCGKVLVWPCDMSHWLNVKVILEELIVRGHEVTVLTHSKPSLIDYRKPSALKFEVVHMPQDRTEENEIFVDLALNVLPGLSTWQSVIKLNDFFVEIRGTLKMMCESFIYNQTLMKKLQETNYDVMLIDPVIPCGDLMAELLAVPFVLTLRISVGGNMERSCGKLPAPLSYVPVPMTGLTDRMTFLERVKNSMLSVLFHFWIQDYDYHFWEEFYSKALGRPTTLCETVGKAEIWLIRTYWDFEFPQPYQPNFEFVGGLHCKPAKALPKEMENFVQSSGEDGIVVFSLGSLFQNVTEEKANIIASALAQIPQKVLWRYKGKKPSTLGANTRLYDWIPQNDLLGHPKTKAFITHGGMNGIYEAIYHGVPMVGVPIFGDQLDNIAHMKAKGAAVEINFKTMTSEDLLRALRTVITDSSYKENAMRLSRIHHDQPVKPLDRAVFWIEFVMRHKGAKHLRSAAHDLTWFQHYSIDVIGFLLACVATAIFLFTKCFLFSCQKFNKTRKIEKRE

SEQ ID NO: 95458 - protein, 172 aa, Homo sapiens
  Payload ID: 19033
  Gene Name: UDP glucuronosyltransferase 2 family, polypeptide A3
  ENSP ID: ENSP00000424092
MKKLQETNYDVMLIDPVIPCGDLMAELLAVPFVLTLRISVGGNMERSCGKLPAPLSYVPVPMTGLTDRMTFLERVKNSMLSVLFHFWIQDYDYHFWEEFYSKALGRPTTLCETVGKAEIWLIRTYWDFEFPQPYQPNFEFVGGLHCKPAKALPKESYTRKPSSLKPWHLYLK

SEQ ID NO: 95459 - protein, 527 aa, Homo sapiens; identical to SEQ ID NO: 95457
  Payload ID: 19033
  Gene Name: UDP glucuronosyltransferase 2 family, polypeptide A3
  Uniprot ID: Q6UWM9
  ENSP ID: ENSP00000479283

SEQ ID NO: 95460 - protein, 173 aa, Homo sapiens
  Payload ID: 19033
  Gene Name: UDP glucuronosyltransferase 2 family, polypeptide A3
  ENSP ID: ENSP00000487009
LMKKLQETNYDVMLIDPVIPCGDLMAELLAVPFVLTLRISVGGNMERSCGKLPAPLSYVPVPMTGLTDRMTFLERVKNSMLSVLFHFWIQDYDYHFWEEFYSKALGRPTTLCETVGKAEIWLIRTYWDFEFPQPYQPNFEFVGGLHCKPAKALPKESYTRKPSSLKPWHLYLK

SEQ ID NO: 95461 - protein, 528 aa, Homo sapiens
  Payload ID: 19034
  Gene Name: UDP glucuronosyltransferase 2 family, polypeptide B10
  Uniprot ID: P36537
  ENSP ID: ENSP00000265403
MALKWTTVLLIQLSFYFSSGSCGKVLVWAAEYSLWMNMKTILKELVQRGHEVTVLASSASILFDPNDSSTLKLEVYPTSLTKTEFENIIMQLVKRLSEIQKDTFWLPFSQEQEILWAINDIIRNFCKDVVSNKKLMKKLQESRFDIVFADAYLPCGELLAELFNIPFVYSHSFSPGYSFERHSGGFIFPPSYVPVVMSKLSDQMTFMERVKNMLYVLYFDFWFQIFNMKKWDQFYSEVLGRPTTLSETMRKADIWLMRNSWNFKFPHPFLPNVDFVGGLHCKPAKPLPKEMEEFVQSSGENGVVVFSLGSMVSNMTEERANVIATALAKIPQKVLWRFDGNKPDALGLNTRLYKWIPQNDLLGHPKTRAFITHGGANGIYEAIYHGIPMVGIPLFFDQPDNIAHMKAKGAAVRVDFNTMSSTDLLNALKTVINDPSYKENIMKLSRIQHDQPVKPLDRAVFWIEFVMRHKGAKHLRVAAHNLTWFQYHSLDVIGFLLACVATVLFIITKCCLFCFWKFARKGKKGKRD

SEQ ID NO: 95462 - protein, 444 aa, Homo sapiens
  Payload ID: 19034
  Gene Name: UDP glucuronosyltransferase 2 family, polypeptide B10
  Uniprot ID: P36537
  ENSP ID: ENSP00000413420
MALKWTTVLLIQLSFYFSSGSCGKVLVWAAEYSLWMNMKTILKELVQRGHEVTVLASSASILFDPNDSSTLKLEVYPTSLTKTEFENIIMQLVKRLSEIQKDTFWLPFSQEQEILWAINDIIRNFCKDVVSNKKLMKKLQESRFDIVFADAYLPCGRPTTLSETMRKADIWLMRNSWNFKFPHPFLPNVDFVGGLHCKPAKPLPKEMEEFVQSSGENGVVVFSLGSMVSNMTEERANVIATALAKIPQKVLWRFDGNKPDALGLNTRLYKWIPQNDLLGHPKTRAFITHGGANGIYEAIYHGIPMVGIPLFFDQPDNIAHMKAKGAAVRVDFNTMSSTDLLNALKTVINDPSYKENIMKLSRIQHDQPVKPLDRAVFWIEFVMRHKGAKHLRVAAHNLTWFQYHSLDVIGFLLACVATVLFIITKCCLFCFWKFARKGKKGKRD

SEQ ID NO: 95463 - protein, 528 aa, Homo sapiens; identical to SEQ ID NO: 95461
  Payload ID: 19034
  Gene Name: UDP glucuronosyltransferase 2 family, polypeptide B10
  Uniprot ID: P36537
  ENSP ID: ENSP00000478760

SEQ ID NO: 95464 - protein, 444 aa, Homo sapiens; identical to SEQ ID NO: 95462
  Payload ID: 19034
  Gene Name: UDP glucuronosyltransferase 2 family, polypeptide B10
  Uniprot ID: P36537
  ENSP ID: ENSP00000486876

SEQ ID NO: 95465 - protein, 529 aa, Homo sapiens
  Payload ID: 19035
  Gene Name: UDP glucuronosyltransferase 2 family, polypeptide B11
  Uniprot ID: O75310
  ENSP ID: ENSP00000387683
MTLKWTSVLLLIHLSCYFSSGSCGKVLVWAAEYSHWMNMKTILKELVQRGHEVTVLASSASILFDPNDASTLKFEVYPTSLTKTEFENIIMQQVKRWSDIRKDSFWLYFSQEQEILWELYDIFRNFCKDVVSNKKVMKKLQESRFDIVFADAVFPCGELLAALLNIRFVYSLRFTPGYTIERHSGGLIFPPSYIPIVMSKLSDQMTFMERVKNMIYVLYFDFWFQMSDMKKWDQFYSEVLGRPTTLFETMGKADIWLMRNSWSFQFPHPFLPNVDFVGGFHCKPAKPLPKEMEEFVQSSGENGVVVFSLGSVISNMTAERANVIATALAKIPQKVLWRFDGNKPDALGLNTRLYKWIPQNDLLGHPKTRAFITHGGANGIYEAIYHGIPMVGIPLFFDQPDNIAHMKAKGAAVRLDFNTMSSTDLLNALKTVINDPLYKENIMKLSRIQHDQPVKPLDRAVFWIEFVMPHKGAKHLRVAAHDLTWFQYHSLDVIGFLLACVATVIFIITKFCLFCFWKFARKGKKGKRD

SEQ ID NO: 95466 - protein, 529 aa, Homo sapiens; identical to SEQ ID NO: 95465
  Payload ID: 19035
  Gene Name: UDP glucuronosyltransferase 2 family, polypeptide B11
  Uniprot ID: O75310
  ENSP ID: ENSP00000477842

SEQ ID NO: 95467 - protein, 335 aa, Homo sapiens
  Payload ID: 19035
  Gene Name: UDP glucuronosyltransferase 2 family, polypeptide B11
  ENSP ID: ENSP00000478182
MTLKWTSVLLLIHLSCYFSSGSCGKVLVWAAEYSHWMNMKTILKELVQRGHEVTVLASSASILFDPNDASTLKFEVYPTSLTKTEFENIIMQQVKRWSDIRKDSFWLYFSQEQEILWELYDIFRNFCKDVVSNKKVMKKLQESRFDIVFADAVFPCGELLAALLNIRFVYSLRFTPGYTIERHSGGLIFPPSYIPIVMSKLSDQMTFMERVKNMIYVLYFDFWFQMSDMKKWDQFYSEVLGRPTTLFETMGKADIWLMRNSWSFQFPHPFLPNVDFVGGFHCKPAKPLPKEMEEFVQSSGENGVVVFSLGSVISNMTAERANVIATALAKIPQKI

SEQ ID NO: 95468 - protein, 530 aa, Homo sapiens
  Payload ID: 19036
  Gene Name: UDP glucuronosyltransferase 2 family, polypeptide B15
  Uniprot ID: P54855
  ENSP ID: ENSP00000341045
MSLKWTSVFLLIQLSCYFSSGSCGKVLVWPTEYSHWINMKTILEELVQRGHEVTVLTSSASTLVNASKSSAIKLEVYPTSLTKNYLEDSLLKILDRWIYGVSKNTFWSYFSQLQELCWEYYDYSNKLCKDAVLNKKLMMKLQESKFDVILADALNPCGELLAELFNIPFLYSLRFSVGYTFEKNGGGFLFPPSYVPVVMSELSDQMIFMERIKNMIHMLYFDFWFQIYDLKKWDQFYSEVLGRPTTLFETMGKAEMWLIRTYWDFEFPRPFLPNVDFVGGLHCKPAKPLPKEMEEFVQSSGENGIVVFSLGSMISNMSEESANMIASALAQIPQKVLWRFDGKKPNTLGSNTRLYKWLPQNDLLGHPKTKAFITHGGTNGIYEAIYHGIPMVGIPLFADQHDNIAHMKAKGAALSVDIRTMSSRDLLNALKSVINDPVYKENVMKLSRIHHDQPMKPLDRAVFWIEFVMRHKGAKHLRVAAHNLTWIQYHSLDVIAFLLACVATVIFIITKFCLFCFRKLAKKGKKKKRD

SEQ ID NO: 95469 - protein, 332 aa, Homo sapiens
  Payload ID: 19036
  Gene Name: UDP glucuronosyltransferase 2 family, polypeptide B15
  ENSP ID: ENSP00000480287
MSELSDQMIFMERIKNMIHMLYFDFWFQIYDLKKWDQFYSEVLGRPTTLFETMGKAEMWLIRTYWDFEFPRPFLPNVDFVGGLHCKPAKPLPKEMEEFVQSSGENGIVVFSLGSMISNMSEESANMIASALAQIPQKVLWRFDGKKPNTLGSNTRLYKWLPQNDLLGHPKTKAFITHGGTNGIYEAIYHGIPMVGIPLFADQHDNIAHMKAKGAALSVDIRTMSSRDLLNALKSVINDPVYKENVMKLSRIHHDQPMKPLDRAVFWIEFVMRHKGAKHLRVAAHNLTWIQYHSLDVIAFLLACVATVIFIITKFCLFCFRKLAKKGKKKKRD

SEQ ID NO: 95470 - protein, 530 aa, Homo sapiens; identical to SEQ ID NO: 95468
  Payload ID: 19036
  Gene Name: UDP glucuronosyltransferase 2 family, polypeptide B15
  Uniprot ID: P54855
  ENSP ID: ENSP00000482004

SEQ ID NO: 95471 - protein, 530 aa, Homo sapiens
  Payload ID: 19037
  Gene Name: UDP glucuronosyltransferase 2 family, polypeptide B17
  Uniprot ID: O75795
  ENSP ID: ENSP00000320401
MSLKWMSVFLLMQLSCYFSSGSCGKVLVWPTEYSHWINMKTILEELVQRGHEVIVLTSSASILVNASKSSAIKLEVYPTSLTKNDLEDFFMKMFDRWTYSISKNTFWSYFSQLQELCWEYSDYNIKLCEDAVLNKKLMRKLQESKFDVLLADAVNPCGELLAELLNIPFLYSLRFSVGYTVEKNGGGFLFPPSYVPVVMSELSDQMIFMERIKNMIYMLYFDFWFQAYDLKKWDQFYSEVLGRPTTLFETMGKAEMWLIRTYWDFEFPRPFLPNVDFVGGLHCKPAKPLPKEMEEFVQSSGENGIVVFSLGSMISNMSEESANMIASALAQIPQKVLWRFDGKKPNTLGSNTRLYKWLPQNDLLGHPKTKAFITHGGTNGIYEAIYHGIPMVGIPLFADQHDNIAHMKAKGAALSVDIRTMSSRDLLNALKSVINDPIYKENIMKLSRIHHDQPVKPLDRAVFWIEFVMRHKGAKHLRVAAHNLTWIQYHSLDVIAFLLACVATMIFMITKCCLFCFRKLAKTGKKKKRD

SEQ ID NO: 95472 - protein, 529 aa, Homo sapiens
  Payload ID: 19038
  Gene Name: UDP glucuronosyltransferase 2 family, polypeptide B28
  Uniprot ID: Q9BY64
  ENSP ID: ENSP00000334276
MALKWTSVLLLIHLGCYFSSGSCGKVLVWTGEYSHWMNMKTILKELVQRGHEVTVLASSASILFDPNDAFTLKLEVYPTSLTKTEFENIIMQQVKRWSDIQKDSFWLYFSQEQEILWEFHDIFRNFCKDVVSNKKVMKKLQESRFDIIFADAFFPCGELLAALLNIPFVYSLCFTPGYTIERHSGGLIFPPSYIPVVMSKLSDQMTFMERVKNMIYVLYFDFWFQMCDMKKWDQFYSEVLGRPTTLFETMGKADIWLMRNSWSFQFPHPFLPNIDFVGGLHCKPAKPLPKEMEEFVQSSGENGVVVFSLGSVISNMTAERANVIATALAKIPQKVLWRFDGNKPDALGLNTRLYKWIPQNDLLGLPKTRAFITHGGANGIYEAIYHGIPMVGIPLFWDQPDNIAHMKAKGAAVRLDFHTMSSTDLLNALKTVINDPSYKENVMKLSIIQHDQPVKPLHRAVFWIEFVMCHKGAKHLRVAARDLTWFQYHSLDVIGFLLACVATVIFVVTKFCLFCFWKFARKGKKGKRD

SEQ ID NO: 95473 - protein, 335 aa, Homo sapiens
  Payload ID: 19038
  Gene Name: UDP glucuronosyltransferase 2 family, polypeptide B28
  Uniprot ID: Q9BY64
  ENSP ID: ENSP00000427399
MALKWTSVLLLIHLGCYFSSGSCGKVLVWTGEYSHWMNMKTILKELVQRGHEVTVLASSASILFDPNDAFTLKLEVYPTSLTKTEFENIIMQQVKRWSDIQKDSFWLYFSQEQEILWEFHDIFRNFCKDVVSNKKVMKKLQESRFDIIFADAFFPCGELLAALLNIPFVYSLCFTPGYTIERHSGGLIFPPSYIPVVMSKLSDQMTFMERVKNMIYVLYFDFWFQMCDMKKWDQFYSEVLGRPTTLFETMGKADIWLMRNSWSFQFPHPFLPNIDFVGGLHCKPAKPLPKEMEEFVQSSGENGVVVFSLGSVISNMTAERANVIATALAKIPQKI

SEQ ID NO: 95474 - protein, 529 aa, Homo sapiens
  Payload ID: 19038
  Gene Name: UDP glucuronosyltransferase 2 family, polypeptide B28
  ENSP ID: ENSP00000481795
MALKWTSVLLLIHLGCYFSSGSCGKVLVWTGEYSHWMNMKTILKELVQRGHEVTVLASSASILFDPNDAFTLKLEVYPTSLTKTEFENIIMQQVKRWSDIQKDSFWLYFSQEQEILWEFHDIFRNFCKDVVSNKKVMKKLQESRFDIIFADAFFPCGELLAALLNIPFVYSLCFTPGYTIERHSGGLIFPPSYIPVVMSKLSDQMTFMERVKNMIYVLYFDFWFQMCDMKKWDQFYSEVLGRPTTLFETMGKADIWLMRNSWSFQFPHPFLPNIDFVGGLHCKPAKPLPKEMEEFVQSSGENGVVVFSLGSVISNMTAERANVIATALAKIPQKVLWRFDGNKPDALGLNTRLYKWIPQNDLLGHPKTRAFITHGGANGIYEAIYHGIPILGIPLFADQPDNIAHMKAKGAAVRLDFNTMSSTDLLNALKTVINVPLYKESVMKLSRIQHDQPVKPLDRAVFWIEFVMRHKGAKHLRVAARDLTWFQYHSLDVIGFLLACVATVTFIITKCCLFCFWKFTRKVKKEKRD

SEQ ID NO: 95475 - protein, 528 aa, Homo sapiens
  Payload ID: 19039
  Gene Name: UDP glucuronosyltransferase 2 family, polypeptide B4
  Uniprot ID: P06133
  ENSP ID: ENSP00000305221
MSMKWTSALLLIQLSCYFSSGSCGKVLVWPTEFSHWMNIKTILDELVQRGHEVTVLASSASISFDPNSPSTLKFEVYPVSLTKTEFEDIIKQLVKRWAELPKDTFWSYFSQVQEIMWTFNDILRKFCKDIVSNKKLMKKLQESRFDVVLADAVFPFGELLAELLKIPFVYSLRFSPGYAIEKHSGGLLFPPSYVPVVMSELSDQMTFIERVKNMIYVLYFEFWFQIFDMKKWDQFYSEVLGRPTTLSETMAKADIWLIRNYWDFQFPHPLLPNVEFVGGLHCKPAKPLPKEMEEFVQSSGENGVVVFSLGSMVSNTSEERANVIASALAKIPQKVLWRFDGNKPDTLGLNTRLYKWIPQNDLLGHPKTRAFITHGGANGIYEAIYHGIPMVGVPLFADQPDNIAHMKAKGAAVSLDFHTMSSTDLLNALKTVINDPLYKENAMKLSRIHHDQPVKPLDRAVFWIEFVMRHKGAKHLRVAAHDLTWFQYHSLDVTGFLLACVATVIFIITKCLFCVWKFVRTGKKGKRD

SEQ ID NO: 95476 - protein, 54 aa, Homo sapiens
  Payload ID: 19039
  Gene Name: UDP glucuronosyltransferase 2 family, polypeptide B4
  ENSP ID: ENSP00000421113
MSMKWTSALLLIQLSCYFSSGSCGKVLVWPTEFSHWMNIKTILDELVQRGHEVT

SEQ ID NO: 95477 - protein, 369 aa, Homo sapiens
  Payload ID: 19039
  Gene Name: UDP glucuronosyltransferase 2 family, polypeptide B4
  Uniprot ID: P06133
  ENSP ID: ENSP00000421290
MSMKWTSALLLIQLSCYFSSGSCGKVLVWPTEFSHWMNIKTILDELVQRGHEVTVLASSASISFDPNSPSTLKFEVYPVSLTKTEFEDIIKQLVKRWAELPKDTFWSYFSQVQEIMWTFNDILRKFCKDIVSNKKLMKKLQESRFDVVLADAVFPFGELLAELLKIPFVYSLRFSPGYAIEKHSGGLLFPPSYVPVVMSELSDQMTFIERVKNMIYVLYFEFWFQIFDMKKWDQFYSEVLGRPTTLSETMAKADIWLIRNYWDFQFPHPLLPNVEFVGGLHCKPAKPLPKEMEEFVQSSGENGVVVFSLGSMVSNTSEERANVIASALAKIPQKVLWRFDGNKPDTLGLNTRLYKWIPQNDLLDIKRML

SEQ ID NO: 95478 - protein, 529 aa, Homo sapiens
  Payload ID: 19040
  Gene Name: UDP glucuronosyltransferase 2 family, polypeptide B7
  Uniprot ID: P16662
  ENSP ID: ENSP00000304811
MSVKWTSVILLIQLSFCFSSGNCGKVLVWAAEYSHWMNIKTILDELIQRGHEVTVLASSASILFDPNNSSALKIEIYPTSLTKTELENFIMQQIKRWSDLPKDTFWLYFSQVQEIMSIFGDITRKFCKDVVSNKKFMKKVQESRFDVIFADAIFPCSELLAELFNIPFVYSLSFSPGYTFEKHSGGFIFPPSYVPVVMSELTDQMTFMERVKNMIYVLYFDFWFEIFDMKKWDQFYSEVLGRPTTLSETMGKADVWLIRNSWNFQFPYPLLPNVDFVGGLHCKPAKPLPKEMEDFVQSSGENGVVVFSLGSMVSNMTEERANVIASALAQIPQKVLWRFDGNKPDTLGLNTRLYKWIPQNDLLGHPKTRAFITHGGANGIYEAIYHGIPMVGIPLFADQPDNIAHMKARGAAVRVDFNTMSSTDLLNALKRVINDPSYKENVMKLSRIQHDQPVKPLDRAVFWIEFVMRHKGAKHLRVAAHDLTWFQYHSLDVIGFLLVCVATVIFIVTKCCLFCFWKFARKAKKGKND

SEQ ID NO: 95479 - protein, 156 aa, Homo sapiens
  Payload ID: 19040
  Gene Name: UDP glucuronosyltransferase 2 family, polypeptide B7
  ENSP ID: ENSP00000426206
MGKADVWLIRNSWNFQFPYPLLPNVDFVGGLHCKPAKPLPKEMEDFVQSSGENGVVVFSLGSMVSNMTEERANVIASALAQIPQKVLWRFDGNKPDTLGLNTRLYKWIPQNDLLGHPKTRAFITHGGANGIYEAIYHGIPMVGIPLFADQPDNIAH

SEQ ID NO: 95480 - protein, 369 aa, Homo sapiens
  Payload ID: 19040
  Gene Name: UDP glucuronosyltransferase 2 family, polypeptide B7
  ENSP ID: ENSP00000427659
MSVKWTSVILLIQLSFCFSSGNCGKVLVWAAEYSHWMNIKTILDELIQRGHEVTVLASSASILFDPNNSSALKIEIYPTSLTKTELENFIMQQIKRWSDLPKDTFWLYFSQVQEIMSIFGDITRKFCKDVVSNKKFMKKVQESRFDVIFADAIFPCSELLAELFNIPFVYSLSFSPGYTFEKHSGGFIFPPSYVPVVMSELTDQMTFMERVKNMIYVLYFDFWFEIFDMKKWDQFYSEVLGRPTTLSETMGKADVWLIRNSWNFQFPYPLLPNVDFVGGLHCKPAKPLPKEMEDFVQSSGENGVVVFSLGSMVSNMTEERANVIASALAQIPQKVLWRFDGNKPDTLGLNTRLYKWIPQNDLLDIKRML

SEQ ID NO: 95481 - protein, 335 aa, Homo sapiens
  Payload ID: 19040
  Gene Name: UDP glucuronosyltransferase 2 family, polypeptide B7
  ENSP ID: ENSP00000483172
MSVKWTSVILLIQLSFCFSSGNCGKVLVWAAEYSHWMNIKTILDELIQRGHEVTVLASSASILFDPNNSSALKIEIYPTSLTKTELENFIMQQIKRWSDLPKDTFWLYFSQVQEIMSIFGDITRKFCKDVVSNKKFMKKVQESRFDVIFADAIFPCSELLAELFNIPFVYSLSFSPGYTFEKHSGGFIFPPSYVPVVMSELTDQMTFMERVKNMIYVLYFDFWFEIFDMKKWDQFYSEVLGRPTTLSETMGKADVWLIRNSWNFQFPYPLLPNVDFVGGLHCKPAKPLPKEMEDFVQSSGENGVVVFSLGSMVSNMTEERANVIASALAQIPQKI

SEQ ID NO: 95482 - protein, 523 aa, Homo sapiens
  Payload ID: 19041
  Gene Name: UDP glycosyltransferase 3 family, polypeptide A1
  Uniprot ID: Q6NUS8
  ENSP ID: ENSP00000274278
MVGQRVLLLVAFLLSGVLLSEAAKILTISTLGGSHYLLLDRVSQILQEHGHNVTMLHQSGKFLIPDIKEEEKSYQVIRWFSPEDHQKRIKKHFDSYIETALDGRKESEALVKLMEIFGTQCSYLLSRKDIMDSLKNENYDLVFVEAFDFCSFLIAEKLVKPFVAILPTTFGSLDFGLPSPLSYVPVFPSLLTDHMDFWGRVKNFLMFFSFSRSQWDMQSTFDNTIKEHFPEGSRPVLSHLLLKAELWFVNSDFAFDFARPLLPNTVYIGGLMEKPIKPVPQDLDNFIANFGDAGFVLVAFGSMLNTHQSQEVLKKMHNAFAHLPQGVIWTCQSSHWPRDVHLATNVKIVDWLPQSDLLAHPSIRLFVTHGGQNSVMEAIRHGVPMVGLPVNGDQHGNMVRVVAKNYGVSIRLNQVTADTLTLTMKQVIEDKRYKSAVVAASVILHSQPLSPAQRLVGWIDHILQTGGATHLKPYAFQQPWHEQYLIDVFVFLLGLTLGTMWLCGKLLGVVARWLRGARKVKKT

SEQ ID NO: 95483 - protein, 252 aa, Homo sapiens
  Payload ID: 19041
  Gene Name: UDP glycosyltransferase 3 family, polypeptide A1
  Uniprot ID: Q6NUS8
  ENSP ID: ENSP00000328033
MLHQSGKFLIPDIKEEEKSYQVIRWFSPEDHQKRIKKHFDSYIETALDGRKESEALVKLMEIFGTQCSYLLSRKDIMDSLKNENYDLVFVEAFDFCSFLIAEKLVKPFVAILPTTFGSLDFGLPSPLSYVPVFPSLLTDHMDFWGRVKNFLMFFSFSRSQWDMQSTFDNTIKEHFPEGSRPVLSHLLLKAELWFVNSDFAFDFARPLLPNTVYIGGLMEKPIKPVPQNGQPALFTTPSLFSSGVYPEPLRWL

SEQ ID NO: 95484 - protein, 402 aa, Homo sapiens
  Payload ID: 19041
  Gene Name: UDP glycosyltransferase 3 family, polypeptide A1
  ENSP ID: ENSP00000426100
MVGQRVLLLVAFLLSGVLLSEAAKILTISTLDIKEEEKSYQVIRWFSPEDHQKRIKKHFDSYIETALDGRKESEALVKLMEIFGTQCSYLLSRKDIMDSLKNENYDLVFVEAFDFCSFLIAEKLVKPFVAILPTTFGSLDFGLPSPLSYVPVFPSLLTDHMDFWGRVKNFLMFFSFSRSQWDMQSTFDNTIKEHFPEGSRPVLSHLLLKAELWFVNSDFAFDFARPLLPNTVYIGGLMEKPIKPVPQDLDNFIANFGDAGFVLVAFGSMLNTHQSQEVLKKMHNAFAHLPQGVIWTCQSSHWPRDVHLATNVKIVDWLPQSDLLAHPSIRLFVTHGGQNSVMEAIRHGVPMVGLPVNGDQHGNMVRVVAKNYGVSIRLNQVTADTLTLTMKQVIEDKRYVAL

SEQ ID NO: 95485 - protein, 436 aa, Homo sapiens
  Payload ID: 19041
  Gene Name: UDP glycosyltransferase 3 family, polypeptide A1
  ENSP ID: ENSP00000427079
MVGQRVLLLVAFLLSGVLLSEAAKILTISTLGGSHYLLLDRVSQILQEHGHNVTMLHQSGKFLIPDIKEEEKSYQVIRWFSPEDHQKRIKKHFDSYIETALDGRKESEALVKLMEIFGTQCSYLLSRKDIMDSLKNENYDLVFVEAFDFCSFLIAEKLVKPFVAILPTTFGSLDFGLPSPLSYVPVFPSLLTDHMDFWGRVKNFLMFFSFSRSQWDMQSTFDNTIKEHFPEGSRPVLSHLLLKAELWFVNSDFAFDFARPLLPNTVYIGGLMEKPIKPVPQDLDNFIANFGDAGFVLVAFGSMLNTHQSQEVLKKMHNAFAHLPQGVIWTCQSSHWPRDVHLATNVKIVDWLPQSDLLAHPSIRLFVTHGGQNSVMEAIRHGVPMVGLPVNGDQHGNMVRVVAKNYGVSIRLNQVTADTLTLTMKQVIEDKRYVAL

SEQ ID NO: 95486 - protein, 57 aa, Homo sapiens
  Payload ID: 19041
  Gene Name: UDP glycosyltransferase 3 family, polypeptide A1
  ENSP ID: ENSP00000427630
MVGQRVLLLVAFLLSGVLLSEAAKILTISTLGECLAGEFPDRRVPDPRTARAPANGD

SEQ ID NO: 95487 - protein, 252 aa, Homo sapiens; identical to SEQ ID NO: 95483
  Payload ID: 19041
  Gene Name: UDP glycosyltransferase 3 family, polypeptide A1
  Uniprot ID: Q6NUS8
  ENSP ID: ENSP00000487376

SEQ ID NO: 95488 - protein, 523 aa, Homo sapiens
  Payload ID: 19042
  Gene Name: UDP glycosyltransferase 3 family, polypeptide A2
  Uniprot ID: Q3SY77
  ENSP ID: ENSP00000282507
MAGQRVLLLVGFLLPGVLLSEAAKILTISTVGGSHYLLMDRVSQILQDHGHNVTMLNHKRGPFMPDFKKEEKSYQVISWLAPEDHQREFKKSFDFFLEETLGGRGKFENLLNVLEYLALQCSHFLNRKDIMDSLKNENFDMVIVETFDYCPFLIAEKLGKPFVAILSTSFGSLEFGLPIPLSYVPVFRSLLTDHMDFWGRVKNFLMFFSFCRRQQHMQSTFDNTIKEHFTEGSRPVLSHLLLKAELWFINSDFAFDFARPLLPNTVYVGGLMEKPIKPVPQDLENFIAKFGDSGFVLVTLGSMVNTCQNPEIFKEMNNAFAHLPQGVIWKCQCSHWPKDVHLAANVKIVDWLPQSDLLAHPSIRLFVTHGGQNSIMEAIQHGVPMVGIPLFGDQPENMVRVEAKKFGVSIQLKKLKAETLALKMKQIMEDKRYKSAAVAASVILRSHPLSPTQRLVGWIDHVLQTGGATHLKPYVFQQPWHEQYLLDVFVFLLGLTLGTLWLCGKLLGMAVWWLRGARKVKET

SEQ ID NO: 95489 - protein, 138 aa, Homo sapiens
  Payload ID: 19042
  Gene Name: UDP glycosyltransferase 3 family, polypeptide A2
  ENSP ID: ENSP00000420865
MAGQRVLLLVGFLLPGVLLSEAAKILTISTVGGSHYLLMDRVSQILQDHGHNVTMLNHKRGPFMPDFKKEEKSYQVISWLAPEDHQREFKKSFDFFLEETLGGRGKFENLLNVLEYLALQCSHFLNRKDIMDSLKNEN

SEQ ID NO: 95490 - protein, 120 aa, Homo sapiens
  Payload ID: 19042
  Gene Name: UDP glycosyltransferase 3 family, polypeptide A2
  ENSP ID: ENSP00000426017
MAGQRVLLLVGFLLPGVLLSEAAKILTISTVGGSHYLLMDRVSQILQDHGHNVTMLNHKRGPFMPDFKKEEKSYQVISWLAPEDHQREFKKSFDFFLEETLGGRTWRTSLPSLGTLVLSL

SEQ ID NO: 95491 - protein, 489 aa, Homo sapiens
  Payload ID: 19042
  Gene Name: UDP glycosyltransferase 3 family, polypeptide A2
  Uniprot ID: Q3SY77
  ENSP ID: ENSP00000427404
MAGQRVLLLVGFLLPGVLLSEAAKILTISTVDFKKEEKSYQVISWLAPEDHQREFKKSFDFFLEETLGGRGKFENLLNVLEYLALQCSHFLNRKDIMDSLKNENFDMVIVETFDYCPFLIAEKLGKPFVAILSTSFGSLEFGLPIPLSYVPVFRSLLTDHMDFWGRVKNFLMFFSFCRRQQHMQSTFDNTIKEHFTEGSRPVLSHLLLKAELWFINSDFAFDFARPLLPNTVYVGGLMEKPIKPVPQDLENFIAKFGDSGFVLVTLGSMVNTCQNPEIFKEMNNAFAHLPQGVIWKCQCSHWPKDVHLAANVKIVDWLPQSDLLAHPSIRLFVTHGGQNSIMEAIQHGVPMVGIPLFGDQPENMVRVEAKKFGVSIQLKKLKAETLALKMKQIMEDKRYKSAAVAASVILRSHPLSPTQRLVGWIDHVLQTGGATHLKPYVFQQPWHEQYLLDVFVFLLGLTLGTLWLCGKLLGMAVWWLRGARKVKET

SEQ ID NO: 95492 - protein, 541 aa, Homo sapiens
  Payload ID: 19043
  Gene Name: UDP glycosyltransferase 8
  Uniprot ID: Q16880
  ENSP ID: ENSP00000311648
MKSYTPYFILLWSAVGIAKAAKIIIVPPIMFESHMYIFKTLASALHERGHHTVFLLSEGRDIAPSNHYSLQRYPGIFNSTTSDAFLQSKMRNIFSGRLTAIELFDILDHYTKNCDLMVGNHALIQGLKKEKFDLLLVDPNDMCGFVIAHLLGVKYAVFSTGLWYPAEVGAPAPLAYVPEFNSLLTDRMNLLQRMKNTGVYLISRLGVSFLVLPKYERIMQKYNLLPEKSMYDLVHGSSLWMLCTDVALEFPRPTLPNVVYVGGILTKPASPLPEDLQRWVNGANEHGFVLVSFGAGVKYLSEDIANKLAGALGRLPQKVIWRFSGPKPKNLGNNTKLIEWLPQNDLLGHSKIKAFLSHGGLNSIFETIYHGVPVVGIPLFGDHYDTMTRVQAKGMGILLEWKTVTEKELYEALVKVINNPSYRQRAQKLSEIHKDQPGHPVNRTIYWIDYIIRHNGAHHLRAAVHQISFCQYFLLDIAFVLLLGAALLYFLLSWVTKFIYRKIKSLWSRNKHSTVNGHYHNGILNGKYKRNGHIKHEKKVK

SEQ ID NO: 95493 - protein, 541 aa, Homo sapiens; identical to SEQ ID NO: 95492
  Payload ID: 19043
  Gene Name: UDP glycosyltransferase 8
  Uniprot ID: Q16880
  ENSP ID: ENSP00000378019

SEQ ID NO: 95494 - protein, 141 aa, Homo sapiens
  Payload ID: 19043
  Gene Name: UDP glycosyltransferase 8
  ENSP ID: ENSP00000421446
MKSYTPYFILLWSAVGIAKAAKIIIVPPIMFESHMYIFKTLASALHERGHHTVFLLSEGRDIAPSNHYSLQRYPGIFNSTTSDAFLQSKMRNIFSGRLTAIELFDILDHYTKNCDLMVGNHALIQGLKKEKFDLLLVDPND

SEQ ID NO: 95495 - protein, 329 aa, Homo sapiens
  Payload ID: 19044
  Gene Name: UDP-Gal:betaGal beta 1,3-galactosyltransferase polypeptide 6
  Uniprot ID: Q96L58
  ENSP ID: ENSP00000368496
MKLLRRAWRRRAALGLGTLALCGAALLYLARCAAEPGDPRAMSGRSPPPPAPARAAAFLAVLVASAPRAAERRSVIRSTWLARRGAPGDVWARFAVGTAGLGAEERRALEREQARHGDLLLLPALRDAYENLTAKVLAMLAWLDEHVAFEFVLKADDDSFARLDALLAELRAREPARRRRLYWGFFSGRGRVKPGGRWREAAWQLCDYYLPYALGGGYVLSADLVHYLRLSRDYLRAWHSEDVSLGAWLAPVDVQREHDPRFDTEYRSRGCSNQYLVTHKQSLEDMLEKHATLAREGRLCKREVQLRLSYVYDWSAPPSQCCQRREGIP

SEQ ID NO: 95496 - protein, 326 aa, Homo sapiens
  Payload ID: 19045
  Gene Name: UDP-Gal:betaGlcNAc beta 1,3-galactosyltransferase, polypeptide 1
  Uniprot ID: Q9Y5Z6
  ENSP ID: ENSP00000376456
MASKVSCLYVLTVVCWASALWYLSITRPTSSYTGSKPFSHLTVARKNFTFGNIRTRPINPHSFEFLINEPNKCEKNIPFLVILISTTHKEFDARQAIRETWGDENNFKGIKIATLFLLGKNADPVLNQMVEQESQIFHDIIVEDFIDSYHNLTLKTLMGMRWVATFCSKAKYVMKTDSDIFVNMDNLIYKLLKPSTKPRRRYFTGYVINGGPIRDVRSKWYMPRDLYPDSNYPPFCSGTGYIFSADVAELIYKTSLHTRLLHLEDVYVGLCLRKLGIHPFQNSGFNHWKMAYSLCRYRRVITVHQISPEEMHRIWNDMSSKKHLRC

SEQ ID NO: 95497 - protein, 422 aa, Homo sapiens
  Payload ID: 19046
  Gene Name: UDP-Gal:betaGlcNAc beta 1,3-galactosyltransferase, polypeptide 2
  Uniprot ID: O43825
  ENSP ID: ENSP00000356404
MLQWRRRHCCFAKMTWNAKRSLFRTHLIGVLSLVFLFAMFLFFNHHDWLPGRAGFKENPVTYTFRGFRSTKSETNHSSLRNIWKETVPQTLRPQTATNSNNTDLSPQGVTGLENTLSANGSIYNEKGTGHPNSYHFKYIINEPEKCQEKSPFLILLIAAEPGQIEARRAIRQTWGNESLAPGIQITRIFLLGLSIKLNGYLQRAILEESRQYHDIIQQEYLDTYYNLTIKTLMGMNWVATYCPHIPYVMKTDSDMFVNTEYLINKLLKPDLPPRHNYFTGYLMRGYAPNRNKDSKWYMPPDLYPSERYPVFCSGTGYVFSGDLAEKIFKVSLGIRRLHLEDVYVGICLAKLRIDPVPPPNEFVFNHWRVSYSSCKYSHLITSHQFQPSELIKYWNHLQQNKHNACANAAKEKAGRYRHRKLH

SEQ ID NO: 95498 - protein, 378 aa, Homo sapiens
  Payload ID: 19047
  Gene Name: UDP-Gal:betaGlcNAc beta 1,3-galactosyltransferase, polypeptide 4
  Uniprot ID: O96024
  ENSP ID: ENSP00000372696
MQLRLFRRLLLAALLLVIVWTLFGPSGLGEELLSLSLASLLPAPASPGPPLALPRLLIPNQEACSGPGAPPFLLILVCTAPENLNQRNAIRASWGGLREARGLRVQTLFLLGEPNAQHPVWGSQGSDLASESAAQGDILQAAFQDSYRNLTLKTLSGLNWAEKHCPMARYVLKTDDDVYVNVPELVSELVLRGGRWGQWERSTEPQREAEQEGGQVLHSEEVPLLYLGRVHWRVNPSRTPGGRHRVSEEQWPHTWGPFPPYASGTGYVLSASAVQLILKVASRAPLLPLEDVFVGVSARRGGLAPTQCVKLAGATHYPLDRCCYGKFLLTSHRLDPWKMQEAWKLVGGSDGERTAPFCSWFQGVLGILRCRAIAWLQS

SEQ ID NO: 95499 - protein, 378 aa, Homo sapiens; identical to SEQ ID NO: 95498
  Payload ID: 19047
  Gene Name: UDP-Gal:betaGlcNAc beta 1,3-galactosyltransferase, polypeptide 4
  Uniprot ID: O96024
  ENSP ID: ENSP00000390784

SEQ ID NO: 95500 - protein, 378 aa, Homo sapiens; identical to SEQ ID NO: 95498
  Payload ID: 19047
  Gene Name: UDP-Gal:betaGlcNAc beta 1,3-galactosyltransferase, polypeptide 4
  Uniprot ID: O96024
  ENSP ID: ENSP00000394876

SEQ ID NO: 95501 - protein, 378 aa, Homo sapiens; identical to SEQ ID NO: 95498
  Payload ID: 19047
  Gene Name: UDP-Gal:betaGlcNAc beta 1,3-galactosyltransferase, polypeptide 4
  Uniprot ID: O96024
  ENSP ID: ENSP00000398660

SEQ ID NO: 95502 - protein, 378 aa, Homo sapiens; identical to SEQ ID NO: 95498
  Payload ID: 19047
  Gene Name: UDP-Gal:betaGlcNAc beta 1,3-galactosyltransferase, polypeptide 4
  Uniprot ID: O96024
  ENSP ID: ENSP00000414880

SEQ ID NO: 95503 - protein, 310 aa, Homo sapiens
  Payload ID: 19048
  Gene Name: UDP-Gal:betaGlcNAc beta 1,3-galactosyltransferase, polypeptide 5
  Uniprot ID: Q9Y2C3
  ENSP ID: ENSP00000343318
MAFPKMRLMYICLLVLGALCLYFSMYSLNPFKEQSFVYKKDGNFLKLPDTDCRQTPPFLVLLVTSSHKQLAERMAIRQTWGKERMVKGKQLKTFFLLGTTSSAAETKEVDQESQRHGDIIQKDFLDVYYNLTLKTMMGIEWVHRFCPQAAFVMKTDSDMFINVDYLTELLLKKNRTTRFFTGFLKLNEFPIRQPFSKWFVSKSEYPWDRYPPFCSGTGYVFSGDVASQVYNVSKSVPYIKLEDVFVGLCLERLNIRLEELHSQPTFFPGGLRFSVCLFRRIVACHFIKPRTLLDYWQALENSRGEDCPPV

SEQ ID NO: 95504 - protein, 310 aa, Homo sapiens; identical to SEQ ID NO: 95503
  Payload ID: 19048
  Gene Name: UDP-Gal:betaGlcNAc beta 1,3-galactosyltransferase, polypeptide 5
  Uniprot ID: Q9Y2C3
  ENSP ID: ENSP00000369992

SEQ ID NO: 95505 - protein, 310 aa, Homo sapiens; identical to SEQ ID NO: 95503
  Payload ID: 19048
  Gene Name: UDP-Gal:betaGlcNAc beta 1,3-galactosyltransferase, polypeptide 5
  Uniprot ID: Q9Y2C3
  ENSP ID: ENSP00000369994

SEQ ID NO: 95506 - protein, 314 aa, Homo sapiens
  Payload ID: 19048
  Gene Name: UDP-Gal:betaGlcNAc beta 1,3-galactosyltransferase, polypeptide 5
  ENSP ID: ENSP00000381699
MCLEMAFPKMRLMYICLLVLGALCLYFSMYSLNPFKEQSFVYKKDGNFLKLPDTDCRQTPPFLVLLVTSSHKQLAERMAIRQTWGKERMVKGKQLKTFFLLGTTSSAAETKEVDQESQRHGDIIQKDFLDVYYNLTLKTMMGIEWVHRFCPQAAFVMKTDSDMFINVDYLTELLLKKNRTTRFFTGFLKLNEFPIRQPFSKWFVSKSEYPWDRYPPFCSGTGYVFSGDVASQVYNVSKSVPYIKLEDVFVGLCLERLNIRLEELHSQPTFFPGGLRFSVCLFRRIVACHFIKPRTLLDYWQALENSRGEDCPPV

SEQ ID NO: 95507 - protein, 310 aa, Homo sapiens; identical to SEQ ID NO: 95503
  Payload ID: 19048
  Gene Name: UDP-Gal:betaGlcNAc beta 1,3-galactosyltransferase, polypeptide 5
  Uniprot ID: Q9Y2C3
  ENSP ID: ENSP00000480285

SEQ ID NO: 95508 - protein, 398 aa, Homo sapiens
  Payload ID: 19049
  Gene Name: UDP-Gal:betaGlcNAc beta 1,4- galactosyltransferase, polypeptide 1
  Uniprot ID: P15291
  ENSP ID: ENSP00000369055
MRLREPLLSGSAAMPGASLQRACRLLVAVCALHLGVTLVYYLAGRDLSRLPQLVGVSTPLQGGSNSAAAIGQSSGELRTGGARPPPPLGASSQPRPGGDSSPVVDSGPGPASNLTSVPVPHTTALSLPACPEESPLLVGPMLIEFNMPVDLELVAKQNPNVKMGGRYAPRDCVSPHKVAIIIPFRNRQEHLKYWLYYLHPVLQRQQLDYGIYVINQAGDTIFNRAKLLNVGFQEALKDYDYTCFVFSDVDLIPMNDHNAYRCFSQPRHISVAMDKFGFSLPYVQYFGGVSALSKQQFLTINGFPNNYWGWGGEDDDIFNRLVFRGMSISRPNAVVGRCRMIRHSRDKKNEPNPQRFDRIAHTKETMLSDGLNSLTYQVLDVQRYPLYTQITVDIGTPS

SEQ ID NO: 95509 - protein, 225 aa, Homo sapiens
  Payload ID: 19049
  Gene Name: UDP-Gal:betaGlcNAc beta 1,4- galactosyltransferase, polypeptide 1
  ENSP ID: ENSP00000440341
MRLREPLLSGSAAMPGASLQRACRLLVAVCALHLGVTLVYYLAGRDLSRLPQLVGVSTPLQGGSNSAAAIGQSSGELRTGGARPPPPLGASSQPRPGGDSSPVVDSGPGPASNLTSVPVPHTTALSLPACPEESPLLVGPMLIEFNMPVDLELVAKQNPNVKMGGRYAPRDCVSPHKVAIIIPFRNRQEHLKYWLYYLHPVLQRQQLDYGIYVINQYEKIRRLLW

SEQ ID NO: 95510 - protein, 401 aa, Homo sapiens
  Payload ID: 19050
  Gene Name: UDP-Gal:betaGlcNAc beta 1,4- galactosyltransferase, polypeptide 2
  Uniprot ID: O60909
  ENSP ID: ENSP00000310696
MAVEVQEQWPCLPAAGCPGPLGGPVAACGMSRLLGGTLERVCKAVLLLCLLHFLVAVILYFDVYAQHLAFFSRFSARGPAHALHPAASSSSSSSNCSRPNATASSSGLPEVPSALPGPTAPTLPPCPDSPPGLVGRLLIEFTSPMPLERVQRENPGVLMGGRYTPPDCTPAQTVAVIIPFRHREHHLRYWLHYLHPILRRQRLRYGVYVINQHGEDTFNRAKLLNVGFLEALKEDAAYDCFIFSDVDLVPMDDRNLYRCGDQPRHFAIAMDKFGFRLPYAGYFGGVSGLSKAQFLRINGFPNEYWGWGGEDDDIFNRISLTGMKISRPDIRIGRYRMIKHDRDKHNEPNPQRFTKIQNTKLTMKRDGIGSVRYQVLEVSRQPLFTNITVDIGRPPSWPPRG

SEQ ID NO: 95511 - protein, 372 aa, Homo sapiens
  Payload ID: 19050
  Gene Name: UDP-Gal:betaGlcNAc beta 1,4- galactosyltransferase, polypeptide 2
  Uniprot ID: O60909
  ENSP ID: ENSP00000349293
MSRLLGGTLERVCKAVLLLCLLHFLVAVILYFDVYAQHLAFFSRFSARGPAHALHPAASSSSSSSNCSRPNATASSSGLPEVPSALPGPTAPTLPPCPDSPPGLVGRLLIEFTSPMPLERVQRENPGVLMGGRYTPPDCTPAQTVAVIIPFRHREHHLRYWLHYLHPILRRQRLRYGVYVINQHGEDTFNRAKLLNVGFLEALKEDAAYDCFIFSDVDLVPMDDRNLYRCGDQPRHFAIAMDKFGFRLPYAGYFGGVSGLSKAQFLRINGFPNEYWGWGGEDDDIFNRISLTGMKISRPDIRIGRYRMIKHDRDKHNEPNPQRFTKIQNTKLTMKRDGIGSVRYQVLEVSRQPLFTNITVDIGRPPSWPPRG

SEQ ID NO: 95512 - protein, 372 aa, Homo sapiens; identical to SEQ ID NO: 95511
  Payload ID: 19050
  Gene Name: UDP-Gal:betaGlcNAc beta 1,4- galactosyltransferase, polypeptide 2
  Uniprot ID: O60909
  ENSP ID: ENSP00000361399

SEQ ID NO: 95513 - protein, 306 aa, Homo sapiens
  Payload ID: 19050
  Gene Name: UDP-Gal:betaGlcNAc beta 1,4- galactosyltransferase, polypeptide 2
  Uniprot ID: O60909
  ENSP ID: ENSP00000407468
MPSTQLLAAAAAAATAPGPTPPPLAPGSLRSPVPCPVPRLPRCHPVLTRHLVLRVQRENPGVLMGGRYTPPDCTPAQTVAVIIPFRHREHHLRYWLHYLHPILRRQRLRYGVYVINQHGEDTFNRAKLLNVGFLEALKEDAAYDCFIFSDVDLVPMDDRNLYRCGDQPRHFAIAMDKFGFRLPYAGYFGGVSGLSKAQFLRINGFPNEYWGWGGEDDDIFNRISLTGMKISRPDIRIGRYRMIKHDRDKHNEPNPQRFTKIQNTKLTMKRDGIGSVRYQVLEVSRQPLFTNITVDIGRPPSWPPRG

SEQ ID NO: 95514 - protein, 393 aa, Homo sapiens
  Payload ID: 19051
  Gene Name: UDP-Gal:betaGlcNAc beta 1,4- galactosyltransferase, polypeptide 3
  Uniprot ID: O60512
  ENSP ID: ENSP00000320965
MLRRLLERPCTLALLVGSQLAVMMYLSLGGFRSLSALFGRDQGPTFDYSHPRDVYSNLSHLPGAPGGPPAPQGLPYCPERSPLLVGPVSVSFSPVPSLAEIVERNPRVEPGGRYRPAGCEPRSRTAIIVPHRAREHHLRLLLYHLHPFLQRQQLAYGIYVIHQAGNGTFNRAKLLNVGVREALRDEEWDCLFLHDVDLLPENDHNLYVCDPRGPRHVAVAMNKFGYSLPYPQYFGGVSALTPDQYLKMNGFPNEYWGWGGEDDDIATRVRLAGMKISRPPTSVGHYKMVKHRGDKGNEENPHRFDLLVRTQNSWTQDGMNSLTYQLLARELGPLYTNITADIGTDPRGPRAPSGPRYPPGSSQAFRQEMLQRRPPARPGPLSTANHTALRGSH

SEQ ID NO: 95515 - protein, 393 aa, Homo sapiens; identical to SEQ ID NO: 95514
  Payload ID: 19051
  Gene Name: UDP-Gal:betaGlcNAc beta 1,4- galactosyltransferase, polypeptide 3
  Uniprot ID: O60512
  ENSP ID: ENSP00000356977

SEQ ID NO: 95516 - protein, 393 aa, Homo sapiens; identical to SEQ ID NO: 95514
  Payload ID: 19051
  Gene Name: UDP-Gal:betaGlcNAc beta 1,4- galactosyltransferase, polypeptide 3
  Uniprot ID: O60512
  ENSP ID: ENSP00000480428

SEQ ID NO: 95517 - protein, 344 aa, Homo sapiens
  Payload ID: 19052
  Gene Name: UDP-Gal:betaGlcNAc beta 1,4- galactosyltransferase, polypeptide 4
  Uniprot ID: O60513
  ENSP ID: ENSP00000352144
MGFNLTFHLSYKFRLLLLLTLCLTVVGWATSNYFVGAIQEIPKAKEFMANFHKTLILGKGKTLTNEASTKKVELDNCPSVSPYLRGQSKLIFKPDLTLEEVQAENPKVSRGRYRPQECKALQRVAILVPHRNREKHLMYLLEHLHPFLQRQQLDYGIYVIHQAEGKKFNRAKLLNVGYLEALKEENWDCFIFHDVDLVPENDFNLYKCEEHPKHLVVGRNSTGYRLRYSGYFGGVTALSREQFFKVNGFSNNYWGWGGEDDDLRLRVELQRMKISRPLPEVGKYTMVFHTRDKGNEVNAERMKLLHQVSRVWRTDGLSSCSYKLVSVEHNPLYINITVDFWFGA

SEQ ID NO: 95518 - protein, 344 aa, Homo sapiens; identical to SEQ ID NO: 95517
  Payload ID: 19052
  Gene Name: UDP-Gal:betaGlcNAc beta 1,4- galactosyltransferase, polypeptide 4
  Uniprot ID: O60513
  ENSP ID: ENSP00000377360

SEQ ID NO: 95519 - protein, 136 aa, Homo sapiens
  Payload ID: 19052
  Gene Name: UDP-Gal:betaGlcNAc beta 1,4- galactosyltransferase, polypeptide 4
  ENSP ID: ENSP00000417188
MGFNLTFHLSYKFRLLLLLTLCLTVVGWATSNYFVGAIQEIPKAKEFMANFHKTLILGKGKTLTNEASTKKVELDNCPSVSPYLRGQSKLIFKPDLTLEEVQAENPKVSRGRYRPQECKALQRVAILVPHRNREKH

SEQ ID NO: 95520 - protein, 301 aa, Homo sapiens
  Payload ID: 19052
  Gene Name: UDP-Gal:betaGlcNAc beta 1,4- galactosyltransferase, polypeptide 4
  ENSP ID: ENSP00000417226
MGFNLTFHLSYKFRLLLLLTLCLTVVGWATSNYFVGAIQEIPKAKEFMANFHKTLILGKGKTLTNEASTKKVELDNCPSVSPYLRGQSKLIFKPDLTLEEVQAENPKVSRGRYRPQECKALQRVAILVPHRNREKHLMYLLEHLHPFLQRQQLDYGIYVIHQAEGKKFNRAKLLNVGYLEALKEENWDCFIFHDVDLVPENDFNLYKCEEHPKHLVVGRNSTGYRLRYSGYFGGVTALSREQFFKVNGFSNNYWGWGGEDDDLRLRVELQRMKISRPLPEVGKYTMVFHTRDKGNEVNAER

SEQ ID NO: 95521 - protein, 62 aa, Homo sapiens
  Payload ID: 19052
  Gene Name: UDP-Gal:betaGlcNAc beta 1,4- galactosyltransferase, polypeptide 4
  ENSP ID: ENSP00000417527
MANFHKTLILGKGKTLTNEASTKKVELDNCPSVSPYLRGQSKLIFKPDLTLEEVQEIRLLNV

SEQ ID NO: 95522 - protein, 118 aa, Homo sapiens
  Payload ID: 19052
  Gene Name: UDP-Gal:betaGlcNAc beta 1,4- galactosyltransferase, polypeptide 4
  ENSP ID: ENSP00000417958
MGFNLTFHLSYKFRLLLLLTLCLTVVGWATSNYFVGAIQEIPKAKEFMANFHKTLILGKGKTLTNEASTKKVELDNCPSVSPYLRGQSKLIFKPDLTLEEVQAENPKVSRGRYRPQEC

SEQ ID NO: 95523 - protein, 2 aa, Homo sapiens
  Payload ID: 19052
  Gene Name: UDP-Gal:betaGlcNAc beta 1,4- galactosyltransferase, polypeptide 4
  ENSP ID: ENSP00000418278
MG

SEQ ID NO: 95524 - protein, 41 aa, Homo sapiens
  Payload ID: 19052
  Gene Name: UDP-Gal:betaGlcNAc beta 1,4- galactosyltransferase, polypeptide 4
  ENSP ID: ENSP00000418436
MGFNLTFHLSYKFRLLLLLTLCLTVVGWATSNYFVGAIQEI

SEQ ID NO: 95525 - protein, 6 aa, Homo sapiens
  Payload ID: 19052
  Gene Name: UDP-Gal:betaGlcNAc beta 1,4- galactosyltransferase, polypeptide 4
  ENSP ID: ENSP00000419275
MGFNLT

SEQ ID NO: 95526 - protein, 21 aa, Homo sapiens
  Payload ID: 19052
  Gene Name: UDP-Gal:betaGlcNAc beta 1,4- galactosyltransferase, polypeptide 4
  ENSP ID: ENSP00000419916
MGFNLTFHLSYKFRLLLLLTL

SEQ ID NO: 95527 - protein, 25 aa, Homo sapiens
  Payload ID: 19052
  Gene Name: UDP-Gal:betaGlcNAc beta 1,4- galactosyltransferase, polypeptide 4
  ENSP ID: ENSP00000419919
MYLLEHLHPFLQRQQLDYGIYVIHQ

SEQ ID NO: 95528 - protein, 344 aa, Homo sapiens; identical to SEQ ID NO: 95517
  Payload ID: 19052
  Gene Name: UDP-Gal:betaGlcNAc beta 1,4- galactosyltransferase, polypeptide 4
  Uniprot ID: O60513
  ENSP ID: ENSP00000420161

SEQ ID NO: 95529 - protein, 54 aa, Homo sapiens
  Payload ID: 19052
  Gene Name: UDP-Gal:betaGlcNAc beta 1,4- galactosyltransferase, polypeptide 4
  ENSP ID: ENSP00000420535
MGFNLTFHLSYKFRLLLLLTLCLTVVGWATSNYFVGAIQEIPKAKEFMANFHKT

SEQ ID NO: 95530 - protein, 246 aa, Homo sapiens
  Payload ID: 19052
  Gene Name: UDP-Gal:betaGlcNAc beta 1,4- galactosyltransferase, polypeptide 4
  ENSP ID: ENSP00000420665
MGFNLTFHLSYKFRLLLLLTLCLTVVGWATSNYFVGAIQEIPKAKEFMANFHKTLILGKGKTLTNEASTKKVELDNCPSVSPYLRGQSKLIFKPDLTLEEVQAENPKVSRGRYRPQECKALQRVAILVPHRNREKHLMYLLEHLHPFLQRQQLDYGIYVIHQAEGKKFNRAKLLNVGYLEALKEENWDCFIFHDVDLVPENDFNLYKCEEHPKHLVVGRNSTGYRLRYSGYFGGVTALSREQFFKG

SEQ ID NO: 95531 - protein, 388 aa, Homo sapiens
  Payload ID: 19053
  Gene Name: UDP-Gal:betaGlcNAc beta 1,4- galactosyltransferase, polypeptide 5
  Uniprot ID: O43286
  ENSP ID: ENSP00000360776
MRARRGLLRLPRRSLLAALFFFSLSSSLLYFVYVAPGIVNTYLFMMQAQGILIRDNVRTIGAQVYEQVLRSAYAKRNSSVNDSDYPLDLNHSETFLQTTTFLPEDFTYFANHTCPERLPSMKGPIDINMSEIGMDYIHELFSKDPTIKLGGHWKPSDCMPRWKVAILIPFRNRHEHLPVLFRHLLPMLQRQRLQFAFYVVEQVGTQPFNRAMLFNVGFQEAMKDLDWDCLIFHDVDHIPESDRNYYGCGQMPRHFATKLDKYMYLLPYTEFFGGVSGLTVEQFRKINGFPNAFWGWGGEDDDLWNRVQNAGYSVSRPEGDTGKYKSIPHHHRGEVQFLGRYALLRKSKERQGLDGLNNLNYFANITYDALYKNITVNLTPELAQVNEY

SEQ ID NO: 95532 - protein, 343 aa, Homo sapiens
  Payload ID: 19054
  Gene Name: UDP-Gal:betaGlcNAc beta 1,4- galactosyltransferase, polypeptide 6
  ENSP ID: ENSP00000237019
MSVLRRMMRVSNRSLLAFIFFFSLSSSCLYFIYVAPGIDYPEGNNSSDYLVQTTTYLPENFTYSPYLPCPEKLPYMRGFLNVNVSEVSFDEIHQLFSKDLDIEPGGHWRPKDCKPRWKVAVLIPFRNRHEHLPIFFLHLIPMLQKQRLEFAFYVIEQTGTQPFNRAMLFNVGFKEAMKDSVWDCVIFHDVDHLPENDRNYYGCGEMPRHFAAKLDKYMYILPYKEFFGGVSGLTVEQFRKINGFPNAFWGWGGEDDDLWNRVHYAGYNVTRPEGDLGKYKSIPHHHRGEVQFLGRYKLLRYSKERQYIDGLNNLIYRPKILVDRLYTNISVNLMPELAPIEDY

SEQ ID NO: 95533 - protein, 382 aa, Homo sapiens
  Payload ID: 19054
  Gene Name: UDP-Gal:betaGlcNAc beta 1,4- galactosyltransferase, polypeptide 6
  Uniprot ID: Q9UBX8
  ENSP ID: ENSP00000306459
MSVLRRMMRVSNRSLLAFIFFFSLSSSCLYFIYVAPGIANTYLFMVQARGIMLRENVKTIGHMIRLYTNKNSTLNGTDYPEGNNSSDYLVQTTTYLPENFTYSPYLPCPEKLPYMRGFLNVNVSEVSFDEIHQLFSKDLDIEPGGHWRPKDCKPRWKVAVLIPFRNRHEHLPIFFLHLIPMLQKQRLEFAFYVIEQTGTQPFNRAMLFNVGFKEAMKDSVWDCVIFHDVDHLPENDRNYYGCGEMPRHFAAKLDKYMYILPYKEFFGGVSGLTVEQFRKINGFPNAFWGWGGEDDDLWNRVHYAGYNVTRPEGDLGKYKSIPHHHRGEVQFLGRYKLLRYSKERQYIDGLNNLIYRPKILVDRLYTNISVNLMPELAPIEDY

SEQ ID NO: 95534 - protein, 343 aa, Homo sapiens
  Payload ID: 19054
  Gene Name: UDP-Gal:betaGlcNAc beta 1,4- galactosyltransferase, polypeptide 6
  Uniprot ID: Q9UBX8
  ENSP ID: ENSP00000372613
MSVLRRMMRVSNRSLLAFIFFFSLSSSCLYFIYVAPGIANTYLFMVQARGIMLRENVKTIGHMIRLYTNKNSTLNGTDYPEGNNSSDYLVQTTTYLPENFTYSPYLPCPEKLPYMRGFLNVNVSEVSFDEIHQLFSKDLDIEPGGHWRPKDCKPRWKTGTQPFNRAMLFNVGFKEAMKDSVWDCVIFHDVDHLPENDRNYYGCGEMPRHFAAKLDKYMYILPYKEFFGGVSGLTVEQFRKINGFPNAFWGWGGEDDDLWNRVHYAGYNVTRPEGDLGKYKSIPHHHRGEVQFLGRYKLLRYSKERQYIDGLNNLIYRPKILVDRLYTNISVNLMPELAPIEDY

SEQ ID NO: 95535 - protein, 71 aa, Homo sapiens
  Payload ID: 19054
  Gene Name: UDP-Gal:betaGlcNAc beta 1,4- galactosyltransferase, polypeptide 6
  ENSP ID: ENSP00000463961
MVQARGIMLRENVKTIGHMIRLYTNKNSTLNGTDYPEGNNSSDYLVQTTTYLPENFTYSPYLPCPEKLPYM

SEQ ID NO: 95536 - protein, 348 aa, Homo sapiens
  Payload ID: 19055
  Gene Name: UDP-galactose-4-epimerase
  Uniprot ID: Q14376
  ENSP ID: ENSP00000363621
MAEKVLVTGGAGYIGSHTVLELLEAGYLPVVIDNFHNAFRGGGSLPESLRRVQELTGRSVEFEEMDILDQGALQRLFKKYSFMAVIHFAGLKAVGESVQKPLDYYRVNLTGTIQLLEIMKAHGVKNLVFSSSATVYGNPQYLPLDEAHPTGGCTNPYGKSKFFIEEMIRDLCQADKTWNAVLLRYFNPTGAHASGCIGEDPQGIPNNLMPYVSQVAIGRREALNVFGNDYDTEDGTGVRDYIHVVDLAKGHIAALRKLKEQCGCRIYNLGTGTGYSVLQMVQAMEKASGKKIPYKVVARREGDVAACYANPSLAQEELGWTAALGLDRMCEDLWRWQKQNPSGFGTQA

SEQ ID NO: 95537 - protein, 194 aa, Homo sapiens
  Payload ID: 19055
  Gene Name: UDP-galactose-4-epimerase
  ENSP ID: ENSP00000393359
MAEKVLVTGGAGYIGSHTVLELLEAGYLPVVIDNFHNAFRGGGSLPESLRRVQELTGRSVEFEEMDILDQGALQRLFKKYSFMAVIHFAGLKAVGESVQKPLDYYRVNLTGTIQLLEIMKAHGVKNLVFSSSATVYGNPQYLPLDEAHPTGGCTNPYGKSKFFIEEMIRDLCQADKTWNAVLLRYFNPTGAHAS

SEQ ID NO: 95538 - protein, 108 aa, Homo sapiens
  Payload ID: 19055
  Gene Name: UDP-galactose-4-epimerase
  ENSP ID: ENSP00000397045
VAIGRREALNVFGNDYDTEDGTGVRDYIHVVDLAKGHIAALRKLKEQCGCRIPYKVVARREGDVAACYANPSLAQEELGWTAALGLDRMCEDLWRWQKQNPSGFGTQA

SEQ ID NO: 95539 - protein, 194 aa, Homo sapiens; identical to SEQ ID NO: 95537
  Payload ID: 19055
  Gene Name: UDP-galactose-4-epimerase
  ENSP ID: ENSP00000398257

SEQ ID NO: 95540 - protein, 239 aa, Homo sapiens
  Payload ID: 19055
  Gene Name: UDP-galactose-4-epimerase
  ENSP ID: ENSP00000398585
MDILDQGALQRLFKKYSFMAVIHFAGLKAVGESVQKPLDYYRVNLTGTIQLLEIMKAHGVKNLVFSSSATVYGNPQYLPLDEAHPTGGCTNPYGKSKFFIEEMIRDLCQADKTWNAVLLRYFNPTGAHASGCIGEDPQGIPNNLMPYVSQVAIGRREALNVFGNDYDTEDGTGVRDYIHVVDLAKGHIAALRKLKEQCGCRIPYKVVARREGDVAACYANPSLAQEELGWTAALGLDRM

SEQ ID NO: 95541 - protein, 227 aa, Homo sapiens
  Payload ID: 19055
  Gene Name: UDP-galactose-4-epimerase
  ENSP ID: ENSP00000414719
MDILDQGALQRLFKKYSFMAVIHFAGLKAVGESVQKPLDYYRVNLTGTIQLLEIMKAHGVKNLVFSSSATVYGNPQYLPLDEAHPTGGCTNPYGKSKFFIEEMIRDLCQADKTWNAVLLRYFNPTGAHASGCIGEDPQGIPNNLMPYVSQVAIGRREALNVFGNDYDTEDGTGVRDYIHVVDLAKGHIAALRKLKEQCGCRIYNLGTGTGYSVLQMVQAMEKASGKK

SEQ ID NO: 95542 - protein, 348 aa, Homo sapiens; identical to SEQ ID NO: 95536
  Payload ID: 19055
  Gene Name: UDP-galactose-4-epimerase
  Uniprot ID: Q14376
  ENSP ID: ENSP00000483375

SEQ ID NO: 95543 - protein, 397 aa, Homo sapiens
  Payload ID: 19056
  Gene Name: UDP-GlcNAc:betaGal beta-1,3-N- acetylglucosaminyltransferase 2
  Uniprot ID: Q9NY97
  ENSP ID: ENSP00000305595
MSVGRRRIKLLGILMMANVFIYFIMEVSKSSSQEKNGKGEVIIPKEKFWKISTPPEAYWNREQEKLNRQYNPILSMLTNQTGEAGRLSNISHLNYCEPDLRVTSVVTGFNNLPDRFKDFLLYLRCRNYSLLIDQPDKCAKKPFLLLAIKSLTPHFARRQAIRESWGQESNAGNQTVVRVFLLGQTPPEDNHPDLSDMLKFESEKHQDILMWNYRDTFFNLSLKEVLFLRWVSTSCPDTEFVFKGDDDVFVNTHHILNYLNSLSKTKAKDLFIGDVIHNAGPHRDKKLKYYIPEVVYSGLYPPYAGGGGFLYSGHLALRLYHITDQVHLYPIDDVYTGMCLQKLGLVPEKHKGFRTFDIEEKNKNNICSYVDLMLVHSRKPQEMIDIWSQLQSAHLKC

SEQ ID NO: 95544 - protein, 397 aa, Homo sapiens; identical to SEQ ID NO: 95543
  Payload ID: 19056
  Gene Name: UDP-GlcNAc:betaGal beta-1,3-N-acetylglucosaminyltransferase 2
  Uniprot ID: Q9NY97
  ENSP ID: ENSP00000384692

SEQ ID NO: 95545 - protein, 372 aa, Homo sapiens
  Payload ID: 19057
  Gene Name: UDP-GlcNAc:betaGal beta-1,3-N-acetylglucosaminyltransferase 3
  Uniprot ID: Q9Y2A9
  ENSP ID: ENSP00000321874
MKYLRHRRPNATLILAIGAFTLLLFSLLVSPPTCKVQEQPPAIPEALAWPTPPTRPAPAPCHANTSMVTHPDFATQPQHVQNFLLYRHCRHFPLLQDVPPSKCAQPVFLLLVIKSSPSNYVRRELLRRTWGRERKVRGLQLRLLFLVGTASNPHEARKVNRLLELEAQTHGDILQWDFHDSFFNLTLKQVLFLQWQETRCANASFVLNGDDDVFAHTDNMVFYLQDHDPGRHLFVGQLIQNVGPIRAFWSKYYVPEVVTQNERYPPYCGGGGFLLSRFTAAALRRAAHVLDIFPIDDVFLGMCLELEGLKPASHSGIRTSGVRAPSQRLSSFDPCFYRDLLLVHRFLPYEMLLMWDALNQPNLTCGNQTQIY

SEQ ID NO: 95546 - protein, 127 aa, Homo sapiens
  Payload ID: 19057
  Gene Name: UDP-GlcNAc:betaGal beta-1,3-N-acetylglucosaminyltransferase 3
  ENSP ID: ENSP00000468914
MKYLRHRRPNATLILAIGAFTLLLFSLLVSPPTCKVQEQPPAIPEALAWPTPPTRPAPAPCHANTSMVTHPDFATQPQHVQNFLLYRHCRHFPLLQDVPPSKCAQPVFLLLVIKSSPSNYVRRELLR

SEQ ID NO: 95547 - protein, 250 aa, Homo sapiens
  Payload ID: 19057
  Gene Name: UDP-GlcNAc:betaGal beta-1,3-N-acetylglucosaminyltransferase 3
  ENSP ID: ENSP00000471733
MKYLRHRRPNATLILAIGAFTLLLFSLLVSPPTCKVQEQPPAIPEALAWPTPPTRPAPAPCHANTSMVTHPDFATQPQHVQNFLLYRHCRHFPLLQDVPPSKCAQPVFLLLVIKSSPSNYVRRELLRRTWGRERKVRGLQLRLLFLVGTASNPHEARKVNRLLELEAQTHGDILQWDFHDSFFNLTLKQVLFLQWQETRCANASFVLNGDDDVFAHTDNMVFYLQDHDPGRHLFVGQLIQNVGPIRAFWS

SEQ ID NO: 95548 - protein, 372 aa, Homo sapiens; identical to SEQ ID NO: 95545
  Payload ID: 19057
  Gene Name: UDP-GlcNAc:betaGal beta-1,3-N-acetylglucosaminyltransferase 3
  Uniprot ID: Q9Y2A9
  ENSP ID: ENSP00000472638

SEQ ID NO: 95549 - protein, 378 aa, Homo sapiens
  Payload ID: 19058
  Gene Name: UDP-GlcNAc:betaGal beta-1,3-N-acetylglucosaminyltransferase 4
  Uniprot ID: Q9C0J1
  ENSP ID: ENSP00000319636
MLPPQPSAAHQGRGGRSGLLPKGPAMLCRLCWLVSYSLAVLLLGCLLFLRKAAKPAGDPTAHQPFWAPPTPRHSRCPPNHTVSSASLSLPSRHRLFLTYRHCRNFSILLEPSGCSKDTFLLLAIKSQPGHVERRAAIRSTWGRVGGWARGRQLKLVFLLGVAGSAPPAQLLAYESREFDDILQWDFTEDFFNLTLKELHLQRWVVAACPQAHFMLKGDDDVFVHVPNVLEFLDGWDPAQDLLVGDVIRQALPNRNTKVKYFIPPSMYRATHYPPYAGGGGYVMSRATVRRLQAIMEDAELFPIDDVFVGMCLRRLGLSPMHHAGFKTFGIRRPLDPLDPCLYRGLLLVHRLSPLEMWTMWALVTDEGLKCAAGPIPQR

SEQ ID NO: 95550 - protein, 353 aa, Homo sapiens
  Payload ID: 19058
  Gene Name: UDP-GlcNAc:betaGal beta-1,3-N-acetylglucosaminyltransferase 4
  Uniprot ID: Q9C0J1
  ENSP ID: ENSP00000438840
MLCRLCWLVSYSLAVLLLGCLLFLRKAAKPAGDPTAHQPFWAPPTPRHSRCPPNHTVSSASLSLPSRHRLFLTYRHCRNFSILLEPSGCSKDTFLLLAIKSQPGHVERRAAIRSTWGRVGGWARGRQLKLVFLLGVAGSAPPAQLLAYESREFDDILQWDFTEDFFNLTLKELHLQRWVVAACPQAHFMLKGDDDVFVHVPNVLEFLDGWDPAQDLLVGDVIRQALPNRNTKVKYFIPPSMYRATHYPPYAGGGGYVMSRATVRRLQAIMEDAELFPIDDVFVGMCLRRLGLSPMHHAGFKTFGIRRPLDPLDPCLYRGLLLVHRLSPLEMWTMWALVTDEGLKCAAGPIPQR

SEQ ID NO: 95551 - protein, 353 aa, Homo sapiens; identical to SEQ ID NO: 95550
  Payload ID: 19058
  Gene Name: UDP-GlcNAc:betaGal beta-1,3-N-acetylglucosaminyltransferase 4
  Uniprot ID: Q9C0J1
  ENSP ID: ENSP00000444534

SEQ ID NO: 95552 - protein, 378 aa, Homo sapiens
  Payload ID: 19059
  Gene Name: UDP-GlcNAc:betaGal beta-1,3-N-acetylglucosaminyltransferase 5
  Uniprot ID: Q9BYG0
  ENSP ID: ENSP00000316173
MRMLVSGRRVKKWQLIIQLFATCFLASLMFFWEPIDNHIVSHMKSYSYRYLINSYDFVNDTLSLKHTSAGPRYQYLINHKEKCQAQDVLLLLFVKTAPENYDRRSGIRRTWGNENYVRSQLNANIKTLFALGTPNPLEGEELQRKLAWEDQRYNDIIQQDFVDSFYNLTLKLLMQFSWANTYCPHAKFLMTADDDIFIHMPNLIEYLQSLEQIGVQDFWIGRVHRGAPPIRDKSSKYYVSYEMYQWPAYPDYTAGAAYVISGDVAAKVYEASQTLNSSLYIDDVFMGLCANKIGIVPQDHVFFSGEGKTPYHPCIYEKMMTSHGHLEDLQDLWKNATDPKVKTISKGFFGQIYCRLMKIILLCKISYVDTYPCRAAFI

SEQ ID NO: 95553 - protein, 50 aa, Homo sapiens
  Payload ID: 19059
  Gene Name: UDP-GlcNAc:betaGal beta-1,3-N-acetylglucosaminyltransferase 5
  ENSP ID: ENSP00000417301
MRMLVSGRRVKKWQLIIQLFATCFLASLMFFWEPIDNHIVSHMKSYSYRY

SEQ ID NO: 95554 - protein, 378 aa, Homo sapiens; identical to SEQ ID NO: 95552
  Payload ID: 19059
  Gene Name: UDP-GlcNAc:betaGal beta-1,3-N-acetylglucosaminyltransferase 5
  Uniprot ID: Q9BYG0
  ENSP ID: ENSP00000417868

SEQ ID NO: 95555 - protein, 81 aa, Homo sapiens
  Payload ID: 19059
  Gene Name: UDP-GlcNAc:betaGal beta-1,3-N-acetylglucosaminyltransferase 5
  ENSP ID: ENSP00000418477
MRMLVSGRRVKKWQLIIQLFATCFLASLMFFWEPIDNHIVSHMKSYSYRYLINSYDFVNDTLSLKHTSAGPRYQYLINHKE

SEQ ID NO: 95556 - protein, 62 aa, Homo sapiens
  Payload ID: 19059
  Gene Name: UDP-GlcNAc:betaGal beta-1,3-N-acetylglucosaminyltransferase 5
  ENSP ID: ENSP00000418785
MRMLVSGRRVKKWQLIIQLFATCFLASLMFFWEPIDNHIVSHMKSYSYRYLINSYDFVNDTL

SEQ ID NO: 95557 - protein, 378 aa, Homo sapiens; identical to SEQ ID NO: 95552
  Payload ID: 19059
  Gene Name: UDP-GlcNAc:betaGal beta-1,3-N-acetylglucosaminyltransferase 5
  Uniprot ID: Q9BYG0
  ENSP ID: ENSP00000420778

SEQ ID NO: 95558 - protein, 121 aa, Homo sapiens
  Payload ID: 19060
  Gene Name: UDP-GlcNAc:betaGal beta-1,3-N-acetylglucosaminyltransferase 6
  ENSP ID: ENSP00000435628
MAFPCRRSLTAKTLACLLVGVSFLALQQWFLQAPRSPREERSPQEETPEGPTDAPAADEPPSELVPGPPCVANASANATADFEQLPARIQDFLRYRHCRHFPLLWDAPAKCAGGRGVFLLL

SEQ ID NO: 95559 - protein, 384 aa, Homo sapiens
  Payload ID: 19060
  Gene Name: UDP-GlcNAc:betaGal beta-1,3-N-acetylglucosaminyltransferase 6
  Uniprot ID: Q6ZMB0
  ENSP ID: ENSP00000484640
MAFPCRRSLTAKTLACLLVGVSFLALQQWFLQAPRSPREERSPQEETPEGPTDAPAADEPPSELVPGPPCVANASANATADFEQLPARIQDFLRYRHCRHFPLLWDAPAKCAGGRGVFLLLAVKSAPEHYERRELIRRTWGQERSYGGRPVRRLFLLGTPGPEDEARAERLAELVALEAREHGDVLQWAFADTFLNLTLKHLHLLDWLAARCPHARFLLSGDDDVFVHTANVVRFLQAQPPGRHLFSGQLMEGSVPIRDSWSKYFVPPQLFPGSAYPVYCSGGGFLLSGPTARALRAAARHTPLFPIDDAYMGMCLERAGLAPSGHEGIRPFGVQLPGAQQSSFDPCMYRELLLVHRFAPYEMLLMWKALHSPALSCDRGHRVS

SEQ ID NO: 95560 - protein, 401 aa, Homo sapiens
  Payload ID: 19061
  Gene Name: UDP-GlcNAc:betaGal beta-1,3-N-acetylglucosaminyltransferase 7
  Uniprot ID: Q8NFL0
  ENSP ID: ENSP00000287590
MSLWKKTVYRSLCLALALLVAVTVFQRSLTPGQFLQEPPPPTLEPQKAQKPNGQLVNPNNFWKNPKDVAAPTPMASQGPQAWDVTTTNCSANINLTHQPWFQVLEPQFRQFLFYRHCRYFPMLLNHPEKCRGDVYLLVVVKSVITQHDRREAIRQTWGRERQSAGGGRGAVRTLFLLGTASKQEERTHYQQLLAYEDRLYGDILQWGFLDTFFNLTLKEIHFLKWLDIYCPHVPFIFKGDDDVFVNPTNLLEFLADRQPQENLFVGDVLQHARPIRRKDNKYYIPGALYGKASYPPYAGGGGFLMAGSLARRLHHACDTLELYPIDDVFLGMCLEVLGVQPTAHEGFKTFGISRNRNSRMNKEPCFFRAMLVVHKLLPPELLAMWGLVHSNLTCSRKLQVL

SEQ ID NO: 95561 - protein, 397 aa, Homo sapiens
  Payload ID: 19062
  Gene Name: UDP-GlcNAc:betaGal beta-1,3-N-acetylglucosaminyltransferase 8
  Uniprot ID: Q7Z7M8
  ENSP ID: ENSP00000312700
MRCPKCLLCLSALLTLLGLKVYIEWTSESRLSKAYPSPRGTPPSPTPANPEPTLPANLSTRLGQTIPLPFAYWNQQQWRLGSLPSGDSTETGGCQAWGAAAATEIPDFASYPKDLRRFLLSAACRSFPQWLPGGGGSQVSSCSDTDVPYLLLAVKSEPGRFAERQAVRETWGSPAPGIRLLFLLGSPVGEAGPDLDSLVAWESRRYSDLLLWDFLDVPFNQTLKDLLLLAWLGRHCPTVSFVLRAQDDAFVHTPALLAHLRALPPASARSLYLGEVFTQAMPLRKPGGPFYVPESFFEGGYPAYASGGGYVIAGRLAPWLLRAAARVAPFPFEDVYTGLCIRALGLVPQAHPGFLTAWPADRTADHCAFRNLLLVRPLGPQASIRLWKQLQDPRLQC

SEQ ID NO: 95562 - protein, 402 aa, Homo sapiens
  Payload ID: 19063
  Gene Name: UDP-GlcNAc:betaGal beta-1,3-N-acetylglucosaminyltransferase 9
  Uniprot ID: Q6UX72
  ENSP ID: ENSP00000400157
MRRRLRLRRDALLTLLLGASLGLLLYAQRDGAAPTASAPRGRGRAAPRPTPGPRAFQLPDAGAAPPAYEGDTPAPPTPTGPFDFARYLRAKDQRRFPLLINQPHKCRGDGAPGGRPDLLIAVKSVAEDFERRQAVRQTWGAEGRVQGALVRRVFLLGVPRGAGSGGADEVGEGARTHWRALLRAESLAYADILLWAFDDTFFNLTLKEIHFLAWASAFCPDVRFVFKGDADVFVNVGNLLEFLAPRDPAQDLLAGDVIVHARPIRTRASKYYIPEAVYGLPAYPAYAGGGGFVLSGATLHRLAGACAQVELFPIDDVFLGMCLQRLRLTPEPHPAFRTFGIPQPSAAPHLSTFDPCFYRELVVVHGLSAADIWLMWRLLHGPHGPACAHPQPVAAGPFQWDS

SEQ ID NO: 95563 - protein, 361 aa, Homo sapiens
  Payload ID: 19064
  Gene Name: UDP-GlcNAc:betaGal beta-1,3-N-acetylglucosaminyltransferase-like 1
  Uniprot ID: Q67FW5
  ENSP ID: ENSP00000319979
MSGAGVGGASEESQAMQAHVSIILPVHNAEPWLDECLRSVLQQDFEGTMELSVFNDASKDKSGAIIEKWRVKLEDSGVHVIIGGHDSPSPRGVGYAKNQAVAQSSGSYLCFLDSDDVMMPQRVRLQHEAAVQHPSSIIGCRVRRDPPNSTERYTRWINQLTPEQLLTQVFTSNGPTVIMPTWFCSRAWFSHVGPFNEGGQGVPEDLLFFYEHLRKGGGVIRVDQSLLLYRHHPQAATHCVLETTIWTHRVRFLEEQALPRWAAFTIWNAGKQGRRLYRSLTAGSQRKVVAFCDVDENKIRKGFYCHEDSQERPKPRIPILHFRAARPPFVICVKLDLTGGAFEDNLRSLHLQEGQDFLHFS

SEQ ID NO: 95564 - protein, 53 aa, Homo sapiens
  Payload ID: 19064
  Gene Name: UDP-GlcNAc:betaGal beta-1,3-N-acetylglucosaminyltransferase-like 1
  ENSP ID: ENSP00000458682
MSGAGVGGASEESQAMQAHVSIILPVHNAEPWLDECLRSVLQQDFEGQVWGYH

SEQ ID NO: 95565 - protein, 183 aa, Homo sapiens
  Payload ID: 19064
  Gene Name: UDP-GlcNAc:betaGal beta-1,3-N-acetylglucosaminyltransferase-like 1
  ENSP ID: ENSP00000459327
MPTWFCSRAWFSHVGPFNEGGQGVPEDLLFFYEHLRKGGGVIRVDQSLLLYRHHPQAATHCVLETTIWTHRVRFLEEQALPRWAAFTIWNAGKQGRRLYRSLTAGSQRKVVAFCDVDENKIRKGFYCHEDSQERPKPRIPILHFRAARPPFVICVKLDLTGGAFEDNLRSLHLQEGQDFLHFS

SEQ ID NO: 95566 - protein, 250 aa, Homo sapiens
  Payload ID: 19064
  Gene Name: UDP-GlcNAc:betaGal beta-1,3-N-acetylglucosaminyltransferase-like 1
  ENSP ID: ENSP00000461127
MEQVQTGGLRTGSGFLTSTLHVIQEIIGCRVRRDPPNSTERYTRWINQLTPEQLLTQVFTSNGPTVIMPTWFCSRAWFSHVGPFNEGGQGVPEDLLFFYEHLRKGGGVIRVDQSLLLYRHHPQAATHCVLETTIWTHRVRFLEEQALPRWAAFTIWNAGKQGRRLYRSLTAGSQRKVVAFCDVDENKIRKGFYCHEDSQERPKPRIPILHFRAARPPFVICVKLDLTGGAFEDNLRSLHLQEGQDFLHFS

SEQ ID NO: 95567 - protein, 361 aa, Homo sapiens; identical to SEQ ID NO: 95563
  Payload ID: 19064
  Gene Name: UDP-GlcNAc:betaGal beta-1,3-N-acetylglucosaminyltransferase-like 1
  Uniprot ID: Q67FW5
  ENSP ID: ENSP00000480784

SEQ ID NO: 95568 - protein, 53 aa, Homo sapiens; identical to SEQ ID NO: 95564
  Payload ID: 19064
  Gene Name: UDP-GlcNAc:betaGal beta-1,3-N-acetylglucosaminyltransferase-like 1
  ENSP ID: ENSP00000487675

SEQ ID NO: 95569 - protein, 183 aa, Homo sapiens; identical to SEQ ID NO: 95565
  Payload ID: 19064
  Gene Name: UDP-GlcNAc:betaGal beta-1,3-N-acetylglucosaminyltransferase-like 1
  ENSP ID: ENSP00000487755

SEQ ID NO: 95570 - protein, 250 aa, Homo sapiens; identical to SEQ ID NO: 95566
  Payload ID: 19064
  Gene Name: UDP-GlcNAc:betaGal beta-1,3-N-acetylglucosaminyltransferase-like 1
  ENSP ID: ENSP00000488207

SEQ ID NO: 95571 - protein, 494 aa, Homo sapiens
  Payload ID: 19065
  Gene Name: UDP-glucose 6-dehydrogenase
  Uniprot ID: O60701
  ENSP ID: ENSP00000319501
MFEIKKICCIGAGYVGGPTCSVIAHMCPEIRVTVVDVNESRINAWNSPTLPIYEPGLKEVVESCRGKNLFFSTNIDDAIKEADLVFISVNTPTKTYGMGKGRAADLKYIEACARRIVQNSNGYKIVTEKSTVPVRAAESIRRIFDANTKPNLNLQVLSNPEFLAEGTAIKDLKNPDRVLIGGDETPEGQRAVQALCAVYEHWVPREKILTTNTWSSELSKLAANAFLAQRISSINSISALCEATGADVEEVATAIGMDQRIGNKFLKASVGFGGSCFQKDVLNLVYLCEALNLPEVARYWQQVIDMNDYQRRRFASRIIDSLFNTVTDKKIAILGFAFKKDTGDTRESSSIYISKYLMDEGAHLHIYDPKVPREQIVVDLSHPGVSEDDQVSRLVTISKDPYEACDGAHAVVICTEWDMFKELDYERIHKKMLKPAFIFDGRRVLDGLHNELQTIGFQIETIGKKVSSKRIPYAPSGEIPKFSLQDPPNKKPKV

SEQ ID NO: 95572 - protein, 494 aa, Homo sapiens; identical to SEQ ID NO: 95571
  Payload ID: 19065
  Gene Name: UDP-glucose 6-dehydrogenase
  Uniprot ID: O60701
  ENSP ID: ENSP00000421757

SEQ ID NO: 95573 - protein, 181 aa, Homo sapiens
  Payload ID: 19065
  Gene Name: UDP-glucose 6-dehydrogenase
  ENSP ID: ENSP00000421954
MWSSGLLIQDSTIMFEIKKICCIGAGYVGGPTCSVIAHMCPEIRVTVVDVNESRINAWNSPTLPIYEPGLKEVVESCRGKNLFFSTNIDDAIKEADLVFISVNTPTKTYGMGKGRAADLKYIEACARRIVQNSNGYKIVTEKSTVPVRAAESIRRIFDANTKPNLNLQVLSNPEFLAEGTA

SEQ ID NO: 95574 - protein, 84 aa, Homo sapiens
  Payload ID: 19065
  Gene Name: UDP-glucose 6-dehydrogenase
  ENSP ID: ENSP00000422565
MFEIKKICCIGAGYVGGPTCSVIAHMCPEIRVTVVDVNESRINAWNSPTLPIYEPGLKEVVESCRGKNLFFSTNIDDAIKEADL

SEQ ID NO: 95575 - protein, 130 aa, Homo sapiens
  Payload ID: 19065
  Gene Name: UDP-glucose 6-dehydrogenase
  ENSP ID: ENSP00000422603
MFEIKKICCIGAGYVGGPTCSVIAHMCPEIRVTVVDVNESRINAWNSPTLPIYEPGLKEVVESCRGKNLFFSTNIDDAIKEADLVFISVNTPTKTYGMGKGRAADLKYIEACARRIVQNSNGYKIVTEKS

SEQ ID NO: 95576 - protein, 427 aa, Homo sapiens
  Payload ID: 19065
  Gene Name: UDP-glucose 6-dehydrogenase
  Uniprot ID: O60701
  ENSP ID: ENSP00000422909
MFEIKKICCIGAGYVGGPTCSVIAHMCPEIRVTVVDVNESRINAWNSPTLPIYEPGLKEVVESCRGKNLFFSTNIDDAIKEADLVFISVLSNPEFLAEGTAIKDLKNPDRVLIGGDETPEGQRAVQALCAVYEHWVPREKILTTNTWSSELSKLAANAFLAQRISSINSISALCEATGADVEEVATAIGMDQRIGNKFLKASVGFGGSCFQKDVLNLVYLCEALNLPEVARYWQQVIDMNDYQRRRFASRIIDSLFNTVTDKKIAILGFAFKKDTGDTRESSSIYISKYLMDEGAHLHIYDPKVPREQIVVDLSHPGVSEDDQVSRLVTISKDPYEACDGAHAVVICTEWDMFKELDYERIHKKMLKPAFIFDGRRVLDGLHNELQTIGFQIETIGKKVSSKRIPYAPSGEIPKFSLQDPPNKKPKV

SEQ ID NO: 95577 - protein, 55 aa, Homo sapiens
  Payload ID: 19065
  Gene Name: UDP-glucose 6-dehydrogenase
  ENSP ID: ENSP00000424059
MFEIKKICCIGAGYVGGPTCSVIAHMCPEIRVTVVDVNESRINAWNSPTLPIYED

SEQ ID NO: 95578 - protein, 55 aa, Homo sapiens; identical to SEQ ID NO: 95577
  Payload ID: 19065
  Gene Name: UDP-glucose 6-dehydrogenase
  ENSP ID: ENSP00000424435

SEQ ID NO: 95579 - protein, 153 aa, Homo sapiens
  Payload ID: 19065
  Gene Name: UDP-glucose 6-dehydrogenase
  ENSP ID: ENSP00000425834
MFEIKKICCIGAGYVGGPTCSVIAHMCPEIRVTVVDVNESRINAWNSPTLPIYEPGLKEVVESCRGKNLFFSTNIDDAIKEADLVFISVNTPTKTYGMGKGRAADLKYIEACARRIVQNSNGYKIVTEKSTVPVRAAESIRRIFDANTKPNLN

SEQ ID NO: 95580 - protein, 397 aa, Homo sapiens
  Payload ID: 19065
  Gene Name: UDP-glucose 6-dehydrogenase
  Uniprot ID: O60701
  ENSP ID: ENSP00000426560
MGKGRAADLKYIEACARRIVQNSNGYKIVTEKSTVPVRAAESIRRIFDANTKPNLNLQVLSNPEFLAEGTAIKDLKNPDRVLIGGDETPEGQRAVQALCAVYEHWVPREKILTTNTWSSELSKLAANAFLAQRISSINSISALCEATGADVEEVATAIGMDQRIGNKFLKASVGFGGSCFQKDVLNLVYLCEALNLPEVARYWQQVIDMNDYQRRRFASRIIDSLFNTVTDKKIAILGFAFKKDTGDTRESSSIYISKYLMDEGAHLHIYDPKVPREQIVVDLSHPGVSEDDQVSRLVTISKDPYEACDGAHAVVICTEWDMFKELDYERIHKKMLKPAFIFDGRRVLDGLHNELQTIGFQIETIGKKVSSKRIPYAPSGEIPKFSLQDPPNKKPKV

SEQ ID NO: 95581 - protein, 53 aa, Homo sapiens
  Payload ID: 19065
  Gene Name: UDP-glucose 6-dehydrogenase
  ENSP ID: ENSP00000427708
MFEIKKICCIGAGYVGGPTCSVIAHMCPEIRVTVVDVNESRINAWNSPTLPIY

SEQ ID NO: 95582 - protein, 394 aa, Homo sapiens
  Payload ID: 19066
  Gene Name: UDP-glucose ceramide glucosyltransferase
  Uniprot ID: Q16739
  ENSP ID: ENSP00000363397
MALLDLALEGMAVFGFVLFLVLWLMHFMAIIYTRLHLNKKATDKQPYSKLPGVSLLKPLKGVDPNLINNLETFFELDYPKYEVLLCVQDHDDPAIDVCKKLLGKYPNVDARLFIGGKKVGINPKINNLMPGYEVAKYDLIWICDSGIRVIPDTLTDMVNQMTEKVGLVHGLPYVADRQGFAATLEQVYFGTSHPRYYISANVTGFKCVTGMSCLMRKDVLDQAGGLIAFAQYIAEDYFMAKAIADRGWRFAMSTQVAMQNSGSYSISQFQSRMIRWTKLRINMLPATIICEPISECFVASLIIGWAAHHVFRWDIMVFFMCHCLAWFIFDYIQLRGVQGGTLCFSKLDYAVAWFIRESMTIYIFLSALWDPTISWRTGRYRLRCGGTAEEILDV

SEQ ID NO: 95583 - protein, 1555 aa, Homo sapiens
  Payload ID: 19067
  Gene Name: UDP-glucose glycoprotein glucosyltransferase 1
  Uniprot ID: Q9NYU2
  ENSP ID: ENSP00000259253
MGCKGDASGACAAGALPVTGVCYKMGVLVVLTVLWLFSSVKADSKAITTSLTTKWFSTPLLLEASEFLAEDSQEKFWNFVEASQNIGSSDHDGTDYSYYHAILEAAFQFLSPLQQNLFKFCLSLRSYSATIQAFQQIAADEPPPEGCNSFFSVHGKKTCESDTLEALLLTASERPKPLLFKGDHRYPSSNPESPVVIFYSEIGSEEFSNFHRQLISKSNAGKINYVFRHYIFNPRKEPVYLSGYGVELAIKSTEYKAKDDTQVKGTEVNTTVIGENDPIDEVQGFLFGKLRDLHPDLEGQLKELRKHLVESTNEMAPLKVWQLQDLSFQTAARILASPVELALVVMKDLSQNFPTKARAITKTAVSSELRTEVEENQKYFKGTLGLQPGDSALFINGLHMDLDTQDIFSLFDVLRNEARVMEGLHRLGIEGLSLHNVLKLNIQPSEADYAVDIRSPAISWVNNLEVDSRYNSWPSSLQELLRPTFPGVIRQIRKNLHNMVFIVDPAHETTAELMNTAEMFLSNHIPLRIGFIFVVNDSEDVDGMQDAGVAVLRAYNYVAQEVDDYHAFQTLTHIYNKVRTGEKVKVEHVVSVLEKKYPYVEVNSILGIDSAYDRNRKEARGYYEQTGVGPLPVVLFNGMPFEREQLDPDELETITMHKILETTTFFQRAVYLGELPHDQDVVEYIMNQPNVVPRINSRILTAERDYLDLTASNNFFVDDYARFTILDSQGKTAAVANSMNYLTKKGMSSKEIYDDSFIRPVTFWIVGDFDSPSGRQLLYDAIKHQKSSNNVRISMINNPAKEISYENTQISRAIWAALQTQTSNAAKNFITKMAKEGAAEALAAGADIAEFSVGGMDFSLFKEVFESSKMDFILSHAVYCRDVLKLKKGQRAVISNGRIIGPLEDSELFNQDDFHLLENIILKTSGQKIKSHIQQLRVEEDVASDLVMKVDALLSAQPKGDPRIEYQFFEDRHSAIKLRPKEGETYFDVVAVVDPVTREAQRLAPLLLVLAQLINMNLRVFMNCQSKLSDMPLKSFYRYVLEPEISFTSDNSFAKGPIAKFLDMPQSPLFTLNLNTPESWMVESVRTPYDLDNIYLEEVDSVVAAEYELEYLLLEGHCYDITTGQPPRGLQFTLGTSANPVIVDTIVMANLGYFQLKANPGAWILRLRKGRSEDIYRIYSHDGTDSPPDADEVVIVLNNFKSKIIKVKVQKKADMVNEDLLSDGTSENESGFWDSFKWGFTGQKTEEVKQDKDDIINIFSVASGHLYERFLRIMMLSVLKNTKTPVKFWFLKNYLSPTFKEFIPYMANEYNFQYELVQYKWPRWLHQQTEKQRIIWGYKILFLDVLFPLVVDKFLFVDADQIVRTDLKELRDFNLDGAPYGYTPFCDSRREMDGYRFWKSGYWASHLAGRKYHISALYVVDLKKFRKIAAGDRLRGQYQGLSQDPNSLSNLDQDLPNNMIHQVPIKSLPQEWLWCETWCDDASKKRAKTIDLCNNPMTKEPKLEAAVRIVPEWQDYDQEIKQLQIRFQKEKETGALYKEKTKEPSREGPQKREEL

SEQ ID NO: 95584 - protein, 46 aa, Homo sapiens
  Payload ID: 19067
  Gene Name: UDP-glucose glycoprotein glucosyltransferase 1
  ENSP ID: ENSP00000365913
MGCKGDASGACAAGALPVTGTQGWREEASWTKRGFGAQGDPVPLSH

SEQ ID NO: 95585 - protein, 131 aa, Homo sapiens
  Payload ID: 19067
  Gene Name: UDP-glucose glycoprotein glucosyltransferase 1
  ENSP ID: ENSP00000389441
  MOD_RES (1)..(1): Any amino acid
XIMMLSVLKNTKTPVKFWFLKNYLSPTFKDLPNNMIHQVPIKSLPQEWLWCETWCDDASKKRAKTIDLCNNPMTKEPKLEAAVRIVPEWQDYDQEIKQLQIRFQKEKETGALYKEKTKEPSREGPQKREEL

SEQ ID NO: 95586 - protein, 54 aa, Homo sapiens
  Payload ID: 19067
  Gene Name: UDP-glucose glycoprotein glucosyltransferase 1
  ENSP ID: ENSP00000392701
MGCKGDASGVCYKMGVLVVLTVLWLFSSVKADSKAITTSLTTKWFSTPLLLEAR

SEQ ID NO: 95587 - protein, 58 aa, Homo sapiens
  Payload ID: 19067
  Gene Name: UDP-glucose glycoprotein glucosyltransferase 1
  ENSP ID: ENSP00000400426
MGCKGDASGVCYKMGVLVVLTVLWLFSSVKADSKAITTSLTTKWFSTPLLLEASCGVE

SEQ ID NO: 95588 - protein, 280 aa, Homo sapiens
  Payload ID: 19068
  Gene Name: UDP-glucose glycoprotein glucosyltransferase 2
  ENSP ID: ENSP00000365902
MAPAKATNVVRLLLGSTALWLSQLGSGTVAASKSVTAHLAAKWPETPLLLEASEFMAEESNEKFWQFLETVQELAIYKQTESDYSYYNLILKKAGQFLDNLHINLLKFAFSIRAYSPAIQMFQQIAADEPPPDGCNAFVVIHKKHTCKINEIKKLLKKAASRTRPYLFKGDHKFPTNKENLPVVILYAEMGTRTFSAFHKVLSEKAQNEEILYVLRHYIQKPSSRKMYLSGYGVELAIKSTEYKALDDTQVKTVTNTTVEDETETNEVQGFLFGKLKLVY

SEQ ID NO: 95589 - protein, 278 aa, Homo sapiens
  Payload ID: 19068
  Gene Name: UDP-glucose glycoprotein glucosyltransferase 2
  Uniprot ID: Q9NYU1
  ENSP ID: ENSP00000365904
MAPAKATNVVRLLLGSTALWLSQLGSGTVAASKSVTAHLAAKWPETPLLLEASEFMAEESNEKFWQFLETVQELAIYKQTESDYSYYNLILKKAGQFLDNLHINLLKFAFSIRAYSPAIQMFQQIAADEPPPDGCNAFVVIHKKHTCKINEIKKLLKKAASRTRPYLFKGDHKFPTNKENLPVVILYAEMGTRTFSAFHKVLSEKAQNEEILYVLRHYIQKPSSRKMYLSGYGVELAIKSTEYKALDDTQVKTVTNTTVEDETETNEVQGFLFGKLKS

SEQ ID NO: 95590 - protein, 1516 aa, Homo sapiens
  Payload ID: 19068
  Gene Name: UDP-glucose glycoprotein glucosyltransferase 2
  Uniprot ID: Q9NYU1
  ENSP ID: ENSP00000365938
MAPAKATNVVRLLLGSTALWLSQLGSGTVAASKSVTAHLAAKWPETPLLLEASEFMAEESNEKFWQFLETVQELAIYKQTESDYSYYNLILKKAGQFLDNLHINLLKFAFSIRAYSPAIQMFQQIAADEPPPDGCNAFVVIHKKHTCKINEIKKLLKKAASRTRPYLFKGDHKFPTNKENLPVVILYAEMGTRTFSAFHKVLSEKAQNEEILYVLRHYIQKPSSRKMYLSGYGVELAIKSTEYKALDDTQVKTVTNTTVEDETETNEVQGFLFGKLKEIYSDLRDNLTAFQKYLIESNKQMMPLKVWELQDLSFQAASQIMSAPVYDSIKLMKDISQNFPIKARSLTRIAVNQHMREEIKENQKDLQVRFKIQPGDARLFINGLRVDMDVYDAFSILDMLKLEGKMMNGLRNLGINGEDMSKFLKLNSHIWEYTYVLDIRHSSIMWINDLENDDLYITWPTSCQKLLKPVFPGSVPSIRRNFHNLVLFIDPAQEYTLDFIKLADVFYSHEVPLRIGFVFILNTDDEVDGANDAGVALWRAFNYIAEEFDISEAFISIVHMYQKVKKDQNILTVDNVKSVLQNTFPHANIWDILGIHSKYDEERKAGASFYKMTGLGPLPQALYNGEPFKHEEMNIKELKMAVLQRMMDASVYLQREVFLGTLNDRTNAIDFLMDRNNVVPRINTLILRTNQQYLNLISTSVTADVEDFSTFFFLDSQDKSAVIAKNMYYLTQDDESIISAVTLWIIADFDKPSGRKLLFNALKHMKTSVHSRLGIIYNPTSKINEENTAISRGILAAFLTQKNMFLRSFLGQLAKEEIATAIYSGDKIKTFLIEGMDKNAFEKKYNTVGVNIFRTHQLFCQDVLKLRPGEMGIVSNGRFLGPLDEDFYAEDFYLLEKITFSNLGEKIKGIVENMGINANNMSDFIMKVDALMSSVPKRASRYDVTFLRENHSVIKTNPQENDMFFNVIAIVDPLTREAQKMAQLLVVLGKIINMKIKLFMNCRGRLSEAPLESFYRFVLEPELMSGANDVSSLGPVAKFLDIPESPLLILNMITPEGWLVETVHSNCDLDNIHLKDTEKTVTAEYELEYLLLEGQCFDKVTEQPPRGLQFTLGTKNKPAVVDTIVMAHHGYFQLKANPGAWILRLHQGKSEDIYQIVGHEGTDSQADLEDIIVVLNSFKSKILKVKVKKETDKIKEDILTDEDEKTKGLWDSIKSFTVSLHKENKKEKDVLNIFSVASGHLYERFLRIMMLSVLRNTKTPVKFWLLKNYLSPTFKEVIPHMAKEYGFRYELVQYRWPRWLRQQTERQRIIWGYKILFLDVLFPLAVDKIIFVDADQIVRHDLKELRDFDLDGAPYGYTPFCDSRREMDGYRFWKTGYWASHLLRRKYHISALYVVDLKKFRRIGAGDRLRSQYQALSQDPNSLSNLDQDLPNNMIYQVAIKSLPQDWLWCETWCDDESKQRAKTIDLCNNPKTKESKLKAAARIVPEWVEYDAEIRQLLDHLENKKQDTILTHDEL

SEQ ID NO: 95591 - protein, 372 aa, Homo sapiens
  Payload ID: 19068
  Gene Name: UDP-glucose glycoprotein glucosyltransferase 2
  ENSP ID: ENSP00000380743
MAPAKATNVVRLLLGSTALWLSQLGSGTVAASKSVTAHLAAKWPETPLLLEASEFMAEESNEKFWQFLETVQELAIYKQTESDYSYYNLILKKAGQFLDNLHINLLKFAFSIRAYSPAIQMFQQIAADEPPPDGCNAFVVIHKKHTCKINEIKKLLKKAASRTRPYLFKGDHKFPTNKENLPVVILYAEMGTRTFSAFHKVLSEKAQNEEILYVLRHYIQKPSSRKMYLSGYGVELAIKSTEYKALDDTQVKTVTNTTVEDETETNEVQGFLFGKLKEIYSDLRDNLTAFQKYLIESNKQMMPLKVWELQDLSFQAASQIMSAPVYDSIKLMKDISQNFPIKARLRMNILICLFQSTLNVKNLRSRHLYNKT

SEQ ID NO: 95592 - protein, 261 aa, Homo sapiens [sequence omitted]

SEQ ID NO: 95593 - protein, 508 aa, Homo sapiens
  Payload ID: 19069
  Gene Name: UDP-glucose pyrophosphorylase 2
  Uniprot ID: Q16851
  ENSP ID: ENSP00000338703
MSRFVQDLSKAMSQDGASQFQEVIRQELELSVKKELEKILTTASSHEFEHTKKDLDGFRKLFHRFLQEKGPSVDWGKIQRPPEDSIQPYEKIKARGLPDNISSVLNKLVVVKLNGGLGTSMGCKGPKSLIGVRNENTFLDLTVQQIEHLNKTYNTDVPLVLMNSFNTDEDTKKILQKYNHCRVKIYTFNQSRYPRINKESLLPVAKDVSYSGENTEAWYPPGHGDIYASFYNSGLLDTFIGEGKEYIFVSNIDNLGATVDLYILNHLMNPPNGKRCEFVMEVTNKTRADVKGGTLTQYEGKLRLVEIAQVPKAHVDEFKSVSKFKIFNTNNLWISLAAVKRLQEQNAIDMEIIVNAKTLDGGLNVIQLETAVGAAIKSFENSLGINVPRSRFLPVKTTSDLLLVMSNLYSLNAGSLTMSEKREFPTVPLVKLGSSFTKVQDYLRRFESIPDMLELDHLTVSGDVTFGKNVSLKGTVIIIANHGDRIDIPPGAVLENKIVSGNLRILDH

SEQ ID NO: 95594 - protein, 497 aa, Homo sapiens
  Payload ID: 19069
  Gene Name: UDP-glucose pyrophosphorylase 2
  Uniprot ID: Q16851
  ENSP ID: ENSP00000377939
MSQDGASQFQEVIRQELELSVKKELEKILTTASSHEFEHTKKDLDGFRKLFHRFLQEKGPSVDWGKIQRPPEDSIQPYEKIKARGLPDNISSVLNKLVVVKLNGGLGTSMGCKGPKSLIGVRNENTFLDLTVQQIEHLNKTYNTDVPLVLMNSFNTDEDTKKILQKYNHCRVKIYTFNQSRYPRINKESLLPVAKDVSYSGENTEAWYPPGHGDIYASFYNSGLLDTFIGEGKEYIFVSNIDNLGATVDLYILNHLMNPPNGKRCEFVMEVTNKTRADVKGGTLTQYEGKLRLVEIAQVPKAHVDEFKSVSKFKIFNTNNLWISLAAVKRLQEQNAIDMEIIVNAKTLDGGLNVIQLETAVGAAIKSFENSLGINVPRSRFLPVKTTSDLLLVMSNLYSLNAGSLTMSEKREFPTVPLVKLGSSFTKVQDYLRRFESIPDMLELDHLTVSGDVTFGKNVSLKGTVIIIANHGDRIDIPPGAVLENKIVSGNLRILDH

SEQ ID NO: 95595 - protein, 517 aa, Homo sapiens
  Payload ID: 19069
  Gene Name: UDP-glucose pyrophosphorylase 2
  ENSP ID: ENSP00000411803
MLLYPAGFSFASLKSDLSKAMSQDGASQFQEVIRQELELSVKKELEKILTTASSHEFEHTKKDLDGFRKLFHRFLQEKGPSVDWGKIQRPPEDSIQPYEKIKARGLPDNISSVLNKLVVVKLNGGLGTSMGCKGPKSLIGVRNENTFLDLTVQQIEHLNKTYNTDVPLVLMNSFNTDEDTKKILQKYNHCRVKIYTFNQSRYPRINKESLLPVAKDVSYSGENTEAWYPPGHGDIYASFYNSGLLDTFIGEGKEYIFVSNIDNLGATVDLYILNHLMNPPNGKRCEFVMEVTNKTRADVKGGTLTQYEGKLRLVEIAQVPKAHVDEFKSVSKFKIFNTNNLWISLAAVKRLQEQNAIDMEIIVNAKTLDGGLNVIQLETAVGAAIKSFENSLGINVPRSRFLPVKTTSDLLLVMSNLYSLNAGSLTMSEKREFPTVPLVKLGSSFTKVQDYLRRFESIPDMLELDHLTVSGDVTFGKNVSLKGTVIIIANHGDRIDIPPGAVLENKIVSGNLRILDH

SEQ ID NO: 95596 - protein, 38 aa, Homo sapiens
  Payload ID: 19069
  Gene Name: UDP-glucose pyrophosphorylase 2
  ENSP ID: ENSP00000417286
MSQDGASQFQEVIRQELELSVKKELEKILTTASSHEFE

SEQ ID NO: 95597 - protein, 52 aa, Homo sapiens
  Payload ID: 19069
  Gene Name: UDP-glucose pyrophosphorylase 2
  ENSP ID: ENSP00000417358
MSQDGASQFQEVIRQELELSVKKELEKILTTASSHEFETPGFAILPRLVSNS

SEQ ID NO: 95598 - protein, 48 aa, Homo sapiens
  Payload ID: 19069
  Gene Name: UDP-glucose pyrophosphorylase 2
  ENSP ID: ENSP00000417801
MSQDGASQFQEVIRQELELSVKKELEKILTTASSHEFERVTSDRTMLL

SEQ ID NO: 95599 - protein, 76 aa, Homo sapiens
  Payload ID: 19069
  Gene Name: UDP-glucose pyrophosphorylase 2
  ENSP ID: ENSP00000418179
MSQDGASQFQEVIRQELELSVKKELEKILTTASSHEFEHTKKDLDGFRKLFHRFLQEKGPSVDWGKIQRPPEDSAG

SEQ ID NO: 95600 - protein, 48 aa, Homo sapiens; identical to SEQ ID NO: 95598
  Payload ID: 19069
  Gene Name: UDP-glucose pyrophosphorylase 2
  ENSP ID: ENSP00000418206

SEQ ID NO: 95601 - protein, 49 aa, Homo sapiens
  Payload ID: 19069
  Gene Name: UDP-glucose pyrophosphorylase 2
  ENSP ID: ENSP00000418375
MSRFVQDLSKAMSQDGASQFQEVIRQELELSVKKELEKILTTASSHEFE

SEQ ID NO: 95602 - protein, 52 aa, Homo sapiens; identical to SEQ ID NO: 95597
  Payload ID: 19069
  Gene Name: UDP-glucose pyrophosphorylase 2
  ENSP ID: ENSP00000418619

SEQ ID NO: 95603 - protein, 29 aa, Homo sapiens
  Payload ID: 19069
  Gene Name: UDP-glucose pyrophosphorylase 2
  ENSP ID: ENSP00000418642
SFASLKSGTCACTQTGRAGEAGGLRKAGS

SEQ ID NO: 95604 - protein, 76 aa, Homo sapiens; identical to SEQ ID NO: 95599
  Payload ID: 19069
  Gene Name: UDP-glucose pyrophosphorylase 2
  ENSP ID: ENSP00000419019

SEQ ID NO: 95605 - protein, 150 aa, Homo sapiens
  Payload ID: 19069
  Gene Name: UDP-glucose pyrophosphorylase 2
  ENSP ID: ENSP00000419238
MSQDGASQFQEVIRQELELSVKKELEKILTTASSHEFEHTKKDLDGFRKLFHRFLQEKGPSVDWGKIQRPPEDSIQPYEKIKARGLPDNISSVLNKLVVVKLNGGLGTSMGCKGPKSLIGVRNENTFLDLTVQQIEHLNKTYNTDVPLVL

SEQ ID NO: 95606 - protein, 170 aa, Homo sapiens
  Payload ID: 19069
  Gene Name: UDP-glucose pyrophosphorylase 2
  ENSP ID: ENSP00000419335
MSQDGASQFQEVIRQELELSVKKELEKILTTASSHEFEHTKKDLDGFRKLFHRFLQEKGPSVDWGKIQRPPEDSIQPYEKIKARGLPDNISSVLNKLVVVKLNGGLGTSMGCKGPKSLIGVRNENTFLDLTVQQIEHLNKTYNTDVPLVLMNSFNTDEDTKKILQKYNHC

SEQ ID NO: 95607 - protein, 135 aa, Homo sapiens
  Payload ID: 19069
  Gene Name: UDP-glucose pyrophosphorylase 2
  ENSP ID: ENSP00000419442
MSQDGASQFQEVIRQELELSVKKELEKILTTASSHEFEHTKKDLDGFRKLFHRFLQEKGPSVDWGKIQRPPEDSIQPYEKIKARGLPDNISSVLNKLVVVKLNGGLGTSMGCKGPKSLIGVRNENTFLDLTVQQI

SEQ ID NO: 95608 - protein, 104 aa, Homo sapiens
  Payload ID: 19069
  Gene Name: UDP-glucose pyrophosphorylase 2
  ENSP ID: ENSP00000419548
MSQDGASQFQEVIRQELELSVKKELEKILTTASSHEFEHTKKDLDGFRKLFHRFLQEKGPSVDWGKIQRPPEDSIQPYEKIKARGLPDNISSVLNKLVVVKLNG

SEQ ID NO: 95609 - protein, 52 aa, Homo sapiens; identical to SEQ ID NO: 95597
  Payload ID: 19069
  Gene Name: UDP-glucose pyrophosphorylase 2
  ENSP ID: ENSP00000419551

SEQ ID NO: 95610 - protein, 175 aa, Homo sapiens
  Payload ID: 19069
  Gene Name: UDP-glucose pyrophosphorylase 2
  ENSP ID: ENSP00000420131
MSRFVQDGASQFQEVIRQELELSVKKELEKILTTASSHEFEHTKKDLDGFRKLFHRFLQEKGPSVDWGKIQRPPEDSIQPYEKIKARGLPDNISSVLNKLVVVKLNGGLGTSMGCKGPKSLIGVRNENTFLDLTVQQIEHLNKTYNTDVPLVLMNSFNTDEDTKKILQKYNHCRV

SEQ ID NO: 95611 - protein, 212 aa, Homo sapiens
  Payload ID: 19069
  Gene Name: UDP-glucose pyrophosphorylase 2
  ENSP ID: ENSP00000420342
MSQDGASQFQEVIRQELELSVKKELEKILTTASSHEFEHTKKDLDGFRKLFHRFLQEKGPSVDWGKIQRPPEDSIQPYEKIKARGLPDNISSVLNKLVVVKLNGGLGTSMGCKGPKSLIGVRNENTFLDLTVQQIEHLNKTYNTDVPLVLMNSFNTDEDTKKILQKYNHCRVKIYTFNQSRYPRINKESLLPVAKDVSYSGENTEAWYPPGH

SEQ ID NO: 95612 - protein, 37 aa, Homo sapiens
  Payload ID: 19069
  Gene Name: UDP-glucose pyrophosphorylase 2
  ENSP ID: ENSP00000420760
MLLYPAGFSFASLKSGTCACTQTGRAGEAGGLRKAGS

SEQ ID NO: 95613 - protein, 497 aa, Homo sapiens; identical to SEQ ID NO: 95594
  Payload ID: 19069
  Gene Name: UDP-glucose pyrophosphorylase 2
  Uniprot ID: Q16851
  ENSP ID: ENSP00000420793

SEQ ID NO: 95614 - protein, 508 aa, Homo sapiens [sequence omitted]

SEQ ID NO: 95615 - protein, 48 aa, Homo sapiens; identical to SEQ ID NO: 95598
  Payload ID: 19069
  Gene Name: UDP-glucose pyrophosphorylase 2
  ENSP ID: ENSP00000486008

SEQ ID NO: 95616 - protein, 52 aa, Homo sapiens; identical to SEQ ID NO: 95597
  Payload ID: 19069
  Gene Name: UDP-glucose pyrophosphorylase 2
  ENSP ID: ENSP00000486332

SEQ ID NO: 95617 - protein, 425 aa, Homo sapiens
  Payload ID: 19070
  Gene Name: UDP-glucuronate decarboxylase 1
  Uniprot ID: Q8NBZ7
  ENSP ID: ENSP00000283148
MVSKALLRLVSAVNRRRMKLLLGIALLAYVASVWGNFVNMSFLLNRSIQENGELKIESKIEEMVEPLREKIRDLEKSFTQKYPPVKFLSEKDRKRILITGGAGFVGSHLTDKLMMDGHEVTVVDNFFTGRKRNVEHWIGHENFELINHDVVEPLYIEVDQIYHLASPASPPNYMYNPIKTLKTNTIGTLNMLGLAKRVGARLLLASTSEVYGDPEVHPQSEDYWGHVNPIGPRACYDEGKRVAETMCYAYMKQEGVEVRVARIFNTFGPRMHMNDGRVVSNFILQALQGEPLTVYGSGSQTRAFQYVSDLVNGLVALMNSNVSSPVNLGNPEEHTILEFAQLIKNLVGSGSEIQFLSEAQDDPQKRKPDIKKAKLMLGWEPVVPLEEGLNKAIHYFRKELEYQANNQYIPKPKPARIKKGRTRHS

SEQ ID NO: 95618 - protein, 420 aa, Homo sapiens
  Payload ID: 19070
  Gene Name: UDP-glucuronate decarboxylase 1
  Uniprot ID: Q8NBZ7
  ENSP ID: ENSP00000387019
MVSKALLRLVSAVNRRRMKLLLGIALLAYVASVWGNFVNMRSIQENGELKIESKIEEMVEPLREKIRDLEKSFTQKYPPVKFLSEKDRKRILITGGAGFVGSHLTDKLMMDGHEVTVVDNFFTGRKRNVEHWIGHENFELINHDVVEPLYIEVDQIYHLASPASPPNYMYNPIKTLKTNTIGTLNMLGLAKRVGARLLLASTSEVYGDPEVHPQSEDYWGHVNPIGPRACYDEGKRVAETMCYAYMKQEGVEVRVARIFNTFGPRMHMNDGRVVSNFILQALQGEPLTVYGSGSQTRAFQYVSDLVNGLVALMNSNVSSPVNLGNPEEHTILEFAQLIKNLVGSGSEIQFLSEAQDDPQKRKPDIKKAKLMLGWEPVVPLEEGLNKAIHYFRKELEYQANNQYIPKPKPARIKKGRTRHS

SEQ ID NO: 95619 - protein, 252 aa, Homo sapiens
  Payload ID: 19070
  Gene Name: UDP-glucuronate decarboxylase 1
  Uniprot ID: Q8NBZ7
  ENSP ID: ENSP00000387096
MYNPIKTLKTNTIGTLNMLGLAKRVGARLLLASTSEVYGDPEVHPQSEDYWGHVNPIGPRACYDEGKRVAETMCYAYMKQEGVEVRVARIFNTFGPRMHMNDGRVVSNFILQALQGEPLTVYGSGSQTRAFQYVSDLVNGLVALMNSNVSSPVNLGNPEEHTILEFAQLIKNLVGSGSEIQFLSEAQDDPQKRKPDIKKAKLMLGWEPVVPLEEGLNKAIHYFRKELEYQANNQYIPKPKPARIKKGRTRHS

SEQ ID NO: 95620 - protein, 52 aa, Homo sapiens
  Payload ID: 19070
  Gene Name: UDP-glucuronate decarboxylase 1
  ENSP ID: ENSP00000397049
MYNPIKTLKTNTIGTLNMLGLAKRVGARLLLASTSEVYGDPEVHPQSEDYWG

SEQ ID NO: 95621 - protein, 190 aa, Homo sapiens
  Payload ID: 19070
  Gene Name: UDP-glucuronate decarboxylase 1
  ENSP ID: ENSP00000399316
MVEPLREKIRDLEKSFTQKYPPVKFLSEKDRKRILITGGAGFVGSHLTDKLMMDGHEVTVVDNFFTGRKRNVEHWIGHENFELINHDVVEPLYIEVDQIYHLASPASPPNYMYNPIKTLKTNTIGTLNMLGLAKRVGARLLLASTSEVYGDPEVHPQSEDYWGHVNPIGPRACYDEGKRVAETMCYAYMK

SEQ ID NO: 95622 - protein, 134 aa, Homo sapiens
  Payload ID: 19070
  Gene Name: UDP-glucuronate decarboxylase 1
  ENSP ID: ENSP00000403612
MYNPIKTLKTNTIGTLNMLGLAKRVGARLLLASTSEVYGDPEVHPQSEDYWGHVNPIGPRACYDEGKRVAETMCYAYMKQEGVEVRVARIFNTFGPRMHMNDGRVVSNFILQALQGEPLTVYGSGSQTRAFQYV

SEQ ID NO: 95623 - protein, 121 aa, Homo sapiens
  Payload ID: 19070
  Gene Name: UDP-glucuronate decarboxylase 1
  ENSP ID: ENSP00000404468
MYNPIKTLKTNTIGTLNMLGLAKRVGARLLLASTSEVYGDPEVHPQSEDYWGHVNPIGPRACYDEGKRVAETMCYAYMKQEGVEVRVARIFNTFGPRMHMNDGRVVSNFILQALQGEPLTV

SEQ ID NO: 95624 - protein, 170 aa, Homo sapiens
  Payload ID: 19070
  Gene Name: UDP-glucuronate decarboxylase 1
  ENSP ID: ENSP00000416656
MVSKALLRLVSAVNRRRMKLLLGIALLAYVAWLAKRVGARLLLASTSEVYGDPEVHPQSEDYWGHVNPIGPRACYDEGKRVAETMCYAYMKQEGVEVRVARIFNTFGPRMHMNDGRVVSNFILQALQGEPLTVYGSGSQTRAFQYVSDLVNGLVALMNSNVSSPVNLVSA

SEQ ID NO: 95625 - protein, 522 aa, Homo sapiens
  Payload ID: 19071
  Gene Name: UDP-N-acetylglucosamine pyrophosphorylase 1
  Uniprot ID: Q16222
  ENSP ID: ENSP00000271469
MNINDLKLTLSKAGQEHLLRFWNELEEAQQVELYAELQAMNFEELNFFFQKAIEGFNQSSHQKNVDARMEPVPREVLGSATRDQDQLQAWESEGLFQISQNKVAVLLLAGGQGTRLGVAYPKGMYDVGLPSRKTLFQIQAERILKLQQVAEKYYGNKCIIPWYIMTSGRTMESTKEFFTKHKYFGLKKENVIFFQQGMLPAMSFDGKIILEEKNKVSMAPDGNGGLYRALAAQNIVEDMEQRGIWSIHVYCVDNILVKVADPRFIGFCIQKGADCGAKVVEKTNPTEPVGVVCRVDGVYQVVEYSEISLATAQKRSSDGRLLFNAGNIANHFFTVPFLRDVVNVYEPQLQHHVAQKKIPYVDTQGQLIKPDKPNGIKMEKFVFDIFQFAKKFVVYEVLREDEFSPLKNADSQNGKDNPTTARHALMSLHHCWVLNAGGHFIDENGSRLPAIPRSATNGKSETITADVNHNLKDANDVPIQCEISPLISYAGEGLESYVADKEFHAPLIIDENGVHELVKNGI

SEQ ID NO: 95626 - protein, 521 aa, Homo sapiens
  Payload ID: 19071
  Gene Name: UDP-N-acetylglucosamine pyrophosphorylase 1
  Uniprot ID: Q16222
  ENSP ID: ENSP00000356901
MNINDLKLTLSKAGQEHLLRFWNELEEAQQVELYAELQAMNFEELNFFFQKAIEGFNQSSHQKNVDARMEPVPREVLGSATRDQDQLQAWESEGLFQISQNKVAVLLLAGGQGTRLGVAYPKGMYDVGLPSRKTLFQIQAERILKLQQVAEKYYGNKCIIPWYIMTSGRTMESTKEFFTKHKYFGLKKENVIFFQQGMLPAMSFDGKIILEEKNKVSMAPDGNGGLYRALAAQNIVEDMEQRGIWSIHVYCVDNILVKVADPRFIGFCIQKGADCGAKVVEKTNPTEPVGVVCRVDGVYQVVEYSEISLATAQKRSSDGRLLFNAGNIANHFFTVPFLRDVVNVYEPQLQHHVAQKKIPYVDTQGQLIKPDKPNGIKMEKFVFDIFQFAKKFVVYEVLREDEFSPLKNADSQNGKDNPTTARHALMSLHHCWVLNAGGHFIDENGSRLPAIPRATNGKSETITADVNHNLKDANDVPIQCEISPLISYAGEGLESYVADKEFHAPLIIDENGVHELVKNGI

SEQ ID NO: 95627 - protein, 522 aa, Homo sapiens; identical to SEQ ID NO: 95625
  Payload ID: 19071
  Gene Name: UDP-N-acetylglucosamine pyrophosphorylase 1
  Uniprot ID: Q16222
  ENSP ID: ENSP00000356902

SEQ ID NO: 95628 - protein, 505 aa, Homo sapiens
  Payload ID: 19071
  Gene Name: UDP-N-acetylglucosamine pyrophosphorylase 1
  Uniprot ID: Q16222
  ENSP ID: ENSP00000356903
MNINDLKLTLSKAGQEHLLRFWNELEEAQQVELYAELQAMNFEELNFFFQKAIEGFNQSSHQKNVDARMEPVPREVLGSATRDQDQLQAWESEGLFQISQNKVAVLLLAGGQGTRLGVAYPKGMYDVGLPSRKTLFQIQAERILKLQQVAEKYYGNKCIIPWYIMTSGRTMESTKEFFTKHKYFGLKKENVIFFQQGMLPAMSFDGKIILEEKNKVSMAPDGNGGLYRALAAQNIVEDMEQRGIWSIHVYCVDNILVKVADPRFIGFCIQKGADCGAKVVEKTNPTEPVGVVCRVDGVYQVVEYSEISLATAQKRSSDGRLLFNAGNIANHFFTVPFLRDVVNVYEPQLQHHVAQKKIPYVDTQGQLIKPDKPNGIKMEKFVFDIFQFAKKFVVYEVLREDEFSPLKNADSQNGKDNPTTARHALMSLHHCWVLNAGGHFIDENGSRLPAIPRLKDANDVPIQCEISPLISYAGEGLESYVADKEFHAPLIIDENGVHELVKNGI

SEQ ID NO: 95629 - protein, 384 aa, Homo sapiens
  Payload ID: 19072
  Gene Name: UDP-N-acetylglucosamine pyrophosphorylase 1 like 1
  Uniprot ID: Q3KQV9
  ENSP ID: ENSP00000353409
MGPGPSPNWTLDPEPRCRLWSEPRLPAGPGVLAAGSPRLPCRYVMTSEFTLGPTAEFFREHNFFHLDPANVVMFEQRLLPAVTFDGKVILERKDKVAMAPDGNGGLYCALEDHKILEDMERRGVEFVHVYCVDNILVRLADPVFIGFCVLQGADCGAKVVEKAYPEEPVGVVCQVDGVPQVVEYSEISPETAQLRASDGSLLYNAGNICNHFFTRGFLKAVTREFEPLLKPHVAVKKVPYVDEEGNLVKPLKPNGIKMEKFVFDVFRFAKNFAALEVLREEEFSPLKNAEPADRDSPRTARQALLTQHYRWALRAGARFLDAHGAWLPELPSLPPNGDPPAICEISPLVSYSGEGLEVYLQGREFQSPLILDEDQAREPQLQES

SEQ ID NO: 95630 - protein, 507 aa, Homo sapiens
  Payload ID: 19072
  Gene Name: UDP-N-acetylglucosamine pyrophosphorylase 1 like 1
  Uniprot ID: Q3KQV9
  ENSP ID: ENSP00000386935
MASEQDVRARLQRAGQEHLLRFWAELAPEPRAALLAELALLEPEALREHCRRAAEACARPHGPPPDLAARLRPLPPERVGRASRSDPETRRRWEEEGFRQISLNKVAVLLLAGGQGTRLGVTYPKGMYRVGLPSRKTLYQLQAERIRRVEQLAGERHGTRCTVPWYVMTSEFTLGPTAEFFREHNFFHLDPANVVMFEQRLLPAVTFDGKVILERKDKVAMAPDGNGGLYCALEDHKILEDMERRGVEFVHVYCVDNILVRLADPVFIGFCVLQGADCGAKVVEKAYPEEPVGVVCQVDGVPQVVEYSEISPETAQLRASDGSLLYNAGNICNHFFTRGFLKAVTREFEPLLKPHVAVKKVPYVDEEGNLVKPLKPNGIKMEKFVFDVFRFAKNFAALEVLREEEFSPLKNAEPADRDSPRTARQALLTQHYRWALRAGARFLDAHGAWLPELPSLPPNGDPPAICEISPLVSYSGEGLEVYLQGREFQSPLILDEDQAREPQLQES

SEQ ID NO: 95631 - protein, 99 aa, Homo sapiens
  Payload ID: 19072
  Gene Name: UDP-N-acetylglucosamine pyrophosphorylase 1 like 1
  ENSP ID: ENSP00000484649
MASEQDVRARLQRAGQEHLLRFWAELAPEPRAALLAELALLEPEALREHCRRAAEACARPHGPPPDLAARLRPLPPERVGRASRSDPETRRRWEEEGTS

SEQ ID NO: 95632 - protein, 215 aa, Homo sapiens
  Payload ID: 19073
  Gene Name: UEV and lactate/malate dehyrogenase domains
  Uniprot ID: Q8IX04
  ENSP ID: ENSP00000300038
MEFDCEGLRRLLGKYKFRDLTVEELRNVNVFFPHFKYSMDTYVFKDSSQKDLLNFTGTIPVMYQGNTYNIPIRFWILDSHPFAPPICFLKPTANMGILVGKHVDAQGRIYLPYLQNWSHPKSVIVGLIKEMIAKFQEELPMYSLSSSDEARQVDLLAYIAKITEGVSDTNSKSWANHENKTVNKITVVGGGELGIACTLAISAKVESRSVTQAGV

SEQ ID NO: 95633 - protein, 357 aa, Homo sapiens
  Payload ID: 19073
  Gene Name: UEV and lactate/malate dehyrogenase domains
  Uniprot ID: Q8IX04
  ENSP ID: ENSP00000323353
MEFDCEGLRRLLGKYKFRDLTVEELRNVNVFFPHFKYSMDTYGNTYNIPIRFWILDSHPFAPPICFLKPTANMGILVGKHVDAQGRIYLPYLQNWSHPKSVIVGLIKEMIAKFQEELPMYSLSSSDEARQVDLLAYIAKITEGVSDTNSKSWANHENKTVNKITVVGGGELGIACTLAISAKGIADRLVLLDLSEGTKGATMDLEIFNLPNVEISKDLSASAHSKVVIFTVNSLGSSQSYLDVVQSNVDMFRALVPALGHYSQHSVLLVASQPVEIMTYVTWKLSTFPANRVIGIGCNLDSQRLQYIITNVLKAQTSGKEVWVIGEQGEDKVLTWSGQEEVVSHTSQVQLSNRDIMI

SEQ ID NO: 95634 - protein, 449 aa, Homo sapiens
  Payload ID: 19073
  Gene Name: UEV and lactate/malate dehyrogenase domains
  Uniprot ID: Q8IX04
  ENSP ID: ENSP00000368697
MEFDCEGLRRLLGKYKFRDLTVEELRNVNVFFPHFKYSMDTYGNTYNIPIRFWILDSHPFAPPICFLKPTANMGILVGKHVDAQGRIYLPYLQNWSHPKSVIVGLIKEMIAKFQEELPMYSLSSSDEARQVDLLAYIAKITEGVSDTNSKSWANHENKTVNKITVVGGGELGIACTLAISAKGIADRLVLLDLSEGTKGATMDLEIFNLPNVEISKDLSASAHSKVVIFTVNSLGSSQSYLDVVQSNVDMFRALVPALGHYSQHSVLLVASQPVEIMTYVTWKLSTFPANRVIGIGCNLDSQRLQYIITNVLKAQTSGKEVWVIGEQGEDKVLTWSGQEEVVSHTSQVQLSNRAMELLRVKGQRSWSVGLSVADMVDSIVNNKKKVHSVSALAKGYYDINSEVFLSLPCILGTNGVSEVIKTTLKEDTVTEKLQSSASSIHSLQQQLKL

SEQ ID NO: 95635 - protein, 65 aa, Homo sapiens
  Payload ID: 19073
  Gene Name: UEV and lactate/malate dehyrogenase domains
  ENSP ID: ENSP00000379499
MEFDCEGLRRLLGKYKFRDLTVEELRNVNVFFPHFKYSMDTYVFKDSSQKDLLNFTGTIPVMYQA

SEQ ID NO: 95636 - protein, 471 aa, Homo sapiens
  Payload ID: 19073
  Gene Name: UEV and lactate/malate dehyrogenase domains
  Uniprot ID: Q8IX04
  ENSP ID: ENSP00000379500
MEFDCEGLRRLLGKYKFRDLTVEELRNVNVFFPHFKYSMDTYVFKDSSQKDLLNFTGTIPVMYQGNTYNIPIRFWILDSHPFAPPICFLKPTANMGILVGKHVDAQGRIYLPYLQNWSHPKSVIVGLIKEMIAKFQEELPMYSLSSSDEARQVDLLAYIAKITEGVSDTNSKSWANHENKTVNKITVVGGGELGIACTLAISAKGIADRLVLLDLSEGTKGATMDLEIFNLPNVEISKDLSASAHSKVVIFTVNSLGSSQSYLDVVQSNVDMFRALVPALGHYSQHSVLLVASQPVEIMTYVTWKLSTFPANRVIGIGCNLDSQRLQYIITNVLKAQTSGKEVWVIGEQGEDKVLTWSGQEEVVSHTSQVQLSNRAMELLRVKGQRSWSVGLSVADMVDSIVNNKKKVHSVSALAKGYYDINSEVFLSLPCILGTNGVSEVIKTTLKEDTVTEKLQSSASSIHSLQQQLKL

SEQ ID NO: 95637 - protein, 199 aa, Homo sapiens
  Payload ID: 19073
  Gene Name: UEV and lactate/malate dehyrogenase domains
  Uniprot ID: Q8IX04
  ENSP ID: ENSP00000437538
MEFDCEGLRRLLGKYKFRDLTVEELRNVNVFFPHFKYSMDTYVFKDSSQKDLLNFTGTIPVMYQGVSDTNSKSWANHENKTVNKITVVGGGELGIACTLAISAKGIADRLVLLDLSEGTKGATMDLEIFNLPNVEISKVEIMTYVTWKLSTFPANRVIGIGCNLDSQRLQYIITNVLKAQTSGKEVWVIGEQGEDKGIL

SEQ ID NO: 95638 - protein, 341 aa, Homo sapiens
  Payload ID: 19073
  Gene Name: UEV and lactate/malate dehyrogenase domains
  Uniprot ID: Q8IX04
  ENSP ID: ENSP00000441092
MDTYVFKDSSQKDLLNFTGTIPVMYQGNTYNIPIRFWILDSHPFAPPICFLKPTANMGILVGKHVDAQGRIYLPYLQNWSHPKSVIVGLIKEMIAKFQEELPMYSLSSSDEARQVDLLAYIAKITEGVSDTNSKSWANHENKTVNKITVVGGGELGIACTLAISAKGIADRLVLLDLSEGTKGATMDLEIFNLPNVEISKDLSASAHSKVVIFTVNSLGSSQSYLDVVQSNVDMFRALVPALGHYSQHSVLLVASQPVEIMTYVTWKLSTFPANRVIGIGCNLDSQRLQYIITNVLKAQTSGKEVWVIGEQGEDKVLTWSGQEEVVSHTSQVQLSNRDIMI

SEQ ID NO: 95639 - protein, 379 aa, Homo sapiens
  Payload ID: 19073
  Gene Name: UEV and lactate/malate dehyrogenase domains
  Uniprot ID: Q8IX04
  ENSP ID: ENSP00000442974
MEFDCEGLRRLLGKYKFRDLTVEELRNVNVFFPHFKYSMDTYVFKDSSQKDLLNFTGTIPVMYQGNTYNIPIRFWILDSHPFAPPICFLKPTANMGILVGKHVDAQGRIYLPYLQNWSHPKSVIVGLIKEMIAKFQEELPMYSLSSSDEARQVDLLAYIAKITEGVSDTNSKSWANHENKTVNKITVVGGGELGIACTLAISAKGIADRLVLLDLSEGTKGATMDLEIFNLPNVEISKDLSASAHSKVVIFTVNSLGSSQSYLDVVQSNVDMFRALVPALGHYSQHSVLLVASQPVEIMTYVTWKLSTFPANRVIGIGCNLDSQRLQYIITNVLKAQTSGKEVWVIGEQGEDKVLTWSGQEEVVSHTSQVQLSNRDIMI

SEQ ID NO: 95640 - protein, 794 aa, Homo sapiens
  Payload ID: 19074
  Gene Name: UFM1-specific ligase 1
  Uniprot ID: O94874
  ENSP ID: ENSP00000358283
MADAWEEIRRLAADFQRAQFAEATQRLSERNCIEIVNKLIAQKQLEVVHTLDGKEYITPAQISKEMRDELHVRGGRVNIVDLQQVINVDLIHIENRIGDIIKSEKHVQLVLGQLIDENYLDRLAEEVNDKLQESGQVTISELCKTYDLPGNFLTQALTQRLGRIISGHIDLDNRGVIFTEAFVARHKARIRGLFSAITRPTAVNSLISKYGFQEQLLYSVLEELVNSGRLRGTVVGGRQDKAVFVPDIYSRTQSTWVDSFFRQNGYLEFDALSRLGIPDAVSYIKKRYKTTQLLFLKAACVGQGLVDQVEASVEEAISSGTWVDIAPLLPTSLSVEDAAILLQQVMRAFSKQASTVVFSDTVVVSEKFINDCTELFRELMHQKAEKEMKNNPVHLITEEDLKQISTLESVSTSKKDKKDERRRKATEGSGSMRGGGGGNAREYKIKKVKKKGRKDDDSDDESQSSHTGKKKPEISFMFQDEIEDFLRKHIQDAPEEFISELAEYLIKPLNKTYLEVVRSVFMSSTTSASGTGRKRTIKDLQEEVSNLYNNIRLFEKGMKFFADDTQAALTKHLLKSVCTDITNLIFNFLASDLMMAVDDPAAITSEIRKKILSKLSEETKVALTKLHNSLNEKSIEDFISCLDSAAEACDIMVKRGDKKRERQILFQHRQALAEQLKVTEDPALILHLTSVLLFQFSTHSMLHAPGRCVPQIIAFLNSKIPEDQHALLVKYQGLVVKQLVSQSKKTGQGDYPLNNELDKEQEDVASTTRKELQELSSSIKDLVLKSRKSSVTEE

SEQ ID NO: 95641 - protein, 142 aa, Homo sapiens
  Payload ID: 19075
  Gene Name: UFM1-specific peptidase 1 (non-functional)
  Uniprot ID: Q6NVU6
  ENSP ID: ENSP00000373413
MGDKPPGFRGSRDWIGCVEASLCLAHFGGPQGRLCHVPRGVGLHGELERLYSHFAGGGGPVMVGGDADARSKALLGVCVGSGTEAYVLVLDPHYWGTPKSPSELQAAGWVGWQEVSAAFDPNSFYNLCLTSLSSQQQQRTLD

SEQ ID NO: 95642 - protein, 469 aa, Homo sapiens
  Payload ID: 19076
  Gene Name: UFM1-specific peptidase 2
  Uniprot ID: Q9NUQ7
  ENSP ID: ENSP00000264689
MVISESMDILFRIRGGLDLAFQLATPNEIFLKKALKHVLSDLSTKLSSNALVFRICHSSVYIWPSSDINTIPGELTDASACKNILRFIQFEPEEDIKRKFMRKKDKKLSDMHQIVNIDLMLEMSTSLAAVTPIIERESGGHHYVNMTLPVDAVISVAPEETWGKVRKLLVDAIHNQLTDMEKCILKYMKGTSIVVPEPLHFLLPGKKNLVTISYPSGIPDGQLQAYRKELHDLFNLPHDRPYFKRSNAYHFPDEPYKDGYIRNPHTYLNPPNMETGMIYVVQGIYGYHHYMQDRIDDNGWGCAYRSLQTICSWFKHQGYTERSIPTHREIQQALVDAGDKPATFVGSRQWIGSIEVQLVLNQLIGITSKILFVSQGSEIASQGRELANHFQSEGTPVMIGGGVLAHTILGVAWNEITGQIKFLILDPHYTGAEDLQVILEKGWCGWKGPDFWNKDAYYNLCLPQRPNMI

SEQ ID NO: 95643 - protein, 387 aa, Homo sapiens
  Payload ID: 19076
  Gene Name: UFM1-specific peptidase 2
  ENSP ID: ENSP00000421133
MVISESMDILFRIRGGLDLAFQLATPNEIFLKKALKHVLSDLSTKLSSNALVFRICHSSVYIWPSSDINTIPGELTDASACKNILRFIQFEPEEDIKRKFMRKKDKKLSDMHQIVNIDLMLEMSTSLAAVTPIIERESGGHHYVNMTLPVDAVISVAPEETWGKVRKLLVDAIHNQLTDMEKCILKYMKGTSIVVPEPLHFLLPGKKNLVTISYPSGIPDGQLQAYRKELHDLFNLPHDRPYFKRSNAYHFPDEPYKDGYIRNPHTYLNPPNMETGMIYVVQGIYGYHHYMQDRIDDNGWGCAYRSLQTICSWFKHQGYTERSIPTHREIQQALVDAGDKPATFVGSRQWIGSIEVQLVLNQLIGITSKILFVSNTRKNKKVGNIVS

SEQ ID NO: 95644 - protein, 124 aa, Homo sapiens
  Payload ID: 19076
  Gene Name: UFM1-specific peptidase 2
  ENSP ID: ENSP00000423108
MDILFRIRGGLDLAFQLATPNEIFLKKALKHVLSDLSTKLSSNALVFRICHSSVYIWPSSDINTIPGELTDASACKNILRFIQFEPEEDIKRKFMRKKDKKLSDMHQIVNIDLMLEMSTSLAAV

SEQ ID NO: 95645 - protein, 87 aa, Homo sapiens
  Payload ID: 19076
  Gene Name: UFM1-specific peptidase 2
  ENSP ID: ENSP00000423599
MVISESMDILFRIRGGLDLAFQLATPNEIFLKKALKHVLSDLSTKLSSNALVFRICHSSVYIWPSSDINTIPGELTDASAYLSQKKI

SEQ ID NO: 95646 - protein, 197 aa, Homo sapiens
  Payload ID: 19076
  Gene Name: UFM1-specific peptidase 2
  ENSP ID: ENSP00000423657
  MOD_RES (1)..(1): Any amino acid
XMETGMIYVVQGIYGYHHYMQDRIDDNGWGCAYRSLQTICSWFKHQGYTERSIPTHREIQQALVDAGDKPATFVGSRQWIGSIEVQLVLNQLIGITSKILFVSQGSEIASQGRELANHFQSEGTPVMIGGGVLAHTILGVAWNEITGQIKFLILDPHYTGAEDLQVILEKHLEFEVYKRFFDWCMYLTEYSSNILVL

SEQ ID NO: 95647 - protein, 112 aa, Homo sapiens
  Payload ID: 19076
  Gene Name: UFM1-specific peptidase 2
  ENSP ID: ENSP00000424419
MVISESMDILFRIRGGLDLAFQLATPNEIFLKKALKHVLSDLSTKLSSNALVFRICHSSVYIWPSSDINTIPGELTDASACKNILRFIQFEPEEDIKRKFMRKKDKKLSDML

SEQ ID NO: 95648 - protein, 368 aa, Homo sapiens
  Payload ID: 19076
  Gene Name: UFM1-specific peptidase 2
  ENSP ID: ENSP00000425855
  MOD_RES (1)..(1): Any amino acid
XFRFEPEEDIKRKFMRKKDKKLSDMHQIVNIDLMLEMSTSLAAVTPIIERESGGHHYVNMTLPVDAVISVAPEETWGKVRKLLVDAIHNQLTDMEKCILKYMKGTSIVVPEPLHFLLPGKKNLVTISYPSGIPDGQLQAYRKELHDLFNLPHDRPYFKRSNAYHFPDEPYKDGYIRNPHTYLNPPNMETGMDRIDDNGWGCAYRSLQTICSWFKHQGYTERSIPTHREIQQALVDAGDKPATFVGSRQWIGSIEVQLVLNQLIGITSKILFVSQGSEIASQGRELANHFQSEGTPVMIGGGVLAHTILGVAWNEITGQIKFLILDPHYTGAEDLQVILEKGWCGWKGPDFWNKDAYYNLCLPQRPNMI

SEQ ID NO: 95649 - protein, 1440 aa, Homo sapiens
  Payload ID: 19077
  Gene Name: UHRF1 binding protein 1
  Uniprot ID: Q6BDS2
  ENSP ID: ENSP00000192788
MAGIIKKQILKHLSRFTKNLSPDKINLSTLKGEGQLTNLELDEEVLQNVLELPTWLAITRVYCNRASIRIQWTKLKTHPICLCLDKVEVEMKTCEDPRPPNGQSPIALASGQSEYGFAEKVVEGMFIIVNSITIKIHSKAFHASFELWQLQGYSVNPNWQQSDLRLTRITDPCRGEVLTFKEITWQTLRIEADATDNGDQDPVTTPLRLITNQGRIQIALKRRTKDCNVISSKLMFLLDDLLWVLTDSQLKAMMKYAESLSEAMEKSAHQRKSLAPEPVQITPPAPSAQQSWAQAFGGSQGNSNSSSSRLSQYFEKFDVKESSYHLLISRLDLHICDDSQSREPGVSANRLMGGAMQLTFRKMAFDYYPFHWAGDSCKHWVRHCEAMETRGQWAQKLVMEFQSKMEKWHEETGLKPPWHLGVDSLFRRKADSLSSPRKNPLERSPSQGRQPAFQPPAWNRLRSSCMVVRVDDLDIHQVSTAGQPSKKPSTLLSCSRKLHNLPTQVSAIHIEFTEYYFPDNQELPVPCPNLYIQLNGLTFTMDPVSLLWGNLFCLDLYRSLEQFKAIYKLEDSSQKDEHLDIRLDAFWLKVSFPLEKRERAELHRPQALVFSASGMIATNTRHAPHCSCSDLQSLFRGFAAAEFFHSNYDHFPKVPGGFSLLHMLFLHHAFQMDSCLPQPNTLPPQRPKASWDLWSVHFTQISLDFEGTENFKGHTLNFVAPFPLSIWACLPLRWQQAQARKLLLASEGRLKPSASFGSPVQSEALAPDSMSHPRSKTEHDLKSLSGLTEVMEILKEGSSGMDNKGPLTELEDVADVHMLVHSPAHVRVRLDHYQYLALLRLKEVLQRLQEQLTKDTESMTGSPLQNQTACIGVLFPSAEVALLMHPAPGAVDADSAGSDSTSLVDSELSPSEDRELKSDASSDQGPASPEKVLEESSIENQDVSQERPHSNGELQDSGPLAQQLAGKGHEAVESLQAKKLSRTQASSSPAALKPPAGRETAVNGQGELIPLKNIEGELSSAIHMTKDATKEALHATMDLTKEAVSLTKDAFSLGRDRMTSTMHKMLSLPPAKEPMAKTDEGVAAPVSGGAARLRFFSMKRTVSQQSFDGVSLDSSGPEDRISVDSDGSDSFVMLLESESGPESVPPGSLSNVSDNAGVQGSPLVNNYGQGSPAANSSVSPSGEDLIFHPVSVLVLKVNEVSFGIEVRGEDLTVALQAEELTLQQLGTVGLWQFLHGQCPGTCFQESSTLKTGHIRPAVGLRFEVGPGAAVHSPLASQNGFLHLLLHGCDLELLTSVLSGLGPFLEDEEIPVVVPMQIELLNSSITLKDDIPPIYPTSPGPIPITLAMEHVVLKRSDDGVFHIGAAAQDKPSAEVLKSEKRQPPKEQVFLVPTGEVFEQQVKELPILQKELIETKQALANANQDKEKLLQEIRKYNPFFEL

SEQ ID NO: 95650 - protein, 1400 aa, Homo sapiens
  Payload ID: 19077
  Gene Name: UHRF1 binding protein 1
  ENSP ID: ENSP00000400628
MAGIIKKQILKHLSRFTKNLSPDKINLSTLKGEGQLTNLELDEEVLQNVLELPTWLAITRVYCNRASIRIQWTKLKTHPICLCLDKVEVEMKTCEDPRPPNGQSPIALASGQSEYGFAEKVVEGMFIIVNSITIKIHSKAFHASFELWQLQGYSVNPNWQQSDLRLTRITDPCRGEVLTFKEITWQTLRIEADATDNGDQDPVTTPLRLITNQGRIQIALKRRTKDCNVISSKLMFLLDDLLWVLTDSQLKAMMKYAESLSEAMEKSAHQRKSLAPEPVQITPPAPSAQQSWAQAFGGSQGNSNSSSSRLSQYFEKFDVKESSYHLLISRLDLHICDDSQSREPGVSANRLMGGAMQLTFRKMAFDYYPFHWAGDSCKHWVRHCEAMETRGQWAQKLVMEFQSKMEKWHEETGLKPPWHLGVDSLFRRKADSLSSPRKNPLERSPSQGRQPAFQPPAWNRLRSSCMVVRVDDLDIHQVSTAGQPSKKPSTLLSCSRKLHNLPTQVSAIHIEFTEYYFPDNQELPVPCPNLYIQLNGLTFTMDPVSLLWGNLFCLDLYRSLEQFKAIYKLEDSSQKDEHLDIRLDAFWLKVSFPLEKRERAELHRPQALVFSASGMIATNTRHAPHCSCSDLQSLFRGFAAAEFFHSNYDHFPKVPGGFSLLHMLFLHHAFQMDSCLPQPNTLPPQRPKASWDLWSVHFTQISLDFEGTENFKGHTLNFVAPFPLSIWACLPLRWQQAQARKLLLASEGRLKPSASFGSPVQSEALAPDSMSHPRSKTEHDLKSLSGLTEVMEILKEGSSGMDNKGPLTELEDVADVHMLVHSPAHVRVRLDHYQYLALLRLKEVLQRLQEQLTKDTESMTGSPLQNQTACIGVLFPSAEVALLMHPAPGAVDADSAGSDSTSLVDSELSPSEDRELKSDASSDQGPASPEKVLEESSIENQDVSQERPHSNGELQDSGPLAQQLAGKGHEAVESLQAKKLSRTQASSSPAALKPPAGRETAVNGQGELIPLKNIEGELSSAIHMTKDATKEALHATMDLTKEAVSLTKDAFSLGRDRMTSTMHKMLSLPPAKEPMAKTDEGVAAPVSGGAARLRFFSMKRTVSQQSFDGVSLDSSGPEDRISVDSDGSDSFVMLLESESGPESVPPGSLSNVSDNAGVQGSPLVNNYGQGSPAANSSVSPSGEDLIFHPVSVLVLKVNEVSFGIEVRGEDLTVALQAEELTLQQLGTVGLWQFLHGQCPGTCFQESSTLKTGHIRPAVGLRFEVGPGAAVHSPLASQNGFLHLLLHGCDLELLTSVLSGLGPFLEDEEIPVVVPMQIELLNSSITLKDDIPPIYPTSPGPIPITLAMEHVVLKRSDDGVFHIGAAAQDKPSAEVLKSEKRQPPKEQVFLVPTGEVFEQQT

SEQ ID NO: 95651 - protein, 1464 aa, Homo sapiens
  Payload ID: 19078
  Gene Name: UHRF1 binding protein 1-like
  Uniprot ID: A0JNW5
  ENSP ID: ENSP00000279907
MAGIIKKQILKHLSRFTKNLSPDKINLSTLKGEGELKNLELDEEVLQNMLDLPTWLAINKVFCNKASIRIPWTKLKTHPICLSLDKVIMEMSTCEEPRSPNGPSPIATASGQSEYGFAEKVVEGISVSVNSIVIRIGAKAFNASFELSQLRIYSVNAHWEHGDLRFTRIQDPQRGEVLTFKEINWQMIRIEADATQSSHLEIMCAPVRLITNQSKIRVTLKRRLKDCNVIATKLVLILDDLLWVLTDSQLKAMVQYAKSLSEAIEKSTEQRKSMAPEPTQSSTVVASAQQVKTTQTSNAPDVNDAIVKLFNDFDVKETSHHLVISHLDLHICDDIHAKEKESNRRITGGAMQLSFTQLTIDYYPYHKAGDSCNHWMYFSDATKTKNGWANELLHEFECNVEMLKQAVKDHNVGSPPKSPTHASPQHTQTEKDYPLKGTCRTPSVLSQQSKAKLMSSSVVVRLADFNIYQVSTAEQCRSSPKSMICCNKKSLYLPQEMSAVYIEFTEYYYPDGKDFPIPSPNLYSQLNALQFTVDERSILWLNQFLLDLKQSLNQFMAVYKLNDNSKSDEHVDVRVDGLMLKFVIPSEVKSECHQDQPRAISIQSSEMIATNTRHCPNCRHSDLEALFQDFKDCDFFSKTYTSFPKSCDNFNLLHPIFQRHAHEQDTKMHEIYKGNITPQLNKNTLKTSAATDVWAVYFSQFWIDYEGMKSGKGRPISFVDSFPLSIWICQPTRYAESQKEPQTCNQVSLNTSQSESSDLAGRLKRKKLLKEYYSTESEPLTNGGQKPSSSDTFFRFSPSSSEADIHLLVHVHKHVSMQINHYQYLLLLFLHESLILLSENLRKDVEAVTGSPASQTSICIGILLRSAELALLLHPVDQANTLKSPVSESVSPVVPDYLPTENGDFLSSKRKQISRDINRIRSVTVNHMSDNRSMSVDLSHIPLKDPLLFKSASDTNLQKGISFMDYLSDKHLGKISEDESSGLVYKSGSGEIGSETSDKKDSFYTDSSSILNYREDSNILSFDSDGNQNILSSTLTSKGNETIESIFKAEDLLPEAASLSENLDISKEETPPVRTLKSQSSLSGKPKERCPPNLAPLCVSYKNMKRSSSQMSLDTISLDSMILEEQLLESDGSDSHMFLEKGNKKNSTTNYRGTAESVNAGANLQNYGETSPDAISTNSEGAQENHDDLMSVVVFKITGVNGEIDIRGEDTEICLQVNQVTPDQLGNISLRHYLCNRPVGSDQKAVIHSKSSPEISLRFESGPGAVIHSLLAEKNGFLQCHIENFSTEFLTSSLMNIQHFLEDETVATVMPMKIQVSNTKINLKDDSPRSSTVSLEPAPVTVHIDHLVVERSDDGSFHIRDSHMLNTGNDLKENVKSDSVLLTSGKYDLKKQRSVTQATQTSPGVPWPSQSANFPEFSFDFTREQLMEENESLKQELAKAKMALAEAHLEKDALLHHIKKMTVE

SEQ ID NO: 95652 - protein, 522 aa, Homo sapiens
  Payload ID: 19078
  Gene Name: UHRF1 binding protein 1-like
  Uniprot ID: A0JNW5
  ENSP ID: ENSP00000349285
MAGIIKKQILKHLSRFTKNLSPDKINLSTLKGEGELKNLELDEEVLQNMLDLPTWLAINKVFCNKASIRIPWTKLKTHPICLSLDKVIMEMSTCEEPRSPNGPSPIATASGQSEYGFAEKVVEGISVSVNSIVIRIGAKAFNASFELSQLRIYSVNAHWEHGDLRFTRIQDPQRGEVLTFKEINWQMIRIEADATQSSHLEIMCAPVRLITNQSKIRVTLKRRLKDCNVIATKLVLILDDLLWVLTDSQLKAMVQYAKSLSEAIEKSTEQRKSMAPEPTQSSTVVASAQQVKTTQTSNAPDVNDAIVKLFNDFDVKETSHHLVISHLDLHICDDIHAKEKESNRRITGGAMQLSFTQLTIDYYPYHKAGDSCNHWMYFSDATKTKNGWANELLHEFECNVEMLKQAVKDHNVGSPPKSPTHASPQHTQTEKDYPLKGTCRTPSVLSQQSKAKLMSSSVVVRLADFNIYQVSTAEQCRSSPKSMICCNKKSLYLPQEMSAVYIEFTEYYYPDGKDFPTAFLSR

SEQ ID NO: 95653 - protein, 1114 aa, Homo sapiens
  Payload ID: 19078
  Gene Name: UHRF1 binding protein 1-like
  ENSP ID: ENSP00000444824
MQLSFTQLTIDYYPYHKAGDSCNHWMYFSDATKTKNGWANELLHEFECNVEMLKQAVKDHNVGSPPKSPTHASPQHTQTEKDYPLKGTCRTPSVLSQQSKAKLMSSSVVVRLADFNIYQVSTAEQCRSSPKSMICCNKKSLYLPQEMSAVYIEFTEYYYPDGKDFPIPSPNLYSQLNALQFTVDERSILWLNQFLLDLKQSLNQFMAVYKLNDNSKSDEHVDVRVDGLMLKFVIPSEVKSECHQDQPRAISIQSSEMIATNTRHCPNCRHSDLEALFQDFKDCDFFSKTYTSFPKSCDNFNLLHPIFQRHAHEQDTKMHEIYKGNITPQLNKNTLKTSAATDVWAVYFSQFWIDYEGMKSGKGRPISFVDSFPLSIWICQPTRYAESQKEPQTCNQVSLNTSQSESSDLAGRLKRKKLLKEYYSTESEPLTNGGQKPSSSDTFFRFSPSSSEADIHLLVHVHKHVSMQINHYQYLLLLFLHESLILLSENLRKDVEAVTGSPASQTSICIGILLRSAELALLLHPVDQANTLKSPVSESVSPVVPDYLPTENGDFLSSKRKQISRDINRIRSVTVNHMSDNRSMSVDLSHIPLKDPLLFKSASDTNLQKGISFMDYLSDKHLGKISEDESSGLVYKSGSGEIGSETSDKKDSFYTDSSSILNYREDSNILSFDSDGNQNILSSTLTSKGNETIESIFKAEDLLPEAASLSENLDISKEETPPVRTLKSQSSLSGKPKERCPPNLAPLCVSYKNMKRSSSQMSLDTISLDSMILEEQLLESDGSDSHMFLEKGNKKNSTTNYRGTAESVNAGANLQNYGETSPDAISTNSEGAQENHDDLMSVVVFKITGVNGEIDIRGEDTEICLQVNQVTPDQLGNISLRHYLCNRPVGSDQKAVIHSKSSPEISLRFESGPGAVIHSLLAEKNGFLQCHIENFSTEFLTSSLMNIQHFLEDETVATVMPMKIQVSNTKINLKDDSPRSSTVSLEPAPVTVHIDHLVVERSDDGSFHIRDSHMLNTGNDLKENVKSDSVLLTSGKYDLKKQRSVTQATQTSPGVPWPSQSANFPEFSFDFTREQLMEENESLKQELAKAKMALAEAHLEKDALLHHIKKMTVE

SEQ ID NO: 95654 - protein, 67 aa, Homo sapiens
  Payload ID: 19078
  Gene Name: UHRF1 binding protein 1-like
  ENSP ID: ENSP00000447043
MQLSFTQLTIDYYPYHKAEKDYPLKGTCRTPSVLSQQSKAKLMSSSVVVRLADFNIYQVSTAEQCRS

SEQ ID NO: 95655 - protein, 204 aa, Homo sapiens
  Payload ID: 19078
  Gene Name: UHRF1 binding protein 1-like
  ENSP ID: ENSP00000447809
  MOD_RES (1)..(1): Any amino acid
XSDQKAVIHSKSSPEISLRFESGPGAVIHSLLAEKNGFLQCHIENFSTEFLTSSLMNIQHFLEDETVATVMPMKIQVSNTKINLKDDSPRSSTVSLEPAPVTVHIDHLVVERSDDGSFHIRDSHMLNTGNDLKENVKSDSVLLTSGKYDLKKQRSVTQATQTSPGVPWPSQSANFPEFSFDFTREQLNKRFFNQDFGTTKMEEI

SEQ ID NO: 95656 - protein, 130 aa, Homo sapiens
  Payload ID: 19078
  Gene Name: UHRF1 binding protein 1-like
  ENSP ID: ENSP00000448226
MQLSFTQLTIDYYPYHKAGDSCNHWMYFSDATKTKNGWANELLHEFECNVEMLKQAVKDHNVGSPPKSPTHASPQHTQTEKDYPLKGTCRTPSVLSQQSKAKLMSSSVVVRLADFNIYQVSTAEQCRSSP

SEQ ID NO: 95657 - protein, 45 aa, Homo sapiens
  Payload ID: 19078
  Gene Name: UHRF1 binding protein 1-like
  ENSP ID: ENSP00000448420
MAGIIKKQILKHLSSVPCWLWWRLVCCELHNHPNEYQRSLRNPGN

SEQ ID NO: 95658 - protein, 103 aa, Homo sapiens
  Payload ID: 19078
  Gene Name: UHRF1 binding protein 1-like
  ENSP ID: ENSP00000449112
MQLSFTQLTIDYYPYHKAEKDYPLKGTCRTPSVLSQQSKAKLMSSSVVVRLADFNIYQVSTAEQCRSSPKSMICCNKKSLYLPQEMSAVYIEFTEYYYPDGKD

SEQ ID NO: 95659 - protein, 60 aa, Homo sapiens
  Payload ID: 19078
  Gene Name: UHRF1 binding protein 1-like
  ENSP ID: ENSP00000449189
MQLSFTQLTIDYYPYHKAGDSCNHWMYFSDATKTKNGWANELLHEFECNVEMLKQAVKDH

SEQ ID NO: 95660 - protein, 244 aa, Homo sapiens
  Payload ID: 19079
  Gene Name: UL16 binding protein 1
  Uniprot ID: Q9BZM6
  ENSP ID: ENSP00000229708
MAAAASPAFLLCLPLLHLLSGWSRAGWVDTHCLCYDFIITPKSRPEPQWCEVQGLVDERPFLHYDCVNHKAKAFASLGKKVNVTKTWEEQTETLRDVVDFLKGQLLDIQVENLIPIEPLTLQARMSCEHEAHGHGRGSWQFLFNGQKFLLFDSNNRKWTALHPGAKKMTEKWEKNRDVTMFFQKISLGDCKMWLEEFLMYWEQMLDPTKPPSLAPGTTQPKAMATTLSPWSLLIIFLCFILAGR

SEQ ID NO: 95661 - protein, 246 aa, Homo sapiens
  Payload ID: 19080
  Gene Name: UL16 binding protein 2
  Uniprot ID: Q9BZM5
  ENSP ID: ENSP00000356320
MAAAAATKILLCLPLLLLLSGWSRAGRADPHSLCYDITVIPKFRPGPRWCAVQGQVDEKTFLHYDCGNKTVTPVSPLGKKLNVTTAWKAQNPVLREVVDILTEQLRDIQLENYTPKEPLTLQARMSCEQKAEGHSSGSWQFSFDGQIFLLFDSEKRMWTTVHPGARKMKEKWENDKVVAMSFHYFSMGDCIGWLEDFLMGMDSTLEPSAGAPLAMSSGTTQLRATATTLILCCLLIILPCFILPGI

SEQ ID NO: 95662 - protein, 244 aa, Homo sapiens
  Payload ID: 19081
  Gene Name: UL16 binding protein 3
  Uniprot ID: Q9BZM4
  ENSP ID: ENSP00000356308
MAAAASPAILPRLAILPYLLFDWSGTGRADAHSLWYNFTIIHLPRHGQQWCEVQSQVDQKNFLSYDCGSDKVLSMGHLEEQLYATDAWGKQLEMLREVGQRLRLELADTELEDFTPSGPLTLQVRMSCECEADGYIRGSWQFSFDGRKFLLFDSNNRKWTVVHAGARRMKEKWEKDSGLTTFFKMVSMRDCKSWLRDFLMHRKKRLEPTAPPTMAPGLAQPKAIATTLSPWSFLIILCFILPGI

SEQ ID NO: 95663 - protein, 244 aa, Homo sapiens; identical to SEQ ID NO: 95662
  Payload ID: 19081
  Gene Name: UL16 binding protein 3
  Uniprot ID: Q9BZM4
  ENSP ID: ENSP00000403562

SEQ ID NO: 95664 - protein, 531 aa, Homo sapiens
  Payload ID: 19082
  Gene Name: UNC homeobox
  Uniprot ID: A6NJT0
  ENSP ID: ENSP00000314480
MMDGRLLEHPHAQFGGSLGGVVGFPYPLGHHHVYELAGHQLQSAAAAASVPFSIDGLLGGSCAAAASVVNPTPLLPAACGVGGDGQPFKLSDSGDPDKESPGCKRRRTRTNFTGWQLEELEKAFNESHYPDVFMREALALRLDLVESRVQVWFQNRRAKWRKKENTKKGPGRPAHNSHPTTCSGEPMDPEEIARKELEKMEKKKRKHEKKLLKSQGRHLHSPGGLSLHSAPSSDSDSGGGGLSPEPPEPPPPAAKGPGAHASGAAGTAPAPPGEPPAPGTCDPAFYPSQRSGAGPQPRPGRPADKDAASCGPGAAVAAVERGAAGLPKASPFSVESLLSDSPPRRKAASNAAAAAAAGLDFAPGLPCAPRTLIGKGHFLLYPITQPLGFLVPQAALKGGAGLEPAPKDAPPAPAVPPAPPAQASFGAFSGPGGAPDSAFARRSPDAVASPGAPAPAPAPFRDLASAAATEGGGGDCADAGTAGPAPPPPAPSPRPGPRPPSPAEEPATCGVPEPGAAAGPSPPEGEELDMD

SEQ ID NO: 95665 - protein, 220 aa, Homo sapiens
  Payload ID: 19083
  Gene Name: unc-119 lipid binding chaperone
  Uniprot ID: Q13432
  ENSP ID: ENSP00000301032
MKVKKGGGGAGTATESAPGPSGQSVAPIPQPPAESESGSESEPDAGPGPRPGPLQRKQPIGPEDVLGLQRITGDYLCSPEENIYKIDFVRFKIRDMDSGTVLFEIKKPPVSERLPINRRDLDPNAGRFVRYQFTPAFLRLRQVGATVEFTVGDKPVNNFRMIERHYFRNQLLKSFDFHFGFCIPSSKNTCEHIYDFPPLSEELSARAGSSGSGEVGASRD

SEQ ID NO: 95666 - protein, 240 aa, Homo sapiens
  Payload ID: 19083
  Gene Name: unc-119 lipid binding chaperone
  Uniprot ID: Q13432
  ENSP ID: ENSP00000337040
MKVKKGGGGAGTATESAPGPSGQSVAPIPQPPAESESGSESEPDAGPGPRPGPLQRKQPIGPEDVLGLQRITGDYLCSPEENIYKIDFVRFKIRDMDSGTVLFEIKKPPVSERLPINRRDLDPNAGRFVRYQFTPAFLRLRQVGATVEFTVGDKPVNNFRMIERHYFRNQLLKSFDFHFGFCIPSSKNTCEHIYDFPPLSEELISEMIRHPYETQSDSFYFVDDRLVMHNKADYSYSGTP

SEQ ID NO: 95667 - protein, 208 aa, Homo sapiens
  Payload ID: 19083
  Gene Name: unc-119 lipid binding chaperone
  ENSP ID: ENSP00000414639
MKVKKGGGGAGTATESAPGPSGQSVAPIPQPPAESESGSESEPDAGPGPRPGPLQRKQPIGPEDVLGLQRITGGARPLFPAWRFKIRDMDSGTVLFEIKKPPVSERLPINRRDLDPNAGRFVRYQFTPAFLRLRQVGATVEFTVGDKPVNNFRMIERHYFRNQLLKSFDFHFGFCIPSSKNTCEHIYDFPPLSEELSARAGSSGSGEV

SEQ ID NO: 95668 - protein, 86 aa, Homo sapiens
  Payload ID: 19083
  Gene Name: unc-119 lipid binding chaperone
  ENSP ID: ENSP00000463893
  MOD_RES (1)..(1): Any amino acid
XKKGGGGAGTATESAPGPSGQSVAPIPQPPAESESGSESEPDAGPGPRPGPLQRKQPIGPEDVLGLQRITGGWSSQWETSLSTTSA

SEQ ID NO: 95669 - protein, 125 aa, Homo sapiens
  Payload ID: 19083
  Gene Name: unc-119 lipid binding chaperone
  ENSP ID: ENSP00000465323
MDSGTVLFEIKKPPVSERLPINRRDLDPNAGRFVRYQFTPAFLRLRQVGATVEFTVGDKPVNNFRMIERHYFRNQLLKSFDFHFGFCIPSSKNTCEHIYDFPPLSEELSARAGSSGSGEVGASRD

SEQ ID NO: 95670 - protein, 145 aa, Homo sapiens
  Payload ID: 19083
  Gene Name: unc-119 lipid binding chaperone
  ENSP ID: ENSP00000466831
MDSGTVLFEIKKPPVSERLPINRRDLDPNAGRFVRYQFTPAFLRLRQVGATVEFTVGDKPVNNFRMIERHYFRNQLLKSFDFHFGFCIPSSKNTCEHIYDFPPLSEELISEMIRHPYETQSDSFYFVDDRLVMHNKADYSYSGTP

SEQ ID NO: 95671 - protein, 251 aa, Homo sapiens
  Payload ID: 19084
  Gene Name: unc-119 lipid binding chaperone B
  Uniprot ID: A6NIH7
  ENSP ID: ENSP00000344942
MSGSNPKAAAAASAAGPGGLVAGKEEKKKAGGGVLNRLKARRQAPHHAADDGVGAAVTEQELLALDTIRPEHVLRLSRVTENYLCKPEDNIYSIDFTRFKIRDLETGTVLFEIAKPCVSDQEEDEEEGGGDVDISAGRFVRYQFTPAFLRLRTVGATVEFTVGDKPVSNFRMIERHYFREHLLKNFDFDFGFCIPSSRNTCEHIYEFPQLSEDVIRLMIENPYETRSDSFYFVDNKLIMHNKADYAYNGGQ

SEQ ID NO: 95672 - protein, 1703 aa, Homo sapiens
  Payload ID: 19085
  Gene Name: unc-13 homolog A (C. elegans)
  ENSP ID: ENSP00000252773
LSLLCVSLKKAKFDGAQEKFNTYVTLKVQNVKSTTIAVRGSQPSWEQDFMFEINRLDLGLTVEVWNKGLIWDTMVGTVWIPLRTIRQSNEEGPGEWLTLDSQVIMADSEICGTKDPTFHRILLDTRFELPLDIPEEEARYWAKKLEQLNAMRDQDEYSFQDEQDKPLPVPSNQCCNWNYFGWGEQHNDDPDSAVDDRDSDYRSETSNSIPPPYYTTSQPNASVHQYSVRPPPLGSRESYSDSMHSYEEFSEPQALSPTGSSRYASSGELSQGSSQLSEDFDPDEHSLQGSDMEDERDRDSYHSCHSSVSYHKDSPRWDQDEEELEEDLEDFLEEEELPEDEEELEEEEEEVPDDLGSYAQREDVAVAEPKDFKRISLPPAAPGKEDKAPVAPTEAPDMAKVAPKPATPDKVPAAEQIPEAEPPKDEESFRPREDEEGQEGQDSMSRAKANWLRAFNKVRMQLQEARGEGEMSKSLWFKGGPGGGLIIIDSMPDIRKRKPIPLVSDLAMSLVQSRKAGITSALASSTLNNEELKNHVYKKTLQALIYPISCTTPHNFEVWTATTPTYCYECEGLLWGIARQGMRCTECGVKCHEKCQDLLNADCLQRAAEKSSKHGAEDRTQNIIMVLKDRMKIRERNKPEIFELIQEIFAVTKTAHTQQMKAVKQSVLDGTSKWSAKISITVVCAQGLQAKDKTGSSDPYVTVQVGKTKKRTKTIYGNLNPVWEENFHFECHNSSDRIKVRVWDEDDDIKSRVKQRFKRESDDFLGQTIIEVRTLSGEMDVWYNLDKRTDKSAVSGAIRLHISVEIKGEEKVAPYHVQYTCLHENLFHFVTDVQNNGVVKIPDAKGDDAWKVYYDETAQEIVDEFAMRYGVESIYQAMTHFACLSSKYMCPGVPAVMSTLLANINAYYAHTTASTNVSASDRFAASNFGKERFVKLLDQLHNSLRIDLSMYRNNFPASSPERLQDLKSTVDLLTSITFFRMKVQELQSPPRASQVVKDCVKACLNSTYEYIFNNCHELYSREYQTDPAKKGEVLPEEQGPSIKNLDFWSKLITLIVSIIEEDKNSYTPCLNQFPQELNVGKISAEVMWNLFAQDMKYAMEEHDKHRLCKSADYMNLHFKVKWLYNEYVTELPAFKDRVPEYPAWFEPFVIQWLDENEEVSRDFLHGALERDKKDGFQQTSEHALFSCSVVDVFSQLNQSFEIIKKLECPDPQIVGHYMRRFAKTISNVLLQYADIISKDFASYCSKEKEKVPCILMNNTQQLRVQLEKMFEAMGGKELDAEASDILKELQVKLNNVLDELSRVFATSFQPHIEECVKQMGDILSQVKGTGNVPASACSSVAQDADNVLQPIMDLLDSNLTLFAKICEKTVLKRVLKELWKLVMNTMEKTIVLPPLTDQTMIGNLLRKHGKGLEKGRVKLPSHSDGTQMIFNAAKELGQLSKLKDHMVREEAKSLTPKQCAVVELALDTIKQYFHAGGVGLKKTFLEKSPDLQSLRYALSLYTQATDLLIKTFVQTQSAQGLGVEDPVGEVSVHVELFTHPGTGEHKVTVKVVAANDLKWQTSGIFRPFIEVNIIGPQLSDKKRKFATKSKNNSWAPKYNESFQFTLSADAGPECYELQVCVKDYCFAREDRTVGLAVLQLRELAQRGSAACWLPLGRRIHMDDTGLTVLRILSQRSNDEVAKEFVKLKSDTRSAEEGGAAPAP

SEQ ID NO: 95673 - protein, 1703 aa, Homo sapiens
  Payload ID: 19085
  Gene Name: unc-13 homolog A (C. elegans)
  Uniprot ID: Q9UPW8
  ENSP ID: ENSP00000429562
MSLLCVGVKKAKFDGAQEKFNTYVTLKVQNVKSTTIAVRGSQPSWEQDFMFEINRLDLGLTVEVWNKGLIWDTMVGTVWIPLRTIRQSNEEGPGEWLTLDSQVIMADSEICGTKDPTFHRILLDTRFELPLDIPEEEARYWAKKLEQLNAMRDQDEYSFQDEQDKPLPVPSNQCCNWNYFGWGEQHNDDPDSAVDDRDSDYRSETSNSIPPPYYTTSQPNASVHQYSVRPPPLGSRESYSDSMHSYEEFSEPQALSPTGSSRYASSGELSQGSSQLSEDFDPDEHSLQGSDMEDERDRDSYHSCHSSVSYHKDSPRWDQDEEELEEDLEDFLEEEELPEDEEELEEEEEEVPDDLGSYAQREDVAVAEPKDFKRISLPPAAPGKEDKAPVAPTEAPDMAKVAPKPATPDKVPAAEQIPEAEPPKDEESFRPREDEEGQEGQDSMSRAKANWLRAFNKVRMQLQEARGEGEMSKSLWFKGGPGGGLIIIDSMPDIRKRKPIPLVSDLAMSLVQSRKAGITSALASSTLNNEELKNHVYKKTLQALIYPISCTTPHNFEVWTATTPTYCYECEGLLWGIARQGMRCTECGVKCHEKCQDLLNADCLQRAAEKSSKHGAEDRTQNIIMVLKDRMKIRERNKPEIFELIQEIFAVTKTAHTQQMKAVKQSVLDGTSKWSAKISITVVCAQGLQAKDKTGSSDPYVTVQVGKTKKRTKTIYGNLNPVWEENFHFECHNSSDRIKVRVWDEDDDIKSRVKQRFKRESDDFLGQTIIEVRTLSGEMDVWYNLDKRTDKSAVSGAIRLHISVEIKGEEKVAPYHVQYTCLHENLFHFVTDVQNNGVVKIPDAKGDDAWKVYYDETAQEIVDEFAMRYGVESIYQAMTHFACLSSKYMCPGVPAVMSTLLANINAYYAHTTASTNVSASDRFAASNFGKERFVKLLDQLHNSLRIDLSMYRNNFPASSPERLQDLKSTVDLLTSITFFRMKVQELQSPPRASQVVKDCVKACLNSTYEYIFNNCHELYSREYQTDPAKKGEVLPEEQGPSIKNLDFWSKLITLIVSIIEEDKNSYTPCLNQFPQELNVGKISAEVMWNLFAQDMKYAMEEHDKHRLCKSADYMNLHFKVKWLYNEYVTELPAFKDRVPEYPAWFEPFVIQWLDENEEVSRDFLHGALERDKKDGFQQTSEHALFSCSVVDVFSQLNQSFEIIKKLECPDPQIVGHYMRRFAKTISNVLLQYADIISKDFASYCSKEKEKVPCILMNNTQQLRVQLEKMFEAMGGKELDAEASDILKELQVKLNNVLDELSRVFATSFQPHIEECVKQMGDILSQVKGTGNVPASACSSVAQDADNVLQPIMDLLDSNLTLFAKICEKTVLKRVLKELWKLVMNTMEKTIVLPPLTDQTMIGNLLRKHGKGLEKGRVKLPSHSDGTQMIFNAAKELGQLSKLKDHMVREEAKSLTPKQCAVVELALDTIKQYFHAGGVGLKKTFLEKSPDLQSLRYALSLYTQATDLLIKTFVQTQSAQGLGVEDPVGEVSVHVELFTHPGTGEHKVTVKVVAANDLKWQTSGIFRPFIEVNIIGPQLSDKKRKFATKSKNNSWAPKYNESFQFTLSADAGPECYELQVCVKDYCFAREDRTVGLAVLQLRELAQRGSAACWLPLGRRIHMDDTGLTVLRILSQRSNDEVAKEFVKLKSDTRSAEEGGAAPAP

SEQ ID NO: 95674 - protein, 1676 aa, Homo sapiens
  Payload ID: 19085
  Gene Name: unc-13 homolog A (C. elegans)
  ENSP ID: ENSP00000446831
MSLLCVGVKKAKFDGAQEKFNTYVTLKVQNVKSTTIAVRGSQPSWEQDFMFEINRLDLGLTVEVWNKGLIWDTMVGTVWIPLRTIRQSNEEGPGEWLTLDSQVIMADSEICGTKDPTFHRILLDTRFELPLDIPEEEARYWAKKLEQLNAMRDQDEYSFQDEQDKPLPVPSNQCCNWNYFGWGEQHNDDPDSAVDDRDSDYRSETSNSIPPPYYTTSQPNASVHQYSVRPPPLGSRESYSDSMHSYEEFSEPQALSPTGSSRYASSGELSQGSSQLSEDFDPDEHSLQGSDMEDERDRDSYHSCHSSVSYHKDSPRWDQDEEELEEDLEDFLEEEELPEDEEELEEEEEEVPDDLGSYAQREDVAVAEPKDFKRISLPPAAPGKEDKAPVAPTEAPDMAKVAPKPATPDKVPAAEQIPEAEPPKDEESFRPREDEEGQEGQDSMSRAKANWLRAFNKVRMQLQEARGEGEMSKSLWFKGGPGGGLIIIDSMPDIRKRKPIPLVSDLSLVQSRKAGITSALASSTLNNEELKNHVYKKTLQALIYPISCTTPHNFEVWTATTPTYCYECEGLLWGIARQGMRCTECGVKCHEKCQDLLNADCLQRAAEKSSKHGAEDRTQNIIMVLKDRMKIRERNKPEIFELIQEIFAVTKTAHTQQMKAVKQSVLDGTSKWSAKISITVVCAQGLQAKDKTGSSDPYVTVQVGKTKKRTKTIYGNLNPVWEENFHFECHNSSDRIKVRVWDEDDDIKSRVKQRFKRESDDFLGQTIIEVRTLSGEMDVWYNLDKRTDKSAVSGAIRLHISVEIKGEEKVAPYHVQYTCLHENLFHFVTDVQNNGVVKIPDAKGDDAWKVYYDETAQEIVDEFAMRYGVESIYQAMTHFACLSSKYMCPGVPAVMSTLLANINAYYAHTTASTNVSASDRFAASNFGKERFVKLLDQLHNSLRIDLSMYRNNFPASSPERLQDLKSTVDLLTSITFFRMKVQELQSPPRASQVVKDCVKACLNSTYEYIFNNCHELYSREYQTDPAKKGEVLPEEQGPSIKNLDFWSKLITLIVSIIEEDKNSYTPCLNQFPQELNVGKISAEVMWNLFAQDMKYAMEEHDKHRLCKSADYMNLHFKVKWLYNEYVTELPAFKDRVPEYPAWFEPFVIQWLDENEEVSRDFLHGALERDKKDGFQQTSEHALFSCSVVDVFSQLNQSFEIIKKLECPDPQIVGHYMRRFAKTISNVLLQYADIISKDFASYCSKEKEKVPCILMNNTQQLRVQLEKMFEAMGGKELDAEASDILKELQVKLNNVLDELSRVFATSFQPHIEECVKQMGDILSQVKGTGNVPASACSSVAQDADNVLQPIMDLLDSNLTLFAKICEKTVLKRVLKELWKLVMNTMEKTIVLPPLTDQTGTQMIFNAAKELGQLSKLKDHMVREEAKSLTPKQCAVVELALDTIKQYFHAGGVGLKKTFLEKSPDLQSLRYALSLYTQATDLLIKTFVQTQSAQGLGVEDPVGEVSVHVELFTHPGTGEHKVTVKVVAANDLKWQTSGIFRPFIEVNIIGPQLSDKKRKFATKSKNNSWAPKYNESFQFTLSADAGPECYELQVCVKDYCFAREDRTVGLAVLQLRELAQRGSAACWLPLGRRIHMDDTGLTVLRILSQRSNDEVAKEFVKLKSDTRSAEEGGAAPAP

SEQ ID NO: 95675 - protein, 1722 aa, Homo sapiens
  Payload ID: 19085
  Gene Name: unc-13 homolog A (C. elegans)
  ENSP ID: ENSP00000447236
MSLLCVGVKKAKFDGAQEKFNTYVTLKVQNVKSTTIAVRGSQPSWEQDFMFEINRLDLGLTVEVWNKGLIWDTMVGTVWIPLRTIRQSNEEGPGEWLTLDSQVIMADSEICGTKDPTFHRILLDTRFELPLDIPEEEARYWAKKLEQLNAMRDQDEYSFQDEQDKPLPVPSNQCCNWNYFGWGEQHNDDPDSAVDDRDSDYRSETSNSIPPPYYTTSQPNASVHQYSVRPPPLGSRESYSDSMHSYEEFSEPQALSPTGSSRYASSGELSQGSSQLSEDFDPDEHSLQGSDMEDERDRDSYHSCHSSVSYHKDSPRWDQDEEELEEDLEDFLEEEELPEDEEELEEEEEEVPDDLGSYAQREDVAVAEPKDFKRISLPPAAPGKEDKAPVAPTEAPDMAKVAPKPATPDKVPAAEQIPEAEPPKDEESFRPREDEEGQEGQDSMSRAKANWLRAFNKVRMQLQEARGEGEMSKSLWFKGGPGGGLIIIDSMPDIRKRKPIPLVSDLAMSLVQSRKAGITSALASSTLNNEELKNHVYKKTLQALIYPISCTTPHNFEVWTATTPTYCYECEGLLWGIARQGMRCTECGVKCHEKCQDLLNADCLQRAAEKSSKHGAEDRTQNIIMVLKDRMKIRERNKPEIFELIQEIFAVTKTAHTQQMKAVKQSVLDGTSKWSAKISITVVCAQGLQAKDKTGSSDPYVTVQVGKTKKRTKTIYGNLNPVWEENFHFECHNSSDRIKVRVWDEDDDIKSRVKQRFKRESDDFLGQTIIEVRTLSGEMDVWYNLDKRTDKSAVSGAIRLHISVEIKGEEKVAPYHVQYTCLHENLFHFVTDVQNNGVVKIPDAKGDDAWKVYYDETAQEIVDEFAMRYGVESIYQAMTHFACLSSKYMCPGVPAVMSTLLANINAYYAHTTASTNVSASDRFAASNFGKERFVKLLDQLHNSLRIDLSMYRNNFPASSPERLQDLKSTVDLLTSITFFRMKVQELQSPPRASQVVKDCVKACLNSTYEYIFNNCHELYSREYQTDPAKKGEVLPEEQGPSIKNLDFWSKLITLIVSIIEEDKNSYTPCLNQFPQELNVGKISAEVMWNLFAQDMKYAMEEHDKHRLCKSADYMNLHFKVKWLYNEYVTELPAFKDRVPEYPAWFEPFVIQWLDENEEVSRDFLHGALERDKKDGFQQTSEHALFSCSVVDVFSQLNQSFEIIKKLECPDPQIVGHYMRRFAKTISNVLLQYADIISKDFASYCSKEKEKVPCILMNNTQQLRVQLEKMFEAMGGKELDAEASDILKELQVKLNNVLDELSRVFATSFQPHIEECVKQMGDILSQVKGTGNVPASACSSVAQDADNVLQPIMDLLDSNLTLFAKICEKTVLKRVLKELWKLVMNTMEKTIVLPPLTDQTMIGNLLRKHGKGLEKGRVKLPSHSDGTQMIFNAAKELGQLSKLKDHMVREEAKSLTPKQCAVVELALDTIKQYFHAGGVGLKKTFLEKSPDLQSLRYALSLYTQATDLLIKTFVQTQSAQVHGGKGTRFTLSEDIYPEKGLGVEDPVGEVSVHVELFTHPGTGEHKVTVKVVAANDLKWQTSGIFRPFIEVNIIGPQLSDKKRKFATKSKNNSWAPKYNESFQFTLSADAGPECYELQVCVKDYCFAREDRTVGLAVLQLRELAQRGSAACWLPLGRRIHMDDTGLTVLRILSQRSNDEVAKEFVKLKSDTRSAEEGGAAPAP

SEQ ID NO: 95676 - protein, 1697 aa, Homo sapiens
  Payload ID: 19085
  Gene Name: unc-13 homolog A (C. elegans)
  ENSP ID: ENSP00000447572
MSLLCVGVKKAKFDGAQEKFNTYVTLKVQNVKSTTIAVRGSQPSWEQDFMFEINRLDLGLTVEVWNKGLIWDTMVGTVWIPLRTIRQSNEEGPGEWLTLDSQVIMADSEICGTKDPTFHRILLDTRFELPLDIPEEEARYWAKKLEQLNAMRDQDEYSFQDEQDKPLPVPSNQCCNWNYFGWGEQHNDDPDSAVDDRDSDYRSETSNSIPPPYYTTSQPNASVHQYSVRPPPLGSRESYSDSMHSYEEFSEPQALSPTGSSRYASSGELSQGSSQLSEDFDPDEHSLQGSDMEDERDRDSYHSCHSSVSYHKDSPRWDQDEEELEEDLEDFLEEEELPEDEEELEEEEEEVPDDLGSYAQREDVAVAEPKDFKRISLPPAAPGKEDKAPVAPTEAPDMAKVAPKPATPDKVPAAEQIPEAEPPKDEESFRPREDEEGQEGQDSMSRAKANWLRAFNKVRMQLQEARGEGEMSKSLWFKGGPGGGLIIIDSMPDIRKRKPIPLVSDLAMSLVQSRKAGITSALASSTLNNEELKNHVYKKTLQALIYPISCTTPHNFEVWTATTPTYCYECEGLLWGIARQGMRCTECGVKCHEKCQDLLNADCLQRAAEKSSKHGAEDRTQNIIMVLKDRMKIRERNKPEIFELIQEIFAVTKTAHTQQMKAVKQSVLDGTSKWSAKISITVVCAQGLQAKDKTGSSDPYVTVQVGKTKKRTKTIYGNLNPVWEENFHFECHNSSDRIKVRVWDEDDDIKSRVKQRFKRESDDFLGQTIIEVRTLSGEMDVWYNLDKRTDKSAVSGAIRLHISVEIKGEEKVAPYHVQYTCLHENLFHFVTDVQNNGVVKIPDAKGDDAWKVYYDETAQEIVDEFAMRYGVESIYQAMTHFACLSSKYMCPGVPAVMSTLLANINAYYAHTTASTNVSASDRFAASNFGKERFVKLLDQLHNSLRIDLSMYRNNFPASSPERLQDLKSTVDLLTSITFFRMKVQELQSPPRASQVVKDCVKACLNSTYEYIFNNCHELYSREYQTDPAKKGEVLPEEQGPSIKNLDFWSKLITLIVSIIEEDKNSYTPCLNQFPQELNVGKISAEVMWNLFAQDMKYAMEEHDKHRLCKSADYMNLHFKVKWLYNEYVTELPAFKDRVPEYPAWFEPFVIQWLDENEEVSRDFLHGALERDKKDGFQQTSEHALFSCSVVDVFSQLNQSFEIIKKLECPDPQIVGHYMRRFAKTISNVLLQYADIISKDFASYCSKEKEKVPCILMNNTQQLRVQLEKMFEAMGGKELDAEASDILKELQVKLNNVLDELSRVFATSFQPHIEECVKQMGDILSQVKGTGNVPASACSSVAQDADNVLQPIMDLLDSNLTLFAKICEKTVLKRVLKELWKLVMNTMEKTIVLPPLTDQTGTQMIFNAAKELGQLSKLKDHMVREEAKSLTPKQCAVVELALDTIKQYFHAGGVGLKKTFLEKSPDLQSLRYALSLYTQATDLLIKTFVQTQSAQVHGGKGTRFTLSEDIYPEKGLGVEDPVGEVSVHVELFTHPGTGEHKVTVKVVAANDLKWQTSGIFRPFIEVNIIGPQLSDKKRKFATKSKNNSWAPKYNESFQFTLSADAGPECYELQVCVKDYCFAREDRTVGLAVLQLRELAQRGSAACWLPLGRRIHMDDTGLTVLRILSQRSNDEVAKEFVKLKSDTRSAEEGGAAPAP

SEQ ID NO: 95677 - protein, 1591 aa, Homo sapiens
  Payload ID: 19086
  Gene Name: unc-13 homolog B (C. elegans)
  Uniprot ID: O14795
  ENSP ID: ENSP00000367756
MSLLCVRVKRAKFQGSPDKFNTYVTLKVQNVKSTTVAVRGDQPSWEQDFMFEISRLDLGLSVEVWNKGLIWDTMVGTVWIALKTIRQSDEEGPGEWSTLEAETLMKDDEICGTRNPTPHKILLDTRFELPFDIPEEEARYWTYKWEQINALGADNEYSSQEESQRKPLPTAAAQCSFEDPDSAVDDRDSDYRSETSNSFPPPYHTASQPNASVHQFPVPVRSPQQLLLQGSSRDSCNDSMQSYDLDYPERRAISPTSSSRYGSSCNVSQGSSQLSELDQYHEQDDDHRETDSIHSCHSSHSLSRDGQAGFGEQEKPLEVTGQAEKEAACEPKEMKEDATTHPPPDLVLQKDHFLGPQESFPEENASSPFTQARAHWIRAVTKVRLQLQEIPDDGDPSLPQWLPEGPAGGLYGIDSMPDLRRKKPLPLVSDLSLVQSRKAGITSAMATRTSLKDEELKSHVYKKTLQALIYPISCTTPHNFEVWTATTPTYCYECEGLLWGIARQGMRCSECGVKCHEKCQDLLNADCLQRAAEKSCKHGAEDRTQNIIMAMKDRMKIRERNKPEIFEVIRDVFTVNKAAHVQQMKTVKQSVLDGTSKWSAKITITVVCAQGLQAKDKTGSSDPYVTVQVSKTKKRTKTIFGNLNPVWEEKFHFECHNSSDRIKVRVWDEDDDIKSRVKQRLKRESDDFLGQTIIEVRTLSGEMDVWYNLEKRTDKSAVSGAIRLQISVEIKGEEKVAPYHVQYTCLHENLFHYLTDIQGSGGVRIPEARGDDAWKVYFDETAQEIVDEFAMRYGIESIYQAMTHFACLSSKYMCPGVPAVMSTLLANINAYYAHTTASTNVSASDRFAASNFGKERFVKLLDQLHNSLRIDLSTYRNNFPAGSPERLQDLKSTVDLLTSITFFRMKVQELQSPPRASQVVKDCVKACLNSTYEYIFNNCHDLYSRQYQLKQELPPEEQGPSIRNLDFWPKLITLIVSIIEEDKNSYTPVLNQFPQELNVGKVSAEVMWHLFAQDMKYALEEHEKDHLCKSADYMNLHFKVKWLHNEYVRDLPVLQGQVPEYPAWFEQFVLQWLDENEDVSLEFLRGALERDKKDGFQQTSEHALFSCSVVDVFTQLNQSFEIIRKLECPDPSILAHYMRRFAKTIGKVLMQYADILSKDFPAYCTKEKLPCILMNNVQQLRVQLEKMFEAMGGKELDLEAADSLKELQVKLNTVLDELSMVFGNSFQVRIDECVRQMADILGQVRGTGNASPDARASAAQDADSVLRPLMDFLDGNLTLFATVCEKTVLKRVLKELWRVVMNTMERMIVLPPLTDQTGTQLIFTAAKELSHLSKLKDHMVREETRNLTPKQCAVLDLALDTIKQYFHAGGNGLKKTFLEKSPDLQSLRYALSLYTQTTDTLIKTFVRSQTTQGSGVDDPVGEVSIQVDLFTHPGTGEHKVTVKVVAANDLKWQTAGMFRPFVEVTMVGPHQSDKKRKFTTKSKSNNWAPKYNETFHFLLGNEEGPESYELQICVKDYCFAREDRVLGLAVMPLRDVTAKGSCACWCPLGRKIHMDETGLTILRILSQRSNDEVAREFVKLKSESRSTEEGS

SEQ ID NO: 95678 - protein, 1197 aa, Homo sapiens [sequence omitted]

SEQ ID NO: 95679 - protein, 1622 aa, Homo sapiens
  Payload ID: 19086
  Gene Name: unc-13 homolog B (C. elegans)
  ENSP ID: ENSP00000380006
MSLLCVRVKRAKFQGSPDKFNTYVTLKVQNVKSTTVAVRGDQPSWEQDFMFEISRLDLGLSVEVWNKGLIWDTMVGTVWIALKTIRQSDEEGPGEWSTLEAETLMKDDEICGTRNPTPHKILLDTRFELPFDIPEEEARYWTYKWEQINALGADNEYSSQEESQRKPLPTAAAQCCHWTYLGWGEQQTFEDPDSAVDDRDSDYRSETSNSFPPPYHTASQPNASVHQFPVPVRSPQQLLLQGSSRDSCNDSMQSYDLDYPERRAISPTSSSRYGSSCNVSQGSSQLSELDQYHEQDDDHRETDSIHSCHSSHSLSRDGQAGFGEQEKPLEVTGQAEKEAACEPKEMKEDATTHPPPDLVLQKDHFLGPQESFPEENASSPFTQARAHWIRAVTKVRLQLQEIPDDGDPSLPQWLPEGPAGGLYGIDSMPDLRRKKPLPLVSDLSLVQSRKAGITSAMATRTSLKDEELKSHVYKKTLQALIYPISCTTPHNFEVWTATTPTYCYECEGLLWGIARQGMRCSECGVKCHEKCQDLLNADCLQRAAEKSCKHGAEDRTQNIIMAMKDRMKIRERNKPEIFEVIRDVFTVNKAAHVQQMKTVKQSVLDGTSKWSAKITITVVCAQGLQAKDKTGSSDPYVTVQVSKTKKRTKTIFGNLNPVWEEKFHFECHNSSDRIKVRVWDEDDDIKSRVKQRLKRESDDFLGQTIIEVRTLSGEMDVWYNLEKRTDKSAVSGAIRLQISVEIKGEEKVAPYHVQYTCLHENLFHYLTDIQGSGGVRIPEARGDDAWKVYFDETAQEIVDEFAMRYGIESIYQAMTHFACLSSKYMCPGVPAVMSTLLANINAYYAHTTASTNVSASDRFAASNFGKERFVKLLDQLHNSLRIDLSTYRNNFPAGSPERLQDLKSTVDLLTSITFFRMKVQELQSPPRASQVVKDCVKACLNSTYEYIFNNCHDLYSRQYQLKQELPPEEQGPSIRNLDFWPKLITLIVSIIEEDKNSYTPVLNQFPQELNVGKVSAEVMWHLFAQDMKYALEEHEKDHLCKSADYMNLHFKVKWLHNEYVRDLPVLQGQVPEYPAWFEQFVLQWLDENEDVSLEFLRGALERDKKDGFQQTSEHALFSCSVVDVFTQLNQSFEIIRKLECPDPSILAHYMRRFAKTIGKVLMQYADILSKDFPAYCTKEKLPCILMNNVQQLRVQLEKMFEAMGGKELDLEAADSLKELQVKLNTVLDELSMVFGNSFQVRIDECVRQMADILGQVRGTGNASPDARASAAQDADSVLRPLMDFLDGNLTLFATVCEKTVLKRVLKELWRVVMNTMERMIVLPPLTDQTGTQLIFTAAKELSHLSKLKDHMVREETRNLTPKQCAVLDLALDTIKQYFHAGGNGLKKTFLEKSPDLQSLRYALSLYTQTTDTLIKTFVRSQTTQVHDGKGIRFTANEDIRPEKGSGVDDPVGEVSIQVDLFTHPGTGEHKVTVKVVAANDLKWQTAGMFRPFVEVTMVGPHQSDKKRKFTTKSKSNNWAPKYNETFHFLLGNEEGPESYELQICVKDYCFAREDRVLGLAVMPLRDVTAKGSCACWCPLGRKIHMDETGLTILRILSQRSNDEVAREFVKLKSESRSTEEGS

SEQ ID NO: 95680 - protein, 1610 aa, Homo sapiens
  Payload ID: 19086
  Gene Name: unc-13 homolog B (C. elegans)
  Uniprot ID: O14795
  ENSP ID: ENSP00000479261
MSLLCVRVKRAKFQGSPDKFNTYVTLKVQNVKSTTVAVRGDQPSWEQDFMFEISRLDLGLSVEVWNKGLIWDTMVGTVWIALKTIRQSDEEGPGEWSTLEAETLMKDDEICGTRNPTPHKILLDTRFELPFDIPEEEARYWTYKWEQINALGADNEYSSQEESQRKPLPTAAAQCSFEDPDSAVDDRDSDYRSETSNSFPPPYHTASQPNASVHQFPVPVRSPQQLLLQGSSRDSCNDSMQSYDLDYPERRAISPTSSSRYGSSCNVSQGSSQLSELDQYHEQDDDHRETDSIHSCHSSHSLSRDGQAGFGEQEKPLEVTGQAEKEAACEPKEMKEDATTHPPPDLVLQKDHFLGPQESFPEENASSPFTQARAHWIRAVTKVRLQLQEIPDDGDPSLPQWLPEGPAGGLYGIDSMPDLRRKKPLPLVSDLSLVQSRKAGITSAMATRTSLKDEELKSHVYKKTLQALIYPISCTTPHNFEVWTATTPTYCYECEGLLWGIARQGMRCSECGVKCHEKCQDLLNADCLQRAAEKSCKHGAEDRTQNIIMAMKDRMKIRERNKPEIFEVIRDVFTVNKAAHVQQMKTVKQSVLDGTSKWSAKITITVVCAQGLQAKDKTGSSDPYVTVQVSKTKKRTKTIFGNLNPVWEEKFHFECHNSSDRIKVRVWDEDDDIKSRVKQRLKRESDDFLGQTIIEVRTLSGEMDVWYNLEKRTDKSAVSGAIRLQISVEIKGEEKVAPYHVQYTCLHENLFHYLTDIQGSGGVRIPEARGDDAWKVYFDETAQEIVDEFAMRYGIESIYQAMTHFACLSSKYMCPGVPAVMSTLLANINAYYAHTTASTNVSASDRFAASNFGKERFVKLLDQLHNSLRIDLSTYRNNFPAGSPERLQDLKSTVDLLTSITFFRMKVQELQSPPRASQVVKDCVKACLNSTYEYIFNNCHDLYSRQYQLKQELPPEEQGPSIRNLDFWPKLITLIVSIIEEDKNSYTPVLNQFPQELNVGKVSAEVMWHLFAQDMKYALEEHEKDHLCKSADYMNLHFKVKWLHNEYVRDLPVLQGQVPEYPAWFEQFVLQWLDENEDVSLEFLRGALERDKKDGFQQTSEHALFSCSVVDVFTQLNQSFEIIRKLECPDPSILAHYMRRFAKTIGKVLMQYADILSKDFPAYCTKEKLPCILMNNVQQLRVQLEKMFEAMGGKELDLEAADSLKELQVKLNTVLDELSMVFGNSFQVRIDECVRQMADILGQVRGTGNASPDARASAAQDADSVLRPLMDFLDGNLTLFATVCEKTVLKRVLKELWRVVMNTMERMIVLPPLTDQTGTQLIFTAAKELSHLSKLKDHMVREETRNLTPKQCAVLDLALDTIKQYFHAGGNGLKKTFLEKSPDLQSLRYALSLYTQTTDTLIKTFVRSQTTQVHDGKGIRFTANEDIRPEKGSGVDDPVGEVSIQVDLFTHPGTGEHKVTVKVVAANDLKWQTAGMFRPFVEVTMVGPHQSDKKRKFTTKSKSNNWAPKYNETFHFLLGNEEGPESYELQICVKDYCFAREDRVLGLAVMPLRDVTAKGSCACWCPLGRKIHMDETGLTILRILSQRSNDEVAREFVKLKSESRSTEEGS

SEQ ID NO: 95681 - protein, 1197 aa, Homo sapiens
  Payload ID: 19086
  Gene Name: unc-13 homolog B (C. elegans)
  ENSP ID: ENSP00000484432
MPDLRRKKPLPLVSDLAMSLVQSRKAGITSAMATRTSLKDEELKSHVYKKTLQALIYPISCTTPHNFEVWTATTPTYCYECEGLLWGIARQGMRCSECGVKCHEKCQDLLNADCLQRAAEKSCKHGAEDRTQNIIMAMKDRMKIRERNKPEIFEVIRDVFTVNKAAHVQQMKTVKQSVLDGTSKWSAKITITVVCAQGLQAKDKTGSSDPYVTVQVSKTKKRTKTIFGNLNPVWEEKFHFECHNSSDRIKVRVWDEDDDIKSRVKQRLKRESDDFLGQTIIEVRTLSGEMDVWYNLEKRTDKSAVSGAIRLQISVEIKGEEKVAPYHVQYTCLHENLFHYLTDIQGSGGVRIPEARGDDAWKVYFDETAQEIVDEFAMRYGIESIYQAMTHFACLSSKYMCPGVPAVMSTLLANINAYYAHTTASTNVSASDRFAASNFGKERFVKLLDQLHNSLRIDLSTYRNNFPAGSPERLQDLKSTVDLLTSITFFRMKVQELQSPPRASQVVKDCVKACLNSTYEYIFNNCHDLYSRQYQLKQELPPEEQGPSIRNLDFWPKLITLIVSIIEEDKNSYTPVLNQFPQELNVGKVSAEVMWHLFAQDMKYALEEHEKDHLCKSADYMNLHFKVKWLHNEYVRDLPVLQGQVPEYPAWFEQFVLQWLDENEDVSLEFLRGALERDKKDGFQQTSEHALFSCSVVDVFTQLNQSFEIIRKLECPDPSILAHYMRRFAKTIGKVLMQYADILSKDFPAYCTKEKLPCILMNNVQQLRVQLEKMFEAMGGKELDLEAADSLKELQVKLNTVLDELSMVFGNSFQVRIDECVRQMADILGQVRGTGNASPDARASAAQDADSVLRPLMDFLDGNLTLFATVCEKTVLKRVLKELWRVVMNTMERMIVLPPLTDQTGTQLIFTAAKELSHLSKLKDHMVREETRNLTPKQCAVLDLALDTIKQYFHAGGNGLKKTFLEKSPDLQSLRYALSLYTQTTDTLIKTFVRSQTTQVHDGKGIRFTANEDIRPEKGSGVDDPVGEVSIQVDLFTHPGTGEHKVTVKVVAANDLKWQTAGMFRPFVEVTMVGPHQSDKKRKFTTKSKSNNWAPKYNETFHFLLGNEEGPESYELQICVKDYCFAREDRVLGLAVMPLRDVTAKGSCACWCPLGRKIHMDETGLTILRILSQRSNDEVAREFVKLKSESRSTEEGS

SEQ ID NO: 95682 - protein, 189 aa, Homo sapiens
  Payload ID: 19086
  Gene Name: unc-13 homolog B (C. elegans)
  ENSP ID: ENSP00000489441
WLHNEYVRDLPVLQGQVPEYPAWFEQFVLQWLDENEDVSLEFLRGALERDKKDGTIGKVLMQYADILSKDFPAYCTKEKLPCILMNNVQQLRVQLEKMFEAMGGKELDLEAADSLKELQVKLNTVLDELSMVFGNSFQVRIDECVRQMADILGQVRGTGNASPDARASAAQDADSVLRPLMDFLDGNLT

SEQ ID NO: 95683 - protein, 465 aa, Homo sapiens
  Payload ID: 19086
  Gene Name: unc-13 homolog B (C. elegans)
  ENSP ID: ENSP00000489581
MSLLCVRVKRAKFQGSPDKFNTYVTLKVQNVKSTTVAVRGDQPSWEQDFMFEISRLDLGLSVEVWNKGLIWDTMVGTVWIALKTIRQSDEEGPGEWSTLEAETLMKDDEICGTRNPTPHKILLDTRFELPFDIPEEEARYWTYKWEQINALGADNEYSSQEESQRKPLPTAAAQCSFEDPDSAVDDRDSDYRSETSNSFPPPYHTASQPNASVHQFPVPVRSPQQLLLQGSSRDSCNDSMQSYDLDYPERRAISPTSSSRYGSSCNVSQGSSQLSELDQYHEQDDDHRETDSIHSCHSSHSLSRDGQAGFGEQEKPLEVTGQAEKEAACEPKEMKEDATTHPPPDLVLQKDHFLGPQESFPEENASSPFTQARAHWIRAVTKVRLQLQEKKSEEPFRFQMMVTPLCLSGSRKGQPEGSMALTACQIYAERSHCHLSVIWLCHWSSLGRQESLLQWLHALLLRTKS

SEQ ID NO: 95684 - protein, 2214 aa, Homo sapiens
  Payload ID: 19087
  Gene Name: unc-13 homolog C (C. elegans)
  Uniprot ID: Q8NB66
  ENSP ID: ENSP00000260323
MVANFFKSLILPYIHKLCKGMFTKKLGNTNKNKEYRQQKKDQDFPTAGQTKSPKFSYTFKSTVKKIAKCSSTHNLSTEEDEASKEFSLSPTFSYRVAIANGLQKNAKVTNSDNEDLLQELSSIESSYSESLNELRSSTENQAQSTHTMPVRRNRKSSSSLAPSEGSSDGERTLHGLKLGALRKLRKWKKSQECVSSDSELSTMKKSWGIRSKSLDRTVRNPKTNALEPGFSSSGCISQTHDVMEMIFKELQGISQIETELSELRGHVNALKHSIDEISSSVEVVQSEIEQLRTGFVQSRRETRDIHDYIKHLGHMGSKASLRFLNVTEERFEYVESVVYQILIDKMGFSDAPNAIKIEFAQRIGHQRDCPNAKPRPILVYFETPQQRDSVLKKSYKLKGTGIGISTDILTHDIRERKEKGIPSSQTYESMAIKLSTPEPKIKKNNWQSPDDSDEDLESDLNRNSYAVLSKSELLTKGSTSKPSSKSHSARSKNKTANSSRISNKSDYDKISSQLPESDILEKQTTTHYADATPLWHSQSDFFTAKLSRSESDFSKLCQSYSEDFSENQFFTRTNGSSLLSSSDRELWQRKQEGTATLYDSPKDQHLNGGVQGIQGQTETENTETVDSGMSNGMVCASGDRSHYSDSQLSLHEDLSPWKEWNQGADLGLDSSTQEGFDYETNSLFDQQLDVYNKDLEYLGKCHSDLQDDSESYDLTQDDNSSPCPGLDNEPQGQWVGQYDSYQGANSNELYQNQNQLSMMYRSQSELQSDDSEDAPPKSWHSRLSIDLSDKTFSFPKFGSTLQRAKSALEVVWNKSTQSLSGYEDSGSSLMGRFRTLSQSTANESSTTLDSDVYTEPYYYKAEDEEDYTEPVADNETDYVEVMEQVLAKLENRTSITETDEQMQAYDHLSYETPYETPQDEGYDGPADDMVSEEGLEPLNETSAEMEIREDENQNIPEQPVEITKPKRIRPSFKEAALRAYKKQMAELEEKILAGDSSSVDEKARIVSGNDLDASKFSALQVCGGAGGGLYGIDSMPDLRRKKTLPIVRDVAMTLAARKSGLSLAMVIRTSLNNEELKMHVFKKTLQALIYPMSSTIPHNFEVWTATTPTYCYECEGLLWGIARQGMKCLECGVKCHEKCQDLLNADCLQRAAEKSSKHGAEDKTQTIITAMKERMKIREKNRPEVFEVIQEMFQISKEDFVQFTKAAKQSVLDGTSKWSAKITITVVSAQGLQAKDKTGSSDPYVTVQVGKNKRRTKTIFGNLNPVWDEKFYFECHNSTDRIKVRVWDEDDDIKSRVKQHFKKESDDFLGQTIVEVRTLSGEMDVWYNLEKRTDKSAVSGAIRLKINVEIKGEEKVAPYHIQYTCLHENLFHYLTEVKSNGGVKIPEVKGDEAWKVFFDDASQEIVDEFAMRYGIESIYQAMTHFSCLSSKYMCPGVPAVMSTLLANINAFYAHTTVSTNIQVSASDRFAATNFGREKFIKLLDQLHNSLRIDLSKYRENFPASNTERLQDLKSTVDLLTSITFFRMKVLELQSPPKASMVVKDCVRACLDSTYKYIFDNCHELYSQLTDPSKKQDIPREDQGPTTKNLDFWPQLITLMVTIIDEDKTAYTPVLNQFPQELNMGKISAEIMWTLFALDMKYALEEHENQRLCKSTDYMNLHFKVKWFYNEYVRELPAFKDAVPEYSLWFEPFVMQWLDENEDVSMEFLHGALGRDKKDGFQQTSEHALFSCSVVDVFAQLNQSFEIIKKLECPNPEALSHLMRRFAKTINKVLLQYAAIVSSDFSSHCDKENVPCILMNNIQQLRVQLEKMFESMGGKELDSEASTILKELQVKLSGVLDELSVTYGESFQVIIEECIKQMSFELNQMRANGNTTSNKNSAAMDAEIVLRSLMDFLDKTLSLSAKICEKTVLKRVLKELWKLVLNKIEKQIVLPPLTDQTGPQMIFIAAKDLGQLSKLKEHMIREDARGLTPRQCAIMEVVLATIKQYFHAGGNGLKKNFLEKSPDLQSLRYALSLYTQTTDALIKKFIDTQTSQSRSSKDAVGQISVHVDITATPGTGDHKVTVKVIAINDLNWQTTAMFRPFVEVCILGPNLGDKKRKQGTKTKSNTWSPKYNETFQFILGKENRPGAYELHLSVKDYCFAREDRIIGMTVIQLQNIAEKGSYGAWYPLLKNISMDETGLTILRILSQRTSDDVAKEFVRLKSETRSTEESA

SEQ ID NO: 95685 - protein, 135 aa, Homo sapiens
  Payload ID: 19087
  Gene Name: unc-13 homolog C (C. elegans)
  ENSP ID: ENSP00000443886
MFRPFVEVCILGPNLGDKKRKQGTKTKSNTWSPKYNETFQFILGKENRPGAYELHLSVKDYCFAREDRIIGMTVIQLQNIAEKGSYGAWYPLLKNISMDETGLTILRILSQRTSDDVAKEFVRLKSETRSTEESA

SEQ ID NO: 95686 - protein, 178 aa, Homo sapiens
  Payload ID: 19087
  Gene Name: unc-13 homolog C (C. elegans)
  ENSP ID: ENSP00000453018
  MOD_RES (1)..(1): Any amino acid
XAKTINKVLLQYAAIVSSDFSSHCDKENVPCILMNNIQQLRVQLEKMFESMGGKEKKEGERFFYELDSEASTILKELQVKLSGVLDELSVTYGESFQVIIEECIKQMSFELNQMRANGNTTSNKNSAAMDAEIVLRSLMDFLDKTLSLSAKICEKTVLKRVLKELWKLVLNKIEKQIV

SEQ ID NO: 95687 - protein, 20 aa, Homo sapiens
  Payload ID: 19087
  Gene Name: unc-13 homolog C (C. elegans)
  ENSP ID: ENSP00000456350
MFRPFVEVCILGPNLGDKKR

SEQ ID NO: 95688 - protein, 1090 aa, Homo sapiens
  Payload ID: 19088
  Gene Name: unc-13 homolog D (C. elegans)
  Uniprot ID: Q70J99
  ENSP ID: ENSP00000207549
MATLLSHPQQRPPFLRQAIKIRRRRVRDLQDPPPQMAPEIQPPSHHFSPEQRALLYEDALYTVLHRLGHPEPNHVTEASELLRYLQEAFHVEPEEHQQTLQRVRELEKPIFCLKATVKQAKGILGKDVSGFSDPYCLLGIEQGVGVPGGSPGSRHRQKAVVRHTIPEEETHRTQVITQTLNPVWDETFILEFEDITNASFHLDMWDLDTVESVRQKLGELTDLHGLRRIFKEARKDKGQDDFLGNVVLRLQDLRCREDQWYPLEPRTETYPDRGQCHLQFQLIHKRRATSASRSQPSYTVHLHLLQQLVSHEVTQHEAGSTSWDGSLSPQAATVLFLHATQKDLSDFHQSMAQWLAYSRLYQSLEFPSSCLLHPITSIEYQWIQGRLKAEQQEELAASFSSLLTYGLSLIRRFRSVFPLSVSDSPARLQSLLRVLVQMCKMKAFGELCPNTAPLPQLVTEALQTGTTEWFHLKQQHHQPMVQGIPEAGKALLGLVQDVIGDLHQCQRTWDKIFHNTLKIHLFSMAFRELQWLVAKRVQDHTTVVGDVVSPEMGESLFQLYISLKELCQLRMSSSERDGVLALDNFHRWFQPAIPSWLQKTYNEALARVQRAVQMDELVPLGELTKHSTSAVDLSTCFAQISHTARQLDWPDPEEAFMITVKFVEDTCRLALVYCSLIKARARELSSGQKDQGQAANMLCVVVNDMEQLRLVIGKLPAQLAWEALEQRVGAVLEQGQLQNTLHAQLQSALAGLGHEIRTGVRTLAEQLEVGIAKHIQKLVGVRESVLPEDAILPLMKFLEVELCYMNTNLVQENFSSLLTLLWTHTLTVLVEAAASQRSSSLASNRLKIALQNLEICFHAEGCGLPPKALHTATFQALQRDLELQAASSRELIRKYFCSRIQQQAETTSEELGAVTVKASYRASEQKLRVELLSASSLLPLDSNGSSDPFVQLTLEPRHEFPELAARETQKHKKDLHPLFDETFEFLVPAEPCRKAGACLLLTVLDYDTLGADDLEGEAFLPLREVPGLSGSEEPGEVPQTRLPLTYPAPNGDPILQLLEGRKGDREAQVFVRLRRHRAKQASQHALRPAP

SEQ ID NO: 95689 - protein, 1142 aa, Homo sapiens
  Payload ID: 19088
  Gene Name: unc-13 homolog D (C. elegans)
  Uniprot ID: Q70J99
  ENSP ID: ENSP00000388093
MATLLSHPQQRPPFLRQAIKIRRRRVRDLQDPPPQMAPEIQPPSHHFSPEQRALLYEDALYTVLHRLGHPEPNHVTEASELLRYLQEAFHVEPEEHQQTLQRVRELEKPIFCLKATVKQAKGILGKDVSGFSDPYCLLGIEQGVGVPGGSPGSRHRQKAVVRHTIPEEETHRTQVITQTLNPVWDETFILEFEDITNASFHLDMWDLDTVESVRQKLGELTDLHGLRRIFKEARKDKGQDDFLGNVVLRLQDLRCREDQWYPLEPRTETYPDRGQCHLQFQLIHKRRATSASRSQPSYTVHLHLLQQLVSHEVTQHEAGSTSWDGSLSPQAATVLFLHATQKDLSDFHQSMAQWLAYSRLYQSLEFPSSCLLHPITSIEYQWIQGRLKAEQQEELAASFSSLLTYGLSLIRRFRSVFPLSVSDSPARLQSLLRVLVQMCKMKAFGELCPNTAPLPQLVTEALQTGTTEWFHLKQQHHQPMVQGIPEAGKALLGLVQDVIGDLHQCQRTWDKIFHNTLKIHLFSMAFRELQWLVAKRVQDHTTVVGDVVSPEMGESLFQLYISLKELCQLRMSSSERDGVLALDNFHRWFQPAIPSWLQKTYNEALARVQRAVQMDELVPLGELTKHSTSAVDLSTCFAQISHTARQLDWPDPEEAFMITVKFVEDTCRLALVYCSLIKARARELSSGQKDQGQAANMLCVVVNDMEQLRLVIGKLPAQLAWEALEQRVGAVLEQGQLQNTLHAQLQSALAGLGHEIRTGVRTLAEQLEVGIAKHIQKLVGVRESVLPEDAILPLMKFLEVELCYMNTNLVQENFSSLLTLLWTHTLTVLVEAAASQRSSSLASNRLKIALQNLEICFHAEGCGLPPKALHTATFQALQRDLELQAASSRELIRKYFCSRIQQQAETTSEELGAVTVKASYRASEQKLRVELLSASSLLPLDSNGSSDPFVQLTLEPRHEFPELAARETQKHKKDLHPLFDETFEFLVPAEPCRKAGACLLLTVLDYDTLGADDLEGEAFLPLREVPGLSGSEEPGEVPQTRLPLTYPAPNGDPILQLLEGRKGDREAQVFVRLRRHRAKQGIGPSVSWPWPICLLAFLFQPLGWGPGSLGPGLQAQSLLEKGEGTLPKMRLQLPWGEGGGHY

SEQ ID NO: 95690 - protein, 169 aa, Homo sapiens
  Payload ID: 19088
  Gene Name: unc-13 homolog D (C. elegans)
  ENSP ID: ENSP00000464749
MATLLSHPQQRPPFLRQAIKIRRRRVRDLQDPPPQMAPEIQPPSHHFSPEQRALLYEDALYTVLHRLGHPEPNHVTEASELLRYLQEAFHVEPEEHQQTLQRVRELEKPIFCLKATVKQAKGILGKDVSGFSDPYCLLGIEQGVGVPGGSPGSRHRQKAVVRHTIPEEE

SEQ ID NO: 95691 - protein, 68 aa, Homo sapiens
  Payload ID: 19088
  Gene Name: unc-13 homolog D (C. elegans)
  ENSP ID: ENSP00000466149
SYRASEQKLRVELLSASSLLPLDSNAWCLLSRAARLGHASCSPCWTTTRWGPTTWKARPSCRCVRCPG

SEQ ID NO: 95692 - protein, 147 aa, Homo sapiens
  Payload ID: 19088
  Gene Name: unc-13 homolog D (C. elegans)
  ENSP ID: ENSP00000466377
  MOD_RES (1)..(1): Any amino acid
XYPLEPRTETYPDRGQCHLQFQLIHKRRATSASRSQPSYTVHLHLLQQLVSHEVTQHEAGSTSWDGSLSPQAATVLFLHATQKDLSDFHQSMAQWLAYSRLYQSLEFPSSCLLHPITSIEYQWIQGRLKAEQPGCSLFSGSWYRCAR

SEQ ID NO: 95693 - protein, 188 aa, Homo sapiens
  Payload ID: 19088
  Gene Name: unc-13 homolog D (C. elegans)
  ENSP ID: ENSP00000466543
MATLLSHPQQRPPFLRQAIKIRRRRVRDLQDPPPQMAPETGTTEWFHLKQQHHQPMVQGIPEAGKALLGLVQDVIGDLHQCQRTWDKIFHNTLKIHLFSMAFRELQWLVAKRVQDHTTVVGDVVSPEMGESLFQLYISLKELCQLRMSSSERDGVLALDNFHRWFQPAIPSWLQKTYNEALARVQRAV

SEQ ID NO: 95694 - protein, 146 aa, Homo sapiens
  Payload ID: 19088
  Gene Name: unc-13 homolog D (C. elegans)
  ENSP ID: ENSP00000466758
  MOD_RES (1)..(1): Any amino acid
XSDPFVQLTLEPRHEFPELAARETQKHKKDLHPLFDETFEFLVPAEPCRKAGACLLLTVLDYDTLGADDLEGEAFLPLREVPGLSGSEEPGEVPQTRLPLTYPAPNGDPILQLLEGRKGDREAQVFVRLRRHRAKQASQHALRPAP

SEQ ID NO: 95695 - protein, 310 aa, Homo sapiens
  Payload ID: 19088
  Gene Name: unc-13 homolog D (C. elegans)
  ENSP ID: ENSP00000466826
ATLLSHPQQRPPFLRQAIKIRRRRVRDLQDPPPQMAPEIQPPSHHFSPEQDALYTVLHRLGHPEPNHVTEASELLRYLQEAFHVEPEEHQQTLQRVRELEKPIFCLKATVKQAKGILGKDVSGFSDPYCLLGIEQGVGVPGGSPGSRHRQKAVVRHTIPEEETHRTQVITQTLNPVWDETFILEFEDITNASFHLDMWDLDTVESVRQKLGELTDLHGLRRIFKEARKDKGQDDFLGNVVLRLQDLRCREDQWYPLEPRTETYPDRGQCHLQFQLIHKRRATSASRSQPSYTVHLHLLQQLVSHEVTQHE

SEQ ID NO: 95696 - protein, 267 aa, Homo sapiens
  Payload ID: 19088
  Gene Name: unc-13 homolog D (C. elegans)
  ENSP ID: ENSP00000467653
MDLSHGGPRDGPPGGLLGEQIQPPSHHFSPEQRALLYEDALYTVLHRLGHPEPNHVTEASELLRYLQEAFHVEPEEHQQTLQRVRELEKPIFCLKATVKQAKGILGKDVSGFSDPYCLLGIEQGVGVPGGSPGSRHRQKAVVRHTIPEEETHRTQVITQTLNPVWDETFILEFEDITNASFHLDMWDLDTVESVRQKLGELTDLHGLRRIFKEARKDKGQDDFLGNVVLRLQDLRCREDQWYPLEPRTETYPDRGQCHLQFQLIHKR

SEQ ID NO: 95697 - protein, 929 aa, Homo sapiens
  Payload ID: 19089
  Gene Name: unc-45 myosin chaperone A
  Uniprot ID: Q9H3U1
  ENSP ID: ENSP00000377816
MTASSVEQLRKEGNELFKCGDYGGALAAYTQALGLDATPQDQAVLHRNRAACHLKLEDYDKAETEASKAIEKDGGDVKALYRRSQALEKLGRLDQAVLDLQRCVSLEPKNKVFQEALRNIGGQIQEKVRYMSSTDAKVEQMFQILLDPEEKGTEKKQKASQNLVVLAREDAGAEKIFRSNGVQLLQRLLDMGETDLMLAALRTLVGICSEHQSRTVATLSILGTRRVVSILGVESQAVSLAACHLLQVMFDALKEGVKKGFRGKEGAIIVDPARELKVLISNLLDLLTEVGVSGQGRDNALTLLIKAVPRKSLKDPNNSLTLWVIDQGLKKILEVGGSLQDPPGELAVTANSRMSASILLSKLFDDLKCDAERENFHRLCENYIKSWFEGQGLAGKLRAIQTVSCLLQGPCDAGNRALELSGVMESVIALCASEQEEEQLVAVEALIHAAGKAKRASFITANGVSLLKDLYKCSEKDSIRIRALVGLCKLGSAGGTDFSMKQFAEGSTLKLAKQCRKWLCNDQIDAGTRRWAVEGLAYLTFDADVKEEFVEDAAALKALFQLSRLEERSVLFAVASALVNCTNSYDYEEPDPKMVELAKYAKQHVPEQHPKDKPSFVRARVKKLLAAGVVSAMVCMVKTESPVLTSSCRELLSRVFLALVEEVEDRGTVVAQGGGRALIPLALEGTDVGQTKAAQALAKLTITSNPEMTFPGERIYEVVRPLVSLLHLNCSGLQNFEALMALTNLAGISERLRQKILKEKAVPMIEGYMFEEHEMIRRAATECMCNLAMSKEVQDLFEAQGNDRLKLLVLYSGEDDELLQRAAAGGLAMLTSMRPTLCSRIPQVTTHWLEILQALLLSSNQELQHRGAVVVLNMVEASREIASTLMESEMMEILSVLAKGDHSPVTRAAAACLDKAVEYGLIQPNQDGE

SEQ ID NO: 95698 - protein, 944 aa, Homo sapiens
  Payload ID: 19089
  Gene Name: unc-45 myosin chaperone A
  Uniprot ID: Q9H3U1
  ENSP ID: ENSP00000407487
MTVSGPGTPEPRPATPGASSVEQLRKEGNELFKCGDYGGALAAYTQALGLDATPQDQAVLHRNRAACHLKLEDYDKAETEASKAIEKDGGDVKALYRRSQALEKLGRLDQAVLDLQRCVSLEPKNKVFQEALRNIGGQIQEKVRYMSSTDAKVEQMFQILLDPEEKGTEKKQKASQNLVVLAREDAGAEKIFRSNGVQLLQRLLDMGETDLMLAALRTLVGICSEHQSRTVATLSILGTRRVVSILGVESQAVSLAACHLLQVMFDALKEGVKKGFRGKEGAIIVDPARELKVLISNLLDLLTEVGVSGQGRDNALTLLIKAVPRKSLKDPNNSLTLWVIDQGLKKILEVGGSLQDPPGELAVTANSRMSASILLSKLFDDLKCDAERENFHRLCENYIKSWFEGQGLAGKLRAIQTVSCLLQGPCDAGNRALELSGVMESVIALCASEQEEEQLVAVEALIHAAGKAKRASFITANGVSLLKDLYKCSEKDSIRIRALVGLCKLGSAGGTDFSMKQFAEGSTLKLAKQCRKWLCNDQIDAGTRRWAVEGLAYLTFDADVKEEFVEDAAALKALFQLSRLEERSVLFAVASALVNCTNSYDYEEPDPKMVELAKYAKQHVPEQHPKDKPSFVRARVKKLLAAGVVSAMVCMVKTESPVLTSSCRELLSRVFLALVEEVEDRGTVVAQGGGRALIPLALEGTDVGQTKAAQALAKLTITSNPEMTFPGERIYEVVRPLVSLLHLNCSGLQNFEALMALTNLAGISERLRQKILKEKAVPMIEGYMFEEHEMIRRAATECMCNLAMSKEVQDLFEAQGNDRLKLLVLYSGEDDELLQRAAAGGLAMLTSMRPTLCSRIPQVTTHWLEILQALLLSSNQELQHRGAVVVLNMVEASREIASTLMESEMMEILSVLAKGDHSPVTRAAAACLDKAVEYGLIQPNQDGE

SEQ ID NO: 95699 - protein, 931 aa, Homo sapiens
  Payload ID: 19090
  Gene Name: unc-45 myosin chaperone B
  Uniprot ID: Q8IWX7
  ENSP ID: ENSP00000268876
MAEVEAVQLKEEGNRHFQLQDYKAATNSYSQALKLTKDKALLATLYRNRAACGLKTESYVQAASDASRAIDINSSDIKALYRRCQALEHLGKLDQAFKDVQRCATLEPRNQNFQEMLRRLNTSIQEKLRVQFSTDSRVQKMFEILLDENSEADKREKAANNLIVLGREEAGAEKIFQNNGVALLLQLLDTKKPELVLAAVRTLSGMCSGHQARATVILHAVRIDRICSLMAVENEEMSLAVCNLLQAIIDSLSGEDKREHRGKEEALVLDTKKDLKQITSHLLDMLVSKKVSGQGRDQALNLLNKNVPRKDLAIHDNSRTIYVVDNGLRKILKVVGQVPDLPSCLPLTDNTRMLASILINKLYDDLRCDPERDHFRKICEEYITGKFDPQDMDKNLNAIQTVSGILQGPFDLGNQLLGLKGVMEMMVALCGSERETDQLVAVEALIHASTKLSRATFIITNGVSLLKQIYKTTKNEKIKIRTLVGLCKLGSAGGTDYGLRQFAEGSTEKLAKQCRKWLCNMSIDTRTRRWAVEGLAYLTLDADVKDDFVQDVPALQAMFELAKAGTSDKTILYSVATTLVNCTNSYDVKEVIPELVQLAKFSKQHVPEEHPKDKKDFIDMRVKRLLKAGVISALACMVKADSAILTDQTKELLARVFLALCDNPKDRGTIVAQGGGKALIPLALEGTDVGKVKAAHALAKIAAVSNPDIAFPGERVYEVVRPLVRLLDTQRDGLQNYEALLGLTNLSGRSDKLRQKIFKERALPDIENYMFENHDQLRQAATECMCNMVLHKEVQERFLADGNDRLKLVVLLCGEDDDKVQNAAAGALAMLTAAHKKLCLKMTQVTTQWLEILQRLCLHDQLSVQHRGLVIAYNLLAADAELAKKLVESELLEILTVVGKQEPDEKKAEVVQTARECLIKCMDYGFIKPVS

SEQ ID NO: 95700 - protein, 929 aa, Homo sapiens
  Payload ID: 19090
  Gene Name: unc-45 myosin chaperone B
  Uniprot ID: Q8IWX7
  ENSP ID: ENSP00000378071
MAEVEAVQLKEEGNRHFQLQDYKAATNSYSQALKLTKDKALLATLYRNRAACGLKTESYVQAASDASRAIDINSSDIKALYRRCQALEHLGKLDQAFKDVQRCATLEPRNQNFQEMLRRLNTSIQEKLRVQFSTDSRVQKMFEILLDENSEADKREKAANNLIVLGREEAGAEKIFQNNGVALLLQLLDTKKPELVLAAVRTLSGMCSGHQARATVILHAVRIDRICSLMAVENEEMSLAVCNLLQAIIDSLSGEDKREHRGKEEALVLDTKKDLKQITSHLLDMLVSKKVSGQGRDQALNLLNKNVPRKDLAIHDNSRTIYVVDNGLRKILKVVGQVPDLPSCLPLTDNTRMLASILINKLYDDLRCDPERDHFRKICEEYITGKFDPQDMDKNLNAIQTVSGILQGPFDLGNQLLGLKGVMEMMVALCGSERETDQLVAVEALIHASTKLSRATFIITNGVSLLKQIYKTTKNEKIKIRTLVGLCKLGSAGGTDYGLRQFAEGSTEKLAKQCRKWLCNMSIDTRTRRWAVEGLAYLTLDADVKDDFVQDVPALQAMFELAKTSDKTILYSVATTLVNCTNSYDVKEVIPELVQLAKFSKQHVPEEHPKDKKDFIDMRVKRLLKAGVISALACMVKADSAILTDQTKELLARVFLALCDNPKDRGTIVAQGGGKALIPLALEGTDVGKVKAAHALAKIAAVSNPDIAFPGERVYEVVRPLVRLLDTQRDGLQNYEALLGLTNLSGRSDKLRQKIFKERALPDIENYMFENHDQLRQAATECMCNMVLHKEVQERFLADGNDRLKLVVLLCGEDDDKVQNAAAGALAMLTAAHKKLCLKMTQVTTQWLEILQRLCLHDQLSVQHRGLVIAYNLLAADAELAKKLVESELLEILTVVGKQEPDEKKAEVVQTARECLIKCMDYGFIKPVS

SEQ ID NO: 95701 - protein, 850 aa, Homo sapiens
  Payload ID: 19090
  Gene Name: unc-45 myosin chaperone B
  Uniprot ID: Q8IWX7
  ENSP ID: ENSP00000468335
MAEVEAVQLKEEGNRHFQLQDYKAATNSYSQALKLTKDKALLATLYRNRAACGLKTESYVQAASDASRAIDINSSDIKALYRRCQALEHLGKLDQAFKDVQRCATLEPRNQNFQEMLRRLNTSIQEKLRVQFSTDSRVQKMFEILLDENSEADKREKAANNLIVLGREEAGAEKIFQNNGVALLLQLLDTKKPELVLAAVRTLSGMCSGHQARATVILHAVRIDRICSLMAVENEEMSLAVCNLLQAIIDSLSGEDKREHRGKEEALVLDTKKDLKQITSHLLDMLVSKKVSGQGRDQALNLLNKNVPRKDLAIHDNSRTIYVVDNGLRKILKVVGQVPDLPSCLPLTDNTRMLASILINKLYDDLRCDPERDHFRKICEEYITGKFDPQDMDKNLNAIQTVSGILQGPFDLGNQLLGLKGVMEMMVALCGSERETDQLVAVEALIHASTKLSRATFIITNGVSLLKQIYKTTKNEKIKIRTLVTSDKTILYSVATTLVNCTNSYDVKEVIPELVQLAKFSKQHVPEEHPKDKKDFIDMRVKRLLKAGVISALACMVKADSAILTDQTKELLARVFLALCDNPKDRGTIVAQGGGKALIPLALEGTDVGKVKAAHALAKIAAVSNPDIAFPGERVYEVVRPLVRLLDTQRDGLQNYEALLGLTNLSGRSDKLRQKIFKERALPDIENYMFENHDQLRQAATECMCNMVLHKEVQERFLADGNDRLKLVVLLCGEDDDKVQNAAAGALAMLTAAHKKLCLKMTQVTTQWLEILQRLCLHDQLSVQHRGLVIAYNLLAADAELAKKLVESELLEILTVVGKQEPDEKKAEVVQTARECLIKCMDYGFIKPVS

SEQ ID NO: 95702 - protein, 518 aa, Homo sapiens
  Payload ID: 19091
  Gene Name: unc-5 family C-terminal like
  Uniprot ID: Q8IV45
  ENSP ID: ENSP00000244565
MCPQESSFQPSQFLLLVGVPVASVLLLAQCLRWHCPRRLLGACWTLNGQEEPVSQPTPQLENEVSRQHLPATLPEMVAFYQELHTPTQGQTMVRQLMHKLLVFSAREVDHRGGCLMLQDTGISLLIPPGAVAVGRQERVSLILVWDLSDAPSLSQAQGLVSPVVACGPHGASFLKPCTLTFKHCAEQPSHARTYSSNTTLLDAKVWRPLGRPGAHASRDECRIHLSHFSLYTCVLEAPVGREARKWLQLAVFCSPLVPGQSHLQLRIYFLNNTPCALQWALTNEQPHGGRLRGPCQLFDFNGARGDQCLKLTYISEGWENVDDSSCQLVPHLHIWHGKCPFRSFCFRRKAADENEDCSALTNEIIVTMHTFQDGLETKYMEILRFQASEEESWAAPPPVSQPPPCNRLPPELFEQLRMLLEPNSITGNDWRRLASHLGLCGMKIRFLSCQRSPAAAILELFEEQNGSLQELHYLMTVMERLDCASAIQNYLSGTHGGSPGPERGGARDNQGLELDEKL

SEQ ID NO: 95703 - protein, 518 aa, Homo sapiens; identical to SEQ ID NO: 95702
  Payload ID: 19091
  Gene Name: unc-5 family C-terminal like
  Uniprot ID: Q8IV45
  ENSP ID: ENSP00000362258

SEQ ID NO: 95704 - protein, 842 aa, Homo sapiens
  Payload ID: 19092
  Gene Name: unc-5 netrin receptor A
  Uniprot ID: Q6ZN44
  ENSP ID: ENSP00000332737
MAVRPGLWPALLGIVLAAWLRGSGAQQSATVANPVPGANPDLLPHFLVEPEDVYIVKNKPVLLVCKAVPATQIFFKCNGEWVRQVDHVIERSTDGSSGLPTMEVRINVSRQQVEKVFGLEEYWCQCVAWSSSGTTKSQKAYIRIAYLRKNFEQEPLAKEVSLEQGIVLPCRPPEGIPPAEVEWLRNEDLVDPSLDPNVYITREHSLVVRQARLADTANYTCVAKNIVARRRSASAAVIVYVDGSWSPWSKWSACGLDCTHWRSRECSDPAPRNGGEECQGTDLDTRNCTSDLCVHTASGPEDVALYVGLIAVAVCLVLLLLVLILVYCRKKEGLDSDVADSSILTSGFQPVSIKPSKADNPHLLTIQPDLSTTTTTYQGSLCPRQDGPSPKFQLTNGHLLSPLGGGRHTLHHSSPTSEAEEFVSRLSTQNYFRSLPRGTSNMTYGTFNFLGGRLMIPNTGISLLIPPDAIPRGKIYEIYLTLHKPEDVRLPLAGCQTLLSPIVSCGPPGVLLTRPVILAMDHCGEPSPDSWSLRLKKQSCEGSWEDVLHLGEEAPSHLYYCQLEASACYVFTEQLGRFALVGEALSVAAAKRLKLLLFAPVACTSLEYNIRVYCLHDTHDALKEVVQLEKQLGGQLIQEPRVLHFKDSYHNLRLSIHDVPSSLWKSKLLVSYQEIPFYHIWNGTQRYLHCTFTLERVSPSTSDLACKLWVWQVEGDGQSFSINFNITKDTRFAELLALESEAGVPALVGPSAFKIPFLIRQKIISSLDPPCRRGADWRTLAQKLHLDSHLSFFASKPSPTAMILNLWEARHFPNGNLSQLAAAVAGLGQPDAGLFTVSEAEC

SEQ ID NO: 95705 - protein, 344 aa, Homo sapiens
  Payload ID: 19092
  Gene Name: unc-5 netrin receptor A
  ENSP ID: ENSP00000421795
  MOD_RES (1)..(1): Any amino acid
XPGANPDLLPHFLVEPEDVYIVKNKPVLLVCKAVPATQIFFKCNGEWVRQVDHVIERSTDGSSGLPTMEVRINVSRQQVEKVFGLEEYWCQCVAWSSSGTTKSQKAYIRIAYLRKNFEQEPLAKEVSLEQGIVLPCRPPEGIPPAEVEWLRNEDLVDPSLDPNVYITREHSLVVRQARLADTANYTCVAKNIVARRRSASAAVIVYVNGGWSTWTEWSVCSASCGRGWQKRSRSCTNPAPLNGGAFCEGQNVQKTACATLCPVDGSWSPWSKWSACGLDCTHWRSRECSDPAPRNGGEECQGTDLDTRNCTSDLCVHTASGPEDVALYVGLIAVAVCLVLLLLV

SEQ ID NO: 95706 - protein, 84 aa, Homo sapiens
  Payload ID: 19092
  Gene Name: unc-5 netrin receptor A
  ENSP ID: ENSP00000424067
  MOD_RES (1)..(1): Any amino acid
XAQQSATVANPVPGANPDLLPHFLVEPEDVYIVKNKPVLLVCKAVPATQIFFKCNGEWVRQVDHVIERSTDGSSEGDREGWRPM

SEQ ID NO: 95707 - protein, 945 aa, Homo sapiens
  Payload ID: 19093
  Gene Name: unc-5 netrin receptor B
  Uniprot ID: Q8IZJ1
  ENSP ID: ENSP00000334329
MGARSGARGALLLALLLCWDPRLSQAGTDSGSEVLPDSFPSAPAEPLPYFLQEPQDAYIVKNKPVELRCRAFPATQIYFKCNGEWVSQNDHVTQEGLDEATGLRVREVQIEVSRQQVEELFGLEDYWCQCVAWSSAGTTKSRRAYVRIAYLRKNFDQEPLGKEVPLDHEVLLQCRPPEGVPVAEVEWLKNEDVIDPTQDTNFLLTIDHNLIIRQARLSDTANYTCVAKNIVAKRRSTTATVIVYVNGGWSSWAEWSPCSNRCGRGWQKRTRTCTNPAPLNGGAFCEGQAFQKTACTTICPVDGAWTEWSKWSACSTECAHWRSRECMAPPPQNGGRDCSGTLLDSKNCTDGLCMQNKKTLSDPNSHLLEASGDAALYAGLVVAIFVVVAILMAVGVVVYRRNCRDFDTDITDSSAALTGGFHPVNFKTARPSNPQLLHPSVPPDLTASAGIYRGPVYALQDSTDKIPMTNSPLLDPLPSLKVKVYSSSTTGSGPGLADGADLLGVLPPGTYPSDFARDTHFLHLRSASLGSQQLLGLPRDPGSSVSGTFGCLGGRLSIPGTGVSLLVPNGAIPQGKFYEMYLLINKAESTLPLSEGTQTVLSPSVTCGPTGLLLCRPVILTMPHCAEVSARDWIFQLKTQAHQGHWEEVVTLDEETLNTPCYCQLEPRACHILLDQLGTYVFTGESYSRSAVKRLQLAVFAPALCTSLEYSLRVYCLEDTPVALKEVLELERTLGGYLVEEPKPLMFKDSYHNLRLSLHDLPHAHWRSKLLAKYQEIPFYHIWSGSQKALHCTFTLERHSLASTELTCKICVRQVEGEGQIFQLHTTLAETPAGSLDTLCSAPGSTVTTQLGPYAFKIPLSIRQKICNSLDAPNSRGNDWRMLAQKLSMDRYLNYFATKASPTGVILDLWEALQQDDGDLNSLASALEEMGKSEMLVAVATDGDC

SEQ ID NO: 95708 - protein, 934 aa, Homo sapiens
  Payload ID: 19093
  Gene Name: unc-5 netrin receptor B
  Uniprot ID: Q8IZJ1
  ENSP ID: ENSP00000362288
MGARSGARGALLLALLLCWDPRLSQAGTDSGSEVLPDSFPSAPAEPLPYFLQEPQDAYIVKNKPVELRCRAFPATQIYFKCNGEWVSQNDHVTQEGLDEATGLRVREVQIEVSRQQVEELFGLEDYWCQCVAWSSAGTTKSRRAYVRIAYLRKNFDQEPLGKEVPLDHEVLLQCRPPEGVPVAEVEWLKNEDVIDPTQDTNFLLTIDHNLIIRQARLSDTANYTCVAKNIVAKRRSTTATVIVYVNGGWSSWAEWSPCSNRCGRGWQKRTRTCTNPAPLNGGAFCEGQAFQKTACTTICPVDGAWTEWSKWSACSTECAHWRSRECMAPPPQNGGRDCSGTLLDSKNCTDGLCMQMLEASGDAALYAGLVVAIFVVVAILMAVGVVVYRRNCRDFDTDITDSSAALTGGFHPVNFKTARPSNPQLLHPSVPPDLTASAGIYRGPVYALQDSTDKIPMTNSPLLDPLPSLKVKVYSSSTTGSGPGLADGADLLGVLPPGTYPSDFARDTHFLHLRSASLGSQQLLGLPRDPGSSVSGTFGCLGGRLSIPGTGVSLLVPNGAIPQGKFYEMYLLINKAESTLPLSEGTQTVLSPSVTCGPTGLLLCRPVILTMPHCAEVSARDWIFQLKTQAHQGHWEEVVTLDEETLNTPCYCQLEPRACHILLDQLGTYVFTGESYSRSAVKRLQLAVFAPALCTSLEYSLRVYCLEDTPVALKEVLELERTLGGYLVEEPKPLMFKDSYHNLRLSLHDLPHAHWRSKLLAKYQEIPFYHIWSGSQKALHCTFTLERHSLASTELTCKICVRQVEGEGQIFQLHTTLAETPAGSLDTLCSAPGSTVTTQLGPYAFKIPLSIRQKICNSLDAPNSRGNDWRMLAQKLSMDRYLNYFATKASPTGVILDLWEALQQDDGDLNSLASALEEMGKSEMLVAVATDGDC

SEQ ID NO: 95709 - protein, 931 aa, Homo sapiens
  Payload ID: 19094
  Gene Name: unc-5 netrin receptor C
  Uniprot ID: O95185
  ENSP ID: ENSP00000406022
MRKGLRATAARCGLGLGYLLQMLVLPALALLSASGTGSAAQDDDFFHELPETFPSDPPEPLPHFLIEPEEAYIVKNKPVNLYCKASPATQIYFKCNSEWVHQKDHIVDERVDETSGLIVREVSIEISRQQVEELFGPEDYWCQCVAWSSAGTTKSRKAYVRIAYLRKTFEQEPLGKEVSLEQEVLLQCRPPEGIPVAEVEWLKNEDIIDPVEDRNFYITIDHNLIIKQARLSDTANYTCVAKNIVAKRKSTTATVIVYVNGGWSTWTEWSVCNSRCGRGYQKRTRTCTNPAPLNGGAFCEGQSVQKIACTTLCPVDGRWTPWSKWSTCGTECTHWRRRECTAPAPKNGGKDCDGLVLQSKNCTDGLCMQTAPDSDDVALYVGIVIAVIVCLAISVVVALFVYRKNHRDFESDIIDSSALNGGFQPVNIKAARQDLLAVPPDLTSAAAMYRGPVYALHDVSDKIPMTNSPILDPLPNLKIKVYNTSGAVTPQDDLSEFTSKLSPQMTQSLLENEALSLKNQSLARQTDPSCTAFGSFNSLGGHLIVPNSGVSLLIPAGAIPQGRVYEMYVTVHRKETMRPPMDDSQTLLTPVVSCGPPGALLTRPVVLTMHHCADPNTEDWKILLKNQAAQGQWEDVVVVGEENFTTPCYIQLDAEACHILTENLSTYALVGHSTTKAAAKRLKLAIFGPLCCSSLEYSIRVYCLDDTQDALKEILHLERQMGGQLLEEPKALHFKGSTHNLRLSIHDIAHSLWKSKLLAKYQEIPFYHVWSGSQRNLHCTFTLERFSLNTVELVCKLCVRQVEGEGQIFQLNCTVSEEPTGIDLPLLDPANTITTVTGPSAFSIPLPIRQKLCSSLDAPQTRGHDWRMLAHKLNLDRYLNYFATKSSPTGVILDLWEAQNFPDGNLSMLAAVLEEMGRHETVVSLAAEGQY

SEQ ID NO: 95710 - protein, 260 aa, Homo sapiens
  Payload ID: 19094
  Gene Name: unc-5 netrin receptor C
  ENSP ID: ENSP00000425117
MRKGLRATAARCGLGLGYLLQMLVLPALALLSASGTGSAAQDDDFFHELPETFPSDPPEPLPHFLIEPEEAYIVKNKPVNLYCKASPATQIYFKCNSEWVHQKDHIVDERVDETSGLIVREVSIEISRQQVEELFGPEDYWCQCVAWSSAGTTKSRKAYVRIAYLRKTFEQEPLGKEVSLEQEVLLQCRPPEGIPVAEVEWLKNEDIIDPVEDRNFYITIDHNLIIKQARLSDTANYTCVAKNIVAKRKSTTATVIVYGP

SEQ ID NO: 95711 - protein, 597 aa, Homo sapiens
  Payload ID: 19094
  Gene Name: unc-5 netrin receptor C
  Uniprot ID: O95185
  ENSP ID: ENSP00000426153
MRKGLRATAARCGLGLGYLLQMLVLPALALLSASGTGSAAQDDDFFHELPETFPSDPPEPLPHFLIEPEEAYIVKNKPVNLYCKASPATQIYFKCNSEWVHQKDHIVDERVDETSGLIVREVSIEISRQQVEELFGPEDYWCQCVAWSSAGTTKSRKAYVRIAYLRKTFEQEPLGKEVSLEQEVLLQCRPPEGIPVAEVEWLKNEDIIDPVEDRNFYITIDHNLIIKQARLSDTANYTCVAKNIVAKRKSTTATVIVYVNGGWSTWTEWSVCNSRCGRGYQKRTRTCTNPAPLNGGAFCEGQSVQKIACTTLCPVDGRWTPWSKWSTCGTECTHWRRRECTAPAPKNGGKDCDGLVLQSKNCTDGLCMQSFIYPISTEQRTQNEYGFSSAPDSDDVALYVGIVIAVIVCLAISVVVALFVYRKNHRDFESDIIDSSALNGGFQPVNIKAARQDLLAVPPDLTSAAAMYRGPVYALHDVSDKIPMTNSPILDPLPNLKIKVYNTSGAVTPQDDLSEFTSKLSPQMTQSLLENEALSLKNQSLARQTDPSCTAFGSFNSLGGHLIVPNSGVSLLIPAGAIPQGRVYEMYVTVHRKETMR

SEQ ID NO: 95712 - protein, 745 aa, Homo sapiens
  Payload ID: 19094
  Gene Name: unc-5 netrin receptor C
  ENSP ID: ENSP00000426924
MRKGLRATAARCGLGLGYLLQMLVLPALALLSASGTGSAAQDDDFFHELPETFPSDPPEPLPHFLIEPEEAYIVKNKPVNLYCKASPATQIYFKCNSEWVHQKDHIVDERVDETSGLIVREVSIEISRQQVEELFGPEDYWCQCVAWSSAGTTKSRKAYVRIAYLRKTFEQEPLGKEVSLEQEVLLQCRPPEGIPVAEVEWLKNEDIIDPVEDRNFYITIDHNLIIKQARLSDTANYTCVAKNIVAKRKSTTATVIVYVNGGWSTWTEWSVCNSRCGRGYQKRTRTCTNPAPLNGGAFCEGQSVQKIACTTLCPVDGRWTPWSKWSTCGTECTHWRRRECTAPAPKNGGKDCDGLVLQSKNCTDGLCMQSFIYPISTEQRTQNEYGFSSAPDSDDVALYVGIVIAVIVCLAISVVVALFVYRKNHRDFESDIIDSSALNGGFQPVNIKAARQDLLAVPPDLTSAAAMYRGPVYALHDVSDKIPMTNSPILDPLPNLKIKVYNTSGAVTPQDDLSEFTSKLSPQMTQSLLENEALSLKNQSLARQTDPSCTAFGSFNSLGGHLIVPNSGVSLLIPAGAIPQGRVYEMYVTVHRKETMRPPMDDSQTLLTPVVSCGPPGALLTRPVVLTMHHCADPNTEDWKILLKNQAAQGQWEDVVVVGEENFTTPCYIQLDAEACHILTENLSTYALVGHSTTKAAAKRLKLAIFGPLCCSSLEYSIRVYCLDDTQDALKEILHLERQMGGQLL

SEQ ID NO: 95713 - protein, 890 aa, Homo sapiens
  Payload ID: 19094
  Gene Name: unc-5 netrin receptor C
  ENSP ID: ENSP00000483905
DDDFFHELPETFPSDPPEPLPHFLIEPEEAYIVKNKPVNLYCKASPATQIYFKCNSEWVHQKDHIVDERVDETSGLIVREVSIEISRQQVEELFGPEDYWCQCVAWSSAGTTKSRKAYVRIAYLRKTFEQEPLGKEVSLEQEVLLQCRPPEGIPVAEVEWLKNEDIIDPVEDRNFYITIDHNLIIKQARLSDTANYTCVAKNIVAKRKSTTATVIVYVNGGWSTWTEWSVCNSRCGRGYQKRTRTCTNPAPLNGGAFCEGQSVQKIACTTLCPVDGRWTPWSKWSTCGTECTHWRRRECTAPAPKNGGKDCDGLVLQSKNCTDGLCMQTAPDSDDVALYVGIVIAVIVCLAISVVVALFVYRKNHRDFESDIIDSSALNGGFQPVNIKAARQDLLAVPPDLTSAAAMYRGPVYALHDVSDKIPMTNSPILDPLPNLKIKVYNTSGAVTPQDDLSEFTSKLSPQMTQSLLENEALSLKNQSLARQTDPSCTAFGSFNSLGGHLIVPNSGVSLLIPAGAIPQGRVYEMYVTVHRKETMRPPMDDSQTLLTPVVSCGPPGALLTRPVVLTMHHCADPNTEDWKILLKNQAAQGQWEDVVVVGEENFTTPCYIQLDAEACHILTENLSTYALVGHSTTKAAAKRLKLAIFGPLCCSSLEYSIRVYCLDDTQDALKEILHLERQMGGQLLEEPKALHFKGSTHNLRLSIHDIAHSLWKSKLLAKYQEIPFYHVWSGSQRNLHCTFTLERFSLNTVELVCKLCVRQVEGEGQIFQLNCTVSEEPTGIDLPLLDPANTITTVTGPSAFSIPLPIRQKLCSSLDAPQTRGHDWRMLAHKLNLDRYLNYFATKSSPTGVILDLWEAQNFPDGNLSMLAAVLEEMGRHETVVSLAAEGQY

SEQ ID NO: 95714 - protein, 884 aa, Homo sapiens
  Payload ID: 19095
  Gene Name: unc-5 netrin receptor D
  ENSP ID: ENSP00000287272
MGRAAATAGGGGGARRWLPWLGLCFWAAGTAAARGTDNGEALPESIPSAPGTLPHFIEEPDDAYIIKSNPIALRCKARPAMQIFFKCNGEWVHQNEHVSEETLDESSGLKVREVFINVTRQQVEDFHGPEDYWCQCVAWSHLGTSKSRKASVRIAYLRKNFEQDPQGREVPIEGMIVLHCRPPEGVPAAEVEWLKNEEPIDSEQDENIDTRADHNLIIRQARLSDSGNYTCMAANIVAKRRSLSATVVVYVDGSWEVWSEWSVCSPECEHLRIRECTAPPPRNGGKFCEGLSQESENCTDGLCILDKKPLHEIKPQSIENASDIALYSGLGAAVVAVAVLVIGVTLYRRSQSDYGVDVIDSSALTGNSLLLNSAMQPDLTVSRTYSGPICLQDPLDKELMTESSLFNPLSDIKVKVQSSFMVSLGVSERAEYHGKNHSRTFPHGNNHSFSTMHPRNKMPYIQNLSSLPTRTELRTTGVFGHLGGRLVMPNTGVSLLIPHGAIPEENSWEIYMSINQGEPSLQSDGSEVLLSPEVTCGPPDMIVTTPFALTIPHCADVSSEHWNIHLKKRTQQGKWEEVMSVEDESTSCYCLLDPFACHVLLDSFGTYALTGEPITDCAVKQLKVAVFGCMSCNSLDYNLRVYCVDNTPCAFQEVVSDERHQGGQLLEEPKLLHFKGNTFSLQISVLDIPPFLWRIKPFTACQEVPFSRVWCSNRQPLHCAFSLERYTPTTTQLSCKICIRQLKGHEQILQVQTSILESERETITFFAQEDSTFPAQTGPKAFKIPYSIRQRICATFDTPNAKGKDWQMLAQKNSINRNLSYFATQSSPSAVILNLWEARHQHDGDLDSLACALEEIGRTHTKLSNISESQLDEADFNYSRQNGL

SEQ ID NO: 95715 - protein, 953 aa, Homo sapiens
  Payload ID: 19095
  Gene Name: unc-5 netrin receptor D
  Uniprot ID: Q6UXZ4
  ENSP ID: ENSP00000385143
MGRAAATAGGGGGARRWLPWLGLCFWAAGTAAARGTDNGEALPESIPSAPGTLPHFIEEPDDAYIIKSNPIALRCKARPAMQIFFKCNGEWVHQNEHVSEETLDESSGLKVREVFINVTRQQVEDFHGPEDYWCQCVAWSHLGTSKSRKASVRIAYLRKNFEQDPQGREVPIEGMIVLHCRPPEGVPAAEVEWLKNEEPIDSEQDENIDTRADHNLIIRQARLSDSGNYTCMAANIVAKRRSLSATVVVYVNGGWSSWTEWSACNVRCGRGWQKRSRTCTNPAPLNGGAFCEGMSVQKITCTSLCPVDGSWEVWSEWSVCSPECEHLRIRECTAPPPRNGGKFCEGLSQESENCTDGLCILDKKPLHEIKPQSIENASDIALYSGLGAAVVAVAVLVIGVTLYRRSQSDYGVDVIDSSALTGGFQTFNFKTVRQGNSLLLNSAMQPDLTVSRTYSGPICLQDPLDKELMTESSLFNPLSDIKVKVQSSFMVSLGVSERAEYHGKNHSRTFPHGNNHSFSTMHPRNKMPYIQNLSSLPTRTELRTTGVFGHLGGRLVMPNTGVSLLIPHGAIPEENSWEIYMSINQGEPSLQSDGSEVLLSPEVTCGPPDMIVTTPFALTIPHCADVSSEHWNIHLKKRTQQGKWEEVMSVEDESTSCYCLLDPFACHVLLDSFGTYALTGEPITDCAVKQLKVAVFGCMSCNSLDYNLRVYCVDNTPCAFQEVVSDERHQGGQLLEEPKLLHFKGNTFSLQISVLDIPPFLWRIKPFTACQEVPFSRVWCSNRQPLHCAFSLERYTPTTTQLSCKICIRQLKGHEQILQVQTSILESERETITFFAQEDSTFPAQTGPKAFKIPYSIRQRICATFDTPNAKGKDWQMLAQKNSINRNLSYFATQSSPSAVILNLWEARHQHDGDLDSLACALEEIGRTHTKLSNISESQLDEADFNYSRQNGL

SEQ ID NO: 95716 - protein, 886 aa, Homo sapiens
  Payload ID: 19095
  Gene Name: unc-5 netrin receptor D
  ENSP ID: ENSP00000392739
MGRAAATAGGGGGARRWLPWLGLCFWAAGTAAARGTDNGEALPESIPSAPGTLPHFIEEPDDAYIIKSNPIALRCKARPAMQIFFKCNGEWVHQNEHVSEETLDESSGLKVREVFINVTRQQVEDFHGPEDYWCQCVAWSHLGTSKSRKASVRIAYLRKNFEQDPQGREVPIEGMIVLHCRPPEGVPAAEVEWLKNEEPIDSEQDENIDTRADHNLIIRQARLSDSGNYTCMAANIVAKRRSLSATVVVYVDGSWEVWSEWSVCSPECEHLRIRECTAPPPRNGGKFCEGLSQESENCTDGLCILGIENASDIALYSGLGAAVVAVAVLVIGVTLYRRSQSDYGVDVIDSSALTGGFQTFNFKTVRQGNSLLLNSAMQPDLTVSRTYSGPICLQDPLDKELMTESSLFNPLSDIKVKVQSSFMVSLGVSERAEYHGKNHSRTFPHGNNHSFSTMHPRNKMPYIQNLSSLPTRTELRTTGVFGHLGGRLVMPNTGVSLLIPHGAIPEENSWEIYMSINQGEPSLQSDGSEVLLSPEVTCGPPDMIVTTPFALTIPHCADVSSEHWNIHLKKRTQQGKWEEVMSVEDESTSCYCLLDPFACHVLLDSFGTYALTGEPITDCAVKQLKVAVFGCMSCNSLDYNLRVYCVDNTPCAFQEVVSDERHQGGQLLEEPKLLHFKGNTFSLQISVLDIPPFLWRIKPFTACQEVPFSRVWCSNRQPLHCAFSLERYTPTTTQLSCKICIRQLKGHEQILQVQTSILESERETITFFAQEDSTFPAQTGPKAFKIPYSIRQRICATFDTPNAKGKDWQMLAQKNSINRNLSYFATQSSPSAVILNLWEARHQHDGDLDSLACALEEIGRTHTKLSNISESQLDEADFNYSRQNGL

SEQ ID NO: 95717 - protein, 948 aa, Homo sapiens
  Payload ID: 19095
  Gene Name: unc-5 netrin receptor D
  Uniprot ID: Q6UXZ4
  ENSP ID: ENSP00000394303
MILVLVKALSDVCAGTSGFLLDFSSQTSPGTDNGEALPESIPSAPGTLPHFIEEPDDAYIIKSNPIALRCKARPAMQIFFKCNGEWVHQNEHVSEETLDESSGLKVREVFINVTRQQVEDFHGPEDYWCQCVAWSHLGTSKSRKASVRIAYLRKNFEQDPQGREVPIEGMIVLHCRPPEGVPAAEVEWLKNEEPIDSEQDENIDTRADHNLIIRQARLSDSGNYTCMAANIVAKRRSLSATVVVYVNGGWSSWTEWSACNVRCGRGWQKRSRTCTNPAPLNGGAFCEGMSVQKITCTSLCPVDGSWEVWSEWSVCSPECEHLRIRECTAPPPRNGGKFCEGLSQESENCTDGLCILDKKPLHEIKPQSIENASDIALYSGLGAAVVAVAVLVIGVTLYRRSQSDYGVDVIDSSALTGGFQTFNFKTVRQGNSLLLNSAMQPDLTVSRTYSGPICLQDPLDKELMTESSLFNPLSDIKVKVQSSFMVSLGVSERAEYHGKNHSRTFPHGNNHSFSTMHPRNKMPYIQNLSSLPTRTELRTTGVFGHLGGRLVMPNTGVSLLIPHGAIPEENSWEIYMSINQGEPSLQSDGSEVLLSPEVTCGPPDMIVTTPFALTIPHCADVSSEHWNIHLKKRTQQGKWEEVMSVEDESTSCYCLLDPFACHVLLDSFGTYALTGEPITDCAVKQLKVAVFGCMSCNSLDYNLRVYCVDNTPCAFQEVVSDERHQGGQLLEEPKLLHFKGNTFSLQISVLDIPPFLWRIKPFTACQEVPFSRVWCSNRQPLHCAFSLERYTPTTTQLSCKICIRQLKGHEQILQVQTSILESERETITFFAQEDSTFPAQTGPKAFKIPYSIRQRICATFDTPNAKGKDWQMLAQKNSINRNLSYFATQSSPSAVILNLWEARHQHDGDLDSLACALEEIGRTHTKLSNISESQLDEADFNYSRQNGL

SEQ ID NO: 95718 - protein, 529 aa, Homo sapiens
  Payload ID: 19095
  Gene Name: unc-5 netrin receptor D
  ENSP ID: ENSP00000397211
MELMIQEKSFGNSLLLNSAMQPDLTVSRTYSGPICLQDPLDKELMTESSLFNPLSDIKVKVQSSFMVSLGVSERAEYHGKNHSRTFPHGNNHSFSTMHPRNKMPYIQNLSSLPTRTELRTTGVFGHLGGRLVMPNTGVSLLIPHGAIPEENSWEIYMSINQGEPSLQSDGSEVLLSPEVTCGPPDMIVTTPFALTIPHCADVSSEHWNIHLKKRTQQGKWEEVMSVEDESTSCYCLLDPFACHVLLDSFGTYALTGEPITDCAVKQLKVAVFGCMSCNSLDYNLRVYCVDNTPCAFQEVVSDERHQGGQLLEEPKLLHFKGNTFSLQISVLDIPPFLWRIKPFTACQEVPFSRVWCSNRQPLHCAFSLERYTPTTTQLSCKICIRQLKGHEQILQVQTSILESERETITFFAQEDSTFPAQTGPKAFKIPYSIRQRICATFDTPNAKGKDWQMLAQKNSINRNLSYFATQSSPSAVILNLWEARHQHDGDLDSLACALEEIGRTHTKLSNISESQLDEADFNYSRQNGL

SEQ ID NO: 95719 - protein, 958 aa, Homo sapiens
  Payload ID: 19095
  Gene Name: unc-5 netrin receptor D
  ENSP ID: ENSP00000412652
MGRAAATAGGGGGARRWLPWLGLCFWAAGTAAARGTDNGEALPESIPSAPGTLPHFIEEPDDAYIIKSNPIALRCKARPAMQIFFKCNGEWVHQNEHVSEETLDESSGLKVREVFINVTRQQVEDFHGPEDYWCQCVAWSHLGTSKSRKASVRIAYLRKNFEQDPQGREVPIEGMIVLHCRPPEGVPAAEVEWLKNEEPIDSEQDENIDTRADHNLIIRQARLSDSGNYTCMAANIVAKRRSLSATVVVYVNGGWSSWTEWSACNVRCGRGWQKRSRTCTNPAPLNGGAFCEGMSVQKITCTSLCPVDGSWEVWSEWSVCSPECEHLRIRECTAPPPRNGGKFCEGLSQESENCTDGLCILDKKPLHEIKPQRWSRRGIENASDIALYSGLGAAVVAVAVLVIGVTLYRRSQSDYGVDVIDSSALTGGFQTFNFKTVRQGNSLLLNSAMQPDLTVSRTYSGPICLQDPLDKELMTESSLFNPLSDIKVKVQSSFMVSLGVSERAEYHGKNHSRTFPHGNNHSFSTMHPRNKMPYIQNLSSLPTRTELRTTGVFGHLGGRLVMPNTGVSLLIPHGAIPEENSWEIYMSINQGEPSLQSDGSEVLLSPEVTCGPPDMIVTTPFALTIPHCADVSSEHWNIHLKKRTQQGKWEEVMSVEDESTSCYCLLDPFACHVLLDSFGTYALTGEPITDCAVKQLKVAVFGCMSCNSLDYNLRVYCVDNTPCAFQEVVSDERHQGGQLLEEPKLLHFKGNTFSLQISVLDIPPFLWRIKPFTACQEVPFSRVWCSNRQPLHCAFSLERYTPTTTQLSCKICIRQLKGHEQILQVQTSILESERETITFFAQEDSTFPAQTGPKAFKIPYSIRQRICATFDTPNAKGKDWQMLAQKNSINRNLSYFATQSSPSAVILNLWEARHQHDGDLDSLACALEEIGRTHTKLSNISESQLDEADFNYSRQNGL

SEQ ID NO: 95720 - protein, 259 aa, Homo sapiens
  Payload ID: 19096
  Gene Name: unc-50 homolog (C. elegans)
  Uniprot ID: Q53HI1
  ENSP ID: ENSP00000350409
MLPSTSVNSLVQGNGVLNSRDAARHTAGAKRYKYLRRLFRFRQMDFEFAAWQMLYLFTSPQRVYRNFHYRKQTKDQWARDDPAFLVLLSIWLCVSTIGFGFVLDMGFFETIKLLLWVVLIDCVGVGLLIATLMWFISNKYLVKRQSRDYDVEWGYAFDVHLNAFYPLLVILHFIQLFFINHVILTDTFIGYLVGNTLWLVAVGYYIYVTFLGYSALPFLKNTVILLYPFAPLILLYGLSLALGWNFTHTLCSFYKYRVK

SEQ ID NO: 95721 - protein, 128 aa, Homo sapiens
  Payload ID: 19096
  Gene Name: unc-50 homolog (C. elegans)
  ENSP ID: ENSP00000377131
  MOD_RES (1)..(1): Any amino acid
XFISNKYLVKRQSRDYDVEWGYAFDVHLNAFYPLLVILHFIQLFFINHVILTDTFIGYLVGNTLWLVAVGYYIYVTFLGYSVWIPFFSSIAIFEKYSNSSVSICTSDSALRAFPGTGMELHPYSLFFL

SEQ ID NO: 95722 - protein, 276 aa, Homo sapiens
  Payload ID: 19096
  Gene Name: unc-50 homolog (C. elegans)
  ENSP ID: ENSP00000386466
MFLQNTCKRNVFLPSRKMLPSTSVNSLVQGNGVLNSRDAARHTAGAKRYKYLRRLFRFRQMDFEFAAWQMLYLFTSPQRVYRNFHYRKQTKDQWARDDPAFLVLLSIWLCVSTIGFGFVLDMGFFETIKLLLWVVLIDCVGVGLLIATLMWFISNKYLVKRQSRDYDVEWGYAFDVHLNAFYPLLVILHFIQLFFINHVILTDTFIGYLVGNTLWLVAVGYYIYVTFLGYSALPFLKNTVILLYPFAPLILLYGLSLALGWNFTHTLCSFYKYRVK

SEQ ID NO: 95723 - protein, 276 aa, Homo sapiens; identical to SEQ ID NO: 95722
  Payload ID: 19096
  Gene Name: unc-50 homolog (C. elegans)
  ENSP ID: ENSP00000387146

SEQ ID NO: 95724 - protein, 92 aa, Homo sapiens
  Payload ID: 19096
  Gene Name: unc-50 homolog (C. elegans)
  ENSP ID: ENSP00000412224
  MOD_RES (1)..(1): Any amino acid
XFISNKYLVKRQSRDYDVEWGYAFDVHLNAFYPLLVILHFIQLFFINPLPFLKNTVILLYPFAPLILLYGLSLALGWNFTHTLCSFYKYRVK

SEQ ID NO: 95725 - protein, 1050 aa, Homo sapiens
  Payload ID: 19097
  Gene Name: unc-51 like autophagy activating kinase 1
  Uniprot ID: O75385
  ENSP ID: ENSP00000324560
MEPGRGGTETVGKFEFSRKDLIGHGAFAVVFKGRHREKHDLEVAVKCINKKNLAKSQTLLGKEIKILKELKHENIVALYDFQEMANSVYLVMEYCNGGDLADYLHAMRTLSEDTIRLFLQQIAGAMRLLHSKGIIHRDLKPQNILLSNPAGRRANPNSIRVKIADFGFARYLQSNMMAATLCGSPMYMAPEVIMSQHYDGKADLWSIGTIVYQCLTGKAPFQASSPQDLRLFYEKNKTLVPTIPRETSAPLRQLLLALLQRNHKDRMDFDEFFHHPFLDASPSVRKSPPVPVPSYPSSGSGSSSSSSSTSHLASPPSLGEMQQLQKTLASPADTAGFLHSSRDSGGSKDSSCDTDDFVMVPAQFPGDLVAEAPSAKPPPDSLMCSGSSLVASAGLESHGRTPSPSPPCSSSPSPSGRAGPFSSSRCGASVPIPVPTQVQNYQRIERNLQSPTQFQTPRSSAIRRSGSTSPLGFARASPSPPAHAEHGGVLARKMSLGGGRPYTPSPQVGTIPERPGWSGTPSPQGAEMRGGRSPRPGSSAPEHSPRTSGLGCRLHSAPNLSDLHVVRPKLPKPPTDPLGAVFSPPQASPPQPSHGLQSCRNLRGSPKLPDFLQRNPLPPILGSPTKAVPSFDFPKTPSSQNLLALLARQGVVMTPPRNRTLPDLSEVGPFHGQPLGPGLRPGEDPKGPFGRSFSTSRLTDLLLKAAFGTQAPDPGSTESLQEKPMEIAPSAGFGGSLHPGARAGGTSSPSPVVFTVGSPPSGSTPPQGPRTRMFSAGPTGSASSSARHLVPGPCSEAPAPELPAPGHGCSFADPITANLEGAVTFEAPDLPEETLMEQEHTEILRGLRFTLLFVQHVLEIAALKGSASEAAGGPEYQLQESVVADQISLLSREWGFAEQLVLYLKVAELLSSGLQSAIDQIRAGKLCLSSTVKQVVRRLNELYKASVVSCQGLSLRLQRFFLDKQRLLDRIHSITAERLIFSHAVQMVQSAALDEMFQHREGCVPRYHKALLLLEGLQHMLSDQADIENVTKCKLCIERRLSALLTGICA

SEQ ID NO: 95726 - protein, 1036 aa, Homo sapiens
  Payload ID: 19098
  Gene Name: unc-51 like autophagy activating kinase 2
  Uniprot ID: Q8IYT8
  ENSP ID: ENSP00000354877
MEVVGDFEYSKRDLVGHGAFAVVFRGRHRQKTDWEVAIKSINKKNLSKSQILLGKEIKILKELQHENIVALYDVQELPNSVFLVMEYCNGGDLADYLQAKGTLSEDTIRVFLHQIAAAMRILHSKGIIHRDLKPQNILLSYANRRKSSVSGIRIKIADFGFARYLHSNMMAATLCGSPMYMAPEVIMSQHYDAKADLWSIGTVIYQCLVGKPPFQANSPQDLRMFYEKNRSLMPSIPRETSPYLANLLLGLLQRNQKDRMDFEAFFSHPFLEQGPVKKSCPVPVPMYSGSVSGSSCGSSPSCRFASPPSLPDMQHIQEENLSSPPLGPPNYLQVSKDSASTSSKNSSCDTDDFVLVPHNISSDHSCDMPVGTAGRRASNEFLVCGGQCQPTVSPHSETAPIPVPTQIRNYQRIEQNLTSTASSGTNVHGSPRSAVVRRSNTSPMGFLRPGSCSPVPADTAQTVGRRLSTGSSRPYSPSPLVGTIPEQFSQCCCGHPQGHDSRSRNSSGSPVPQAQSPQSLLSGARLQSAPTLTDIYQNKQKLRKQHSDPVCPSHTGAGYSYSPQPSRPGSLGTSPTKHLGSSPRSSDWFFKTPLPTIIGSPTKTTAPFKIPKTQASSNLLALVTRHGPAEEQSKDGNEPRECAHCLLVQGSERQRAEQQSKAVFGRSVSTGKLSDQQGKTPICRHQGSTDSLNTERPMDIAPAGACGGVLAPPAGTAASSKAVLFTVGSPPHSAAAPTCTHMFLRTRTTSVGPSNSGGSLCAMSGRVCVGSPPGPGFGSSPPGAEAAPSLRYVPYGASPPSLEGLITFEAPELPEETLMEREHTDTLRHLNVMLMFTECVLDLTAMRGGNPELCTSAVSLYQIQESVVVDQISQLSKDWGRVEQLVLYMKAAQLLAASLHLAKAQIKSGKLSPSTAVKQVVKNLNERYKFCITMCKKLTEKLNRFFSDKQRFIDEINSVTAEKLIYNCAVEMVQSAALDEMFQQTEDIVYRYHKAALLLEGLSRILQDPADIENVHKYKCSIERRLSALCHSTATV

SEQ ID NO: 95727 - protein, 1036 aa, Homo sapiens; identical to SEQ ID NO: 95726
  Payload ID: 19098
  Gene Name: unc-51 like autophagy activating kinase 2
  Uniprot ID: Q8IYT8
  ENSP ID: ENSP00000378914

SEQ ID NO: 95728 - protein, 198 aa, Homo sapiens
  Payload ID: 19098
  Gene Name: unc-51 like autophagy activating kinase 2
  ENSP ID: ENSP00000464892
  MOD_RES (1)..(1): Any amino acid
XAEQQSKAVFGRSVSTGKLSDQQGKTPICRHQGSTDSLNTERPMDIGSPPHSAAAPTCTHMFLRTRTTSVGPSNSGGSLCAMSGRVCVGSPPGPGFGSSPPGAEAAPSLRYVPYGASPPSLEGLITFEAPELPEETLMEREHTDTLRHLNVMLMFTECVLDLTAMRGGNPELCTSAVSLYQIQESVVVDQISQLSKDW

SEQ ID NO: 95729 - protein, 21 aa, Homo sapiens
  Payload ID: 19098
  Gene Name: unc-51 like autophagy activating kinase 2
  ENSP ID: ENSP00000465666
  MOD_RES (1)..(1): Any amino acid
XYLQGYIEHILRIIWTDMHHE

SEQ ID NO: 95730 - protein, 49 aa, Homo sapiens
  Payload ID: 19098
  Gene Name: unc-51 like autophagy activating kinase 2
  ENSP ID: ENSP00000467277
  MOD_RES (1)..(1): Any amino acid
XHENIVALYDVQSCSCRPGWSAMAQSQLIAPLPPEFKGFSCLSLLNSWD

SEQ ID NO: 95731 - protein, 472 aa, Homo sapiens
  Payload ID: 19099
  Gene Name: unc-51 like kinase 3
  Uniprot ID: Q6PHR2
  ENSP ID: ENSP00000400312
MAGPGWGPPRLDGFILTERLGSGTYATVYKAYAKKDTREVVAIKCVAKKSLNKASVENLLTEIEILKGIRHPHIVQLKDFQWDSDNIYLIMEFCAGGDLSRFIHTRRILPEKVARVFMQQLASALQFLHERNISHLDLKPQNILLSSLEKPHLKLADFGFAQHMSPWDEKHVLRGSPLYMAPEMVCQRQYDARVDLWSMGVILYEALFGQPPFASRSFSELEEKIRSNRVIELPLRPLLSRDCRDLLQRLLERDPSRRISFQDFFAHPWVDLEHMPSGESLGRATALVVQAVKKDQEGDSAAALSLYCKALDFFVPALHYEVDAQRKEAIKAKVGQYVSRAEELKAIVSSSNQALLRQGTSARDLLREMARDKPRLLAALEVASAAMAKEEAAGGEQDALDLYQHSLGELLLLLAAEPPGRRRELLHTEVQNLMARAEYLKEQVKMRESRWEADTLDKEGLSESVRSSCTLQ

SEQ ID NO: 95732 - protein, 50 aa, Homo sapiens
  Payload ID: 19099
  Gene Name: unc-51 like kinase 3
  ENSP ID: ENSP00000454583
MQRNGSASRGLEKTRLRLCREARIPESAFLTGLTRESWEARCWCAVEGHS

SEQ ID NO: 95733 - protein, 41 aa, Homo sapiens
  Payload ID: 19099
  Gene Name: unc-51 like kinase 3
  ENSP ID: ENSP00000455199
MAGPGWGPPRLDGFILTERLGSGTYATVYKAYAKNAKKWIS

SEQ ID NO: 95734 - protein, 84 aa, Homo sapiens
  Payload ID: 19099
  Gene Name: unc-51 like kinase 3
  ENSP ID: ENSP00000455395
MAGPGWGPPRLDGFILTERLGSGTYATVYKAYAKKDTREVVAIKCVAKKSLNKASVENLLTEIEILKGIRHPHIVQLKDFQDSA

SEQ ID NO: 95735 - protein, 470 aa, Homo sapiens
  Payload ID: 19099
  Gene Name: unc-51 like kinase 3
  Uniprot ID: Q6PHR2
  ENSP ID: ENSP00000456051
MAGPGWGPPRLDGFILTERLGSGTYATVYKAYAKKDTREVVAIKCVAKKSLNKASVENLLTEIEILKGIRHPHIVQLKDFQWDSDNIYLIMEFCAGGDLSRFIHTRRILPEKVARVFMQQLASALQFLHERNISHLDLKPQNILLSSLEKPHLKLADFGFAQHMSPWDEKHVLRGSPLYMAPEMVCQRQYDARVDLWSMGVILYEALFGQPPFASRSFSELEEKIRSNRVIELPLRPLLSRDCRDLLQRLLERDPSRRISFQDFFAHPWVDLEHMPSGESLGRATALVVQAVKKDQEGDSAAALSLYCKALDFFVPALHYEVDAQRKEAIKAKVGQYVSRAEELKAIVSSSNQALLRQGTSARDLLREMARDKPRLLAALEVASAAMAKEEAAGGEQDALDLYQHSLGELLLLLAAEPPGRRRELLHTEVQNLMARAEYLKEQMRESRWEADTLDKEGLSESVRSSCTLQ

SEQ ID NO: 95736 - protein, 50 aa, Homo sapiens; identical to SEQ ID NO: 95732
  Payload ID: 19099
  Gene Name: unc-51 like kinase 3
  ENSP ID: ENSP00000456296

SEQ ID NO: 95737 - protein, 61 aa, Homo sapiens
  Payload ID: 19099
  Gene Name: unc-51 like kinase 3
  ENSP ID: ENSP00000456510
MQRNGSASRGLEKTRLRLCREARIPESAFLTGLTRESWEARCWCAAESPNLLSRRRTLVKW

SEQ ID NO: 95738 - protein, 136 aa, Homo sapiens
  Payload ID: 19099
  Gene Name: unc-51 like kinase 3
  ENSP ID: ENSP00000457061
MAGPGWGPPRLDGFILTERLGSGTYATVYKAYAKKDTREVVAIKCVAKKSLNKASVENLLTEIEILKGIRHPHIVQLKDFQWDSDNIYLIMEFCAGGDLSRFIHTRRILPEKVARVFMQQLAPCNSCMNGISLTWI

SEQ ID NO: 95739 - protein, 42 aa, Homo sapiens
  Payload ID: 19099
  Gene Name: unc-51 like kinase 3
  ENSP ID: ENSP00000457305
MQRNGSASRGLEKTRLRLCREARIPESAFLTGLTRESWEARC

SEQ ID NO: 95740 - protein, 483 aa, Homo sapiens
  Payload ID: 19099
  Gene Name: unc-51 like kinase 3
  Uniprot ID: Q6PHR2
  ENSP ID: ENSP00000457853
MQRNGSASRGLEKTRLRLCREARIPESAFLTGLTRESWEARCWCAKDTREVVAIKCVAKKSLNKASVENLLTEIEILKGIRHPHIVQLKDFQWDSDNIYLIMEFCAGGDLSRFIHTRRILPEKVARVFMQQLASALQFLHERNISHLDLKPQNILLSSLEKPHLKLADFGFAQHMSPWDEKHVLRGSPLYMAPEMVCQRQYDARVDLWSMGVILYEALFGQPPFASRSFSELEEKIRSNRVIELPLRPLLSRDCRDLLQRLLERDPSRRISFQDFFAHPWVDLEHMPSGESLGRATALVVQAVKKDQEGDSAAALSLYCKALDFFVPALHYEVDAQRKEAIKAKVGQYVSRAEELKAIVSSSNQALLRQGTSARDLLREMARDKPRLLAALEVASAAMAKEEAAGGEQDALDLYQHSLGELLLLLAAEPPGRRRELLHTEVQNLMARAEYLKEQVKMRESRWEADTLDKEGLSESVRSSCTLQ

SEQ ID NO: 95741 - protein, 49 aa, Homo sapiens
  Payload ID: 19099
  Gene Name: unc-51 like kinase 3
  ENSP ID: ENSP00000457983
MQRNGSASRGLEKTRLRLCREARIPESAFLTGLTRESWEARCWCAVGHS

SEQ ID NO: 95742 - protein, 41 aa, Homo sapiens; identical to SEQ ID NO: 95733
  Payload ID: 19099
  Gene Name: unc-51 like kinase 3
  ENSP ID: ENSP00000486917

SEQ ID NO: 95743 - protein, 1275 aa, Homo sapiens
  Payload ID: 19100
  Gene Name: unc-51 like kinase 4
  Uniprot ID: Q96C45
  ENSP ID: ENSP00000301831
MENFILYEEIGRGSKTVVYKGRRKGTINFVAILCTDKCKRPEITNWVRLTREIKHKNIVTFHEWYETSNHLWLVVELCTGGSLKTVIAQDENLPEDVVREFGIDLISGLHHLHKLGILFCDISPRKILLEGPGTLKFSNFCLAKVEGENLEEFFALVAAEEGGGDNGENVLKKSMKSRVKGSPVYTAPEVVRGADFSISSDLWSLGCLLYEMFSGKPPFFSESISELTEKILCEDPLPPIPKDSSRPKASSDFINLLDGLLQRDPQKRLTWTRLLQHSFWKKAFAGADQESSVEDLSLSRNTMECSGPQDSKELLQNSQSRQAKGHKSGQPLGHSFRLENPTEFRPKSTLEGQLNESMFLLSSRPTPRTSTAVEVSPGEDMTHCSPQKTSPLTKITSGHLSQQDLESQMRELIYTDSDLVVTPIIDNPKIMKQPPVKFDAKILHLPTYSVDKLLFLKDQDWNDFLQQVCSQIDSTEKSMGASRAKLNLLCYLCVVAGHQEVATRLLHSPLFQLLIQHLRIAPNWDIRAKVAHVIGLLASHTAELQENTPVVEAIVLLTELIRENFRNSKLKQCLLPTLGELIYLVATQEEKKKNPRECWAVPLAAYTVLMRCLREGEERVVNHMAAKIIENVCTTFSAQSQGFITGEIGPILWYLFRHSTADSLRITAVSALCRITRHSPTAFQNVIEKVGLNSVINSLASAICKVQQYMLTLFAAMLSCGIHLQRLIQEKGFVSTIIRLLDSPSTCIRAKAFLVLLYILIYNREMLLLSCQARLVMYIERDSRKTTPGKEQQSGNEYLSKCLDLLICHIVQELPRILGDILNSLANVSGRKHPSTVQVKQLKLCLPLMPVVLHLVTSQVFRPQVVTEEFLFSYGTILSHIKSVDSGETNIDGAIGLTASEEFIKITLSAFEAIIQYPILLKDYRSTVVDYILPPLVSLVQSQNVEWRLFSLRLLSETTSLLVNQEFGDGKEKASVDSDSNLLALIRDVLLPQYEHILLEPDPVPAYALKLLVAMTEHNPTFTRLVEESKLIPLIFEVTLEHQESILGNTMQSVIALLSNLVACKDSNMELLYEQGLVSHICNLLTETATLCLDVDNKNNNEMAAPLLFSLLDILHSMLTYTSGIVRLALQAQKSGSGEDPQAAEDLLLLNRPLTDLISLLIPLLPNEDPEIFDVSSKCLSILVQLYGGENPDSLSPENVEIFAHLLTSKEDPKEQKLLLRILRRMITSNEKHLESLKNAGSLLRALERLAPGSGSFADSAVAPLALEILQAVGH

SEQ ID NO: 95744 - protein, 84 aa, Homo sapiens
  Payload ID: 19100
  Gene Name: unc-51 like kinase 4
  ENSP ID: ENSP00000391849
MENFILYEEIGRGSKTVVYKGRRKGTINFVAILCTDKCKRPEITNWVRLTREIKHKNIVTFHEWYETSNHLWLVVELCTGQDYG

SEQ ID NO: 95745 - protein, 84 aa, Homo sapiens; identical to SEQ ID NO: 95744
  Payload ID: 19100
  Gene Name: unc-51 like kinase 4
  ENSP ID: ENSP00000399382

SEQ ID NO: 95746 - protein, 84 aa, Homo sapiens; identical to SEQ ID NO: 95744
  Payload ID: 19100
  Gene Name: unc-51 like kinase 4
  ENSP ID: ENSP00000401414

SEQ ID NO: 95747 - protein, 580 aa, Homo sapiens
  Payload ID: 19100
  Gene Name: unc-51 like kinase 4
  ENSP ID: ENSP00000412187
MENFILYEEIGRGSKTVVYKGRRKGTINFVAILCTDKCKRPEITNWVRLTREIKHKNIVTFHEWYETSNHLWLVVELCTGGSLKTVIAQDENLPEDVVREFGIDLISGLHHLHKLGILFCDISPRKILLEGPGTLKFSNFCLAKVEGENLEEFFALVAAEEGGGDNGENVLKKSMKSRVKGSPVYTAPEVVRGADFSISSDLWSLGCLLYEMFSGKPPFFSESISELTEKILCEDPLPPIPKDSSRPKASSDFINLLDGLLQRDPQKRLTWTRLLQHSFWKKAFAGADQESSVEDLSLSRNTMECSGPQDSKELLQNSQSRQAKGHKSGQPLGHSFRLENPTEFRPKSTLEGQLNESMFLLSSRPTPRTSTAVEVSPGEDMTHCSPQKTSPLTKITSGHLSQQDLESQMRELIYTDSDLVVTPIIDNPKIMKQPPVKFDAKILHLPTYSVDKLLFLKDQDWNDFLQQVCSQIDSTEKSMGASRAKLNLLCYLCVVAGHQEVATRLLHSPLFQLLIQHLRIAPNWDIRAKVAHVIGLLASHTAELQENTPVVETTSSIGIGILNCLVQHSTPVPRQCLVYV

SEQ ID NO: 95748 - protein, 2458 aa, Homo sapiens
  Payload ID: 19101
  Gene Name: unc-79 homolog (C. elegans)
  Uniprot ID: Q9P2D8
  ENSP ID: ENSP00000256339
MISTLATFPPFLHKDIIEYLSTSFLPMAILGSSRREGVPAHVNLSASSMLMIAMQYTSNPVYHCQLLECLMKYKQEVWKDLLYVIAYGPSQVKPPAVQMLFHYWPNLKPPGAISEYRGLQYTAWNPIHCQHIECHNAINKPAVKMCIDPSLSVALGDKPPPLYLCEECSERIAGDHSEWLIDVLLPQAEISAICQKKNCSSHVRRAVVTCFSAGCCGRHGNRPVRYCKRCHSNHHSNEVGAAAETHLYQTSPPPINTRECGAEELVCAVEAVISLLKEAEFHAEQREHELNRRRQLGLSSSHHSLDNADFDNKDDDKHDQRLLSQFGIWFLVSLCTPSENTPTESLARLVAMVFQWFHSTAYMMDDEVGSLVEKLKPQFVTKWLKTVCDVRFDVMVMCLLPKPMEFARVGGYWDKSCSTVTQLKEGLNRILCLIPYNVINQSVWECIMPEWLEAIRTEVPDNQLKEFREVLSKMFDIELCPLPFSMEEMFGFISCRFTGYPSSVQEQALLWLHVLSELDIMVPLQLLISMFSDGVNSVKELANQRKSRVSELAGNLASRRVSVASDPGRRVQHNMLSPFHSPFQSPFRSPLRSPFRSPFKNFGHPGGRTIDFDCEDDEMNLNCFILMFDLLLKQMELQDDGITMGLEHSLSKDIISIINNVFQAPWGGSHTCQKDEKAIECNLCQSSILCYQLACELLERLAPKEESRLVEPTDSLEDSLLSSRPEFIIGPEGEEEENPASKHGENPGNCTEPVEHAAVKNDTERKFCYQQLPVTLRLIYTIFQEMAKFEEPDILFNMLNCLKILCLHGECLYIARKDHPQFLAYIQDHMLIASLWRVVKSEFSQLSSLAVPLLLHALSLPHGADIFWTIINGNFNSKDWKMRFEAVEKVAVICRFLDIHSVTKNHLLKYSLAHAFCCFLTAVEDVNPAVATRAGLLLDTIKRPALQGLCLCLDFQFDTVVKDRPTILSKLLLLHFLKQDIPALSWEFFVNRFETLSLEAQLHLDCNKEFPFPTTITAVRTNVANLSDAALWKIKRARFARNRQKSVRSLRDSVKGPVESKRALSLPETLTSKIRQQSPENDNTIKDLLPEDAGIDHQTVHQLITVLMKFMAKDESSAESDISSAKAFNTVKRHLYVLLGYDQQEGCFMIAPQKMRLSTCFNAFIAGIAQVMDYNINLGKHLLPLVVQVLKYCSCPQLRHYFQQPPRCSLWSLKPHIRQMWLKALLVILYKYPYRDCDISKILLHLIHITVNTLNAQYHSCKPHATAGPLYSDNSNISRYSEKEKGEIELAEYRETGALQDSLLHCVREESIPKKKLRSFKQKSLDIGNADSLLFTLDEHRRKSCIDRCDIEKPPTQAAYIAQRPNDPGRSRQNSATRPDNSEIPENPAMEGFPDARRPVIPEVRLNCMETFEVKVDSPVKPAPKEDLDLIDLSSDSTSGPEKHSILSTSDSDSLVFEPLPPLRIVESDEEEETMNQGDDGPSGKNAASSPSVPSHPSVLSLSTAPLVQVSVEDCSKDFSSKDSGNNQSAGNTDSALITLEDPMDAEGSSKPEELPEFSCGSPLTLKQKRDLLQKSFALPEMSLDDHPDPGTEGEKPGELMPSSGAKTVLLKVPEDAENPTESEKPDTSAESDTEQNPERKVEEDGAEESEFKIQIVPRQRKQRKIAVSAIQREYLDISFNILDKLGEQKDPDPSTKGLSTLEMPRESSSAPTLDAGVPETSSHSSISTQYRQMKRGSLGVLTMSQLMKRQLEHQSSAPHNISNWDTEQIQPGKRQCNVPTCLNPDLEGQPLRMRGATKSSLLSAPSIVSMFVPAPEEFTDEQPTVMTDKCHDCGAILEEYDEETLGLAIVVLSTFIHLSPDLAAPLLLDIMQSVGRLASSTTFSNQAESMMVPGNAAGVAKQFLRCIFHQLAPNGIFPQLFQSTIKDGTFLRTLASSLMDFNELSSIAALSQLLEGLNNKKNLPAGGAMIRCLENIATFMEALPMDSPSSLWTTISNQFQTFFAKLPCVLPLKCSLDSSLRIMICLLKIPSTNATRSLLEPFSKLLSFVIQNAVFTLAYLVELCGLCYRAFTKERDKFYLSRSVVLELLQALKLKSPLPDTNLLLLVQFICADAGTKLAESTILSKQMIASVPGCGTAAMECVRQYINEVLDFMADMHTLTKLKSHMKTCSQPLHEDTFGGHLKVGLAQIAAMDISRGNHRDNKAVIRYLPWLYHPPSAMQQGPKEFIECVSHIRLLSWLLLGSLTHNAVCPNASSPCLPIPLDAGSHVADHLIVILIGFPEQSKTSVLHMCSLFHAFIFAQLWTVYCEQSAVATNLQNQNEFSFTAILTALEFWSRVTPSILQLMAHNKVMVEMVCLHVISLMEALQECNSTIFVKLIPMWLPMIQSNIKHLSAGLQLRLQAIQNHVNHHSLRTLPGSGQSSAGLAALRKWLQCTQFKMAQVEIQSSEAASQFYPL

SEQ ID NO: 95749 - protein, 2635 aa, Homo sapiens
  Payload ID: 19101
  Gene Name: unc-79 homolog (C. elegans)
  Uniprot ID: Q9P2D8
  ENSP ID: ENSP00000376858
MSTKAEQFASKIRYLQEYHNRVLHNIYPVPSGTDIANTLKYFSQTLLSILSRTGKKENQDASNLTVPMTMCLFPVPFPLTPSLRPQVSSINPTVTRSLLYSVLRDAPSERGPQSRDAQLSDYPSLDYQGLYVTLVTLLDLVPLLQHGQHDLGQSIFYTTTCLLPFLNDDILSTLPYTMISTLATFPPFLHKDIIEYLSTSFLPMAILGSSRREGVPAHVNLSASSMLMIAMQYTSNPVYHCQLLECLMKYKQEVWKDLLYVIAYGPSQVKPPAVQMLFHYWPNLKPPGAISEYRGLQYTAWNPIHCQHIECHNAINKPAVKMCIDPSLSVALGDKPPPLYLCEECSERIAGDHSEWLIDVLLPQAEISAICQKKNCSSHVRRAVVTCFSAGCCGRHGNRPVRYCKRCHSNHHSNEVGAAAETHLYQTSPPPINTRECGAEELVCAVEAVISLLKEAEFHAEQREHELNRRRQLGLSSSHHSLDNADFDNKDDDKHDQRLLSQFGIWFLVSLCTPSENTPTESLARLVAMVFQWFHSTAYMMDDEVGSLVEKLKPQFVTKWLKTVCDVRFDVMVMCLLPKPMEFARVGGYWDKSCSTVTQLKEGLNRILCLIPYNVINQSVWECIMPEWLEAIRTEVPDNQLKEFREVLSKMFDIELCPLPFSMEEMFGFISCRFTGYPSSVQEQALLWLHVLSELDIMVPLQLLISMFSDGVNSVKELANQRKSRVSELAGNLASRRVSVASDPGRRVQHNMLSPFHSPFQSPFRSPLRSPFRSPFKNFGHPGGRTIDFDCEDDEMNLNCFILMFDLLLKQMELQDDGITMGLEHSLSKDIISIINNVFQAPWGGSHTCQKDEKAIECNLCQSSILCYQLACELLERLAPKEESRLVEPTDSLEDSLLSSRPEFIIGPEGEEEENPASKHGENPGNCTEPVEHAAVKNDTERKFCYQQLPVTLRLIYTIFQEMAKFEEPDILFNMLNCLKILCLHGECLYIARKDHPQFLAYIQDHMLIASLWRVVKSEFSQLSSLAVPLLLHALSLPHGADIFWTIINGNFNSKDWKMRFEAVEKVAVICRFLDIHSVTKNHLLKYSLAHAFCCFLTAVEDVNPAVATRAGLLLDTIKRPALQGLCLCLDFQFDTVVKDRPTILSKLLLLHFLKQDIPALSWEFFVNRFETLSLEAQLHLDCNKEFPFPTTITAVRTNVANLSDAALWKIKRARFARNRQKSVRSLRDSVKGPVESKRALSLPETLTSKIRQQSPENDNTIKDLLPEDAGIDHQTVHQLITVLMKFMAKDESSAESDISSAKAFNTVKRHLYVLLGYDQQEGCFMIAPQKMRLSTCFNAFIAGIAQVMDYNINLGKHLLPLVVQVLKYCSCPQLRHYFQQPPRCSLWSLKPHIRQMWLKALLVILYKYPYRDCDISKILLHLIHITVNTLNAQYHSCKPHATAGPLYSDNSNISRYSEKEKGEIELAEYRETGALQDSLLHCVREESIPKKKLRSFKQKSLDIGNADSLLFTLDEHRRKSCIDRCDIEKPPTQAAYIAQRPNDPGRSRQNSATRPDNSEIPENPAMEGFPDARRPVIPEVRLNCMETFEVKVDSPVKPAPKEDLDLIDLSSDSTSGPEKHSILSTSDSDSLVFEPLPPLRIVESDEEEETMNQGDDGPSGKNAASSPSVPSHPSVLSLSTAPLVQVSVEDCSKDFSSKDSGNNQSAGNTDSALITLEDPMDAEGSSKPEELPEFSCGSPLTLKQKRDLLQKSFALPEMSLDDHPDPGTEGEKPGELMPSSGAKTVLLKVPEDAENPTESEKPDTSAESDTEQNPERKVEEDGAEESEFKIQIVPRQRKQRKIAVSAIQREYLDISFNILDKLGEQKDPDPSTKGLSTLEMPRESSSAPTLDAGVPETSSHSSISTQYRQMKRGSLGVLTMSQLMKRQLEHQSSAPHNISNWDTEQIQPGKRQCNVPTCLNPDLEGQPLRMRGATKSSLLSAPSIVSMFVPAPEEFTDEQPTVMTDKCHDCGAILEEYDEETLGLAIVVLSTFIHLSPDLAAPLLLDIMQSVGRLASSTTFSNQAESMMVPGNAAGVAKQFLRCIFHQLAPNGIFPQLFQSTIKDGTFLRTLASSLMDFNELSSIAALSQLLEGLNNKKNLPAGGAMIRCLENIATFMEALPMDSPSSLWTTISNQFQTFFAKLPCVLPLKCSLDSSLRIMICLLKIPSTNATRSLLEPFSKLLSFVIQNAVFTLAYLVELCGLCYRAFTKERDKFYLSRSVVLELLQALKLKSPLPDTNLLLLVQFICADAGTKLAESTILSKQMIASVPGCGTAAMECVRQYINEVLDFMADMHTLTKLKSHMKTCSQPLHEDTFGGHLKVGLAQIAAMDISRGNHRDNKAVIRYLPWLYHPPSAMQQGPKEFIECVSHIRLLSWLLLGSLTHNAVCPNASSPCLPIPLDAGSHVADHLIVILIGFPEQSKTSVLHMCSLFHAFIFAQLWTVYCEQSAVATNLQNQNEFSFTAILTALEFWSRVTPSILQLMAHNKVMVEMVCLHVISLMEALQECNSTIFVKLIPMWLPMIQSNIKHLSAGLQLRLQAIQNHVNHHSLRTLPGSGQSSAGLAALRKWLQCTQFKMAQVEIQSSEAASQFYPL

SEQ ID NO: 95750 - protein, 2596 aa, Homo sapiens
  Payload ID: 19101
  Gene Name: unc-79 homolog (C. elegans)
  ENSP ID: ENSP00000450868
MSTKAEQFASKIRYLQEYHNRVLHNIYPVPSGTDIANTLKYFSQTLLSILSRTGKKENQDASNLTVPMTMCLFPVPFPLTPSLRPQVSSINPTVTRSLLYSVLRDAPSERGPQSRDAQLSDYPSLDYQGLYVTLVTLLDLVPLLQHGQHDLGQSIFYTTTCLLPFLNDDILSTLPYTMISTLATFPPFLHKDIIEYLSTSFLPMAILGSSRREGVPAHVNLSASSMLMIAMQYTSNPVYHCQLLECLMKYKQEVWKDLLYVIAYGPSQVKPPAVQMLFHYWPNLKPPGAISEYRGLQYTAWNPIHCQHIECHNAINKPAVKMCIDPSLSVALGDKPPPLYLCEECSERIAGDHSEWLIDVLLPQAEISAICQKKNCSSHVRRAVVTCFSAGCCGRHGNRPVRYCKRCHSNHHSNEVGAAAETHLYQTSPPPINTRECGAEELVCAVEAVISLLKEAEFHAEQREHELNRRRQLGLSSSHHSLDNADFDNKDDDKHDQRLLSQFGIWFLVSLCTPSENTPTESLARLVAMVFQWFHSTAYMMDDEVGSLVEKLKPQFVTKWLKTVCDVRFDVMVMCLLPKPMEFARVGGYWDKSCSTVTQLKEGLNRILCLIPYNVINQSVWECIMPEWLEAIRTEVPDNQLKEFREVLSKMFDIELCPLPFSMEEMFGFISCRFTGYPSSVQEQALLWLHVLSELDIMVPLQLLISMFSDGVNSVKELANQRKSRVSELAGNLASRRVSVASDPGRRVQHNMLSPFHSPFQSPFRSPLRSPFRSPFKNFGHPGGRTIDFDCEDDEMNLNCFILMFDLLLKQMELQDDGITMGLEHSLSKDIISIINNVFQAPWGGSHTCQKDEKAIECNLCQSSILCYQLACELLERLAPKEESRLVEPTDSLEDSLLSSRPEFIIGPEGEEEENPASKHGENPGNCTEPVEHAAVKNDTERKFCYQQLPVTLRLIYTIFQEMAKFEEPDILFNMLNCLKILCLHGECLYIARKDHPQFLAYIQDHMLIASLWRVVKSEFSQLSSLAVPLLLHALSLPHGADIFWTIINGNFNSKDWKMRFEAVEKVAVICRFLDIHSVTKNHLLKYSLAHAFCCFLTAVEDVNPAVATRAGLLLDTIKRPALQGLCLCLDFQFDTVVKDRPTILSKLLLLHFLKQDIPALSWEFFVNRFETLSLEAQLHLDCNKEFPFPTTITAVRTNVANLSDAALWKIKRARFARNRQKSVRSLRDSVKGPVESKRALSLPETLTSKIRQQSPENDNTIKDLLPEDAGIDHQTVHQLITVLMKFMAKDESSAESDISSAKAFNTVKRHLYVLLGYDQQEGCFMIAPQKMRLSTCFNAFIAGIAQVMDYNINLGKHLLPLVVQVLKYCSCPQLRHYFQQPPRCSLWSLKPHIRQMWLKALLVILYKYPYRDCDISKILLHLIHITVNTLNAQYHSCKPHATAGPLYSDNSNISRYSEKEKGEIELAEYRETGALQDSLLHCVREESIPKKKLRSFKQKSLDIGNADSLLFTLDEHRRKSCIDRCDIEKPPTQAAYIAQRPNDPGRSRQNSATRPDNSEIPENPAMEGFPDARRPVIPEVRLNCMETFEVKVDSPVKPAPKEDLDLIDLSSDSTSGPEKHSILSTSDSDSLVFEPLPPLRIVESDEEEETMNQGDDGPSGKNAASSPSVPSHPSVLSLSTAPLVQVSVEDCSKDFSSKDSGNNQSAGNTDSALITLEDPMDAEGSSKPEELPEFSCGSPLTLKQKRDLLQKSFALPEMSLDDHPDPGTEGEKPGELMPSSGAKTVLLKVPEDAENPTESEKPDTSAESDTEQNPERKVEEDGAEESEFKIQIVPRQRKQRKIAVSAIQREYLDISFNILDKLGEQKDPDPSTKGLSTLEMPRESSSAPTLDAGVPETSSHSSISKQIQPGKRQCNVPTCLNPDLEGQPLRMRGATKSSLLSAPSIVSMFVPAPEEFTDEQPTVMTDKCHDCGAILEEYDEETLGLAIVVLSTFIHLSPDLAAPLLLDIMQSVGRLASSTTFSNQAESMMVPGNAAGVAKQFLRCIFHQLAPNGIFPQLFQSTIKDGTFLRTLASSLMDFNELSSIAALSQLLEGLNNKKNLPAGGAMIRCLENIATFMEALPMDSPSSLWTTISNQFQTFFAKLPCVLPLKCSLDSSLRIMICLLKIPSTNATRSLLEPFSKLLSFVIQNAVFTLAYLVELCGLCYRAFTKERDKFYLSRSVVLELLQALKLKSPLPDTNLLLLVQFICADAGTKLAESTILSKQMIASVPGCGTAAMECVRQYINEVLDFMADMHTLTKLKSHMKTCSQPLHEDTFGGHLKVGLAQIAAMDISRGNHRDNKAVIRYLPWLYHPPSAMQQGPKEFIECVSHIRLLSWLLLGSLTHNAVCPNASSPCLPIPLDAGSHVADHLIVILIGFPEQSKTSVLHMCSLFHAFIFAQLWTVYCEQSAVATNLQNQNEFSFTAILTALEFWSRVTPSILQLMAHNKVMVEMVCLHVISLMEALQECNSTIFVKLIPMWLPMIQSNIKHLSAGLQLRLQAIQNHVNHHSLRTLPGSGQSSAGLAALRKWLQCTQFKMAQVEIQSSEAASQFYPL

SEQ ID NO: 95751 - protein, 2657 aa, Homo sapiens
  Payload ID: 19101
  Gene Name: unc-79 homolog (C. elegans)
  Uniprot ID: Q9P2D8
  ENSP ID: ENSP00000451360
MSTKAEQFASKIRYLQEYHNRVLHNIYPVPSGTDIANTLKYFSQTLLSILSRTGKKENQDASNLTVPMTMCLFPVPFPLTPSLRPQVSSINPTVTRSLLYSVLRDAPSERGPQSRDAQLSDYPSLDYQGLYVTLVTLLDLVPLLQHGQHDLGQSIFYTTTCLLPFLNDDILSTLPYTMISTLATFPPFLHKDIIEYLSTSFLPMAILGSSRREGVPAHVNLSASSMLMIAMQYTSNPVYHCQLLECLMKYKQEVWKDLLYVIAYGPSQVKPPAVQMLFHYWPNLKPPGAISEYRGLQYTAWNPIHCQHIECHNAINKPAVKMCIDPSLSVALGDKPPPLYLCEECSERIAGDHSEWLIDVLLPQAEISAICQKKNCSSHVRRAVVTCFSAGCCGRHGNRPVRYCKRCHSNHHSNEVGAAAETHLYQTSPPPINTRECGAEELVCAVEAVISLLKEAEFHAEQREHELNRRRQLGLSSSHHSLDNADFDNKDDDKHDQRLLSQFGIWFLVSLCTPSENTPTESLARLVAMVFQWFHSTAYMMDDEVGSLVEKLKPQFVTKWLKTVCDVRFDVMVMCLLPKPMEFARVGGYWDKSCSTVTQLKEGLNRILCLIPYNVINQSVWECIMPEWLEAIRTEVPDNQLKEFREVLSKMFDIELCPLPFSMEEMFGFISCRFTGYPSSVQEQALLWLHVLSELDIMVPLQLLISMFSDGVNSVKELANQRKSRVSELAGNLASRRVSVASDPGRRVQHNMLSPFHSPFQSPFRSPLRSPFRSPFKNFGHPGGRTIDFDCEDDEMNLNCFILMFDLLLKQMELQDDGITMGLEHSLSKDIISIINNVFQAPWGGSHTCQKDEKAIECNLCQSSILCYQLACELLERLAPKEESRLVEPTDSLEDSLLSSRPEFIIGPEGEEEENPASKHGENPGNCTEPVEHAAVKNDTERKFCYQQLPVTLRLIYTIFQEMAKFEEPDILFNMLNCLKILCLHGECLYIARKDHPQFLAYIQDHMLIASLWRVVKSEFSQLSSLAVPLLLHALSLPHGADIFWTIINGNFNSKDWKMRFEAVEKVAVICRFLDIHSVTKNHLLKYSLAHAFCCFLTAVEDVNPAVATRAGLLLDTIKRPALQGLCLCLDFQFDTVVKDRPTILSKLLLLHFLKQDIPALSWEFFVNRFETLSLEAQLHLDCNKEFPFPTTITAVRTNVANLSDAALWKIKRARFARNRQKSVRSLRDSVKGPVESKRALSLPETLTSKIPMRLTRHEQSAPALGGTPEQTPGQQSPENDNTIKDLLPEDAGIDHQTVHQLITVLMKFMAKDESSAESDISSAKAFNTVKRHLYVLLGYDQQEGCFMIAPQKMRLSTCFNAFIAGIAQVMDYNINLGKHLLPLVVQVLKYCSCPQLRHYFQQPPRCSLWSLKPHIRQMWLKALLVILYKYPYRDCDISKILLHLIHITVNTLNAQYHSCKPHATAGPLYSDNSNISRYSEKEKGEIELAEYRETGALQDSLLHCVREESIPKKKLRSFKQKSLDIGNADSLLFTLDEHRRKSCIDRCDIEKPPTQAAYIAQRPNDPGRSRQNSATRPDNSEIPENPAMEGFPDARRPVIPEVRLNCMETFEVKVDSPVKPAPKEDLDLIDLSSDSTSGPEKHSILSTSDSDSLVFEPLPPLRIVESDEEEETMNQGDDGPSGKNAASSPSVPSHPSVLSLSTAPLVQVSVEDCSKDFSSKDSGNNQSAGNTDSALITLEDPMDAEGSSKPEELPEFSCGSPLTLKQKRDLLQKSFALPEMSLDDHPDPGTEGEKPGELMPSSGAKTVLLKVPEDAENPTESEKPDTSAESDTEQNPERKVEEDGAEESEFKIQIVPRQRKQRKIAVSAIQREYLDISFNILDKLGEQKDPDPSTKGLSTLEMPRESSSAPTLDAGVPETSSHSSISTQYRQMKRGSLGVLTMSQLMKRQLEHQSSAPHNISNWDTEQIQPGKRQCNVPTCLNPDLEGQPLRMRGATKSSLLSAPSIVSMFVPAPEEFTDEQPTVMTDKCHDCGAILEEYDEETLGLAIVVLSTFIHLSPDLAAPLLLDIMQSVGRLASSTTFSNQAESMMVPGNAAGVAKQFLRCIFHQLAPNGIFPQLFQSTIKDGTFLRTLASSLMDFNELSSIAALSQLLEGLNNKKNLPAGGAMIRCLENIATFMEALPMDSPSSLWTTISNQFQTFFAKLPCVLPLKCSLDSSLRIMICLLKIPSTNATRSLLEPFSKLLSFVIQNAVFTLAYLVELCGLCYRAFTKERDKFYLSRSVVLELLQALKLKSPLPDTNLLLLVQFICADAGTKLAESTILSKQMIASVPGCGTAAMECVRQYINEVLDFMADMHTLTKLKSHMKTCSQPLHEDTFGGHLKVGLAQIAAMDISRGNHRDNKAVIRYLPWLYHPPSAMQQGPKEFIECVSHIRLLSWLLLGSLTHNAVCPNASSPCLPIPLDAGSHVADHLIVILIGFPEQSKTSVLHMCSLFHAFIFAQLWTVYCEQSAVATNLQNQNEFSFTAILTALEFWSRVTPSILQLMAHNKVMVEMVCLHVISLMEALQECNSTIFVKLIPMWLPMIQSNIKHLSAGLQLRLQAIQNHVNHHSLRTLPGSGQSSAGLAALRKWLQCTQFKMAQVEIQSSEAASQFYPL

SEQ ID NO: 95752 - protein, 2458 aa, Homo sapiens; identical to SEQ ID NO: 95748
  Payload ID: 19101
  Gene Name: unc-79 homolog (C. elegans)
  Uniprot ID: Q9P2D8
  ENSP ID: ENSP00000479521

SEQ ID NO: 95753 - protein, 2458 aa, Homo sapiens; identical to SEQ ID NO: 95748
  Payload ID: 19101
  Gene Name: unc-79 homolog (C. elegans)
  Uniprot ID: Q9P2D8
  ENSP ID: ENSP00000480937

SEQ ID NO: 95754 - protein, 2458 aa, Homo sapiens; identical to SEQ ID NO: 95748
  Payload ID: 19101
  Gene Name: unc-79 homolog (C. elegans)
  Uniprot ID: Q9P2D8
  ENSP ID: ENSP00000485969

SEQ ID NO: 95755 - protein, 2657 aa, Homo sapiens; identical to SEQ ID NO: 95751
  Payload ID: 19101
  Gene Name: unc-79 homolog (C. elegans)
  Uniprot ID: Q9P2D8
  ENSP ID: ENSP00000486167

SEQ ID NO: 95756 - protein, 2635 aa, Homo sapiens; identical to SEQ ID NO: 95749
  Payload ID: 19101
  Gene Name: unc-79 homolog (C. elegans)
  Uniprot ID: Q9P2D8
  ENSP ID: ENSP00000487436

SEQ ID NO: 95757 - protein, 2596 aa, Homo sapiens; identical to SEQ ID NO: 95750
  Payload ID: 19101
  Gene Name: unc-79 homolog (C. elegans)
  ENSP ID: ENSP00000487503

SEQ ID NO: 95758 - protein, 3234 aa, Homo sapiens
  Payload ID: 19102
  Gene Name: unc-80 homolog (C. elegans)
  Uniprot ID: Q8N2C7
  ENSP ID: ENSP00000272845
MVKRKSSEGQEQDGGRGIPLPIQTFLWRQTSAFLRPKLGKQYEASCVSFERVLVENKLHGLSPALSEAIQSISRWELVQAALPHVLHCTATLLSNRNKLGHQDKLGVAETKLLHTLHWMLLEAPQDCNNERFGGTDRGSSWGGSSSAFIHQVENQGSPGQPCQSSSNDEEENNRRKIFQNSMATVELFVFLFAPLVHRIKESDLTFRLASGLVIWQPMWEHRQPGVSGFTALVKPIRNIITAKRSSPINSQSRTCESPNQDARHLEGLQVVCETFQSDSISPKATISGCHRGNSFDGSLSSQTSQERGPSHSRASLVIPPCQRSRYATYFDVAVLRCLLQPHWSEEGTQWSLMYYLQRLRHMLEEKPEKPPEPDIPLLPRPRSSSMVAAAPSLVNTHKTQDLTMKCNEEEKSLSSEAFSKVSLTNLRRSAVPDLSSDLGMNIFKKFKSRKEDRERKGSIPFHHTGKRRPRRMGVPFLLHEDHLDVSPTRSTFSFGSFSGLGEDRRGIEKGGWQTTILGKLTRRGSSDAATEMESLSARHSHSHHTLVSDLPDPSNSHGENTVKEVRSQISTITVATFNTTLASFNVGYADFFNEHMRKLCNQVPIPEMPHEPLACANLPRSLTDSCINYSYLEDTEHIDGTNNFVHKNGMLDLSVVLKAVYLVLNHDISSRICDVALNIVECLLQLGVVPCVEKNRKKSENKENETLEKRPSEGAFQFKGVSGSSTCGFGGPAVSGAGDGGGEEGGGGDGGGGGGDGGGGGGGGGGPYEKNDKNQEKDESTPVSNHRLALTMLIKIVKSLGCAYGCGEGHRGLSGDRLRHQAQNCLTKLYKLDKMQFRQTMRDYVNKDSLNNVVDFLHALLGFCMEPVTDNKAGFGNNFTTVDNKSTAQNVEGIIVSAMFKSLITRCASTTHELHSPENLGLYCDIRQLVQFIKEAHGNVFRRVALSALLDSAEKLAPGKKVEENEQESKPAGSKRSEAGSIVDKGQVSSAPEECRSFMSGRPSQTPEHDEQMQGANLGRKDFWRKMFKSQSAASDTSSQSEQDTSECTTAHSGTTSDRRARSRSRRISLRKKLKLPIGKRNWLKRSSLSGLADGVEDLLDISSVDRLSFIRQSSKVKFTSAVKLSEGGPGSGMENGRDEEENFFKRLGCHSFDDHLSPNQDGGKSKNVVNLGAIRQGMKRFQFLLNCCEPGTIPDASILAAALDLEAPVVARAALFLECARFVHRCNRGNWPEWMKGHHVNITKKGLSRGRSPIVGNKRNQKLQWNAAKLFYQWGDAIGVRLNELCHGESESPANLLGLIYDEETKRRLRKEDEEEDFLDDSTVNPSKCGCPFALKMAACQLLLEITTFLRETFSCLPRPRTEPLVDLESCRLRLDPELDRHRYERKISFAGVLDENEDSKDSLHSSSHTLKSDAGVEEKKEGSPWSASEPSIEPEGMSNAGAEENYHRNMSWLHVMILLCNQQSFICTHVDYCHPHCYLHHSRSCARLVRAIKLLYGDSVDSLRESSNISSVALRGKKQKECSDKSCLRTPSLKKRVSDANLEGKKDSGMLKYIRLQVMSLSPAPLSLLIKAAPILTEEMYGDIQPAAWELLLSMDEHMAGAAAAMFLLCAVKVPEAVSDMLMSEFHHPETVQRLNAVLKFHTLWRFRYQVWPRMEEGAQQIFKIPPPSINFTLPSPVLGMPSVPMFDPPWVPQCSGSVQDPINEDQSKSFSARAVSRSHQRAEHILKNLQQEEEKKRLGREASLITAIPITQEACYEPTCTPNSEPEEEVEEVTNLASRRLSVSPSCTSSTSHRNYSFRRGSVWSVRSAVSAEDEEHTTEHTPNHHVPQPPQAVFPACICAAVLPIVHLMEDGEVREDGVAVSAVAQQVLWNCLIEDPSTVLRHFLEKLTISNRQDELMYMLRKLLLNIGDFPAQTSHILFNYLVGLIMYFVRTPCEWGMDAISATLTFLWEVVGYVEGLFFKDLKQTMKKEQCEVKLLVTASMPGTKTLVVHGQNECDIPTQLPVHEDTQFEALLKECLEFFNIPESQSTHYFLMDKRWNLIHYNKTYVRDIYPFRRSVSPQLNLVHMHPEKGQELIQKQVFTRKLEEVGRVLFLISLTQKIPTAHKQSHVSMLQEDLLRLPSFPRSAIDAEFSLFSDPQAGKELFGLDTLQKSLWIQLLEEMFLGMPSEFPWGDEIMLFLNVFNGALILHPEDSALLRQYAATVINTAVHFNHLFSLSGYQWILPTMLQVYSDYESNPQLRQAIEFACHQFYILHRKPFVLQLFASVAPLLEFPDAANNGPSKGVSAQCLFDLLQSLEGETTDILDILELVKAEKPLKSLDFCYGNEDLTFSISEAIKLCVTVVAYAPESFRSLQMLMVLEALVPCYLQKLKRQTSQVETVPAAREEIAATAALATSLQALLYSVEVLTRPMTAPQMSRCDQGHKGTTTANHTMSSGVNTRYQEQGAKLHFIRENLHLLEEGQGIPREELDERIAREEFRRPRESLLNICTEFYKHCGPRLKILQNLAGEPRVIALELLDVKSHMRLAEIAHSLLKLAPYDTQTMESRGLRRYIMEMLPITDWTAEAVRPALILILKRLDRMFNKIHKMPTLRRQVEWEPASNLIEGVCLTLQRQPIISFLPHLRSLINVCVNLVMGVVGPSSVADGLPLLHLSPYLSPPLPFSTAVVRLVALQIQALKEDFPLSHVISPFTNQERREGMLLNLLIPFVLTVGSGSKDSPWLEQPEVQLLLQTVINVLLPPRIISTSRSKNFMLESSPAHCSTPGDAGKDLRREGLAESTSQAAYLALKVILVCFERQLGSQWYWLSLQVKEMALRKVGGLALWDFLDFIVRTRIPIFVLLRPFIQCKLLAQPAENHEELSARQHIADQLERRFIPRPLCKSSLIAEFNSELKILKEAVHSGSAYQGKTSISTVGTSTSAYRLSLATMSRSNTGTGTVWEQDSEPSQQASQDTLSRTDEEDEENDSISMPSVVSEQEAYLLSAIGRRRFSSHVSSMSVPQAEVGMLPSQRVASIQSEPGQQNLLVQQPLGRKRGLRQLRRPLLSRQKTQTEPRNRQGARLSTTRRSIQPKTKPSADQKRSVTFIEAQPEPAAAPTDALPATGQLQGCSPAPSRKPEAMDEPVLTSSPAIVVADLHSVSPKQSENFPTEEGEKEEDTEAQGATAHSPLSAQLSDPDDFTGLETSSLLQHGDTVLHISEENGMENPLLSSQFTFTPTELGKTDAVLDESHV

SEQ ID NO: 95759 - protein, 546 aa, Homo sapiens
  Payload ID: 19102
  Gene Name: unc-80 homolog (C. elegans)
  ENSP ID: ENSP00000335576
IPREELDERIAREEFRRPRESLLNICTEFYKHCGPRLKILQNLAGEPRVIALELLDVKSHMRLAEIAHSLLKLAPYDTQTMESRGLRRYIMEMLPITDWTAEAVRPALILILKRLDRMFNKIHKMPTLRRQVEWEPASNLIEGVCLTLQRQPIISFLPHLRSLINVCVNLVMGVVGPSSVADGLPLLHLSPYLSPPLPFSTAVVRLVALQIQALKEDFPLSHVISPFTNQERREGMLLNLLIPFVLTVGSGSKDSPWLEQPEVQLLLQTVINVLLPPRIISTSRSKNFMLESSPAHCSTPGDAGKDLRREGLAESTSQAAYLALKVILVCFERQLGSQWYWLSLQVKEMALRKVGGLALWDFLDFIVRTRIPIFVLLRPFIQCKLLAQPAENHEELSARQHIADQLERRFIPRPLCKSSLIAEFNSELKILKEAVHSGSAYQGKTSISTVGTSTSAYRLSLATMSRSNTGTGTVWEQDSEPSQQASQDTLSRTDEEDEENDSISMPSVVSEQEAYLLSAIGRRRFSSHVSSMSVPQAEVGMLPSQR

SEQ ID NO: 95760 - protein, 3258 aa, Homo sapiens
  Payload ID: 19102
  Gene Name: unc-80 homolog (C. elegans)
  Uniprot ID: Q8N2C7
  ENSP ID: ENSP00000391088
MVKRKSSEGQEQDGGRGIPLPIQTFLWRQTSAFLRPKLGKQYEASCVSFERVLVENKLHGLSPALSEAIQSISRWELVQAALPHVLHCTATLLSNRNKLGHQDKLGVAETKLLHTLHWMLLEAPQDCNNERFGGTDRGSSWGGSSSAFIHQVENQGSPGQPCQSSSNDEEENNRRKIFQNSMATVELFVFLFAPLVHRIKESDLTFRLASGLVIWQPMWEHRQPGVSGFTALVKPIRNIITAKRSSPINSQSRTCESPNQDARHLEGLQVVCETFQSDSISPKATISGCHRGNSFDGSLSSQTSQERGPSHSRASLVIPPCQRSRYATYFDVAVLRCLLQPHWSEEGTQWSLMYYLQRLRHMLEEKPEKPPEPDIPLLPRPRSSSMVAAAPSLVNTHKTQDLTMKCNEEEKSLSSEAFSKVSLTNLRRSAVPDLSSDLGMNIFKKFKSRKEDRERKGSIPFHHTGKRRPRRMGVPFLLHEDHLDVSPTRSTFSFGSFSGLGEDRRGIEKGGWQTTILGKLTRRGSSDAATEMESLSARHSHSHHTLVSDLPDPSNSHGENTVKEVRSQISTITVATFNTTLASFNVGYADFFNEHMRKLCNQVPIPEMPHEPLACANLPRSLTDSCINYSYLEDTEHIDGTNNFVHKNGMLDLSVVLKAVYLVLNHDISSRICDVALNIVECLLQLGVVPCVEKNRKKSENKENETLEKRPSEGAFQFKGVSGSSTCGFGGPAVSGAGDGGGEEGGGGDGGGGGGDGGGGGGGGGGPYEKNDKNQEKDESTPVSNHRLALTMLIKIVKSLGCAYGCGEGHRGLSGDRLRHQVFRENAQNCLTKLYKLDKMQFRQTMRDYVNKDSLNNVVDFLHALLGFCMEPVTDNKAGFGNNFTTVDNKSTAQNVEGIIVSAMFKSLITRCASTTHELHSPENLGLYCDIRQLVQFIKEAHGNVFRRVALSALLDSAEKLAPGKKVEENEQESKPAGSKRSEAGSIVDKGQVSSAPEECRSFMSGRPSQTPEHDEQMQGANLGRKDFWRKMFKSQSAASDTSSQSEQDTSECTTAHSGTTSDRRARSRSRRISLRKKLKLPIGKRNWLKRSSLSGLADGVEDLLDISSVDRLSFIRQSSKVKFTSAVKLSEGGPGSGMENGRDEEENFFKRLGCHSFDDHLSPNQDGGKSKNVVNLGAIRQGMKRFQFLLNCCEPGTIPDASILAAALDLEAPVVARAALFLECARFVHRCNRGNWPEWMKGHHVNITKKGLSRGRSPIVGNKRNQKLQWNAAKLFYQWGDAIGVRLNELCHGESESPANLLGLIYDEETKRRLRKEDEEEDFLDDSTVNPSKCGCPFALKMAACQLLLEITTFLRETFSCLPRPRTEPLVDLESCRLRLDPELDRHRYERKISFAGVLDENEDSKDSLHSSSHTLKSDAGVEEKKEGSPWSASEPSIEPEGMSNAGAEENYHRNMSWLHVMILLCNQQSFICTHVDYCHPHCYLHHSRSCARLVRAIKLLYGDSVDSLRESSNISSVALRGKKQKECSDKSCLRTPSLKKRVSDANLEGKKDSGMLKYIRLQVMSLSPAPLSLLIKAAPILTEEMYGDIQPAAWELLLSMDEHMAGAAAAMFLLCAVKVPEAVSDMLMSEFHHPETVQRLNAVLKFHTLWRFRYQVWPRMEEGAQQIFKIPPPSINFTLPSPVLGMPSVPMFDPPWVPQCSGSVQDPINEDQSKSFSARAVSRSHQRAEHILKNLQQEEEKKRLGREASLITAIPITQEACYEPTCTPNSEPEEEVEEVTNLASRRLSVSPSCTSSTSHRNYSFRRGSVWSVRSAVSAEDEEHTTEHTPNHHVPQPPQAVFPACICAAVLPIVHLMEDGEVREDGVAVSAVAQQVLWNCLIEDPSTVLRHFLEKLTISNRQDELMYMLRKLLLNIGDFPAQTSHILFNYLVGLIMYFVRTPCEWGMDAISATLTFLWEVVGYVEGLFFKDLKQTMKKEQCEVKLLVTASMPGTKTLVVHGQNECDIPTQLPVHEDTQFEALLKECLEFFNIPESQSTHYFLMDKRWNLIHYNKTYVRDIYPFRRSVSPQLNLVHMHPEKGQELIQKQVFTRKLEEVGRVLFLISLTQKIPTAHKQSHVSMLQEDLLRLPSFPRSAIDAEFSLFSDPQAGKELFGLDTLQKSLWIQLLEEMFLGMPSEFPWGDEIMLFLNVFNGALILHPEDSALLRQYAATVINTAVHFNHLFSLSGYQWILPTMLQVYSDYESNPQLRQAIEFACHQFYILHRKPFVLQLFASVAPLLEFPDAANNGPSKGVSAQCLFDLLQSLEGETTDILDILELVKAEKPLKSLDFCYGNEDLTFSISEAIKLCVTVVAYAPESFRSLQMLMVLEALVPCYLQKLKRQTSQVETVPAAREEIAATAALATSLQALLYSVEVLTRPMTAPQMSRCDQGHKGTTTANHTMSSGVNTRYQEQGAKLHFIRENLHLLEEGQGIPREELDERIAREEFRRPRESLLNICTEFYKHCGPRLKILQNLAGEPRVIALELLDVKSHMRLAEIAHSLLKLAPYDTQTMESRGLRRYIMEMLPITDWTAEAVRPALILILKRLDRMFNKIHKMPTLRRQVEWEPASNLIEGVCLTLQRQPIISFLPHLRSLINVCVNLVMGVVGPSSVADGLPLLHLSPYLSPPLPFSTAVVRLVALQIQALKEDFPLSHVISPFTNQERREGMLLNLLIPFVLTVGSGSKDSPWLEQPEVQLLLQTVINVLLPPRIISTSRSKNFMLESSPAHCSTPGDAGKDLRREGLAESTSQAAYLALKVILVCFERQLGSQWYWLSLQVKEMALRKVGGLALWDFLDFIVRTRIPIFVLLRPFIQCKLLAQPAENHEELSARQHIADQLERRFIPRPLCKSSLIAEFNSELKILKEAVHSGSAYQGKTSISTVGTSTSAYRLSLATMSRSNTGTGTVWEQDSEPSQQASQDTLSRTDEEDEENDSISMPSVVSEQEAYLLSAIGRRRFSSHVSSMSVPQAEVGMLPSQSEPNVLDDSQGLAAEGSLSRVASIQSEPGQQNLLVQQPLGRKRGLRQLRRPLLSRQKTQTEPRNRQGARLSTTRRSIQPKTKPSADQKRSVTFIEAQPEPAAAPTDALPATGQLQGCSPAPSRKPEAMDEPVLTSSPAIVVADLHSVSPKQSENFPTEEGEKEEDTEAQGATAHSPLSAQLSDPDDFTGLETSSLLQHGDTVLHISEENGMENPLLSSQFTFTPTELGKTDAVLDESHV

SEQ ID NO: 95761 - protein, 457 aa, Homo sapiens
  Payload ID: 19103
  Gene Name: unc-93 homolog A (C. elegans)
  Uniprot ID: Q86WB7
  ENSP ID: ENSP00000230256
MDRSLRNVLVVSFGFLLLFTAYGGLQSLQSSLYSEEGLGVTALSTLYGGMLLSSMFLPPLLIERLGCKGTIILSMCGYVAFSVGNFFASWYTLIPTSILLGLGAAPLWSAQCTYLTITGNTHAEKAGKRGKDMVNQYFGIFFLIFQSSGVWGNLISSLVFGQTPSQETLPEEQLTSCGASDCLMATTTTNSTQRPSQQLVYTLLGIYTGSGVLAVLMIAAFLQPIRDVQRESEGEKKSVPFWSTLLSTFKLYRDKRLCLLILLPLYSGLQQGFLSSEYTRSYVTCTLGIQFVGYVMICFSATDALCSVLYGKVSQYTGRAVLYVLGAVTHVSCMIALLLWRPRADHLAVFFVFSGLWGVADAVWQTQNNALYGVLFEKSKEAAFANYRLWEALGFVIAFGYSMFLCVHVKLYILLGVLSLTMVAYGLVECVESKNPIRPHAPGQVNQAEDEEIQTKM

SEQ ID NO: 95762 - protein, 415 aa, Homo sapiens
  Payload ID: 19103
  Gene Name: unc-93 homolog A (C. elegans)
  Uniprot ID: Q86WB7
  ENSP ID: ENSP00000355794
MDRSLRNVLVVSFGFLLLFTAYGGLQSLQSSLYSEEGLGVTALSTLYGGMLLSSMFLPPLLIERLGCKGTIILSMCGYVAFSVGNFFASWYTLIPTSILLGLGAAPLWSAQCTYLTITGNTHAEKAGKRGKDMVNQYFGIFFLIFQSSGVWGNLISSLVFGQTPSQGSGVLAVLMIAAFLQPIRDVQRESEGEKKSVPFWSTLLSTFKLYRDKRLCLLILLPLYSGLQQGFLSSEYTRSYVTCTLGIQFVGYVMICFSATDALCSVLYGKVSQYTGRAVLYVLGAVTHVSCMIALLLWRPRADHLAVFFVFSGLWGVADAVWQTQNNALYGVLFEKSKEAAFANYRLWEALGFVIAFGYSMFLCVHVKLYILLGVLSLTMVAYGLVECVESKNPIRPHAPGQVNQAEDEEIQTKM

SEQ ID NO: 95763 - protein, 144 aa, Homo sapiens
  Payload ID: 19103
  Gene Name: unc-93 homolog A (C. elegans)
  ENSP ID: ENSP00000421484
MDRSLRNVLVVSFGFLLLFTAYGGLQSLQSSLYSEEGLGVTALSTLYGGMLLSSMFLPPLLIERLGCKGTIILSMCGYVAFSVGNFFASWYTLIPTSILLGLGAAPLWSAQCTYLTITGNTHAEKAGKRGKDMVNQYFGIFFLI

SEQ ID NO: 95764 - protein, 597 aa, Homo sapiens
  Payload ID: 19104
  Gene Name: unc-93 homolog B1 (C. elegans)
  Uniprot ID: Q9H1C4
  ENSP ID: ENSP00000227471
MEAEPPLYPMAGAAGPQGDEDLLGVPDGPEAPLDELVGAYPNYNEEEEERRYYRRKRLGVLKNVLAASAGGMLTYGVYLGLLQMQLILHYDETYREVKYGNMGLPDIDSKMLMGINVTPIAALLYTPVLIRFFGTKWMMFLAVGIYALFVSTNYWERYYTLVPSAVALGMAIVPLWASMGNYITRMAQKYHEYSHYKEQDGQGMKQRPPRGSHAPYLLVFQAIFYSFFHLSFACAQLPMIYFLNHYLYDLNHTLYNVQSCGTNSHGILSGFNKTVLRTLPRSGNLIVVESVLMAVAFLAMLLVLGLCGAAYRPTEEIDLRSVGWGNIFQLPFKHVRDYRLRHLVPFFIYSGFEVLFACTGIALGYGVCSVGLERLAYLLVAYSLGASAASLLGLLGLWLPRPVPLVAGAGVHLLLTFILFFWAPVPRVLQHSWILYVAAALWGVGSALNKTGLSTLLGILYEDKERQDFIFTIYHWWQAVAIFTVYLGSSLHMKAKLAVLLVTLVAAAVSYLRMEQKLRRGVAPRQPRIPRPQHKVRGYRYLEEDNSDESDAEGEHGDGAEEEAPPAGPRPGPEPAGLGRRPCPYEQAQGGDGPEEQ

SEQ ID NO: 95765 - protein, 214 aa, Homo sapiens
  Payload ID: 19104
  Gene Name: unc-93 homolog B1 (C. elegans)
  ENSP ID: ENSP00000434294
MEAEPPLYPMAGAAGPQGDEDLLGVPDGPEAPLDELVGAYPNYNEEEEERRYYRRKRLGVLKNVLAASAGGMLTYGVYLGLLQMQLILHYDETYREVKYGNMGLPDIDSKMLMGINVTPIAALLYTPVLIRFFGTKWMMFLAVGIYALFVSTNYWERYYTLVPSAVALGMAIVPLWASMGNYITSSGCRTHRSGTGRAGESLLSFVVQDGAEVP

SEQ ID NO: 95766 - protein, 180 aa, Homo sapiens
  Payload ID: 19104
  Gene Name: unc-93 homolog B1 (C. elegans)
  ENSP ID: ENSP00000437195
MLTYGVYLGLLQMQLILHYDETYREVKYGNMGLPDIDSKMLMGINVTPIAALLYTPVLIRFFGTKWMMFLAVGIYALFVSTNYWERYYTLVPSAVALGMAIVPLWASMGNYITRMAQKYHEYSHYKEQDGQGMKQRPPRGSHAPYLLVFQAIFYSFFHLSFACAQLPMIYFLNHYLYDLN

SEQ ID NO: 95767 - protein, 99 aa, Homo sapiens
  Payload ID: 19105
  Gene Name: uncharacterized LOC150527 [Source:EntrezGene
  Acc:150527]
  ENSP ID: ENSP00000386678
MTVNKIMVHADYNELHRMGSDITLLQLHRHVEFSSHILPACLPEPTTWLAPDSSCWISGWGMVTEDAGMFLREAWSYAMACLSMKFLWPPPILWLQIHT

SEQ ID NO: 95768 - protein, 160 aa, Homo sapiens
  Payload ID: 19105
  Gene Name: uncharacterized LOC150527 [Source:EntrezGene
  Acc:150527]
  ENSP ID: ENSP00000387081
MTVNKIMVHADYNELHRMGSDITLLQLHRHVEFSSHILPACLPEPTTWLAPDSSCWISGWGMVTEDVFLPEPFQLQEAEVGVMDNTVCGSFFQPQYPGQPSSSDYTIHEDMLCAGDLITGKAICRVSGLTLSPLCCPGPLPQGLLWTLPQPRLLPEPSQA

SEQ ID NO: 95769 - protein, 141 aa, Homo sapiens
  Payload ID: 19105
  Gene Name: uncharacterized LOC150527 [Source:EntrezGene
  Acc:150527]
  ENSP ID: ENSP00000409747
MTVNKIMVHADYNELHRMGSDITLLQLHRHVEFSSHILPACLPEPTTWLAPDSSCWISGWGMVTEDVFLPEPFQLQEAEVGVMDNTVCGSFFQPQYPGQPSSSDYTIHEDMLCAGDLITGKAICRACSYVKHGVTQWPACP

SEQ ID NO: 95770 - protein, 149 aa, Homo sapiens
  Payload ID: 19105
  Gene Name: uncharacterized LOC150527 [Source:EntrezGene
  Acc:150527]
  ENSP ID: ENSP00000485065
MTVNKIMVHADYNELHRMGSDITLLQLHRHVEFSSHILPACLPEPTTWLAPDSSCWISGWGMVTEDVFLPEPFQLQEAEVGVMDNTVCGSFFQPQYPGQPSSSDYTIHEDMLCAGDLITGKAICRCGELRPREEVYHPSETPGVPSSAH

SEQ ID NO: 95771 - protein, 115 aa, Homo sapiens
  Payload ID: 19106
  Gene Name: Uncharacterized protein C12orf79  [Source:UniProtKB/Swiss-Prot
  Acc:G3V211]
  Uniprot ID: G3V211
  ENSP ID: ENSP00000477724
MNVCCSSHPVNEKVWKPSSRKWSSKVWSMDEFDLQTACYWFMTRCQKEAGKFGTHRGKPMCFVRSLLRVQLLPRTFPANSFVISFFPSLIYPLQVYQLHFESSDKQRAMQFVTEG

SEQ ID NO: 95772 - protein, 129 aa, Homo sapiens
  Payload ID: 19107
  Gene Name: Uncharacterized protein FLJ43738  [Source:UniProtKB/Swiss-Prot
  Acc:Q6ZUG5]
  ENSP ID: ENSP00000422463
MPVYCKYQFHKTPVHKTKGEPHGTHVYFQDINVIFLGALHPSDLREYLEGPPMVVEVHDRDRKSEECSQKPVLFGEDPLDSYLNFQALISPRETENNPFESQNKMWYPYGIAQVSFADLLLGHKYLNLA

SEQ ID NO: 95773 - protein, 572 aa, Homo sapiens
  Payload ID: 19107
  Gene Name: Uncharacterized protein FLJ43738  [Source:UniProtKB/Swiss-Prot
  Acc:Q6ZUG5]
  Uniprot ID: Q6ZUG5
  ENSP ID: ENSP00000424951
MPVYCKYQFHKTPVHKTKGEPHGTHVYFQDINVIFLGALHPSDLREYLEGPPMVVEVHDRDRKSEECSQKPVLFGEDPLDSYLNFQALISPRETENNPFESQNKMWYPYGIAQVSFADLLLGHKYLNLAVPIHSCEVQPTHCGQDSRRRKVVGLGVPRDGHQHGPMPRGNYLEADSQLKLRVDIAVPLRAGARAADPDLGGSQFGRIIFVFDFKKVSLLHSLLQDITMINAKALGLDSYPVRTLQQILSAFKVRVRVQEQQHLDVLTGFHLLDGKTHLFILEGLADQGLRQLWENHQSWIPRSEHRKYKVLYNSQLLFRSRLYGDLEAILYHVHLFQPTELLLQQAVFFLRDTERRRVFQALARIHDICYNSTTLWDVTVRDLLPSSAMIKDLSQEFGMPLSQEELTDEKLFALPPQPAPNLEDYHSRNSTLTLEIHAHQEPRKRFTYSQDYLSAMVEPLDLKEEEKKAQKKSRQAWLTARGFQVTGLQSDTESSFQDLKLPPIKELNEEWKENSLFANVLEPVLDRDRWSWDRHHVDFDLYKKPPPFLELLPSPAPKPVTVRKKKGNSPIS

SEQ ID NO: 95774 - protein, 381 aa, Homo sapiens
  Payload ID: 19108
  Gene Name: uncharacterized protein LOC100288966 [Source:RefSeq peptide
  Acc:NP_001244291]
  ENSP ID: ENSP00000477677
MVAEVCSMPTASTVKKPFDLRSKMGKWCHHRFPCCRGSGKSNMGTSGDHDDSFMKMLRSKMGKCCRHCFPCCRGSGTSNVGTSGDHENSFMKMLRSKMGKWCCHCFPCCRGSSKSNVGAWGDYDHSAFMEPRYHVRREDLDKLHRAAWWGKVPRKDLIVMLRDTDMNKRDKEKRTALHLASANGNSEVVQLLLDRRCQLNVLDNKKRTALIKAIQCQEDECVLMLLEHGADRNIPDEYGNTALHYAIYNEDKLMAKALLLYGADIESKNKCGLTPLLLGVHEQKQQVVKFLIKKKANLNVLDRYGRTALILAVCCGSASIVNLLLEQNVDVSSQDLSGQTAREYAVSSHHHVICELLSDYKEKQMLKISSENSNPGKEAEE

SEQ ID NO: 95775 - protein, 584 aa, Homo sapiens
  Payload ID: 19108
  Gene Name: uncharacterized protein LOC100288966 [Source:RefSeq peptide
  Acc:NP_001244291]
  ENSP ID: ENSP00000479139
MVAEVCSMPTASTVKKPFDLRSKMGKWCHHRFPCCRGSGKSNMGTSGDHDDSFMKMLRSKMGKCCRHCFPCCRGSGTSNVGTSGDHENSFMKMLRSKMGKWCCHCFPCCRGSSKSNVGAWGDYDHSAFMEPRYHVRREDLDKLHRAAWWGKVPRKDLIVMLRDTDMNKRDKEKRTALHLASANGNSEVVQLLLDRRCQLNVLDNKKRTALIKAIQCQEDECVLMLLEHGADRNIPDEYGNTALHYAIYNEDKLMAKALLLYGADIESKNKCGLTPLLLGVHEQKQQVVKFLIKKKANLNVLDRYGRTALILAVCCGSASIVNLLLEQNVDVSSQDLSGQTAREYAVSSHHHVICELLSDYKEKQMLKISSENSNPEQDLKLTSEEESQRLKVSENSQPEKMSQEPEINKDCDREVEEEIKKHGSNPVGLPENLTNGASAGNGDDGLIPQRRSRKPENQQFPDTENEEYHSDEQNDTRKQLSEEQNTGISQDEILTNKQKQIEVAEQKMNSELSLSHKKEEDLLRENSVLQEEIAVLRLELDETKHQNQLRENKILEEIESVKEKTDKLLRAMQLNEEALTKTNI

SEQ ID NO: 95776 - protein, 361 aa, Homo sapiens
  Payload ID: 19109
  Gene Name: Uncharacterized protein LOC113230  [Source:UniProtKB/Swiss-Prot
  Acc:Q96FF7]
  ENSP ID: ENSP00000269720
MAPQRAGPGLGKPSSKKSRALRGGPGVPRARQRSPRAAAELNTEVPKPSAKDVEILEQESEVLEPSVEQDAESPGLSTAAGFESPEPGRDDPGPSEAQRAEVQGQHPPPGPKTSSSRSGSEAPHLRFPPCPEAPQRPPEERFMETPIEREIRRSCEREESLRRSRGLSPGRAGRELVELRVRPVLNLPGPGPALPRALERARAGAQMQRDIEREAHRQAALARPAVPEPRARSPPQPLGELKRFFEAAAGSGSSAGAGDGAGPQRLPEPGGRPRSAVQGGCRVLGSAPPPFTPSLLEQEVRAVREREQELQRQRRSVYGTAEFKEPTPSLTASRGDGKLVVIWPPRRKVSENGLEQEERKP

SEQ ID NO: 95777 - protein, 219 aa, Homo sapiens
  Payload ID: 19109
  Gene Name: Uncharacterized protein LOC113230  [Source:UniProtKB/Swiss-Prot
  Acc:Q96FF7]
  Uniprot ID: Q96FF7
  ENSP ID: ENSP00000465157
METPIEREIRRSCEREESLRRSRGLSPGRAGRELVELRVRPVLNLPGPGPALPRALERARAGAQMQRDIEREAHRQAALARPAVPEPRARSPPQPLGELKRFFEAAAGSGSSAGAGDGAGPQRLPEPGGRPRSAVQGGCRVLGSAPPPFTPSLLEQEVRAVREREQELQRQRRSVYGTAEFKEPTPSLTASRGDGKLVVIWPPRRKVSENGLEQEERKP

SEQ ID NO: 95778 - protein, 150 aa, Homo sapiens
  Payload ID: 19109
  Gene Name: Uncharacterized protein LOC113230  [Source:UniProtKB/Swiss-Prot
  Acc:Q96FF7]
  ENSP ID: ENSP00000466176
AAAAAGRTQALLRGRGGERLLGGGGGRRGPAEAARAWGTAALGRAGRVPGAGQRPAAFHSVTAGAGGARRARARAGTAAPAAQRLWHRGVQGAYAEPHRGAAGLSSWLPPAGELSAPSPAASRGDGKLVVIWPPRRKVSENGLEQEERKP

SEQ ID NO: 95779 - protein, 120 aa, Homo sapiens
  Payload ID: 19110
  Gene Name: uncharacterized protein LOC389831 [Source:RefSeq peptide
  Acc:NP_001229409]
  ENSP ID: ENSP00000484596
MYSFPTTVVEEILSLSLQLIAFPTVSCEILLEITSQTNKKQTWETCYAHSAEEIGIIAGKRIHKTQAVPYICFLLRHQFISQSSHVRVEALYSLLFLGTLLQVGKGQEVLLKDALRARAP

SEQ ID NO: 95780 - protein, 157 aa, Homo sapiens
  Payload ID: 19111
  Gene Name: Uncharacterized protein UNQ6126/PRO20091  [Source:UniProtKB/Swiss-Prot
  Acc:Q6UXV3]
  Uniprot ID: Q6UXV3
  ENSP ID: ENSP00000485227
MLPEQGPQPSTMPLWCLLAACTSLPRQAATMLEEAASPNEAVHASTSGSGALTDQTFTDLSAAEASSEEVPDFMEVPHSVHHKINCFFYLEKQLCQLPSPLCLSSLLTLKLKTTVPAPGRWWSFQPHKAFPLLVGTPGSWQSTIDPAWAAPSQPSPG

SEQ ID NO: 95781 - protein, 410 aa, Homo sapiens
  Payload ID: 19112
  Gene Name: uncharacterized serine/threonine-protein kinase SgK494 [Source:EntrezGene
  Acc:124923]
  ENSP ID: ENSP00000301037
MGAVSCRQGQHTQQGEHTRVAVPHKQGGNIRGPWARGWKSLWTGLGTIRSDLEELWELRGHHYLHQESLKPAPVLVEKPLPEWPVPQFINLFLPEFPIRPIRGQQQLKILGLVAKGSFGTVLKVLDCTQKAVFAVKVVPKVKVLQRDTVRQCKEEVSIQRQINHPFVHSLGDSWQGKRHLFIMCSYCSTDLYSLWSAVGCFPEASIRLFAAELVLVLCYLHDLGIMHRDVKMENILLDERGHLKLTDFGLSRHVPQGAQAYTICGTLQYMAPEVLSGGPYNHAADWWSLGVLLFSLATGKFPVAAERDHVAMLASVTHSDSEIPASLNQGLSLLLHELLCQNPLHRLRYLHHFQVHPFFRGVAFDPELLQKQPVNFVTETQATQPSSAETMPFDDFDCDLESFLLYPIPA

SEQ ID NO: 95782 - protein, 186 aa, Homo sapiens
  Payload ID: 19112
  Gene Name: uncharacterized serine/threonine-protein kinase SgK494 [Source:EntrezGene
  Acc:124923]
  ENSP ID: ENSP00000434603
MGAVSCRQGQHTQQGEHTRVAVPHKQGGNIRGPWARGWKSLWTGLGTIRSDLEELWELRGHHYLHQESLKPAPVLVEKPLPEWPVPQFINLFLPEFPIRPIRGQQQLKILGLVAKGSFGTVLKVLDCTQKAVFAVKVVPKVKVLQRDTVRQCKEERQINHPFVHSLGDSWQGKRHLFIMCSYCSTD

SEQ ID NO: 95783 - protein, 146 aa, Homo sapiens
  Payload ID: 19112
  Gene Name: uncharacterized serine/threonine-protein kinase SgK494 [Source:EntrezGene
  Acc:124923]
  ENSP ID: ENSP00000463890
VSLKSVAPEVLSGGPYNHAADWWSLGVLLFSLATGKFPVAAERDHVAMLASVTHSDSEIPASLNQGLSLLLHELLCQNPLHRLRYLHHFQVHPFFRGVAFDPELLQKQPVNFVTETQATQPSSAETMPFDDFDCDLESFLLYPIPA

SEQ ID NO: 95784 - protein, 173 aa, Homo sapiens
  Payload ID: 19112
  Gene Name: uncharacterized serine/threonine-protein kinase SgK494 [Source:EntrezGene
  Acc:124923]
  ENSP ID: ENSP00000464010
MGAVSCRQGQHTQQGEHTRVAVPHKGGNIRGPWARGWKSLWTGLGTIRSDLEELWELRGHHYLHQESLKPAPVLVEKPLPEWPVPQFINLFLPEFPIRPIRGQQQLKILGLVAKGSFGTVLKVLDCTQKAVFAVKVVPKVKVLQRDTVRQCKEEVSIQVCTESWKGLWEELGH

SEQ ID NO: 95785 - protein, 92 aa, Homo sapiens
  Payload ID: 19112
  Gene Name: uncharacterized serine/threonine-protein kinase SgK494 [Source:EntrezGene
  Acc:124923]
  ENSP ID: ENSP00000468448
  MOD_RES (1)..(1): Any amino acid
XCSYCSTDLYSLWSAVGCFPEASIRLFAAELVLVLCYLHDLGIMHRDVKMENILLDERGHLKLTDFGLSRHVPQGAQAYTICGTLQYMGERG

SEQ ID NO: 95786 - protein, 259 aa, Homo sapiens
  Payload ID: 19113
  Gene Name: unconventional SNARE in the ER 1 homolog (S. cerevisiae)
  Uniprot ID: Q9NZ43
  ENSP ID: ENSP00000263897
MAASRLELNLVRLLSRCEAMAAEKRDPDEWRLEKYVGALEDMLQALKVHASKPASEVINEYSWKVDFLKGMLQAEKLTSSSEKALANQFLAPGRVPTTARERVPATKTVHLQSRARYTSEMRSELLGTDSAEPEMDVRKRTGVAGSQPVSEKQLAAELDLVLQRHQNLQEKLAEEMLGLARSLKTNTLAAQSVIKKDNQTLSHSLKMADQNLEKLKTESERLEQHTQKSVNWLLWAMLIIVCFIFISMILFIRIMPKLK

SEQ ID NO: 95787 - protein, 256 aa, Homo sapiens
  Payload ID: 19113
  Gene Name: unconventional SNARE in the ER 1 homolog (S. cerevisiae)
  ENSP ID: ENSP00000390287
MAASRLELNLVRLLSRCEAMAAEKRDPDEWRLEKYVGALEDMLQALKVHASKPASEVINEYSWKVDFLKGMLQAEKLTSSSEKALANQFLAPGRVPTTARERVPATKTVHLQSRARYTSEMRSELLGTEPEMDVRKRTGVAGSQPVSEKQLAAELDLVLQRHQNLQEKLAEEMLGLARSLKTNTLAAQSVIKKDNQTLSHSLKMADQNLEKLKTESERLEQHTQKSVNWLLWAMLIIVCFIFISMILFIRIMPKLK

SEQ ID NO: 95788 - protein, 38 aa, Homo sapiens
  Payload ID: 19113
  Gene Name: unconventional SNARE in the ER 1 homolog (S. cerevisiae)
  ENSP ID: ENSP00000469658
MAASRLELNLVRLLSRCEAMAAEKRDPDEWRLEKQTGL

SEQ ID NO: 95789 - protein, 161 aa, Homo sapiens
  Payload ID: 19113
  Gene Name: unconventional SNARE in the ER 1 homolog (S. cerevisiae)
  ENSP ID: ENSP00000470065
MLQALKVHASKPASEVINEYSWKVDFLKGMLQAEKLTSSSEKALANQFLAPGRVPTTARERVPATKTVHLQSRARYTSEMRSELLGTDSAEPEMDVRKRTGVAGSQPVSEKQLAAELDLVLQRHQNLQEKLAEEMLGLARSLKTNTLAAQSVIKKDNQTLS

SEQ ID NO: 95790 - protein, 133 aa, Homo sapiens
  Payload ID: 19113
  Gene Name: unconventional SNARE in the ER 1 homolog (S. cerevisiae)
  ENSP ID: ENSP00000470487
MAASRLELNLVRLLSRCEAMAAEKRDPDEWRLEKYVGALEDMLQALKVHASKPASEVINEYSWKVDFLKGMLQAEKLTSSSEKALANQFLAPGRVPTTARERVPATKTVHLQSRARYTSEMRSELLGTVGLLP

SEQ ID NO: 95791 - protein, 38 aa, Homo sapiens; identical to SEQ ID NO: 95788
  Payload ID: 19113
  Gene Name: unconventional SNARE in the ER 1 homolog (S. cerevisiae)
  ENSP ID: ENSP00000470882

SEQ ID NO: 95792 - protein, 135 aa, Homo sapiens
  Payload ID: 19113
  Gene Name: unconventional SNARE in the ER 1 homolog (S. cerevisiae)
  Uniprot ID: Q9NZ43
  ENSP ID: ENSP00000472362
MAASRLELNLVRLLSRCEAMAAEKRDPDEWRLEKYVGALEDMLQALKVHASKPASEVINEYSWKVDFLKGMLQAEKLTSSSEKALANQFLAPGRVPTTARERVPATKTVHLQSRARYTSEMRSELLGTDSAGESP

SEQ ID NO: 95793 - protein, 146 aa, Homo sapiens
  Payload ID: 19113
  Gene Name: unconventional SNARE in the ER 1 homolog (S. cerevisiae)
  Uniprot ID: Q9NZ43
  ENSP ID: ENSP00000473239
MAASRLELNLVRLLSRCEAMAAEKRDPDEWRLEKYVGALEDMLQALKVHASKPASEVINEYSWKVDFLKGMLQAEKLTSSSEKALANQFLAPGRVPTTARERVPATKTVHLQSRARYTSEMRSELLGTDSAEPEMDVRKRTPCHTH

SEQ ID NO: 95794 - protein, 307 aa, Homo sapiens
  Payload ID: 19114
  Gene Name: uncoupling protein 1 (mitochondrial, proton carrier)
  Uniprot ID: P25874
  ENSP ID: ENSP00000262999
MGGLTASDVHPTLGVQLFSAGIAACLADVITFPLDTAKVRLQVQGECPTSSVIRYKGVLGTITAVVKTEGRMKLYSGLPAGLQRQISSASLRIGLYDTVQEFLTAGKETAPSLGSKILAGLTTGGVAVFIGQPTEVVKVRLQAQSHLHGIKPRYTGTYNAYRIIATTEGLTGLWKGTTPNLMRSVIINCTELVTYDLMKEAFVKNNILADDVPCHLVSALIAGFCATAMSSPVDVVKTRFINSPPGQYKSVPNCAMKVFTNEGPTAFFKGLVPSFLRLGSWNVIMFVCFEQLKRELSKSRQTMDCAT

SEQ ID NO: 95795 - protein, 309 aa, Homo sapiens
  Payload ID: 19115
  Gene Name: uncoupling protein 2 (mitochondrial, proton carrier)
  Uniprot ID: P55851
  ENSP ID: ENSP00000312029
MVGFKATDVPPTATVKFLGAGTAACIADLITFPLDTAKVRLQIQGESQGPVRATASAQYRGVMGTILTMVRTEGPRSLYNGLVAGLQRQMSFASVRIGLYDSVKQFYTKGSEHASIGSRLLAGSTTGALAVAVAQPTDVVKVRFQAQARAGGGRRYQSTVNAYKTIAREEGFRGLWKGTSPNVARNAIVNCAELVTYDLIKDALLKANLMTDDLPCHFTSAFGAGFCTTVIASPVDVVKTRYMNSALGQYSSAGHCALTMLQKEGPRAFYKGFMPSFLRLGSWNVVMFVTYEQLKRALMAACTSREAPF

SEQ ID NO: 95796 - protein, 32 aa, Homo sapiens
  Payload ID: 19115
  Gene Name: uncoupling protein 2 (mitochondrial, proton carrier)
  ENSP ID: ENSP00000438230
MVGFKATDVPPTATVKFLGAGTAACIADLITF

SEQ ID NO: 95797 - protein, 129 aa, Homo sapiens
  Payload ID: 19115
  Gene Name: uncoupling protein 2 (mitochondrial, proton carrier)
  ENSP ID: ENSP00000439706
GSRLLAGSTTGALAVAVAQPTDVVKVRFQAQARAGGGRRYQSTVNAYKTIAREEGFRGLWKGTSPNVARNAIVNCAELVTYDLIKDALLKANLMTGFCTTVIASPVDVVKTRYMNSALGQYSSAGHCAL

SEQ ID NO: 95798 - protein, 282 aa, Homo sapiens
  Payload ID: 19115
  Gene Name: uncoupling protein 2 (mitochondrial, proton carrier)
  ENSP ID: ENSP00000439951
GQHAYPCSYPVLALQIQGESQGPVRATASAQYRGVMGTILTMVRTEGPRSLYNGLVAGLQRQMSFASVRIGLYDSVKQFYTKGSEHASIGSRLLAGSTTGALAVAVAQPTDVVKVRFQAQARAGGGRRYQSTVNAYKTIAREEGFRGLWKGTSPNVARNAIVNCAELVTYDLIKDALLKANLMTDDLPCHFTSAFGAGFCTTVIASPVDVVKTRYMNSALGQYSSAGHCALTMLQKEGPRAFYKGFMPSFLRLGSWNVVMFVTYEQLKRALMAACTSREAPF

SEQ ID NO: 95799 - protein, 225 aa, Homo sapiens
  Payload ID: 19115
  Gene Name: uncoupling protein 2 (mitochondrial, proton carrier)
  ENSP ID: ENSP00000441147
MVGFKATDVPPTATVKFLGAGTAACIADLITFPLDTAKVRLQIQGESQGPVRATASAQYRGVMGTILTMVRTEGPRSLYNGLVAGLQRQMSFASVRIGLYDSVKQFYTKGSEHASIGSRLLAGSTTGALAVAVAQPTDVVKVRFQAQARAGGGRRYQSTVNAYKTIAREEGFRGLWKGTSPNVARNAIVNCAELVTYDLIKDALLKANLMTGSCPPFSAWVPGTW

SEQ ID NO: 95800 - protein, 312 aa, Homo sapiens
  Payload ID: 19116
  Gene Name: uncoupling protein 3 (mitochondrial, proton carrier)
  Uniprot ID: P55916
  ENSP ID: ENSP00000323740
MVGLKPSDVPPTMAVKFLGAGTAACFADLVTFPLDTAKVRLQIQGENQAVQTARLVQYRGVLGTILTMVRTEGPCSPYNGLVAGLQRQMSFASIRIGLYDSVKQVYTPKGADNSSLTTRILAGCTTGAMAVTCAQPTDVVKVRFQASIHLGPSRSDRKYSGTMDAYRTIAREEGVRGLWKGTLPNIMRNAIVNCAEVVTYDILKEKLLDYHLLTDNFPCHFVSAFGAGFCATVVASPVDVVKTRYMNSPPGQYFSPLDCMIKMVAQEGPTAFYKGFTPSFLRLGSWNVVMFVTYEQLKRALMKVQMLRESPF

SEQ ID NO: 95801 - protein, 275 aa, Homo sapiens
  Payload ID: 19116
  Gene Name: uncoupling protein 3 (mitochondrial, proton carrier)
  Uniprot ID: P55916
  ENSP ID: ENSP00000392143
MVGLKPSDVPPTMAVKFLGAGTAACFADLVTFPLDTAKVRLQIQGENQAVQTARLVQYRGVLGTILTMVRTEGPCSPYNGLVAGLQRQMSFASIRIGLYDSVKQVYTPKGADNSSLTTRILAGCTTGAMAVTCAQPTDVVKVRFQASIHLGPSRSDRKYSGTMDAYRTIAREEGVRGLWKGTLPNIMRNAIVNCAEVVTYDILKEKLLDYHLLTDNFPCHFVSAFGAGFCATVVASPVDVVKTRYMNSPPGQYFSPLDCMIKMVAQEGPTAFYKG

SEQ ID NO: 95802 - protein, 96 aa, Homo sapiens
  Payload ID: 19116
  Gene Name: uncoupling protein 3 (mitochondrial, proton carrier)
  ENSP ID: ENSP00000445279
MVGLKPSDVPPTMAVKFLGAGTAACFADLVTFPLDTAKVRLQIQGENQAVQTARLVQYRGVLGTILTMVRTEGPCSPYNGLVAGLQRQMSFASIRI

SEQ ID NO: 95803 - protein, 341 aa, Homo sapiens
  Payload ID: 19117
  Gene Name: undifferentiated embryonic cell transcription factor 1
  Uniprot ID: Q5T230
  ENSP ID: ENSP00000305906
MLLRPRRPPPLAPPAPPSPASPDPEPRTPGDAPGTPPRRPASPSALGELGLPVSPGSAQRTPWSARETELLLGTLLQPAVWRALLLDRRQALPTYRRVSAALAQQQVRRTPAQCRRRYKFLKDKFREAHGQPPGPFDEQIRKLMGLLGDNGRKRPRRRSPGSGRPQRARRPVPNAHAPAPSEPDATPLPTARDRDADPTWTLRFSPSPPKSADASPAPGSPPAPAPTALATCIPEDRAPVRGPGSPPPPPAREDPDSPPGRPEDCAPPPAAPPSLNTALLQTLGHLGDIANILGPLRDQLLTLNQHVEQLRGAFDQTVSLAVGFILGSAAAERGVLRDPCQ

SEQ ID NO: 95804 - protein, 810 aa, Homo sapiens
  Payload ID: 19118
  Gene Name: unkempt family zinc finger
  Uniprot ID: Q9C0B0
  ENSP ID: ENSP00000464893
MSKGPGPGGSAASSAPPAATAQVLQAQPEKPQHYTYLKEFRTEQCPLFVQHKCTQHRPYTCFHWHFVNQRRRRSIRRRDGTFNYSPDVYCTKYDEATGLCPEGDECPFLHRTTGDTERRYHLRYYKTGICIHETDSKGNCTKNGLHCAFAHGPHDLRSPVYDIRELQAMEALQNGQTTVEGSIEGQSAGAASHAMIEKILSEEPRWQETAYVLGNYKTEPCKKPPRLCRQGYACPYYHNSKDRRRSPRKHKYRSSPCPNVKHGDEWGDPGKCENGDACQYCHTRTEQQFHPEIYKSTKCNDMQQSGSCPRGPFCAFAHVEQPPLSDDLQPSSAVSSPTQPGPVLYMPSAAGDSVPVSPSSPHAPDLSALLCRNSSLGSPSNLCGSPPGSIRKPPNLEGIVFPGESGLAPGSYKKAPGFEREDQVGAEYLKNFKCQAKLKPHSLEPRSQEQPLLQPKQDMLGILPAGSPLTSSISSSITSSLAATPPSPVGTSSVPGMNANALPFYPTSDTVESVIESALDDLDLNEFGVAALEKTFDNSTVPHPGSITIGGSLLQSSAPVNIPGSLGSSASFHSASPSPPVSLSSHFLQQPQGHLSQSENTFLGTSASHGSLGLNGMNSSIWEHFASGSFSPGTSPAFLSGPGAAELARLRQELDEANSTIKQWEESWKQAKQACDAWKKEAEEAGERASAAGAECELAREQRDALEVQVKKLQEELERLHAGPEPQALPAFSDLEALSLSTLYSLQKQLRAHLEQVDKAVFHMQSVKCLKCQEQKRAVLPCQHAALCELCAEGSECPICQPGRAHTLQS

SEQ ID NO: 95805 - protein, 37 aa, Homo sapiens
  Payload ID: 19118
  Gene Name: unkempt family zinc finger
  ENSP ID: ENSP00000464953
MSKGPGPGGSAASSAPPAATAQVLQAQPEKPQHYTYG

SEQ ID NO: 95806 - protein, 69 aa, Homo sapiens
  Payload ID: 19118
  Gene Name: unkempt family zinc finger
  ENSP ID: ENSP00000466054
  MOD_RES (1)..(1): Any amino acid
XRRYHLRYYKTGICIHETDSKGNCTKNGLHCAFAHGPHDLRSPVYDIRWAGCWAGLMAVGWGPGQGPGG

SEQ ID NO: 95807 - protein, 41 aa, Homo sapiens
  Payload ID: 19118
  Gene Name: unkempt family zinc finger
  ENSP ID: ENSP00000466431
MSKGPGPGGSAASSAPPAATAQVLQAQPEKPQHYTAEERDQ

SEQ ID NO: 95808 - protein, 220 aa, Homo sapiens
  Payload ID: 19118
  Gene Name: unkempt family zinc finger
  ENSP ID: ENSP00000467726
  MOD_RES (1)..(1): Any amino acid
XTFDNSTVPHPGSITIGGSLLQSSAPVNIPGSLGSSASFHSASPSPPVSLSSHFLQQPQGHLSQSENTFLGTSASHGSLGPGAAELARLRQELDEANSTIKQWEESWKQAKQACDAWKKEAEEAGERASAAGAECELAREQRDALEVQVKKLQEELERLHAGPEPQALPAFSDLEALSLSTLYSLQKQLRAHLEQVDKAVFHMQSVKCLKCQEQKRAVLP

SEQ ID NO: 95809 - protein, 39 aa, Homo sapiens
  Payload ID: 19118
  Gene Name: unkempt family zinc finger
  ENSP ID: ENSP00000467849
MSKGPGPGGSAASSAPPAATAQVLQAQPEKPQHYTYVRY

SEQ ID NO: 95810 - protein, 229 aa, Homo sapiens
  Payload ID: 19119
  Gene Name: unkempt family zinc finger-like
  Uniprot ID: Q9H9P5
  ENSP ID: ENSP00000248104
MTCCSQVPPRRRPSLALSPRLDCNGLNGVPGSIWDFVSGSFSPSPSPILSAGPPSSSSASPNGAELARVRRQLDEAKRKIRQWEESWQQVKQVCDAWQREAQEAKERARVADSDRQLALQKKEEVEAQVKQLQEELEGLGVASTLPGLRGCGDIGTIPLPKLHSLQSQLRLDLEAVDGVIFQLRAKQCVACRERAHGAVLRPCQHHILCEPCAATAPECPYCKGQPLQW

SEQ ID NO: 95811 - protein, 277 aa, Homo sapiens
  Payload ID: 19119
  Gene Name: unkempt family zinc finger-like
  Uniprot ID: Q9H9P5
  ENSP ID: ENSP00000301712
MPSVSKAAAAALSGSPPQTEKPTHYRYLKEFRTEQCPLFSQHKCAQHRPFTCFHWHFLNQRRRRPLRRRDGTFNYSPDVYCSKYNEATGVCPDGDECPYLHRTTGDTERKYHLRYYKTGTCIHETDARGHCVKNGLHCAFAHGPLDLRPPVCDVRELQAQEALQNGQLGGGEGVPDLQPGVLASQAMIEKILSEDPRWQDANFVLGSYKTEQCPKPPRLCRQGYACPHYHNSRDRRRNPRRFQYSWQLGRRVLRLSPRANNPRVALPRVHTGPSSTA

SEQ ID NO: 95812 - protein, 116 aa, Homo sapiens
  Payload ID: 19119
  Gene Name: unkempt family zinc finger-like
  ENSP ID: ENSP00000372205
MPSVSKAAAAALSGSPPQTEKPTHYSTSARSTGRSPASTGTSSTSGAAGPSAGATAPSTTAPTCTAPSTTKPPACAPTATSVPTCTGRRGTQNASTTCVTTKQEPASTRQTHVATA

SEQ ID NO: 95813 - protein, 683 aa, Homo sapiens
  Payload ID: 19119
  Gene Name: unkempt family zinc finger-like
  ENSP ID: ENSP00000373873
MPSVSKAAAAALSGSPPQTEKPTHYRYLKEFRTEQCPLFSQHKCAQHRPFTCFHWHFLNQRRRRPLRRRDGTFNYSPDVYCSKYNEATGVCPDGDECPYLHRTTGDTERKYHLRYYKTGTCIHETDARGHCVKNGLHCAFAHGPLDLRPPVCDVRELQAQEALQNGQLGGGEGVPDLQPGVLASQAMIEKILSEDPRWQDANFVLGSYKTEQCPKPPRLCRQGYACPHYHNSRDRRRNPRRFQYRSTPCPSVKHGDEWGEPSRCDGGDGCQYCHSRTEQQFHPEIYKSTKCNDMRQTGYCPRGPFCAFAHVEKSLGMVNEWGCHDLHLTSPSSTGSGQPGNAKRRDSPAEGGPRGSEQDSKQNHLAVFAAVHPPAPSVSSSVASSLASSAGSGSSSPTALPAPPARALPLGPASSTVEAVLGSALDLHLSNVNIASLEKDLEEQDGHDLGAAGPRSLAGSAPVAIPGSLPRAPSLHSPSSASTSPLGSLSQPLPGPVGSSAMTPPQQPPPLRSEPGTLGSAASSYSPLGLNGVPGSIWDFVSGSFSPSPSPILSAGPPSSSSASPNGAELARVRRQLDEAKRKIRQWEESWQQVKQVCDAWQREAQEAKERARVADSDRQLALQKKEEVEAQVIFQLRAKQCVACRERAHGAVLRPCQHHILCEPCAATAPECPYCKGQPLQW

SEQ ID NO: 95814 - protein, 182 aa, Homo sapiens
  Payload ID: 19119
  Gene Name: unkempt family zinc finger-like
  Uniprot ID: Q9H9P5
  ENSP ID: ENSP00000380606
MTPPQQPPPLRSEPGTLGSAASSYSPLGLNGVPGSIWDFVSGSFSPSPSPILSAGPPSSSSASPNGAELARVRRQLDEAKRKIRQWEESWQQVKQVCDAWQREAQEAKERARVADSDRQLALQKKEEVEAQVIFQLRAKQCVACRERAHGAVLRPCQHHILCEPCAATAPECPYCKGQPLQW

SEQ ID NO: 95815 - protein, 114 aa, Homo sapiens
  Payload ID: 19119
  Gene Name: unkempt family zinc finger-like
  ENSP ID: ENSP00000384850
MTPPQQPPPLRSEPGTLGSAASSYSPLGLNGVPGSIWDFVSGSFSPSPSPILSAGPPSSSSASPNGAELARVRRQLDEAKRKIRQWEESWQQVKQVCDAWQREAQEAKERARVA

SEQ ID NO: 95816 - protein, 52 aa, Homo sapiens
  Payload ID: 19119
  Gene Name: unkempt family zinc finger-like
  ENSP ID: ENSP00000385895
MTPPQQPPPLRSEPGTLGSAASSYSPLGECRLPPCWRCREASVGLPPRCRPD

SEQ ID NO: 95817 - protein, 733 aa, Homo sapiens
  Payload ID: 19119
  Gene Name: unkempt family zinc finger-like
  ENSP ID: ENSP00000422852
MPSVSKAAAAALSGSPPQTEKPTHYRYLKEFRTEQCPLFSQHKCAQHRPFTCFHWHFLNQRRRRPLRRRDGTFNYSPDVYCSKYNEATGVCPDGDECPYLHRTTGDTERKYHLRYYKTGTCIHETDARGHCVKNGLHCAFAHGPLDLRPPVCDVRELQAQEALQNGQLGGGEGVPDLQPGVLASQAMIEKILSEDPRWQDANFVLGSYKTEQCPKPPRLCRQGYACPHYHNSRDRRRNPRRFQYRSTPCPSVKHGDEWGEPSRCDGGDGCQYCHSRTEQQFHPEIYKSTKCNDMRQTGYCPRGPFCAFAHVEKSLGMVNEWGCHDLHLTSPSSTGSGQPGNAKRRDSPAEGGPRGSEQDSKQNHLAVFAAVHPPAPSVSSSVASSLASSAGSGSSSPTALPAPPARALPLGPASSTVEAVLGSALDLHLSNVNIASLEKDLEEQDGHDLGAAGPRSLAGSAPVAIPGSLPRAPSLHSPSSASTSPLGSLSQPLPGPVGSSAMTPPQQPPPLRSEPGTLGSAASSYSPLGLNGVPGSIWDFVSGSFSPSPSPILSAGPPSSSSASPNGAELARVRRQLDEAKRKIRQWEESWQQVKQVCDAWQREAQEAKERARVADSDRQLALQKKEEVEAQVKQLQEELEGLGVASTLPGLRGCGDIGTIPLPKLHSLQSQLRLDLEAVDGVIFQLRAKQCVACRERAHGAVLRPCQHHILCEPCAATAPECPYCKGQPLQW

SEQ ID NO: 95818 - protein, 76 aa, Homo sapiens
  Payload ID: 19119
  Gene Name: unkempt family zinc finger-like
  ENSP ID: ENSP00000423107
MTPPQQPPPLRSEPGTLGSAASSYSPLGLNGVPGSIWDFVSGSFSPSPSPILSAGPPSSSSASPNGAELARVRRQL

SEQ ID NO: 95819 - protein, 622 aa, Homo sapiens; identical to SEQ ID NO: 17210
  Payload ID: 19120
  Gene Name: UPF0704 protein C6orf165 [Source:UniProtKB/Swiss-Prot
  Acc:Q8IYR0]
  Uniprot ID: Q8IYR0
  ENSP ID: ENSP00000426769

SEQ ID NO: 95820 - protein, 1118 aa, Homo sapiens
  Payload ID: 19121
  Gene Name: UPF1 regulator of nonsense transcripts homolog (yeast)
  Uniprot ID: Q92900
  ENSP ID: ENSP00000262803
MSVEAYGPSSQTLTFLDTEEAELLGADTQGSEFEFTDFTLPSQTQTPPGGPGGPGGGGAGGPGGAGAGAAAGQLDAQVGPEGILQNGAVDDSVAKTSQLLAELNFEEDEEDTYYTKDLPIHACSYCGIHDPACVVYCNTSKKWFCNGRGNTSGSHIVNHLVRAKCKEVTLHKDGPLGETVLECYNCGCRNVFLLGFIPAKADSVVVLLCRQPCASQSSLKDINWDSSQWQPLIQDRCFLSWLVKIPSEQEQLRARQITAQQINKLEELWKENPSATLEDLEKPGVDEEPQHVLLRYEDAYQYQNIFGPLVKLEADYDKKLKESQTQDNITVRWDLGLNKKRIAYFTLPKTDSDMRLMQGDEICLRYKGDLAPLWKGIGHVIKVPDNYGDEIAIELRSSVGAPVEVTHNFQVDFVWKSTSFDRMQSALKTFAVDETSVSGYIYHKLLGHEVEDVIIKCQLPKRFTAQGLPDLNHSQVYAVKTVLQRPLSLIQGPPGTGKTVTSATIVYHLARQGNGPVLVCAPSNIAVDQLTEKIHQTGLKVVRLCAKSREAIDSPVSFLALHNQIRNMDSMPELQKLQQLKDETGELSSADEKRYRALKRTAERELLMNADVICCTCVGAGDPRLAKMQFRSILIDESTQATEPECMVPVVLGAKQLILVGDHCQLGPVVMCKKAAKAGLSQSLFERLVVLGIRPIRLQVQYRMHPALSAFPSNIFYEGSLQNGVTAADRVKKGFDFQWPQPDKPMFFYVTQGQEEIASSGTSYLNRTEAANVEKITTKLLKAGAKPDQIGIITPYEGQRSYLVQYMQFSGSLHTKLYQEVEIASVDAFQGREKDFIILSCVRANEHQGIGFLNDPRRLNVALTRARYGVIIVGNPKALSKQPLWNHLLNYYKEQKVLVEGPLNNLRESLMQFSKPRKLVNTINPGARFMTTAMYDAREAIIPGSVYDRSSQGRPSSMYFQTHDQIGMISAGPSHVAAMNIPIPFNLVMPPMPPPGYFGQANGPAAGRGTPKGKTGRGGRQKNRFGLPGPSQTNLPNSQASQDVASQPFSQGALTQGYISMSQPSQMSQPGLSQPELSQDSYLGDEFKSQIDVALSQDSTYQGERAYQHGGVTGLSQY

SEQ ID NO: 95821 - protein, 1129 aa, Homo sapiens
  Payload ID: 19121
  Gene Name: UPF1 regulator of nonsense transcripts homolog (yeast)
  Uniprot ID: Q92900
  ENSP ID: ENSP00000470142
MSVEAYGPSSQTLTFLDTEEAELLGADTQGSEFEFTDFTLPSQTQTPPGGPGGPGGGGAGGPGGAGAGAAAGQLDAQVGPEGILQNGAVDDSVAKTSQLLAELNFEEDEEDTYYTKDLPIHACSYCGIHDPACVVYCNTSKKWFCNGRGNTSGSHIVNHLVRAKCKEVTLHKDGPLGETVLECYNCGCRNVFLLGFIPAKADSVVVLLCRQPCASQSSLKDINWDSSQWQPLIQDRCFLSWLVKIPSEQEQLRARQITAQQINKLEELWKENPSATLEDLEKPGVDEEPQHVLLRYEDAYQYQNIFGPLVKLEADYDKKLKESQTQDNITVRWDLGLNKKRIAYFTLPKTDSGNEDLVIIWLRDMRLMQGDEICLRYKGDLAPLWKGIGHVIKVPDNYGDEIAIELRSSVGAPVEVTHNFQVDFVWKSTSFDRMQSALKTFAVDETSVSGYIYHKLLGHEVEDVIIKCQLPKRFTAQGLPDLNHSQVYAVKTVLQRPLSLIQGPPGTGKTVTSATIVYHLARQGNGPVLVCAPSNIAVDQLTEKIHQTGLKVVRLCAKSREAIDSPVSFLALHNQIRNMDSMPELQKLQQLKDETGELSSADEKRYRALKRTAERELLMNADVICCTCVGAGDPRLAKMQFRSILIDESTQATEPECMVPVVLGAKQLILVGDHCQLGPVVMCKKAAKAGLSQSLFERLVVLGIRPIRLQVQYRMHPALSAFPSNIFYEGSLQNGVTAADRVKKGFDFQWPQPDKPMFFYVTQGQEEIASSGTSYLNRTEAANVEKITTKLLKAGAKPDQIGIITPYEGQRSYLVQYMQFSGSLHTKLYQEVEIASVDAFQGREKDFIILSCVRANEHQGIGFLNDPRRLNVALTRARYGVIIVGNPKALSKQPLWNHLLNYYKEQKVLVEGPLNNLRESLMQFSKPRKLVNTINPGARFMTTAMYDAREAIIPGSVYDRSSQGRPSSMYFQTHDQIGMISAGPSHVAAMNIPIPFNLVMPPMPPPGYFGQANGPAAGRGTPKGKTGRGGRQKNRFGLPGPSQTNLPNSQASQDVASQPFSQGALTQGYISMSQPSQMSQPGLSQPELSQDSYLGDEFKSQIDVALSQDSTYQGERAYQHGGVTGLSQY

SEQ ID NO: 95822 - protein, 1272 aa, Homo sapiens
  Payload ID: 19122
  Gene Name: UPF2 regulator of nonsense transcripts homolog (yeast)
  Uniprot ID: Q9HAU5
  ENSP ID: ENSP00000348708
MPAERKKPASMEEKDSLPNNKEKDCSERRTVSSKERPKDDIKLTAKKEVSKAPEDKKKRLEDDKRKKEDKERKKKDEEKVKAEEESKKKEEEEKKKHQEEERKKQEEQAKRQQEEEAAAQMKEKEESIQLHQEAWERHHLRKELRSKNQNAPDSRPEENFFSRLDSSLKKNTAFVKKLKTITEQQRDSLSHDFNGLNLSKYIAEAVASIVEAKLKISDVNCAVHLCSLFHQRYADFAPSLLQVWKKHFEARKEEKTPNITKLRTDLRFIAELTIVGIFTDKEGLSLIYEQLKNIINADRESHTHVSVVISFCRHCGDDIAGLVPRKVKSAAEKFNLSFPPSEIISPEKQQPFQNLLKEYFTSLTKHLKRDHRELQNTERQNRRILHSKGELSEDRHKQYEEFAMSYQKLLANSQSLADLLDENMPDLPQDKPTPEEHGPGIDIFTPGKPGEYDLEGGIWEDEDARNFYENLIDLKAFVPAILFKDNEKSCQNKESNKDDTKEAKESKENKEVSSPDDLELELENLEINDDTLELEGGDEAEDLTKKLLDEQEQEDEEASTGSHLKLIVDAFLQQLPNCVNRDLIDKAAMDFCMNMNTKANRKKLVRALFIVPRQRLDLLPFYARLVATLHPCMSDVAEDLCSMLRGDFRFHVRKKDQINIETKNKTVRFIGELTKFKMFTKNDTLHCLKMLLSDFSHHHIEMACTLLETCGRFLFRSPESHLRTSVLLEQMMRKKQAMHLDARYVTMVENAYYYCNPPPAEKTVKKKRPPLQEYVRKLLYKDLSKVTTEKVLRQMRKLPWQDQEVKDYVICCMINIWNVKYNSIHCVANLLAGLVLYQEDVGIHVVDGVLEDIRLGMEVNQPKFNQRRISSAKFLGELYNYRMVESAVIFRTLYSFTSFGVNPDGSPSSLDPPEHLFRIRLVCTILDTCGQYFDRGSSKRKLDCFLVYFQRYVWWKKSLEVWTKDHPFPIDIDYMISDTLELLRPKIKLCNSLEESIRQVQDLEREFLIKLGLVNDKDSKDSMTEGENLEEDEEEEEGGAETEEQSGNESEVNEPEEEEGSDNDDDEGEEEEEENTDYLTDSNKENETDEENTEVMIKGGGLKHVPCVEDEDFIQALDKMMLENLQQRSGESVKVHQLDVAIPLHLKSQLRKGPPLGGGEGEAESADTMPFVMLTRKGNKQQFKILNVPMSSQLAANHWNQQQAEQEERMRMKKLTLDINERQEQEDYQEMLQSLAQRPAPANTNRERRPRYQHPKGAPNADLIFKTGGRRR

SEQ ID NO: 95823 - protein, 1272 aa, Homo sapiens; identical to SEQ ID NO: 95822
  Payload ID: 19122
  Gene Name: UPF2 regulator of nonsense transcripts homolog (yeast)
  Uniprot ID: Q9HAU5
  ENSP ID: ENSP00000350221

SEQ ID NO: 95824 - protein, 1272 aa, Homo sapiens; identical to SEQ ID NO: 95822
  Payload ID: 19122
  Gene Name: UPF2 regulator of nonsense transcripts homolog (yeast)
  Uniprot ID: Q9HAU5
  ENSP ID: ENSP00000380244

SEQ ID NO: 95825 - protein, 443 aa, Homo sapiens
  Payload ID: 19123
  Gene Name: UPF3 regulator of nonsense transcripts homolog A (yeast)
  Uniprot ID: Q9H1J1
  ENSP ID: ENSP00000329592
MRSEKEGAGGLRAAVAARGPSGREKLSALEVQFHRDSQQQEAETPPTSSSGCGGGAGKPREEKRTALSKVVIRRLPPGLTKEQLEEQLRPLPAHDYFEFFAADLSLYPHLYSRAYINFRNPDDILLFRDRFDGYIFLDSKDPEYKKFLETYCVEEEKTSANPETLLGEMEAKTRELIARRTTPLLEYIKNRKLEKQRIREEKREERRRRELEKKRLREEEKRRRREEERCKKKETDKQKKIAEKEVRIKLLKKPEKGEEPTTEKPKERGEEIDTGGGKQESCAPGAVVKARPMEGSLEEPQETSHSGSDKEHRDVERSQEQESEAQRYHVDDGRRHRAHHEPERLSRRSEDEQRWGKGPGQDRGKKGSQDSGAPGEAMERLGRAQRCDDSPAPRKERLANKDRPALQLYDPGARFRARECGGNRRICKAEGSGTGPEKREEAE

SEQ ID NO: 95826 - protein, 476 aa, Homo sapiens
  Payload ID: 19123
  Gene Name: UPF3 regulator of nonsense transcripts homolog A (yeast)
  Uniprot ID: Q9H1J1
  ENSP ID: ENSP00000364448
MRSEKEGAGGLRAAVAARGPSGREKLSALEVQFHRDSQQQEAETPPTSSSGCGGGAGKPREEKRTALSKVVIRRLPPGLTKEQLEEQLRPLPAHDYFEFFAADLSLYPHLYSRAYINFRNPDDILLFRDRFDGYIFLDSKGLEYPAVVEFAPFQKIAKKKLRKKDAKTGSIEDDPEYKKFLETYCVEEEKTSANPETLLGEMEAKTRELIARRTTPLLEYIKNRKLEKQRIREEKREERRRRELEKKRLREEEKRRRREEERCKKKETDKQKKIAEKEVRIKLLKKPEKGEEPTTEKPKERGEEIDTGGGKQESCAPGAVVKARPMEGSLEEPQETSHSGSDKEHRDVERSQEQESEAQRYHVDDGRRHRAHHEPERLSRRSEDEQRWGKGPGQDRGKKGSQDSGAPGEAMERLGRAQRCDDSPAPRKERLANKDRPALQLYDPGARFRARECGGNRRICKAEGSGTGPEKREEAE

SEQ ID NO: 95827 - protein, 105 aa, Homo sapiens
  Payload ID: 19123
  Gene Name: UPF3 regulator of nonsense transcripts homolog A (yeast)
  ENSP ID: ENSP00000482320
MRSEKEGAGGLRAAVAARGPSGREKLSALEVQFHRDSQQQEAETPPTSSSGCGGGAGKPREEKRTALSKVVIRRLPPGLTKEQLEEQLRPLPAHDYFEFFAADLR

SEQ ID NO: 95828 - protein, 470 aa, Homo sapiens
  Payload ID: 19124
  Gene Name: UPF3 regulator of nonsense transcripts homolog B (yeast)
  Uniprot ID: Q9BZI7
  ENSP ID: ENSP00000245418
MKEEKEHRPKEKRVTLLTPAGATGSGGGTSGDSSKGEDKQDRNKEKKEALSKVVIRRLPPTLTKEQLQEHLQPMPEHDYFEFFSNDTSLYPHMYARAYINFKNQEDIILFRDRFDGYVFLDNKGQEYPAIVEFAPFQKAAKKKTKKRDTKVGTIDDDPEYRKFLESYATDNEKMTSTPETLLEEIEAKNRELIAKKTTPLLSFLKNKQRMREEKREERRRREIERKRQREEERRKWKEEEKRKRKDIEKLKKIDRIPERDKLKDEPKIKLLKKPEKGDEKELDKREKAKKLDKENLSDERASGQSCTLPKRSDSELKDEKPKRPEDESGRDYREREREYERDQERILRERERLKRQEEERRRQKERYEKEKTFKRKEEEMKKEKDTLRDKGKKAESTESIGSSEKTEKKEEVVKRDRIRNKDRPAMQLYQPGARSRNRLCPPDDSTKSGDSAAERKQESGISHRKEGGEE

SEQ ID NO: 95829 - protein, 483 aa, Homo sapiens
  Payload ID: 19124
  Gene Name: UPF3 regulator of nonsense transcripts homolog B (yeast)
  Uniprot ID: Q9BZI7
  ENSP ID: ENSP00000276201
MKEEKEHRPKEKRVTLLTPAGATGSGGGTSGDSSKGEDKQDRNKEKKEALSKVVIRRLPPTLTKEQLQEHLQPMPEHDYFEFFSNDTSLYPHMYARAYINFKNQEDIILFRDRFDGYVFLDNKGQEYPAIVEFAPFQKAAKKKTKKRDTKVGTIDDDPEYRKFLESYATDNEKMTSTPETLLEEIEAKNRELIAKKTTPLLSFLKNKQRMREEKREERRRREIERKRQREEERRKWKEEEKRKRKDIEKLKKIDRIPERDKLKDEPKIKVHRFLLQAVNQKNLLKKPEKGDEKELDKREKAKKLDKENLSDERASGQSCTLPKRSDSELKDEKPKRPEDESGRDYREREREYERDQERILRERERLKRQEEERRRQKERYEKEKTFKRKEEEMKKEKDTLRDKGKKAESTESIGSSEKTEKKEEVVKRDRIRNKDRPAMQLYQPGARSRNRLCPPDDSTKSGDSAAERKQESGISHRKEGGEE

SEQ ID NO: 95830 - protein, 217 aa, Homo sapiens [sequence omitted]

SEQ ID NO: 95831 - protein, 138 aa, Homo sapiens
  Payload ID: 19125
  Gene Name: upper zone of growth plate and cartilage matrix associated
  Uniprot ID: Q8WVF2
  ENSP ID: ENSP00000367952
MTWRQAVLLSCFSAVVLLSMLREGTSVSVGTMQMAGEEASEDAKQKIFMQESDASNFLKRRGKRSPKSRDEVNVENRQKLRVDELRREYYEEQRNEFENFVEEQNDEQEERSREAVEQWRQWHYDGLHPSYLYNRHHT

SEQ ID NO: 95832 - protein, 116 aa, Homo sapiens
  Payload ID: 19125
  Gene Name: upper zone of growth plate and cartilage matrix associated
  ENSP ID: ENSP00000473368
MTWRQAVLLSCFSAVVLLSNAKQKIFMQESDASNFLKRRGKRSPKSRDEVNVENRQKLRVDELRREYYEEQRNEFENFVEEQNDEQEERSREAVEQWRQWHYDGLHPSYLYNRHHT

SEQ ID NO: 95833 - protein, 58 aa, Homo sapiens
  Payload ID: 19126
  Gene Name: up-regulated during skeletal muscle growth 5 homolog (mouse)
  Uniprot ID: Q96IX5
  ENSP ID: ENSP00000311245
MAGPESDAQYQFTGIKKYFNSYTLTGRMNCVLATYGSIALIVLYFKLRSKKTPAVKAT

SEQ ID NO: 95834 - protein, 58 aa, Homo sapiens; identical to SEQ ID NO: 95833
  Payload ID: 19126
  Gene Name: up-regulated during skeletal muscle growth 5 homolog (mouse)
  Uniprot ID: Q96IX5
  ENSP ID: ENSP00000337705

SEQ ID NO: 95835 - protein, 58 aa, Homo sapiens; identical to SEQ ID NO: 95833
  Payload ID: 19126
  Gene Name: up-regulated during skeletal muscle growth 5 homolog (mouse)
  Uniprot ID: Q96IX5
  ENSP ID: ENSP00000358826

SEQ ID NO: 95836 - protein, 58 aa, Homo sapiens; identical to SEQ ID NO: 95833
  Payload ID: 19126
  Gene Name: up-regulated during skeletal muscle growth 5 homolog (mouse)
  Uniprot ID: Q96IX5
  ENSP ID: ENSP00000358830

SEQ ID NO: 95837 - protein, 58 aa, Homo sapiens; identical to SEQ ID NO: 95833
  Payload ID: 19126
  Gene Name: up-regulated during skeletal muscle growth 5 homolog (mouse)
  Uniprot ID: Q96IX5
  ENSP ID: ENSP00000358840

SEQ ID NO: 95838 - protein, 888 aa, Homo sapiens
  Payload ID: 19127
  Gene Name: upregulator of cell proliferation
  Uniprot ID: Q8TCY9
  ENSP ID: ENSP00000336872
MEGDDCEFRYGDGTNEAQDNDFPTVERSRLQEMLSLLGLETYQVQKLSLQDSLQISFDSMKNWAPQVPKDLPWNFLRKLQALNADARNTTMVLDVLPDARPVEKESQMEEEIIYWDPADDLAADIYSFSELPTPDTPVNPLDLLCALLLSSDSFLQQEIALKMALCQFALPLVLPDSENHYHTFLLWAMRGIVRTWWSQPPRGMGSFREDSVVLSRAPAFAFVRMDVSSNSKSQLLNAVLSPGHRQWDCFWHRDLNLGTNAREISDGLVEISWFFPSGREDLDIFPEPVAFLNLRGDIGSHWLQFKLLTEISSAVFILTDNISKKEYKLLYSMKESTTKYYFILSPYRGKRNTNLRFLNKLIPVLKIDHSHVLVKVSSTDSDSFVKRIRAIVGNVLRAPCRRVSVEDMAHAARKLGLKVDEDCEECQKAKDRMERITRKIKDSDAYRRDELRLQGDPWRKAAQVEKEFCQLQWAVDPPEKHRAELRRRLLELRMQQNGHDPSSGVQEFISGISSPSLSEKQYFLRWMEWGLARVAQPRLRQPPETLLTLRPKHGGTTDVGEPLWPEPLGVEHFLREMGQFYEAESCLVEAGRLPAGQRRFAHFPGLASELLLTGLPLELIDGSTLSMPVRWVTGLLKELHVRLERRSRLVVLSTVGVPGTGKSTLLNTMFGLRFATGKSCGPRGAFMQLITVAEGFSQDLGCDHILVIDSGGLIGGALTSAGDRFELEASLATLLMGLSNVTVISLAETKDIPAAILHAFLRLEKTGHMPNYQFVYQNLHDVSVPGPRPRDKRQLLDPPGDLSRAAAQMEKQGDGFRALAGLAFCDPEKQHIWHIPGLWHGAPPMAAVSLAYSEAIFELKRCLLENIRNGLSNQNKNIQQLIELVRRL

SEQ ID NO: 95839 - protein, 922 aa, Homo sapiens
  Payload ID: 19127
  Gene Name: upregulator of cell proliferation
  Uniprot ID: Q8TCY9
  ENSP ID: ENSP00000384955
MASPGHSDLGEVAPEIKASERRTAVAIADLEWREMEGDDCEFRYGDGTNEAQDNDFPTVERSRLQEMLSLLGLETYQVQKLSLQDSLQISFDSMKNWAPQVPKDLPWNFLRKLQALNADARNTTMVLDVLPDARPVEKESQMEEEIIYWDPADDLAADIYSFSELPTPDTPVNPLDLLCALLLSSDSFLQQEIALKMALCQFALPLVLPDSENHYHTFLLWAMRGIVRTWWSQPPRGMGSFREDSVVLSRAPAFAFVRMDVSSNSKSQLLNAVLSPGHRQWDCFWHRDLNLGTNAREISDGLVEISWFFPSGREDLDIFPEPVAFLNLRGDIGSHWLQFKLLTEISSAVFILTDNISKKEYKLLYSMKESTTKYYFILSPYRGKRNTNLRFLNKLIPVLKIDHSHVLVKVSSTDSDSFVKRIRAIVGNVLRAPCRRVSVEDMAHAARKLGLKVDEDCEECQKAKDRMERITRKIKDSDAYRRDELRLQGDPWRKAAQVEKEFCQLQWAVDPPEKHRAELRRRLLELRMQQNGHDPSSGVQEFISGISSPSLSEKQYFLRWMEWGLARVAQPRLRQPPETLLTLRPKHGGTTDVGEPLWPEPLGVEHFLREMGQFYEAESCLVEAGRLPAGQRRFAHFPGLASELLLTGLPLELIDGSTLSMPVRWVTGLLKELHVRLERRSRLVVLSTVGVPGTGKSTLLNTMFGLRFATGKSCGPRGAFMQLITVAEGFSQDLGCDHILVIDSGGLIGGALTSAGDRFELEASLATLLMGLSNVTVISLAETKDIPAAILHAFLRLEKTGHMPNYQFVYQNLHDVSVPGPRPRDKRQLLDPPGDLSRAAAQMEKQGDGFRALAGLAFCDPEKQHIWHIPGLWHGAPPMAAVSLAYSEAIFELKRCLLENIRNGLSNQNKNIQQLIELVRRL

SEQ ID NO: 95840 - protein, 163 aa, Homo sapiens
  Payload ID: 19127
  Gene Name: upregulator of cell proliferation
  ENSP ID: ENSP00000389990
MEGDDCEFRYGDGTNEAQDNDFPTVERSRLQEMLSLLGLETYQVQKLSLQDSLQISFDSMKNWAPQVPKDLPWNFLRKLQALNADARNTTMVLDVLPDARPVEKESQMEEEIIYWDPADDLAADIYSFSELPTPDTPVNPLDLLCALLLSSDSFLQQEIALKM

SEQ ID NO: 95841 - protein, 888 aa, Homo sapiens; identical to SEQ ID NO: 95838
  Payload ID: 19127
  Gene Name: upregulator of cell proliferation
  Uniprot ID: Q8TCY9
  ENSP ID: ENSP00000392136

SEQ ID NO: 95842 - protein, 122 aa, Homo sapiens
  Payload ID: 19127
  Gene Name: upregulator of cell proliferation
  ENSP ID: ENSP00000392963
MEGDDCEFRYGDGTNEAQDNDFPTVERSRLQEMLSLLGLETYQVQKLSLQDSLQISFDSMKNWAPQVPKDLPWNFLRKLQALNADARNTTMVLDVLPDARPVEKESQMEEEIIYWDPADDLA

SEQ ID NO: 95843 - protein, 931 aa, Homo sapiens
  Payload ID: 19127
  Gene Name: upregulator of cell proliferation
  Uniprot ID: Q8TCY9
  ENSP ID: ENSP00000396918
MASPGIEVELLGKGHSDLGEVAPEIKASERRTAVAIADLEWREMEGDDCEFRYGDGTNEAQDNDFPTVERSRLQEMLSLLGLETYQVQKLSLQDSLQISFDSMKNWAPQVPKDLPWNFLRKLQALNADARNTTMVLDVLPDARPVEKESQMEEEIIYWDPADDLAADIYSFSELPTPDTPVNPLDLLCALLLSSDSFLQQEIALKMALCQFALPLVLPDSENHYHTFLLWAMRGIVRTWWSQPPRGMGSFREDSVVLSRAPAFAFVRMDVSSNSKSQLLNAVLSPGHRQWDCFWHRDLNLGTNAREISDGLVEISWFFPSGREDLDIFPEPVAFLNLRGDIGSHWLQFKLLTEISSAVFILTDNISKKEYKLLYSMKESTTKYYFILSPYRGKRNTNLRFLNKLIPVLKIDHSHVLVKVSSTDSDSFVKRIRAIVGNVLRAPCRRVSVEDMAHAARKLGLKVDEDCEECQKAKDRMERITRKIKDSDAYRRDELRLQGDPWRKAAQVEKEFCQLQWAVDPPEKHRAELRRRLLELRMQQNGHDPSSGVQEFISGISSPSLSEKQYFLRWMEWGLARVAQPRLRQPPETLLTLRPKHGGTTDVGEPLWPEPLGVEHFLREMGQFYEAESCLVEAGRLPAGQRRFAHFPGLASELLLTGLPLELIDGSTLSMPVRWVTGLLKELHVRLERRSRLVVLSTVGVPGTGKSTLLNTMFGLRFATGKSCGPRGAFMQLITVAEGFSQDLGCDHILVIDSGGLIGGALTSAGDRFELEASLATLLMGLSNVTVISLAETKDIPAAILHAFLRLEKTGHMPNYQFVYQNLHDVSVPGPRPRDKRQLLDPPGDLSRAAAQMEKQGDGFRALAGLAFCDPEKQHIWHIPGLWHGAPPMAAVSLAYSEAIFELKRCLLENIRNGLSNQNKNIQQLIELVRRL

SEQ ID NO: 95844 - protein, 96 aa, Homo sapiens
  Payload ID: 19127
  Gene Name: upregulator of cell proliferation
  ENSP ID: ENSP00000409496
MASPGHSDLGEVAPEIKASERRTAVAIADLEWREMEGDDCEFRYGDGTNEAQDNDFPTDQDTGPRASKQPAKGHTLGRSVFFVFFPLPFTTMLLKK

SEQ ID NO: 95845 - protein, 181 aa, Homo sapiens
  Payload ID: 19127
  Gene Name: upregulator of cell proliferation
  ENSP ID: ENSP00000412599
MEGDDCEFRYGDGTNEAQDNDFPTVERSRLQEMLSLLGLETYQVQKLSLQDSLQISFDSMKNWAPQVPKDLPWNFLRKLQALNADARNTTMVLDVLPDARPVEKESQMEEEIIYWDPADDLAADIYSFSELPTPDTPVNPLDLLCALLLSSDSFLQQEIALKMALCQFALPLVLPDSENHY

SEQ ID NO: 95846 - protein, 540 aa, Homo sapiens
  Payload ID: 19128
  Gene Name: upstream binding protein 1 (LBP-1a)
  Uniprot ID: Q9NZI7
  ENSP ID: ENSP00000283628
MAWVLKMDEVIESGLVHDFDASLSGIGQELGAGAYSMSDVLALPIFKQEDSSLPLDGETEHPPFQYVMCAATSPAVKLHDETLTYLNQGQSYEIRMLDNRKMGDMPEINGKLVKSIIRVVFHDRRLQYTEHQQLEGWKWNRPGDRLLDLDIPMSVGIIDTRTNPSQLNAVEFLWDPAKRTSAFIQVHCISTEFTPRKHGGEKGVPFRIQVDTFKQNENGEYTDHLHSASCQIKVFKPKGADRKQKTDREKMEKRTAHEKEKYQPSYDTTILTEMRLEPIIEDAVEHEQKKSSKRTLPADYGDSLAKRGSCSPWPDAPTAYVNNSPSPAPTFTSPQQSTCSVPDSNSSSPNHQGDGASQTSGEQIQPSATIQETQQWLLKNRFSSYTRLFSNFSGADLLKLTKEDLVQICGAADGIRLYNSLKSRSVRPRLTIYVCREQPSSTVLQGQQQAASSASENGSGAPYVYHAIYLEEMIASEVARKLALVFNIPLHQINQVYRQGPTGIHILVSDQMVQNFQDESCFLFSTVKAESSDGIHIILK

SEQ ID NO: 95847 - protein, 540 aa, Homo sapiens; identical to SEQ ID NO: 95846
  Payload ID: 19128
  Gene Name: upstream binding protein 1 (LBP-1a)
  Uniprot ID: Q9NZI7
  ENSP ID: ENSP00000283629

SEQ ID NO: 95848 - protein, 164 aa, Homo sapiens
  Payload ID: 19128
  Gene Name: upstream binding protein 1 (LBP-1a)
  ENSP ID: ENSP00000393842
MEKRTAHEKEKYQPSYDTTILTECSPWPDAPTAYVNNSPSPAPTFTSPQQSTCSVPDSNSSSPNHQGDGASQTSGEQIQPSATIQETQQWLLKNRFSSYTRLFSNFSGADLLKLTKEDLVQICGAADGIRLYNSLKSRAGPDMMQALMRAEVDCKTGRNAHGQY

SEQ ID NO: 95849 - protein, 504 aa, Homo sapiens
  Payload ID: 19128
  Gene Name: upstream binding protein 1 (LBP-1a)
  Uniprot ID: Q9NZI7
  ENSP ID: ENSP00000395558
MAWVLKMDEVIESGLVHDFDASLSGIGQELGAGAYSMSDVLALPIFKQEDSSLPLDGETEHPPFQYVMCAATSPAVKLHDETLTYLNQGQSYEIRMLDNRKMGDMPEINGKLVKSIIRVVFHDRRLQYTEHQQLEGWKWNRPGDRLLDLDIPMSVGIIDTRTNPSQLNAVEFLWDPAKRTSAFIQVHCISTEFTPRKHGGEKGVPFRIQVDTFKQNENGEYTDHLHSASCQIKVFKPKGADRKQKTDREKMEKRTAHEKEKYQPSYDTTILTECSPWPDAPTAYVNNSPSPAPTFTSPQQSTCSVPDSNSSSPNHQGDGASQTSGEQIQPSATIQETQQWLLKNRFSSYTRLFSNFSGADLLKLTKEDLVQICGAADGIRLYNSLKSRSVRPRLTIYVCREQPSSTVLQGQQQAASSASENGSGAPYVYHAIYLEEMIASEVARKLALVFNIPLHQINQVYRQGPTGIHILVSDQMVQNFQDESCFLFSTVKAESSDGIHIILK

SEQ ID NO: 95850 - protein, 148 aa, Homo sapiens
  Payload ID: 19128
  Gene Name: upstream binding protein 1 (LBP-1a)
  ENSP ID: ENSP00000401614
MAWVLKMDEVIESGLVHDFDASLSGIGQELGAGAYSMSDVLALPIFKQEDSSLPLDGETEHPPFQYVMCAATSPAVKLHDETLTYLNQGQSYEIRMLDNRKMGDMPEINGKLVKSIIRVVFHDRRLQYTEHQQLEGWKWNRPGDRLLD

SEQ ID NO: 95851 - protein, 764 aa, Homo sapiens
  Payload ID: 19129
  Gene Name: upstream binding transcription factor, RNA polymerase I
  Uniprot ID: P17480
  ENSP ID: ENSP00000302640
MNGEADCPTDLEMAAPKGQDRWSQEDMLTLLECMKNNLPSNDSSKFKTTESHMDWEKVAFKDFSGDMCKLKWVEISNEVRKFRTLTELILDAQEHVKNPYKGKKLKKHPDFPKKPLTPYFRFFMEKRAKYAKLHPEMSNLDLTKILSKKYKELPEKKKMKYIQDFQREKQEFERNLARFREDHPDLIQNAKKSDIPEKPKTPQQLWYTHEKKVYLKVRPDATTKEVKDSLGKQWSQLSDKKRLKWIHKALEQRKEYEEIMRDYIQKHPELNISEEGITKSTLTKAERQLKDKFDGRPTKPPPNSYSLYCAELMANMKDVPSTERMVLCSQQWKLLSQKEKDAYHKKCDQKKKDYEVELLRFLESLPEEEQQRVLGEEKMLNINKKQATSPASKKPAQEGGKGGSEKPKRPVSAMFIFSEEKRRQLQEERPELSESELTRLLARMWNDLSEKKKAKYKAREAALKAQSERKPGGEREERGKLPESPKRAEEIWQQSVIGDYLARFKNDRVKALKAMEMTWNNMEKKEKLMWIKKAAEDQKRYERELSEMRAPPAATNSSKKMKFQGEPKKPPMNGYQKFSQELLSNGELNHLPLKERMVEIGSRWQRISQSQKEHYKKLAEEQQKQYKVHLDLWVKSLSPQDRAAYKEYISNKRKSMTKLRGPNPKSSRTTLQSKSESEEDDEEDEDDEDEDEEEEDDENGDSSEDGGDSSESSSEDESEDGDENEEDDEDEDDDEDDDEDEDNESEGSSSSSSSSGDSSDSDSN

SEQ ID NO: 95852 - protein, 727 aa, Homo sapiens
  Payload ID: 19129
  Gene Name: upstream binding transcription factor, RNA polymerase I
  Uniprot ID: P17480
  ENSP ID: ENSP00000345297
MNGEADCPTDLEMAAPKGQDRWSQEDMLTLLECMKNNLPSNDSSKFKTTESHMDWEKVAFKDFSGDMCKLKWVEISNEVRKFRTLTELILDAQEHVKNPYKGKKLKKHPDFPKKPLTPYFRFFMEKRAKYAKLHPEMSNLDLTKILSKKYKELPEKKKMKYIQDFQREKQEFERNLARFREDHPDLIQNAKKSDIPEKPKTPQQLWYTHEKKVYLKVRPDEIMRDYIQKHPELNISEEGITKSTLTKAERQLKDKFDGRPTKPPPNSYSLYCAELMANMKDVPSTERMVLCSQQWKLLSQKEKDAYHKKCDQKKKDYEVELLRFLESLPEEEQQRVLGEEKMLNINKKQATSPASKKPAQEGGKGGSEKPKRPVSAMFIFSEEKRRQLQEERPELSESELTRLLARMWNDLSEKKKAKYKAREAALKAQSERKPGGEREERGKLPESPKRAEEIWQQSVIGDYLARFKNDRVKALKAMEMTWNNMEKKEKLMWIKKAAEDQKRYERELSEMRAPPAATNSSKKMKFQGEPKKPPMNGYQKFSQELLSNGELNHLPLKERMVEIGSRWQRISQSQKEHYKKLAEEQQKQYKVHLDLWVKSLSPQDRAAYKEYISNKRKSMTKLRGPNPKSSRTTLQSKSESEEDDEEDEDDEDEDEEEEDDENGDSSEDGGDSSESSSEDESEDGDENEEDDEDEDDDEDDDEDEDNESEGSSSSSSSSGDSSDSDSN

SEQ ID NO: 95853 - protein, 727 aa, Homo sapiens; identical to SEQ ID NO: 95852
  Payload ID: 19129
  Gene Name: upstream binding transcription factor, RNA polymerase I
  Uniprot ID: P17480
  ENSP ID: ENSP00000377231

SEQ ID NO: 95854 - protein, 764 aa, Homo sapiens; identical to SEQ ID NO: 95851
  Payload ID: 19129
  Gene Name: upstream binding transcription factor, RNA polymerase I
  Uniprot ID: P17480
  ENSP ID: ENSP00000390669

SEQ ID NO: 95855 - protein, 194 aa, Homo sapiens
  Payload ID: 19129
  Gene Name: upstream binding transcription factor, RNA polymerase I
  ENSP ID: ENSP00000431295
MFIFSEEKRRQLQEERPELSESELTRLLARMWNDLSEKKKAKYKAREAALKAQSERKPGGEREERGKLPESPKRAEEIWQQSVIGDYLARFKNDRVKALKAMEMTWNNMEKKEKLMWIKKAAEDQKRYERELSEMRAPPAATNSSKKMKFQGEPKKPPMNGYQKFSQELLSNGELNHLPLKERMVEIGSRWQRI

SEQ ID NO: 95856 - protein, 745 aa, Homo sapiens
  Payload ID: 19129
  Gene Name: upstream binding transcription factor, RNA polymerase I
  ENSP ID: ENSP00000431539
MNGEADCPTDLEMAAPKGQDRWSQEDMLTLLECMKNNLPSNDSSKFKTTESHMDWEKVAFKDFSGDMCKLKWVEISNEVRKFRTLTELILDAQEHVKNPYKGKKLKKHPDFPKKPLTPYFRFFMEKRAKYAKLHPEMSNLDLTKILSKKYKELPEKKKMKYIQDFQREKQEFERNLARFREDHPDLIQNAKKSDIPEKPKTPQQLWYTHEKKVYLKVRPDEIMRDYIQKHPELNISEEGITKSTLTKAERQLKDKFDGRPTKPPPNSYSLYCAELMANMKDVPSTERMVLCSQQWKLLSQKEKDAYHKKCDQKKKDYEVELLRFLESLPEEEQQRVLGEEKMLNINKKQATSPASKKPAQEGGKGGSEKPKRPVSAMFIFSEEKRRQLQEERPELSESELTRLLARMWNDLSEKKKAKYKAREAALKAQSERKPGGEREERGKLPESPKRAEEIWQQSVIGDYLARFKNDRVKALKAMEMTWNNMEKKEKLMWIKKAAEDQKRYERELSEMRAPPAATNSSKKMKFQGEPKKPPMNGYQKFSQELLSNGELNHLPLKERMVEIGSRWQRISQSQKEHYKKLAEEQQKQYKVHLDLWVKSLSPQDRAAYKEYISNKRKSMTKLRGPNPKSSRTTLQSKSPRRMMKRMRMTRTRMKKRKMMRMGTPLKMAATPLSPAARTRARMGMRMKRMTRTKTTTRMTMRMKIMSPRAAAPAPPPQGTPQTLTPTEAQPHPRAARESPGAPLPN

SEQ ID NO: 95857 - protein, 727 aa, Homo sapiens; identical to SEQ ID NO: 95852
  Payload ID: 19129
  Gene Name: upstream binding transcription factor, RNA polymerase I
  Uniprot ID: P17480
  ENSP ID: ENSP00000432925

SEQ ID NO: 95858 - protein, 149 aa, Homo sapiens
  Payload ID: 19129
  Gene Name: upstream binding transcription factor, RNA polymerase I
  ENSP ID: ENSP00000433046
MNGEADCPTDLEMAAPKGQDRWSQEDMLTLLECMKNNLPSNDSSKFKTTESHMDWEKVAFKDFSGDMCKLKWVEISNEKHPDFPKKPLTPYFRFFMEKRAKYAKLHPEMSNLDLTKILSKKYKELPEKKKMKYIQDFQREKQEFERNLA

SEQ ID NO: 95859 - protein, 36 aa, Homo sapiens
  Payload ID: 19129
  Gene Name: upstream binding transcription factor, RNA polymerase I
  ENSP ID: ENSP00000433625
  MOD_RES (1)..(1): Any amino acid
XEHYKKLAEEQQKQYKVHLDLWVKRWAGWSRTPDLM

SEQ ID NO: 95860 - protein, 764 aa, Homo sapiens; identical to SEQ ID NO: 95851
  Payload ID: 19129
  Gene Name: upstream binding transcription factor, RNA polymerase I
  Uniprot ID: P17480
  ENSP ID: ENSP00000435708

SEQ ID NO: 95861 - protein, 727 aa, Homo sapiens; identical to SEQ ID NO: 95852
  Payload ID: 19129
  Gene Name: upstream binding transcription factor, RNA polymerase I
  Uniprot ID: P17480
  ENSP ID: ENSP00000437180

SEQ ID NO: 95862 - protein, 393 aa, Homo sapiens
  Payload ID: 19130
  Gene Name: upstream binding transcription factor, RNA polymerase I-like 1
  Uniprot ID: P0CB47
  ENSP ID: ENSP00000485108
MALPRSQGHWSNKDILRLLECMENNRPSDDNSTFSSTQSHMDWGKVAFKNFSGEMCRLKWLEISCNLRKFGTLKELVLEAKKCVKKMNKSQKYRNGPDFPKRPLTAYNRFFKESWPQYSQMYPGMRSQELTKILSKKYRELPEQMKQKYIQDFRKEKQEFEEKLARFREEHPDLVQKAKKSSVSKRTQNKVQKKFQKNIEEVRSLPKTDRFFKKVKFHGEPQKPPMNGYHKFHQDSWSSKEMQHLSVRERMVEIGRRWQRIPQSQKDHFKSQAEELQKQYKVKLDLWLKTLSPENYAAYKESTYAKGKNMAMTGGPDPRLKQADPQSSSAKGLQEGFGEGQGLQAAGTDSSQTIWVNCHVSMEPEENRKKDREKEESSNSSDCSSGEEIEVDV

SEQ ID NO: 95863 - protein, 282 aa, Homo sapiens
  Payload ID: 19131
  Gene Name: upstream transcription factor 1
  ENSP ID: ENSP00000356998
MKGQQKTAETEEGTVQIQEGAVATGEDPTSVAIASIQSAATFPDPNVKYVFRTENGGQVMYRVIQVSEGQLDGQTEGTGAISGYPATQSMTQAVIQGAFTSDDAVDTEGTAAETHYTYFPSTAVGDGAGGQFFVMMSPQEVLQGGSQRSIAPRTHPYSPKSEAPRTTRDEKRRAQHNEVERRRRDKINNWIVQLSKIIPDCSMESTKSGQSKGGILSKACDYIQELRQSNHRLSEELQGLDQLQLDNDVLRQQVEDLKNKNLLLRAQLRHHGLEVVIKNDSN

SEQ ID NO: 95864 - protein, 310 aa, Homo sapiens
  Payload ID: 19131
  Gene Name: upstream transcription factor 1
  Uniprot ID: P22415
  ENSP ID: ENSP00000356999
MKGQQKTAETEEGTVQIQEGAVATGEDPTSVAIASIQSAATFPDPNVKYVFRTENGGQVMYRVIQVSEGQLDGQTEGTGAISGYPATQSMTQAVIQGAFTSDDAVDTEGTAAETHYTYFPSTAVGDGAGGTTSGSTAAVVTTQGSEALLGQATPPGTGQFFVMMSPQEVLQGGSQRSIAPRTHPYSPKSEAPRTTRDEKRRAQHNEVERRRRDKINNWIVQLSKIIPDCSMESTKSGQSKGGILSKACDYIQELRQSNHRLSEELQGLDQLQLDNDVLRQQVEDLKNKNLLLRAQLRHHGLEVVIKNDSN

SEQ ID NO: 95865 - protein, 310 aa, Homo sapiens; identical to SEQ ID NO: 95864
  Payload ID: 19131
  Gene Name: upstream transcription factor 1
  Uniprot ID: P22415
  ENSP ID: ENSP00000357000

SEQ ID NO: 95866 - protein, 105 aa, Homo sapiens
  Payload ID: 19131
  Gene Name: upstream transcription factor 1
  ENSP ID: ENSP00000432533
MYRVIQVSEGQLDGQTEGTGAISGYPATQSMTQAVIQGAFTSDDAVDTEGTAAETHYTYFPSTAVGDGAGGTTSGSTAAVVTTQGSEALLGQATPPGTGQFFVMM

SEQ ID NO: 95867 - protein, 165 aa, Homo sapiens
  Payload ID: 19131
  Gene Name: upstream transcription factor 1
  ENSP ID: ENSP00000433041
  MOD_RES (1)..(1): Any amino acid
XSTAAVVTTQGSEALLGQATPPGTGQFFVMMSPQEVLQGGSQRSIAPRTHPYSPKSEAPRTTRDEKRRAQHNEVERRRRDKINNWIVQLSKIIPDCSMESTKSGQVGFYPKLVIISRSFGRVTTACLKNCRDLTNCSWTMTCFDNRWKILKTRICCFELSCGTTD

SEQ ID NO: 95868 - protein, 217 aa, Homo sapiens
  Payload ID: 19131
  Gene Name: upstream transcription factor 1
  ENSP ID: ENSP00000435005
MKGQQKTAETEEGTVQIQEGAVATGEDPTSVAIASIQSAATFPDPNVKYVFRTENGGQVMYRVIQVSEGQLDGQTEGTGAISGYPATQSMTQAVIQGQFFVMMSPQEVLQGGSQRSIAPRTHPYSPKSEAPRTTRDEKRRAQHNEVERRRRDKINNWIVQLSKIIPDCSMESTKSGQSKGGILSKACDYIQELRQSNHRLSEELQGLDQLQLDNDVL

SEQ ID NO: 95869 - protein, 48 aa, Homo sapiens
  Payload ID: 19131
  Gene Name: upstream transcription factor 1
  ENSP ID: ENSP00000435671
MKGQQKTAETEEGTVQIQEGAVATGEDPTSVAIASIQSAATFPDPNVK

SEQ ID NO: 95870 - protein, 346 aa, Homo sapiens
  Payload ID: 19132
  Gene Name: upstream transcription factor 2, c-fos interacting
  Uniprot ID: Q15853
  ENSP ID: ENSP00000222305
MDMLDPGLDPAASATAAAAASHDKGPEAEEGVELQEGGDGPGAEEQTAVAITSVQQAAFGDHNIQYQFRTETNGGQVTYRVVQVTDGQLDGQGDTAGAVSVVSTAAFAGGQQAVTQVGVDGAAQRPGPAAASVPPGPAAPFPLAVIQNPFSNGGSPAAEAVSGEARFAYFPASSVGDTTAVSVQTTDQSLQAGGQFYVMMTPQDVLQTGTQRTIAPRTHPYSPKIDGTRTPRDERRRAQHNEVERRRRDKINNWIVQLSKIIPDCNADNSKTGASKGGILSKACDYIRELRQTNQRMQETFKEAERLQMDNELLRQQIEELKNENALLRAQLQQHNLEMVGEGTRQ

SEQ ID NO: 95871 - protein, 279 aa, Homo sapiens
  Payload ID: 19132
  Gene Name: upstream transcription factor 2, c-fos interacting
  Uniprot ID: Q15853
  ENSP ID: ENSP00000340633
MDMLDPGLDPAASATAAAAASHDKGPEAEEGVELQEGGDGPGAEEQTAVAITSVQQAAFGDHNIQYQFRTETNGGQAVIQNPFSNGGSPAAEAVSGEARFAYFPASSVGDTTAVSVQTTDQSLQAGGQFYVMMTPQDVLQTGTQRTIAPRTHPYSPKIDGTRTPRDERRRAQHNEVERRRRDKINNWIVQLSKIIPDCNADNSKTGASKGGILSKACDYIRELRQTNQRMQETFKEAERLQMDNELLRQQIEELKNENALLRAQLQQHNLEMVGEGTRQ

SEQ ID NO: 95872 - protein, 215 aa, Homo sapiens
  Payload ID: 19132
  Gene Name: upstream transcription factor 2, c-fos interacting
  Uniprot ID: Q15853
  ENSP ID: ENSP00000368429
MDMLDPGLDPAASATAAAAASHDKGPEAEEGVELQEGGDGPGAEEQTAVAITSVQQAAFGDHNIQYQFRTETNGGQTGTQRTIAPRTHPYSPKIDGTRTPRDERRRAQHNEVERRRRDKINNWIVQLSKIIPDCNADNSKTGASKGGILSKACDYIRELRQTNQRMQETFKEAERLQMDNELLRQQIEELKNENALLRAQLQQHNLEMVGEGTRQ

SEQ ID NO: 95873 - protein, 253 aa, Homo sapiens
  Payload ID: 19132
  Gene Name: upstream transcription factor 2, c-fos interacting
  ENSP ID: ENSP00000469364
VIQNPFSNGGSPAAEAVSGEARFAYFPASSVGDTTAVSVQTTDQSLQAGGQFYVMMTPQDVLQTGTQRTIAPRTHPYSPKIDGTRTPRDERRRAQHNEVERRRRDKINNWIVQLSKIIPDCNADNSKTGAVSTPDPQCLRWSRPPTLACRKSNSHGARESSLGWRPVGGACPKAPGPLAPQSKGGILSKACDYIRELRQTNQRMQETFKEAERLQMDNELLRQQIEELKNENALLRAQLQQHNLEMVGEGTRQ

SEQ ID NO: 95874 - protein, 170 aa, Homo sapiens
  Payload ID: 19132
  Gene Name: upstream transcription factor 2, c-fos interacting
  ENSP ID: ENSP00000469585
  MOD_RES (1)..(1): Any amino acid
XPGLDPAASATAAAAASHDKGPEAEEGVELQEGGDGPGAEEQTAVAITSVQQAAFGDHNIQYQFRTETNGGQVTYRVVQVTDGQLDGQGDTAGAVSVVSTAAFAGGQQAVTQVGVDGAAQRPGPAAASVPPGPAAPFPLVGALPPLGGGGREWRGDTGSALGEPRGWGRC

SEQ ID NO: 95875 - protein, 149 aa, Homo sapiens
  Payload ID: 19132
  Gene Name: upstream transcription factor 2, c-fos interacting
  ENSP ID: ENSP00000470081
  MOD_RES (1)..(1): Any amino acid
XSNLILSRCLGKQLCDNTCPLFFSSSCRKIDGTRTPRDERRRAQHNEVERRRRDKINNWIVQLSKIIPDCNADNSKTGASKGGILSKACDYIRELRQTNQRMQETFKEAERLQMDNELLRQQIEELKNENALLRAQLQQHNLEMVGEGT

SEQ ID NO: 95876 - protein, 86 aa, Homo sapiens
  Payload ID: 19132
  Gene Name: upstream transcription factor 2, c-fos interacting
  ENSP ID: ENSP00000470277
  MOD_RES (1)..(1): Any amino acid
XAVSGEARFAYFPASSVGDTTAVSVQTTDQSLQAGGQFYVMMTPQDVLQTGTQRTIAPRTHPYSPKIDGTRTPRDERRRAQHNEVP

SEQ ID NO: 95877 - protein, 338 aa, Homo sapiens
  Payload ID: 19132
  Gene Name: upstream transcription factor 2, c-fos interacting
  Uniprot ID: Q15853
  ENSP ID: ENSP00000471099
MDMLDPGLDPAASATAAAAASHDKGPEAEEGVELQEGGDGPGAEEQTAVAITSVQQAAFGDHNIQYQFRTETNGGQVTYRVVQVTDGQLDGQGDTAGAVSVVSTAAFAGGQQAVTQVGVDGAAQRPGPAAASVPPGPAAPFPLAVIQNPFSNGGSPAAEAVSGEARFAYFPASSVGDTTAVSVQTTDQSLQAGGQFYVMMTPQDVLQTGTQRTIAPRTHPYSPKIDGTRTPRDERRRAQHNEVERRRRDKINNWIVQLSKIIPDCNADNSKTGAACDYIRELRQTNQRMQETFKEAERLQMDNELLRQQIEELKNENALLRAQLQQHNLEMVGEGTRQ

SEQ ID NO: 95878 - protein, 349 aa, Homo sapiens
  Payload ID: 19132
  Gene Name: upstream transcription factor 2, c-fos interacting
  ENSP ID: ENSP00000471511
MLDPGLDPAASATAAAAASHDKGPEAEEGVELQEGGDGPGAEEQTAVAITSVQQAAFGDHNIQYQFRTETNGGQVTYRVVQVTDGQLDGQGDTAGAVSVVSTAAFAGGQQAVTQVGVDGAAQRPGPAAASVPPGPAAPFPLAVIQNPFSNGGSPAAEAVSGEARFAYFPASSVGDTTAVSVQTTDQSLQAGGQFYVMMTPQDVLQTGTQRTIAPRTHPYSPKIDGTRTPRDERRRAQHNEVERRRRDKINNWIVQLSKIIPDCNADNSKTGASKGGILSKACDYIRELRQTNQRMQETFKEAERLQMDNELLRQQVGAGPGAGQGPGAPDARRWPSAPLTSVVSARSRS

SEQ ID NO: 95879 - protein, 143 aa, Homo sapiens
  Payload ID: 19132
  Gene Name: upstream transcription factor 2, c-fos interacting
  ENSP ID: ENSP00000471775
MRGRDGGTEKAKGSLCPPTPQAVIQNPFSNGGSPAAEAVSGEARFAYFPASSVGDTTAVSVQTTDQSLQAGGQFYVMMTPQDVLQTGTQRTIAPRTHPYSPKIDGTRTPRDERRRAQHNEVERRRRDKINNWIVQLSKIIPDC

SEQ ID NO: 95880 - protein, 112 aa, Homo sapiens
  Payload ID: 19132
  Gene Name: upstream transcription factor 2, c-fos interacting
  ENSP ID: ENSP00000477020
MLDPGLDPAASATAAAAASHDKGPEAEEGVELQEGECLPGRPRPGRAGGARRGPDRAPTLLGPRRGRPRSGGADSGGHHQRPAGGVRRPQHPVPVPHRDKWRTGDIPRSPGD

SEQ ID NO: 95881 - protein, 2245 aa, Homo sapiens
  Payload ID: 19133
  Gene Name: upstream transcription factor family member 3
  Uniprot ID: Q68DE3
  ENSP ID: ENSP00000320794
MPEMTENETPTKKQHRKKNRETHNAVERHRKKKINAGINRIGELIPCSPALKQSKNMILDQAFKYITELKRQNDELLLNGGNNEQAEEIKKLRKQLEEIQKENGRYIELLKANDICLYDDPTIHWKGNLKNSKVSVVIPSDQVQKKIIVYSNGNQPGGNSQGTAVQGITFNVSHNLQKQTANVVPVQRTCNLVTPVSISGVYPSENKPWHQTTVPALATNQPVPLCLPAAISAQSILELPTSESESNVLGATSGSLIAVSIESEPHQHHSLHTCLNDQNSSENKNGQENPKVLKKMTPCVTNIPHSSSATATKVHHGNKSCLSIQDFRGDFQNTFVVSVTTTVCSQPPRTAGDSSPMSISKSADLTSTATVVASSAPGVGKATIPISTLSGNPLDNGWTLSCSLPSSSVSTSDLKNINSLTRISSAGNTQTTWTTLQLAGNTIQPLSQTPSSAVTPVLNESGTSPTTSNHSRYVATDINLNNSFPADGQPVEQVVVTLPSCPSLPMQPLIAQPQVKSQPPKNILPLNSAMQVIQMAQPVGSAVNSAPTNQNVIILQPPSTTPCPTVMRAEVSNQTVGQQIVIIQAANQNPLPLLPAPPPGSVRLPINGANTVIGSNNSVQNVPTPQTFGGKHLVHILPRPSSLSASNSTQTFSVTMSNQQPQTISLNGQLFALQPVMSSSGTTNQTPMQIIQPTTSEDPNTNVALNTFGALASLNQSISQMAGQSCVQLSISQPANSQTAANSQTTTANCVSLTTTAAPPVTTDSSATLASTYNLVSTSSMNTVACLPNMKSKRLNKKPGGRKHLAANKSACPLNSVRDVSKLDCPNTEGSAEPPCNDGLLESFPAVLPSVSVSQANSVSVSASHSLGVLSSESLIPESVSKSKSAEKSSPPSQESVTSEHFAMAAAKSKDSTPNLQQETSQDKPPSSLALSDAAKPCASANVLIPSPSDPHILVSQVPGLSSTTSTTSTDCVSEVEIIAEPCRVEQDSSDTMQTTGLLKGQGLTTLLSDLAKKKNPQKSSLSDQMDHPDFSSENPKIVDSSVNLHPKQELLLMNNDDRDPPQHHSCLPDQEVINGSLINGRQADSPMSTSSGSSRSFSVASMLPETTREDVTSNATTNTCDSCTFVEQTDIVALAARAIFDQENLEKGRVGLQADIREVASKPSEASLLEGDPPFKSQIPKESGTGQAEATPNEFNSQGSIEATMERPLEKPSCSLGIKTSNASLQDSTSQPPSITSLSVNNLIHQSSISHPLASCAGLSPTSEQTTVPATVNLTVSSSSYGSQPPGPSLMTEYSQEQLNTMTSTIPNSQIQEPLLKPSHESRKDSAKRAVQDDLLLSSAKRQKHCQPAPLRLESMSLMSRTPDTISDQTQMMVSQIPPNSSNSVVPVSNPAHGDGLTRLFPPSNNFVTPALRQTEVQCGSQPSVAEQQQTQASQHLQALQQHVPAQGVSHLHSNHLYIKQQQQQQQQQQQQQQQQQAGQLRERHHLYQMQHHVPHAESSVHSQPHNVHQQRTLQQEVQMQKKRNLVQGTQTSQLSLQPKHHGTDQSRSKTGQPHPHHQQMQQQMQQHFGSSQTEKSCENPSTSRNHHNHPQNHLNQDIMHQQQDVGSRQQGSGVSSEHVSGHNPMQRLLTSRGLEQQMVSQPSIVTRSSDMTCTPHRPERNRVSSYSAEALIGKTSSNSEQRMGISIQGSRVSDQLEMRSYLDVPRNKSLAIHNMQGRVDHTVASDIRLSDCQTFKPSGASQQPQSNFEVQSSRNNEIGNPVSSLRSMQSQAFRISQNTGPPPIDRQKRLSYPPVQSIPTGNGIPSRDSENTCHQSFMQSLLAPHLSDQVIGSQRSLSEHQRNTQCGPSSAIEYNCPPTHENVHIRRESESQNRESCDMSLGAINTRNSTLNIPFSSSSSSGDIQGRNTSPNVSVQKSNPMRITESHATKGHMNPPVTTNMHGVARPALPHPSVSHGNGDQGPAVRQANSSVPQRSRHPLQDSSGSKIRQPERNRSGNQRQSTVFDPSLPHLPLSTGGSMILGRQQPATEKRGSIVRFMPDSPQVPNDNSGPDQHTLSQNFGFSFIPEGGMNPPINANASFIPQVTQPSATRTPALIPVDPQNTLPSFYPPYSPAHPTLSNDISIPYFPNQMFSNPSTEKVNSGSLNNRFGSILSPPRPVGFAQPSFPLLPDMPPMHMTNSHLSNFNMTSLFPEIATALPDGSAMSPLLTIANSSASDSSKQSSNRPAHNISHILGHDCSSAV

SEQ ID NO: 95882 - protein, 2245 aa, Homo sapiens; identical to SEQ ID NO: 95881
  Payload ID: 19133
  Gene Name: upstream transcription factor family member 3
  Uniprot ID: Q68DE3
  ENSP ID: ENSP00000420721

SEQ ID NO: 95883 - protein, 88 aa, Homo sapiens
  Payload ID: 19133
  Gene Name: upstream transcription factor family member 3
  ENSP ID: ENSP00000420752
MPEMTENETPTKKQHRKKNRETHNAVERHRKKKINAGINRIGELIPCSPALKQSKNMILDQAFKYITELKRQNDELLLNGGNNEQGFY

SEQ ID NO: 95884 - protein, 313 aa, Homo sapiens
  Payload ID: 19134
  Gene Name: uracil DNA glycosylase
  Uniprot ID: P13051
  ENSP ID: ENSP00000242576
MIGQKTLYSFFSPSPARKRHAPSPEPAVQGTGVAGVPEESGDAAAIPAKKAPAGQEEPGTPPSSPLSAEQLDRIQRNKAAALLRLAARNVPVGFGESWKKHLSGEFGKPYFIKLMGFVAEERKHYTVYPPPHQVFTWTQMCDIKDVKVVILGQDPYHGPNQAHGLCFSVQRPVPPPPSLENIYKELSTDIEDFVHPGHGDLSGWAKQGVLLLNAVLTVRAHQANSHKERGWEQFTDAVVSWLNQNSNGLVFLLWGSYAQKKGSAIDRKRHHVLQTAHPSPLSVYRGFFGCRHFSKTNELLQKSGKKPIDWKEL

SEQ ID NO: 95885 - protein, 304 aa, Homo sapiens
  Payload ID: 19134
  Gene Name: uracil DNA glycosylase
  Uniprot ID: P13051
  ENSP ID: ENSP00000337398
MGVFCLGPWGLGRKLRTPGKGPLQLLSRLCGDHLQAIPAKKAPAGQEEPGTPPSSPLSAEQLDRIQRNKAAALLRLAARNVPVGFGESWKKHLSGEFGKPYFIKLMGFVAEERKHYTVYPPPHQVFTWTQMCDIKDVKVVILGQDPYHGPNQAHGLCFSVQRPVPPPPSLENIYKELSTDIEDFVHPGHGDLSGWAKQGVLLLNAVLTVRAHQANSHKERGWEQFTDAVVSWLNQNSNGLVFLLWGSYAQKKGSAIDRKRHHVLQTAHPSPLSVYRGFFGCRHFSKTNELLQKSGKKPIDWKEL

SEQ ID NO: 95886 - protein, 141 aa, Homo sapiens
  Payload ID: 19134
  Gene Name: uracil DNA glycosylase
  ENSP ID: ENSP00000400287
MGVFCLGPWGLGRKLRTPGKGPLQLLSRLCGDHLQAIPAKKAPAGQEEPGTPPSSPLSAEQLDRIQRNKAAALLRLAARNVPVGFGESWKKHLSGEFGKPYFIKLMGFVAEERKHYTVYPPPHQVFTWTQMCDIKDFGEHL

SEQ ID NO: 95887 - protein, 258 aa, Homo sapiens
  Payload ID: 19134
  Gene Name: uracil DNA glycosylase
  ENSP ID: ENSP00000440784
MGVFCLGPWGLGRKLRTPGKGPLQLLSRLCGDHLQAIPAKKAPAGQEEPGTPPSSPLSAEQLDRIQRNKAAALLRLAARNVPVGFGESWKKHLSGEFGKPYFIKLMGFVAEERKHYTVYPPPHQVFTWTQMCDIKDVKVVILGQDPYHGPNQAHGLCFSVQRPVPPPPSLENIYKELSTDIEDFVHPGHGDLSGWAKQGVLLLNAVLTVRAHQANSHKERGWEQFTDAVVSWLNQNSNGLVFLLWGSYAQKKGSAIDR

SEQ ID NO: 95888 - protein, 142 aa, Homo sapiens
  Payload ID: 19135
  Gene Name: uracil phosphoribosyltransferase (FUR1) homolog (S. cerevisiae)
  ENSP ID: ENSP00000362471
MATELQCPDSMPCHNQQVNSASTPSPEQLRPGDLILDHAGGNRASRAKVILLTGYAHSSLPAELDSGACGGSSLNSEGNSGSGDSSSYDAPAGNSFLEDCELSRQIGAQLKLLPMNDQIRELQTIIRDNFFSSRRDYGYDLK

SEQ ID NO: 95889 - protein, 281 aa, Homo sapiens
  Payload ID: 19135
  Gene Name: uracil phosphoribosyltransferase (FUR1) homolog (S. cerevisiae)
  ENSP ID: ENSP00000362477
MATELQCPDSMPCHNQQVNSASTPSPEQLRPGDLILDHAGGNRASRAKVILLTGYAHSSLPAELDSGACGGSSLNSEGNSGSGDSSSYDAPAGNSFLEDCELSRQIGAQLKLLPMNDQIRELQTIIRDKTASRGDFMFSADRLIRLVVEEGLNQLPYKECMVTTPTGYKYEGVKFEKGNCGVSIMRSGEAMEQGLRDCCRSIRIGKILIQSDEETQRAKVYYAKFPPDIYRRKVLLMYPILSTGNTVIEAVKVLIEHGVQPSVIILLSLFSTPHGEFSMRQ

SEQ ID NO: 95890 - protein, 309 aa, Homo sapiens
  Payload ID: 19135
  Gene Name: uracil phosphoribosyltransferase (FUR1) homolog (S. cerevisiae)
  Uniprot ID: Q96BW1
  ENSP ID: ENSP00000362481
MATELQCPDSMPCHNQQVNSASTPSPEQLRPGDLILDHAGGNRASRAKVILLTGYAHSSLPAELDSGACGGSSLNSEGNSGSGDSSSYDAPAGNSFLEDCELSRQIGAQLKLLPMNDQIRELQTIIRDKTASRGDFMFSADRLIRLVVEEGLNQLPYKECMVTTPTGYKYEGVKFEKGNCGVSIMRSGEAMEQGLRDCCRSIRIGKILIQSDEETQRAKVYYAKFPPDIYRRKVLLMYPILSTGNTVIEAVKVLIEHGVQPSVIILLSLFSTPHGAKSIIQEFPEITILTTEVHPVAPTHFGQKYFGTD

SEQ ID NO: 95891 - protein, 176 aa, Homo sapiens
  Payload ID: 19135
  Gene Name: uracil phosphoribosyltransferase (FUR1) homolog (S. cerevisiae)
  Uniprot ID: Q96BW1
  ENSP ID: ENSP00000433987
MATELQCPDSMPCHNQQVNSASTPSPEQLRPGDLILDHAGGNRASRAKVILLTGYAHSSLPAELDSGACGGSSLNSEGNSGSGDSSSYDAPAGNSFLEDCELSRQIGAQLKLLPMNDQIRELQTIIRDKTASRGDFMFSADRLVLPEDLFQKSIDNSCSAFHHQTCCGRGIESAAI

SEQ ID NO: 95892 - protein, 173 aa, Homo sapiens
  Payload ID: 19135
  Gene Name: uracil phosphoribosyltransferase (FUR1) homolog (S. cerevisiae)
  ENSP ID: ENSP00000434037
MFSADRLIRLVVEEGLNQLPYKECMVTTPTGYKYEGVKFEKGNCGVSIMRSGEAMEQGLRDCCRSIRIGKILIQSDEETQRAKVYYAKFPPDIYRRKVLLMYPILSTGNTVIEAVKVLIEHGVQPSVIILLSLFSTPHGAKSIIQEFPEITILTTEVHPVAPTHFGQKYFGTD

SEQ ID NO: 95893 - protein, 2271 aa, Homo sapiens
  Payload ID: 19136
  Gene Name: URB1 ribosome biogenesis 1 homolog (S. cerevisiae)
  Uniprot ID: O60287
  ENSP ID: ENSP00000372199
MGVPKRKASGGQDGAASSAGAAKRARKEELTGVRFKAQLKDPQGPGPGLEAFVSAAKKLPREDVYDVVEGYIKISVECVEIFQLLSGEKRPESETMLIFQVFEAILLRTASDLSHFHVVGTNIVKKLMNNHMKLICESLYASGYRLARACLSLMTAMVTQGPEAARDVCSHFDLNKKTLYTLVTKRDSKGVYDVRQAYVQFALSFLIAGDDSTIVQVLEVKEFIPCIFSSGIKEDRISTINILLSTLKTKVVHNKNITKTQKVRFFTGQLLNHIASLYNWNGITDVNPENVKVSAEEAGKTMVRELVHNFLMDLCCSLKHGINFYDASLGTFGRGGNLTLLHFLLGLKTAADDDLVADLVVNILKVCPDLLNKYFKEVTFSFIPRAKSTWLNNIKLLNKIYEAQPEISRAFQTREFIPLPRLLAMVMVTTVPLVCNKSMFTQALNLDSTSVRHTALSLISVILKRALKTVDHCLNKEVWQESGVYTAVMMEEFVQLFREALSKILPDLNTVVWVWQSLKKQETKQDDKKGQKRSDGPPAACDAHQCDDAETILLKAVLLQVICLYQKVVPHVVMQYNFDFSKLLKGVISEQGLREEVPPILQHHMLKVALELPASKFLWLKAQEGPDAEIIGGERSVFYLLMKMFVTSSHLQLKSLTKLLIMKILRDTGVFEHTWKELELWLEHLENTMEEDKETVIQFLERILLTLVANPYSYTDKASDFVQEASMLQATMTKQEADDMSIPISHIDDVLDMVDVLVEGSEGLDEEIGFTLSEDMILLTFPFSAVVPAALEARNKLLLGTGNEAAENVVTYLTAVLTDLLHTQRDPLALCLLLQAYDKLEPPCLVPCCQQLSRFNRYYSLWIPEQAREAWLLQAQGSPSPPALPLASSFTALLQAAYESQALRDEHIQVQLQATMPHLSMQQVLLAAKQVLLYLRSTVENFGQLGRSVGPPLLQLFLDLLRRLVVHCEQLDAQNQQRCEAARAEADLFLDMESVASLELANDQTLEEVLVAILRHPTLEGWFLALEQQALPPHTLSPVLVKLLATHFSAGVLQLLAASAPILQNIGQLGLLARYSEAITQSVLKELQNRRAGPATSPPKTPPQLEALQELHPYMEGAQLREVTLALLSLPETHLVTQQPTKSPGKERHLNALGKTLVQLLTCSPQDQLQSGELLWSSEYVRGLGALLPTLAVDELDTVLLHTLQRDPVLAPAVGADLLDYCLARRTQAALSIAALLLQESCTHLLWFEQWCLQAGPGLGLQGDLDDFLPLIHVYLQCRTRSHFTRPAGVSSAVIPVLRKTLWRQLQSRLLSTDSPPASGLYQEILAQLVPFARAKDLSVLMDRLPSLLHTPSSHKRWIVADSISAALEGSAEELCAWRRTLLESCVKWLIVSFSGGQQDDDNTQNQEKEMLLRLNALLHALNEVDPGDWQKFVKKGLKFRYQDHTFLKMLLTAVQLLYSPESSVRTKLIQLPVVYVMLMQHSLFLPTLLTSDGEESPDSQVKEALVDLMLTVVEMCPSVCESSHFAVLLGAYGATLSVLDQKILLLLRAYEQNKLSLINFRVLLWGPAAVEHHKTCRSLGRSLWQQPSVGDILRLLDRDRMMQTILHFPQNRRLLPPEDTQELIFKDKSRVDLDGLYDPCFLLQLFSELTRPEFVVDCRKFLDSNALGLTVTALSSYDPQMRAIAYHVLAAYYSHLEGARFQEQSQLLYLLDVVRNGIRTQDMRLTFTLALFIAKAALQILKPEEHMYLKVSNFLLSHEYLNMDKVPGFYQFFYSSDFEQKTEQKWVFGVLRQGIRDKQCYELCARRGIFHIILSFFHSPLCDEAAQNWILEILQNAAQVARSAYEIIRDYSLLTWILHILESKFLETPLLSNVISLLHTLWVTNLGDKAVEWESQRLCQPSSQEPAKRLALHLVNEFLYVLIVLMKHLRPTLAPVQLTNFFGTLDSVLRYRATVIQAFRDMNRFTVNETVLSTKDVLVLLHKWSLIERDLKLQEDLRAAIEKAQARELMKMLKDKNKPVMPARAKGPRGRKRRPGEAEEMADPELMASTLETCKGLLRSILTYWRPVIPGPDPTQEPVDSASPESDAPGPVYAAASLAVSWVLRSVAEHPLSRAEAAGLIGWLKSHILPHPVVVADLLKDSAVRSSIFRLYSRLCGAEGLAGPVQEVACLFNTVMLQLVAAQGRAGSPFHPAMEALSLSSLSEKDEATQASAAFLVSLYIKDIWLGAQRPDTLLTHVRMVCEAADDAPSSEEEAIVVLCKDAASAASDA

SEQ ID NO: 95894 - protein, 1524 aa, Homo sapiens
  Payload ID: 19137
  Gene Name: URB2 ribosome biogenesis 2 homolog (S. cerevisiae)
  Uniprot ID: Q14146
  ENSP ID: ENSP00000258243
MAAVYSGISLKLKSKTTSWEDKLKLAHFAWISHQCFLPNKEQVLLDWARQSLVAFYKKKLELKEDIVERLWIYIDNILHSRKLQNLLKNGKTINLQISLVKIINERVAEFSLSGSQRNICAVLRCCQGILSTPALAVIYTAKQELMVALLSQLCWSACRQPEGAVVAQLFEVIHLALGHYLLILQQQVNPRRAFGDVTAHLLQPCLVLRHLLSGGTWTQAGQGQLRQVLSRDIRSQIEAMFRGGIFQPELLSSYKEGLLDQQQGDVKTGAMKNLLAPMDTVLNRLVDAGYCAASLHTSVVANSVALLYKLFLDSYFKEGNQLLCFQVLPRLFGCLKISHLQEEQSKALSTSDWTTELLVVEQLLNSVANNNIYNIAADRIRHEEAQFRFYRHVAELLINHAQAPIPAWFRCLKTLISLNHLILEPDLDDLLASAWIDAEVTEFRTKKAQEALIRTVFQTYAKLRQVPRLFEEVLGVICRPAAEALRQPVLASGPSTVLSACLLELPPSQILDTWSLVLEKFQSLVLPYLQSDADMALKSLSLSLLLHCIMFNMRSLDSSTPLPIVRRTQCMMERMMRELVQPLLALLPDTPGPEPELWLQKVSDSVLLLSYTWAQVDAMFSLNCSQYHSMSGPLIGVALEISNLPSLLPGVKTQHWKKIEKFTAQFSSLGTYCLEQLYLQKMKRTLMQTSFRSEGAIQSLRCDAAFIIGSGRKSLNQRTTASWDGQVGMVSGLTYPVAHWHLIVSNLTILISYLCPDDVGYLASVLLRTLPMGKAQEVSIDEEAYITLEKISKAFLHSPLFPEMQSLHSAFLTCVTTSCSSILCSGAQRDSGLVSQQLPWLFEKDHMVVGHWENRFAKAGPEGIEPRGEIAQNLLSLVKSDFPIQLEGEQLESILGLLEVISALQLDSLLPPYHVHYFLVLLSMAVTKLGCSCSSSLALKFLTTCYQLLGYLQKGKSARSVFKIMYGSDIFEVVLTSLFRASSRFLIEMDDPAWLEFLQVIGTFLEELMQMLIQMKLSLVLNFRKITAFLSSSKPYTEAASSKQLENQNPQGRQLLLVSLTRLCHVLGPFLKEQKLGQEAPAALSELLQQVVLQTGAVLQLCSVPGARGWRLPSVLISSVSTLLEADLGQHCRDGGADISQGSDRTLLSHVALYQGVYSQILLELPALAGHDQSFQAALQFLTLFFLAPELHPKKDSVFTSMFHSVRRVLADPEIPVQVTQDIEPHLGALFTQMLEVGTTEDLRLVMQCILQGLDVSNMWKADVQAVVSAVTLLRLLLNCPLSGEKASLLWRACPQIVTALTLLNREASQEQPVSLTVVGPVLDVLAALLRQGEEAIGNPHHVSLAFSILLTVPLDHLKPLEYGSVFPRLHNVLFSILQCHPKVMLKAIPSFLNSFNRLVFSVMREGRQKDKGSIDDLPTVLKCARLVERMYSHIAARAEEFAVFSPFMVAQYVLEVQKVTLYPAVKSLLQEGIYLILDLCIEPDVQFLRASLQPGMRDIFKELYNDYLKYHKAKHEGEKRYTA

SEQ ID NO: 95895 - protein, 84 aa, Homo sapiens
  Payload ID: 19137
  Gene Name: URB2 ribosome biogenesis 2 homolog (S. cerevisiae)
  ENSP ID: ENSP00000395107
MLKAIPSFLNSFNRLVFSVMREGRQKDKGSIDDLPTVLKCARLVERMYSHIAARAEEFAVFSPFMVAQYVLEVQKVTLYPAVKS

SEQ ID NO: 95896 - protein, 173 aa, Homo sapiens
  Payload ID: 19138
  Gene Name: ureidoimidazoline (2-oxo-4-hydroxy-4-carboxy-5-) decarboxylase
  Uniprot ID: A6NGE7
  ENSP ID: ENSP00000333490
MDIEKVNSMDLGEFVDVFGNATERCPLIAAAVWSQRPFSDLEDLEKHFFAFIDALAQSGQEGILRCHPDLAGSELQRGTLTAESQREQSGAGLRSLGADERLRLAELNAQYRARFGFPFVLAARFSDRTAVPRELARRLLCPSAQELRTALGEVKKIGSLRLADLLRADPAKL

SEQ ID NO: 95897 - protein, 384 aa, Homo sapiens
  Payload ID: 19139
  Gene Name: ureidopropionase, beta
  Uniprot ID: Q9UBR1
  ENSP ID: ENSP00000324343
MAGAEWKSLEECLEKHLPLPDLQEVKRVLYGKELRKLDLPREAFEAASREDFELQGYAFEAAEEQLRRPRIVHVGLVQNRIPLPANAPVAEQVSALHRRIKAIVEVAAMCGVNIICFQEAWTMPFAFCTREKLPWTEFAESAEDGPTTRFCQKLAKNHDMVVVSPILERDSEHGDVLWNTAVVISNSGAVLGKTRKNHIPRVGDFNESTYYMEGNLGHPVFQTQFGRIAVNICYGRHHPLNWLMYSINGAEIIFNPSATIGALSESLWPIEARNAAIANHCFTCAINRVGTEHFPNEFTSGDGKKAHQDFGYFYGSSYVAAPDSSRTPGLSRSRDGLLVAKLDLNLCQQVNDVWNFKMTGRYEMYARELAEAVKSNYSPTIVKE

SEQ ID NO: 95898 - protein, 186 aa, Homo sapiens
  Payload ID: 19139
  Gene Name: ureidopropionase, beta
  ENSP ID: ENSP00000372208
MAGAEWKSLEECLEKHLPLPDLQEVKRVLYGKELRKLDLPREAFEAASREDFELQGYAFEAAEEQLRRPRIVHVGLVQNRIPLPANAPVAEQVSALHRRIKAIVEVAAMCGVNIICFQEAWILRPHHQEPRPPCCYAPSCCLIPSVFPHRSESIRSSPSLYHHLVQAPGSSPLAFVIPSSWSPVPS

SEQ ID NO: 95899 - protein, 42 aa, Homo sapiens
  Payload ID: 19139
  Gene Name: ureidopropionase, beta
  ENSP ID: ENSP00000400684
MAGAEWKSLEECLEKHLPLPDLQEVKRVLYGKELRSLPFIDA

SEQ ID NO: 95900 - protein, 110 aa, Homo sapiens
  Payload ID: 19140
  Gene Name: URGCP-MRPS24 readthrough
  ENSP ID: ENSP00000473871
MASPGHSDLGEVAPEIKASERRTAVAIADLEWREMEGDDCEFRYGDGTNEAQDNDFPTGAVLEPRAALRLARPAHLPGLRQEPGGPSTRKQGGQAGDLRGGTRAALHRPP

SEQ ID NO: 95901 - protein, 475 aa, Homo sapiens
  Payload ID: 19141
  Gene Name: URI1, prefoldin-like chaperone
  Uniprot ID: O94763
  ENSP ID: ENSP00000353817
MTTWSSLQGSHVSKRALAYALVVTNCQERIQHWKKVDNDYNALRERLSTLPDKLSYNIMVPFGPFAFMPGKLVHTNEVTVLLGDNWFAKCSAKQAVGLVEHRKEHVRKTIDDLKKVMKNFESRVEFTEDLQKMSDAAGDIVDIREEIKCDFEFKAKHRIAHKPHSKPKTSDIFEADIANDVKSKDLLADKELWARLEELERQEELLGELDSKPDTVIANGEDTTSSEEEKEDRNTNVNAMHQVTDSHTPCHKDVASSEPFSGQVNSQLNCSVNGSSSYHSDDDDDDDDDDDDDNIDDDDGDNDHEALGVGDNSIPTIYFSHTVEPKRVRINTGKNTTLKFSEKKEEAKRKRKNSTGSGHSAQELPTIRTPADIYRAFVDVVNGEYVPRKSILKSRSRENSVCSDTSESSAAEFDDRRGVLRSISCEEATCSDTSESILEEEPQENQKKLLPLSVTPEVLRLVGYSRNLAPLNVIL

SEQ ID NO: 95902 - protein, 535 aa, Homo sapiens
  Payload ID: 19141
  Gene Name: URI1, prefoldin-like chaperone
  Uniprot ID: O94763
  ENSP ID: ENSP00000376097
MEAPTVETPPDPSPPSAPAPALVPLRAPDVARLREEQEKVVTNCQERIQHWKKVDNDYNALRERLSTLPDKLSYNIMVPFGPFAFMPGKLVHTNEVTVLLGDNWFAKCSAKQAVGLVEHRKEHVRKTIDDLKKVMKNFESRVEFTEDLQKMSDAAGDIVDIREEIKCDFEFKAKHRIAHKPHSKPKTSDIFEADIANDVKSKDLLADKELWARLEELERQEELLGELDSKPDTVIANGEDTTSSEEEKEDRNTNVNAMHQVTDSHTPCHKDVASSEPFSGQVNSQLNCSVNGSSSYHSDDDDDDDDDDDDDNIDDDDGDNDHEALGVGDNSIPTIYFSHTVEPKRVRINTGKNTTLKFSEKKEEAKRKRKNSTGSGHSAQELPTIRTPADIYRAFVDVVNGEYVPRKSILKSRSRENSVCSDTSESSAAEFDDRRGVLRSISCEEATCSDTSESILEEEPQENQKKLLPLSVTPEAFSGTVIEKEFVSPSLTPPPAIAHPALPTIPERKEVLLEASEETGKRVSKFKAARLQQKD

SEQ ID NO: 95903 - protein, 40 aa, Homo sapiens
  Payload ID: 19141
  Gene Name: URI1, prefoldin-like chaperone
  ENSP ID: ENSP00000458161
  MOD_RES (1)..(1): Any amino acid
XSISCEEATCSDTSESILEEEPQENQKKLLPLSVTPELNI

SEQ ID NO: 95904 - protein, 71 aa, Homo sapiens
  Payload ID: 19141
  Gene Name: URI1, prefoldin-like chaperone
  ENSP ID: ENSP00000458480
MVPFGPFAFMPGKLVHTNEVTVLLGDNWFAKCSAKQAVGLVEHRKEHVRKTIDDLKKVMKNFESRVEFTED

SEQ ID NO: 95905 - protein, 50 aa, Homo sapiens
  Payload ID: 19141
  Gene Name: URI1, prefoldin-like chaperone
  ENSP ID: ENSP00000458533
MEAPTVETPPDPSPPSAPAPALVPLRAPDVARLREEQEKVVTNCQERIQH

SEQ ID NO: 95906 - protein, 228 aa, Homo sapiens
  Payload ID: 19141
  Gene Name: URI1, prefoldin-like chaperone
  ENSP ID: ENSP00000459450
  MOD_RES (1)..(1): Any amino acid
XVNAMHQVTDSHTPCHKDVASSEPFSGQVNSQLNCSVNGSSSYHSDDDDDDDDDDDDDNIDDDDGDNDHEALGVGDNSIPTIYFSHTVEPKRVRINTGKNTTLKFSEKKEEAKRKRKNSTGSGHSAQELPTIRTPADIYRAFVDVVNGEYVPRKSILKSRSRENSVCSDTSESSAAEFDDRRGVLRSISCEEATCSDTSESILEEEPQENQKKLLPLSVTPEVCVCIF

SEQ ID NO: 95907 - protein, 33 aa, Homo sapiens
  Payload ID: 19141
  Gene Name: URI1, prefoldin-like chaperone
  ENSP ID: ENSP00000459966
MVPFGPFAFMPGKLVHTNEVTVLLGDNWFAKCS

SEQ ID NO: 95908 - protein, 43 aa, Homo sapiens
  Payload ID: 19141
  Gene Name: URI1, prefoldin-like chaperone
  ENSP ID: ENSP00000461003
MEAPTVETPPDPSPPSAPAPALVPLRAPDVARLREEQEKEEGR

SEQ ID NO: 95909 - protein, 122 aa, Homo sapiens
  Payload ID: 19141
  Gene Name: URI1, prefoldin-like chaperone
  ENSP ID: ENSP00000461895
MVPFGPFAFMPGKLVHTNEVTVLLGDNWFAKCSAKQAVGLVEHRKEHVRKTIDDLKKVMKNFESRVEFTEDLQKMSDAAGDIVDIREEIKCDFEFKAKHRIAHKPHSKPKTSDIFEADIAND

SEQ ID NO: 95910 - protein, 17 aa, Homo sapiens
  Payload ID: 19141
  Gene Name: URI1, prefoldin-like chaperone
  ENSP ID: ENSP00000468048
RALAYALGLCEVLMNEG

SEQ ID NO: 95911 - protein, 480 aa, Homo sapiens
  Payload ID: 19142
  Gene Name: uridine monophosphate synthetase
  Uniprot ID: P11172
  ENSP ID: ENSP00000232607
MAVARAALGPLVTGLYDVQAFKFGDFVLKSGLSSPIYIDLRGIVSRPRLLSQVADILFQTAQNAGISFDTVCGVPYTALPLATVICSTNQIPMLIRRKETKDYGTKRLVEGTINPGETCLIIEDVVTSGSSVLETVEVLQKEGLKVTDAIVLLDREQGGKDKLQAHGIRLHSVCTLSKMLEILEQQKKVDAETVGRVKRFIQENVFVAANHNGSPLSIKEAPKELSFGARAELPRIHPVASKLLRLMQKKETNLCLSADVSLARELLQLADALGPSICMLKTHVDILNDFTLDVMKELITLAKCHEFLIFEDRKFADIGNTVKKQYEGGIFKIASWADLVNAHVVPGSGVVKGLQEVGLPLHRGCLLIAEMSSTGSLATGDYTRAAVRMAEEHSEFVVGFISGSRVSMKPEFLHLTPGVQLEAGGDNLGQQYNSPQEVIGKRGSDIIIVGRGIISAADRLEAAEMYRKAAWEAYLSRLGV

SEQ ID NO: 95912 - protein, 57 aa, Homo sapiens
  Payload ID: 19142
  Gene Name: uridine monophosphate synthetase
  ENSP ID: ENSP00000417893
MAVARAALGPLVTGLYDVQAFKFGDFVLKSGLSSPIYIDLRGIVSRPRLLSQELSVL

SEQ ID NO: 95913 - protein, 57 aa, Homo sapiens; identical to SEQ ID NO: 95912
  Payload ID: 19142
  Gene Name: uridine monophosphate synthetase
  ENSP ID: ENSP00000419121

SEQ ID NO: 95914 - protein, 66 aa, Homo sapiens
  Payload ID: 19142
  Gene Name: uridine monophosphate synthetase
  ENSP ID: ENSP00000419618
MAVARAALGPLVTGLYDVQAFKFGDFVLKSGLSSPIYIDLRGIVSRPRLLSQMGSLLRHPGWSAAL

SEQ ID NO: 95915 - protein, 142 aa, Homo sapiens
  Payload ID: 19142
  Gene Name: uridine monophosphate synthetase
  ENSP ID: ENSP00000420348
MAVARAALGPLVTGLYDVQAFKFGDFVLKSGLSSPIYIDLRGIVSRPRLLSQVADILFQTAQNAGISFDTVCGVPYTALPLATVICSTNQIPMLIRRKETKDYGSTQRTQLRCTCRAAQDPPSCIEASQAYAKEGDQSVSIC

SEQ ID NO: 95916 - protein, 66 aa, Homo sapiens; identical to SEQ ID NO: 95914
  Payload ID: 19142
  Gene Name: uridine monophosphate synthetase
  ENSP ID: ENSP00000420409

SEQ ID NO: 95917 - protein, 342 aa, Homo sapiens
  Payload ID: 19142
  Gene Name: uridine monophosphate synthetase
  ENSP ID: ENSP00000420754
MAVARAALGPLVTGLYDVQAFKFGDFVLKSGLSSPIYIDLRGIVSRPRLLSQVADILFQTAQNAGISFDTVCGVPYTALPLATVICSTNQIPMLIRRKETKDYGTKRLVEGTINPGETCLIIEDVVTSGSSVLETVEVLQKEGLKVTDAIVLLDREQGGKDKLQAHGIRLHSVCTLSKMLEILEQQKKVDAETVGRVKRFIQENVFVAANHNGSPLSIKEAPKELSFGARAELPRIHPVASKLLRLMQKKETNLCLSADVSLARELLQLADALGPSICMLKTHVDILNDFTLDVMKELITLAKCHEFLIFEDRKFADIGNTVKKQYEGKCIIQESARIRNPA

SEQ ID NO: 95918 - protein, 66 aa, Homo sapiens; identical to SEQ ID NO: 95914
  Payload ID: 19142
  Gene Name: uridine monophosphate synthetase
  ENSP ID: ENSP00000486143

SEQ ID NO: 95919 - protein, 310 aa, Homo sapiens
  Payload ID: 19143
  Gene Name: uridine phosphorylase 1
  Uniprot ID: Q16831
  ENSP ID: ENSP00000330032
MAATGANAEKAESHNDCPVRLLNPNIAKMKEDILYHFNLTTSRHNFPALFGDVKFVCVGGSPSRMKAFIRCVGAELGLDCPGRDYPNICAGTDRYAMYKVGPVLSVSHGMGIPSISIMLHELIKLLYYARCSNVTIIRIGTSGGIGLEPGTVVITEQAVDTCFKAEFEQIVLGKRVIRKTDLNKKLVQELLLCSAELSEFTTVVGNTMCTLDFYEGQGRLDGALCSYTEKDKQAYLEAAYAAGVRNIEMESSVFAAMCSACGLQAAVVCVTLLNRLEGDQISSPRNVLSEYQQRPQRLVSYFIKKKLSKA

SEQ ID NO: 95920 - protein, 36 aa, Homo sapiens
  Payload ID: 19143
  Gene Name: uridine phosphorylase 1
  Uniprot ID: Q16831
  ENSP ID: ENSP00000378927
MAATGANAEKAESHKSGARHCGHNRAGSGYLLQGRV

SEQ ID NO: 95921 - protein, 310 aa, Homo sapiens; identical to SEQ ID NO: 95919
  Payload ID: 19143
  Gene Name: uridine phosphorylase 1
  Uniprot ID: Q16831
  ENSP ID: ENSP00000378931

SEQ ID NO: 95922 - protein, 29 aa, Homo sapiens
  Payload ID: 19143
  Gene Name: uridine phosphorylase 1
  ENSP ID: ENSP00000387607
MAATGANAEKAESHNDCPVRLLNPNIAKM

SEQ ID NO: 95923 - protein, 146 aa, Homo sapiens
  Payload ID: 19143
  Gene Name: uridine phosphorylase 1
  ENSP ID: ENSP00000390118
MAATGANAEKAESHNDCPVRLLNPNIAKMKEDILYHFNLTTSRHNFPALFGDVKFVCVGGSPSRMKAFIRCVGAELGLDCPGRDYPNICAGTDRYAMYKVGPVLSVSHGMGIPSISIMLHELIKLLYYARCSNVTIIRIGTSGGIG

SEQ ID NO: 95924 - protein, 85 aa, Homo sapiens
  Payload ID: 19143
  Gene Name: uridine phosphorylase 1
  ENSP ID: ENSP00000396820
MAATGANAEKAESHNDCPVRLLNPNIAKMKEDILYHFNLTTSRHNFPALFGDVKFVCVGGSPSRMKAFISMVWAFLLSQSCCMSS

SEQ ID NO: 95925 - protein, 144 aa, Homo sapiens
  Payload ID: 19143
  Gene Name: uridine phosphorylase 1
  ENSP ID: ENSP00000405209
MAATGANAEKAESHNDCPVRLLNPNIAKMKEDILYHFNLTTSRHNFPALFGDVKFVCVGGSPSRMKAFIRCVGAELGLDCPGRDYPNICAGTDRYAMYKVGPVLSVSHGMGIPSISIMLHELIKLLYYARCSNVTIIRIGTSGG

SEQ ID NO: 95926 - protein, 36 aa, Homo sapiens; identical to SEQ ID NO: 95920
  Payload ID: 19143
  Gene Name: uridine phosphorylase 1
  Uniprot ID: Q16831
  ENSP ID: ENSP00000408899

SEQ ID NO: 95927 - protein, 36 aa, Homo sapiens; identical to SEQ ID NO: 95920
  Payload ID: 19143
  Gene Name: uridine phosphorylase 1
  Uniprot ID: Q16831
  ENSP ID: ENSP00000413611

SEQ ID NO: 95928 - protein, 171 aa, Homo sapiens
  Payload ID: 19143
  Gene Name: uridine phosphorylase 1
  ENSP ID: ENSP00000414963
MAATGANAEKAESHNDCPVRLLNPNIAKMKEDILYHFNLTTSRHNFPALFGDVKFVCVGGSPSRMKAFIRCVGAELGLDCPGRDYPNICAGTDRYAMYKVGPVLSVSHGMGIPSISIMLHELIKLLYYARCSNVTIIRIGTSGGIGILKHLRRKDTGKSKGGRERRSTKLR

SEQ ID NO: 95929 - protein, 317 aa, Homo sapiens
  Payload ID: 19144
  Gene Name: uridine phosphorylase 2
  Uniprot ID: O95045
  ENSP ID: ENSP00000005756
MASVIPASNRSMRSDRNTYVGKRFVHVKNPYLDLMDEDILYHLDLGTKTHNLPAMFGDVKFVCVGGSPNRMKAFALFMHKELGFEEAEEDIKDICAGTDRYCMYKTGPVLAISHGMGIPSISIMLHELIKLLHHARCCDVTIIRIGTSGGIGIAPGTVVITDIAVDSFFKPRFEQVILDNIVTRSTELDKELSEELFNCSKEIPNFPTLVGHTMCTYDFYEGQGRLDGALCSFSREKKLDYLKRAFKAGVRNIEMESTVFAAMCGLCGLKAAVVCVTLLDRLDCDQINLPHDVLVEYQQRPQLLISNFIRRRLGLCD

SEQ ID NO: 95930 - protein, 374 aa, Homo sapiens
  Payload ID: 19144
  Gene Name: uridine phosphorylase 2
  Uniprot ID: O95045
  ENSP ID: ENSP00000474090
MLAPGCELDPDQEVVRTRPEDVPASPSTSTMIVSVLRPPSHASCTACGTVTFHIVERMASVIPASNRSMRSDRNTYVGKRFVHVKNPYLDLMDEDILYHLDLGTKTHNLPAMFGDVKFVCVGGSPNRMKAFALFMHKELGFEEAEEDIKDICAGTDRYCMYKTGPVLAISHGMGIPSISIMLHELIKLLHHARCCDVTIIRIGTSGGIGIAPGTVVITDIAVDSFFKPRFEQVILDNIVTRSTELDKELSEELFNCSKEIPNFPTLVGHTMCTYDFYEGQGRLDGALCSFSREKKLDYLKRAFKAGVRNIEMESTVFAAMCGLCGLKAAVVCVTLLDRLDCDQINLPHDVLVEYQQRPQLLISNFIRRRLGLCD

SEQ ID NO: 95931 - protein, 201 aa, Homo sapiens
  Payload ID: 19145
  Gene Name: uridine-cytidine kinase 1
  Uniprot ID: Q9HA47
  ENSP ID: ENSP00000361282
MASAGGEDCESPAPEADRPHQRPFLIGVSGGTASGKSTVCEKIMELLGQNEVEQRQRKVVILSQDRFYKVLTAEQKAKALKGQYNFDHPDAFDNDLMHRTLKNIVEGKTVEVPTYDFVTHSRLPETTVVYPADVVLFEGILVFYSQEIRDMFHLRLFVDTDSDVRLSRRDKEVCRCDHPARSGQYGCHQPDRAAHPGHSEW

SEQ ID NO: 95932 - protein, 268 aa, Homo sapiens
  Payload ID: 19145
  Gene Name: uridine-cytidine kinase 1
  Uniprot ID: Q9HA47
  ENSP ID: ENSP00000361284
MASAGGEDCESPAPEADRPHQRPFLIGSTVCEKIMELLGQNEVEQRQRKVVILSQDRFYKVLTAEQKAKALKGQYNFDHPDAFDNDLMHRTLKNIVEGKTVEVPTYDFVTHSRLPETTVVYPADVVLFEGILVFYSQEIRDMFHLRLFVDTDSDVRLSRRVLRDVRRGRDLEQILTQYTTFVKPAFEEFCLPTKKYADVIIPRGVDNMVAINLIVQHIQDILNGDICKWHRGGSNGRSYKRTFSEPGDHPGMLTSGKRSHLESSSRPH

SEQ ID NO: 95933 - protein, 282 aa, Homo sapiens
  Payload ID: 19145
  Gene Name: uridine-cytidine kinase 1
  Uniprot ID: Q9HA47
  ENSP ID: ENSP00000361285
MASAGGEDCESPAPEADRPHQRPFLIGDERFQAGIPLLCLQSTVCEKIMELLGQNEVEQRQRKVVILSQDRFYKVLTAEQKAKALKGQYNFDHPDAFDNDLMHRTLKNIVEGKTVEVPTYDFVTHSRLPETTVVYPADVVLFEGILVFYSQEIRDMFHLRLFVDTDSDVRLSRRVLRDVRRGRDLEQILTQYTTFVKPAFEEFCLPTKKYADVIIPRGVDNMVAINLIVQHIQDILNGDICKWHRGGSNGRSYKRTFSEPGDHPGMLTSGKRSHLESSSRPH

SEQ ID NO: 95934 - protein, 277 aa, Homo sapiens
  Payload ID: 19145
  Gene Name: uridine-cytidine kinase 1
  Uniprot ID: Q9HA47
  ENSP ID: ENSP00000361289
MASAGGEDCESPAPEADRPHQRPFLIGVSGGTASGKSTVCEKIMELLGQNEVEQRQRKVVILSQDRFYKVLTAEQKAKALKGQYNFDHPDAFDNDLMHRTLKNIVEGKTVEVPTYDFVTHSRLPETTVVYPADVVLFEGILVFYSQEIRDMFHLRLFVDTDSDVRLSRRVLRDVRRGRDLEQILTQYTTFVKPAFEEFCLPTKKYADVIIPRGVDNMVAINLIVQHIQDILNGDICKWHRGGSNGRSYKRTFSEPGDHPGMLTSGKRSHLESSSRPH

SEQ ID NO: 95935 - protein, 218 aa, Homo sapiens
  Payload ID: 19145
  Gene Name: uridine-cytidine kinase 1
  ENSP ID: ENSP00000432363
MASAGGEDCESPAPEADRPHQRPFLIGVSGGTASGKDERFQAGIPLLCLQSTVCEKIMELLGQNEVEQRQRKVVILSQDRFYKVLTAEQKAKALKGQYNFDHPDAFDNDLMHRTLKNIVEGKTVEVPTYDFVTHSRLPETTVVYPADVVLFEGILVFYSQEIRDMFHLRLFVDTDSDVRLSRRVLRDVRRGRDLEQILTQYTTFVKPAFEEFCLPQSI

SEQ ID NO: 95936 - protein, 548 aa, Homo sapiens
  Payload ID: 19146
  Gene Name: uridine-cytidine kinase 1-like 1
  Uniprot ID: Q9NWZ5
  ENSP ID: ENSP00000346155
MAAPPARADADPSPTSPPTARDTPGRQAEKSETACEDRSNAESLDRLLPPVGTGRSPRKRTTSQCKSEPPLLRTSKRTIYTAGRPPWYNEHGTQSKEAFAIGLGGGSASGKTTVARMIIEALDVPWVVLLSMDSFYKVLTEQQQEQAAHNNFNFDHPDAFDFDLIISTLKKLKQGKSVKVPIYDFTTHSRKKDWKTLYGANVIIFEGIMAFADKTLLELLDMKIFVDTDSDIRLVRRLRRDISERGRDIEGVIKQYNKFVKPSFDQYIQPTMRLADIVVPRGSGNTVAIDLIVQHVHSQLEERELSVRAALASAHQCHPLPRTLSVLKSTPQVRGMHTIIRDKETSRDEFIFYSKRLMRLLIEHALSFLPFQDCVVQTPQGQDYAGKCYAGKQITGVSILRAGETMEPALRAVCKDVRIGTILIQTNQLTGEPELHYLRLPKDISDDHVILMDCTVSTGAAAMMAVRVLLDHDVPEDKIFLLSLLMAEMGVHSVAYAFPRVRIITTAVDKRVNDLFRIIPGIGNFGDRYFGTDAVPDGSDEEEVAYTG

SEQ ID NO: 95937 - protein, 419 aa, Homo sapiens
  Payload ID: 19146
  Gene Name: uridine-cytidine kinase 1-like 1
  Uniprot ID: Q9NWZ5
  ENSP ID: ENSP00000351546
MAAPPARADADPSPTSPPTARDTPGRQAEKSETACEDRSNAESLDRLLPPVGTGRSPRKRTTSQCKSEPPLLRTSKRTIYTAGRPPWYNEHGTQSKEAFAIGLGGGSASGKTTVARMIIEALDVPWVVLLSMDSFYKVLTEQQQEQAAHNNFNFDHPDAFDFDLIISTLKKLKQGKSVKVPIYDFTTHSRKKDWKTLYGANVIIFEGIMAFADKTLLELLDMKIFVDTDSDIRLVRRLRRDISERGRDIEGVIKQYNKFVKPSFDQYIQPTMRLADIVVPRGSGNTVAIDLIVQHVHSQLEEGCAGLGTPVPPAAPDAERPEEHAAGTGHAHHHQVRAHLGTGRPRARAPAQLLAPQGQGDQSRRVHLLLQETDAAAHRARALLPALSGLRRTDPAGAGLCGQVLCGEADHRCVHSARR

SEQ ID NO: 95938 - protein, 533 aa, Homo sapiens
  Payload ID: 19146
  Gene Name: uridine-cytidine kinase 1-like 1
  Uniprot ID: Q9NWZ5
  ENSP ID: ENSP00000358924
MSSPPAYPGIRISGCRALGAEGSSNAESLDRLLPPVGTGRSPRKRTTSQCKSEPPLLRTSKRTIYTAGRPPWYNEHGTQSKEAFAIGLGGGSASGKTTVARMIIEALDVPWVVLLSMDSFYKVLTEQQQEQAAHNNFNFDHPDAFDFDLIISTLKKLKQGKSVKVPIYDFTTHSRKKDWKTLYGANVIIFEGIMAFADKTLLELLDMKIFVDTDSDIRLVRRLRRDISERGRDIEGVIKQYNKFVKPSFDQYIQPTMRLADIVVPRGSGNTVAIDLIVQHVHSQLEERELSVRAALASAHQCHPLPRTLSVLKSTPQVRGMHTIIRDKETSRDEFIFYSKRLMRLLIEHALSFLPFQDCVVQTPQGQDYAGKCYAGKQITGVSILRAGETMEPALRAVCKDVRIGTILIQTNQLTGEPELHYLRLPKDISDDHVILMDCTVSTGAAAMMAVRVLLDHDVPEDKIFLLSLLMAEMGVHSVAYAFPRVRIITTAVDKRVNDLFRIIPGIGNFGDRYFGTDAVPDGSDEEEVAYTG

SEQ ID NO: 95939 - protein, 135 aa, Homo sapiens
  Payload ID: 19146
  Gene Name: uridine-cytidine kinase 1-like 1
  ENSP ID: ENSP00000402994
MHTIIRDKETSRDEFIFYSKRLMRLLIEHALSFLPFQDCVVQTPQGQDYAGKCYAGKQITGVSILRAGETMEPALRAVCKDVRIGTILIQTNQLTGEPELHYLRLPKDISDDHVILMDCTVSTGAAAMMAVRVLL

SEQ ID NO: 95940 - protein, 261 aa, Homo sapiens
  Payload ID: 19147
  Gene Name: uridine-cytidine kinase 2
  Uniprot ID: Q9BZX2
  ENSP ID: ENSP00000356853
MAGDSEQTLQNHQQPNGGEPFLIGVSGGTASGKSSVCAKIVQLLGQNEVDYRQKQVVILSQDSFYRVLTSEQKAKALKGQFNFDHPDAFDNELILKTLKEITEGKTVQIPVYDFVSHSRKEETVTVYPADVVLFEGILAFYSQEVRDLFQMKLFVDTDADTRLSRRVLRDISERGRDLEQILSQYITFVKPAFEEFCLPTKKYADVIIPRGADNLVAINLIVQHIQDILNGGPSKRQTNGCLNGYTPSRKRQASESSSRPH

SEQ ID NO: 95941 - protein, 111 aa, Homo sapiens
  Payload ID: 19147
  Gene Name: uridine-cytidine kinase 2
  Uniprot ID: Q9BZX2
  ENSP ID: ENSP00000476327
MKLFVDTDADTRLSRRVLRDISERGRDLEQILSQYITFVKPAFEEFCLPTKKYADVIIPRGADNLVAINLIVQHIQDILNGGPSKRQTNGCLNGYTPSRKRQASESSSRPH

SEQ ID NO: 95942 - protein, 111 aa, Homo sapiens; identical to SEQ ID NO: 95941
  Payload ID: 19147
  Gene Name: uridine-cytidine kinase 2
  Uniprot ID: Q9BZX2
  ENSP ID: ENSP00000476692

SEQ ID NO: 95943 - protein, 676 aa, Homo sapiens
  Payload ID: 19148
  Gene Name: urocanate hydratase 1
  Uniprot ID: Q96N76
  ENSP ID: ENSP00000290868
MSSLQALCSGLPLRPLPENRGRQAGVPHAPVRTPSLSPVEKQLALRNALRYFPPDVQELLAPEFAQELQLYGHIYMYRFCPDIEMRAYPIEQYPCQTKVAAAIMHMIMNNLDPAVAQFPQELVTYGGNGQVFSNWAQFWLTMFYLSKMTEEQTLVMYSGHPLGLFPSSRSAPRLVITNGMVIPNYSSRTEYEKLFALGVTMYGQMTAGSYCYIGPQGIVHGTVLTVLNAARRYLGIEDLAGKVFVTSGLGGMSGAQAKAAVIVGCIGVIAEVDKAALEKRHRQGWLMEVTDSLDRCIQRLREARKKKEVLSLGYHGNVVALWERLVHELDTTGECLVDLGSDQTSCHNPFNGGYYPVQLSFTEAQSLMASNPAVFKDLVQESLRRQVSAINRLAEEKFFFWDYGNAFLLEAQRAGADVEKKGAGRTEFRYPSYVQHIMGDIFSQGFGPFRWVCTSGDPQDLAVTDELATSVLEEAIADGVKVSVKLQYMDNIRWIREAARHRLVVGSQARILYSDQKGRVAIAVAINQAIACRRIKAPVVLSRDHHDVSGTDSPFRETSNIYDGSAFCADMAVQNFVGDACRGATWVALHNGGGVGWGEVINGGFGLVLDGTPEAEGRARLMLSWDVSNGVARRCWSGNQKAYEIICQTMQENSTLVVTLPHKVEDERVLQQALQL

SEQ ID NO: 95944 - protein, 736 aa, Homo sapiens
  Payload ID: 19148
  Gene Name: urocanate hydratase 1
  Uniprot ID: Q96N76
  ENSP ID: ENSP00000373073
MSSLQALCSGLPLRPLPENRGRQAGVPHAPVRTPSLSPVEKQLALRNALRYFPPDVQELLAPEFAQELQLYGHIYMYRFCPDIEMRAYPIEQYPCQTKVAAAIMHMIMNNLDPAVAQFPQELVTYGGNGQVFSNWAQFWLTMFYLSKMTEEQTLVMYSGHPLGLFPSSRSAPRLVITNGMVIPNYSSRTEYEKLFALGVTMYGQMTAGSYCYIGPQGIVHGTVLTVLNAARRYLGIEDLAGKVFVTSGLGGMSGAQAKAAVIVGCIGVIAEVDKAALEKRHRQGWLMEVTDSLDRCIQRLRVLQLGLQQALGWAGLPAALGLCVLSCFVNLAPLGEGRCLAPSGFSRPLLGAPVLLLCPSREARKKKEVLSLGYHGNVVALWERLVHELDTTGECLVDLGSDQTSCHNPFNGGYYPVQLSFTEAQSLMASNPAVFKDLVQESLRRQVSAINRLAEEKFFFWDYGNAFLLEAQRAGADVEKKGAGRTEFRYPSYVQHIMGDIFSQGFGPFRWVCTSGDPQDLAVTDELATSVLEEAIADGVKVSVKLQYMDNIRWIREAARHRLVVGSQARILYSDQKGRVAIAVAINQAIACRRIKAPVVLSRDHHDVSGTDSPFRETSNIYDGSAFCADMAVQNFVGDACRGATWVALHNGGGVGWGEVINGGFGLVLDGTPEAEGRARLMLSWDVSNGVARRCWSGNQKAYEIICQTMQENSTLVVTLPHKVEDERVLQQALQL

SEQ ID NO: 95945 - protein, 124 aa, Homo sapiens
  Payload ID: 19149
  Gene Name: urocortin
  Uniprot ID: P55089
  ENSP ID: ENSP00000296099
MRQAGRAALLAALLLLVQLCPGSSQRSPEAAGVQDPSLRWSPGARNQGGGARALLLLLAERFPRRAGPGRLGLGTAGERPRRDNPSLSIDLTFHLLRTLLELARTQSQRERAEQNRIIFDSVGK

SEQ ID NO: 95946 - protein, 112 aa, Homo sapiens
  Payload ID: 19150
  Gene Name: urocortin 2
  Uniprot ID: Q96RP3
  ENSP ID: ENSP00000273610
MTRCALLLLMVLMLGRVLVVPVTPIPTFQLRPQNSPQTTPRPAASESPSAAPTWPWAAQSHCSPTRHPGSRIVLSLDVPIGLLQILLEQARARAAREQATTNARILARVGHC

SEQ ID NO: 95947 - protein, 161 aa, Homo sapiens
  Payload ID: 19151
  Gene Name: urocortin 3
  Uniprot ID: Q969E3
  ENSP ID: ENSP00000369798
MLMPVHFLLLLLLLLGGPRTGLPHKFYKAKPIFSCLNTALSEAEKGQWEDASLLSKRSFHYLRSRDASSGEEEEGKEKKTFPISGARGGARGTRYRYVSQAQPRGKPRQDTAKSPHRTKFTLSLDVPTNIMNLLFNIAKAKNLRAQAAANAHLMAQIGRKK

SEQ ID NO: 95948 - protein, 640 aa, Homo sapiens
  Payload ID: 19152
  Gene Name: uromodulin
  Uniprot ID: P07911
  ENSP ID: ENSP00000306279
MGQPSLTWMLMVVVASWFITTAATDTSEARWCSECHSNATCTEDEAVTTCTCQEGFTGDGLTCVDLDECAIPGAHNCSANSSCVNTPGSFSCVCPEGFRLSPGLGCTDVDECAEPGLSHCHALATCVNVVGSYLCVCPAGYRGDGWHCECSPGSCGPGLDCVPEGDALVCADPCQAHRTLDEYWRSTEYGEGYACDTDLRGWYRFVGQGGARMAETCVPVLRCNTAAPMWLNGTHPSSDEGIVSRKACAHWSGHCCLWDASVQVKACAGGYYVYNLTAPPECHLAYCTDPSSVEGTCEECSIDEDCKSNNGRWHCQCKQDFNITDISLLEHRLECGANDMKVSLGKCQLKSLGFDKVFMYLSDSRCSGFNDRDNRDWVSVVTPARDGPCGTVLTRNETHATYSNTLYLADEIIIRDLNIKINFACSYPLDMKVSLKTALQPMVSALNIRVGGTGMFTVRMALFQTPSYTQPYQGSSVTLSTEAFLYVGTMLDGGDLSRFALLMTNCYATPSSNATDPLKYFIIQDRCPHTRDSTIQVVENGESSQGRFSVQMFRFAGNYDLVYLHCEVYLCDTMNEKCKPTCSGTRFRSGSVIDQSRVLNLGPITRKGVQATVSRAFSSLGLLKVWLPLLLSATLTLTFQ

SEQ ID NO: 95949 - protein, 673 aa, Homo sapiens
  Payload ID: 19152
  Gene Name: uromodulin
  Uniprot ID: P07911
  ENSP ID: ENSP00000379438
MGQPSLTWMLMVVVASWFITTAATDTSEARTKYNCPARWSWRTPQRGGDTEQGPDEDFTSQGRWCSECHSNATCTEDEAVTTCTCQEGFTGDGLTCVDLDECAIPGAHNCSANSSCVNTPGSFSCVCPEGFRLSPGLGCTDVDECAEPGLSHCHALATCVNVVGSYLCVCPAGYRGDGWHCECSPGSCGPGLDCVPEGDALVCADPCQAHRTLDEYWRSTEYGEGYACDTDLRGWYRFVGQGGARMAETCVPVLRCNTAAPMWLNGTHPSSDEGIVSRKACAHWSGHCCLWDASVQVKACAGGYYVYNLTAPPECHLAYCTDPSSVEGTCEECSIDEDCKSNNGRWHCQCKQDFNITDISLLEHRLECGANDMKVSLGKCQLKSLGFDKVFMYLSDSRCSGFNDRDNRDWVSVVTPARDGPCGTVLTRNETHATYSNTLYLADEIIIRDLNIKINFACSYPLDMKVSLKTALQPMVSALNIRVGGTGMFTVRMALFQTPSYTQPYQGSSVTLSTEAFLYVGTMLDGGDLSRFALLMTNCYATPSSNATDPLKYFIIQDRCPHTRDSTIQVVENGESSQGRFSVQMFRFAGNYDLVYLHCEVYLCDTMNEKCKPTCSGTRFRSGSVIDQSRVLNLGPITRKGVQATVSRAFSSLGLLKVWLPLLLSATLTLTFQ

SEQ ID NO: 95950 - protein, 689 aa, Homo sapiens
  Payload ID: 19152
  Gene Name: uromodulin
  ENSP ID: ENSP00000379442
MRHIMTRLTLPFWLQDTRHQRQREKFKGPTRLSFGQVLSRPEVAGRAERMGQPSLTWMLMVVVASWFITTAATDTSEARWCSECHSNATCTEDEAVTTCTCQEGFTGDGLTCVDLDECAIPGAHNCSANSSCVNTPGSFSCVCPEGFRLSPGLGCTDVDECAEPGLSHCHALATCVNVVGSYLCVCPAGYRGDGWHCECSPGSCGPGLDCVPEGDALVCADPCQAHRTLDEYWRSTEYGEGYACDTDLRGWYRFVGQGGARMAETCVPVLRCNTAAPMWLNGTHPSSDEGIVSRKACAHWSGHCCLWDASVQVKACAGGYYVYNLTAPPECHLAYCTDPSSVEGTCEECSIDEDCKSNNGRWHCQCKQDFNITDISLLEHRLECGANDMKVSLGKCQLKSLGFDKVFMYLSDSRCSGFNDRDNRDWVSVVTPARDGPCGTVLTRNETHATYSNTLYLADEIIIRDLNIKINFACSYPLDMKVSLKTALQPMVSALNIRVGGTGMFTVRMALFQTPSYTQPYQGSSVTLSTEAFLYVGTMLDGGDLSRFALLMTNCYATPSSNATDPLKYFIIQDRCPHTRDSTIQVVENGESSQGRFSVQMFRFAGNYDLVYLHCEVYLCDTMNEKCKPTCSGTRFRSGSVIDQSRVLNLGPITRKGVQATVSRAFSSLGLLKVWLPLLLSATLTLTFQ

SEQ ID NO: 95951 - protein, 29 aa, Homo sapiens
  Payload ID: 19152
  Gene Name: uromodulin
  ENSP ID: ENSP00000458695
MGQPSLTWMLMVVVASWFITTAATDTSEA

SEQ ID NO: 95952 - protein, 125 aa, Homo sapiens
  Payload ID: 19152
  Gene Name: uromodulin
  ENSP ID: ENSP00000458939
MGQPSLTWMLMVVVASWFITTAATDTSEARWCSECHSNATCTEDEAVTTCTCQEGFTGDGLTCVDLDECAIPGAHNCSANSSCVNTPGSFSCVCPEGFRLSPGLGCTDVDECAEPGLSHCHALAT

SEQ ID NO: 95953 - protein, 88 aa, Homo sapiens
  Payload ID: 19152
  Gene Name: uromodulin
  ENSP ID: ENSP00000459724
MGQPSLTWMLMVVVASWFITTAATDTSEARWCSECHSNATCTEDEAVTTCTCQEGFTGDGLTCVDLDECAIPGAHNCSANSSCVNTPG

SEQ ID NO: 95954 - protein, 138 aa, Homo sapiens
  Payload ID: 19152
  Gene Name: uromodulin
  ENSP ID: ENSP00000459738
MRHIMTRLTLPFWLQVLSRPEVAGRAERMGQPSLTWMLMVVVASWFITTAATDTSEARWCSECHSNATCTEDEAVTTCTCQEGFTGDGLTCVDLDECAIPGAHNCSANSSCVNTPGSFSCVCPEGFRLSPGLGCTDVD

SEQ ID NO: 95955 - protein, 161 aa, Homo sapiens
  Payload ID: 19152
  Gene Name: uromodulin
  ENSP ID: ENSP00000460374
MGQPSLTWMLMVVVASWFITTAATDTSEARTKYNCPARWSWRTPQRGGDTEQGWCSECHSNATCTEDEAVTTCTCQEGFTGDGLTCVDLDECAIPGAHNCSANSSCVNTPGSFSCVCPEGFRLSPGLGCTDVDECAEPGLSHCHALATCVNVVGSYLCVCP

SEQ ID NO: 95956 - protein, 640 aa, Homo sapiens; identical to SEQ ID NO: 95948
  Payload ID: 19152
  Gene Name: uromodulin
  Uniprot ID: P07911
  ENSP ID: ENSP00000460548

SEQ ID NO: 95957 - protein, 161 aa, Homo sapiens
  Payload ID: 19152
  Gene Name: uromodulin
  ENSP ID: ENSP00000460845
MGQPSLTWMLMVVVASWFITTAATDTSEARTKYNCPARWSWRTPQRGGDTEQGPDEDFTSQGSRKHKMCKEREGQQVHRKSYQRWCSECHSNATCTEDEAVTTCTCQEGFTGDGLTCVDLDECAIPGAHNCSANSSCVNTPGSFSCVCPEGFRLSPGLGCT

SEQ ID NO: 95958 - protein, 86 aa, Homo sapiens
  Payload ID: 19152
  Gene Name: uromodulin
  ENSP ID: ENSP00000461120
MGQPSLTWMLMVVVASWFITTAATDTSEARWCSECHSNATCTEDEAVTTCTCQEGFTGDGLTCVDLDECAIPGAHNCSANSSCVNT

SEQ ID NO: 95959 - protein, 102 aa, Homo sapiens
  Payload ID: 19152
  Gene Name: uromodulin
  ENSP ID: ENSP00000461641
MGQPSLTWMLMVVVASWFITTAATDTSEARWCSECHSNATCTEDEAVTTCTCQEGFTGDGLTCVDLDECAIPGAHNCSANSSCVNTPGSFSCVCPEGFRLSP

SEQ ID NO: 95960 - protein, 242 aa, Homo sapiens
  Payload ID: 19153
  Gene Name: uromodulin-like 1
  ENSP ID: ENSP00000383273
  MOD_RES (1)..(1): Any amino acid
XPVGSWYNVTILVKMDFKELQQVDPRLLNHMRLLHSLVTSALQPMASTVHHLHSAPGNASTTVSRLLLGLPRPLPVADVSTLLGDIAKRVYEVISVQVQDVNECFYEELNACSGRELCANLEGSYWCVCHQEAPATSPRKLNLEWEDCPPVSDYVVLNVTSDSFQVSWRLNSTQNHTFHVRVYRGMELLRSARTQSQALAVAGLEAGVLYRVKTSYQGCGADVSTTLTIKTKYVLEKLDFQS

SEQ ID NO: 95961 - protein, 1246 aa, Homo sapiens
  Payload ID: 19153
  Gene Name: uromodulin-like 1
  Uniprot ID: Q5DID0
  ENSP ID: ENSP00000383276
MVYRTQYLVVEVPESRNVTDCCEGYEQLGLYCVLPLNQSGQFTSRPGACPAEGPEPSTSPCSLDIDCPGLEKCCPWSGGRYCMAPAPQAPERDPVGSWYNVTILVKMDFKELQQVDPRLLNHMRLLHSLVTSALQPMASTVHHLHSAPGNASTTVSRLLLGLPRPLPVADVSTLLGDIAKRVYEVISVQVQDVNECFYEELNACSGRELCANLEGSYWCVCHQEAPATSPRKLNLEWEDCPPVSDYVVLNVTSDSFQVSWRLNSTQNHTFHVRVYRGMELLRSARTQSQALAVAGLEAGVLYRVKTSYQGCGADVSTTLTIKTNAQVFEVTIKIVNHNLTEKLLNRSSVEYQDFSRQLLHEVESSFPPVVSDLYRSGKLRMQIVSLQAGSVVVRLKLTVQDPGFPMGISTLAPILQPLLASTVFQIDRQGTRVQDWDECVDSAEHDCSPAAWCINLEGSYTCQCRTTRDATPSRAGRACEGDLVSPMGGGLSAATGVTVPGLGTGTAALGLENFTLSPSPGYPQGTPAAGQAWTPEPSPRRGGSNVVGYDRNNTGKGVEQELQGNSIMEPPSWPSPTEDPTGHFLWHATRSTRETLLNPTWLRNEDSGPSGSVDLPLTSTLTALKTPACVPVSIGRIMVSNVTSTGFHLAWEADLAMDSTFQLTLTSMWSPAVVLETWNTSVTLSGLEPGVLHLVEIMAKACGKEGARAHLKVRTAARKLIGKVRIKNVRYSESFRNASSQEYRDFLELFFRMVRGSLPATMCQHMDAGGVRMEVVSVTNGSIVVEFHLLIIADVDVQEVSAAFLTAFQTVPLLEVIRGDTFIQDYDECERKEDDCVPGTSCRNTLGSFTCSCEGGAPDFPVEYSERPCEGDSPGNETWATSPERPLTTAGTKAAFVQGTSPTPQGLPQRLNLTGAVRVLCEIEKVVVAIQKRFLQQESIPESSLYLSHPSCNVSHSNGTHVLLEAGWSECGTLMQSNMTNTVVRTTLRNDLSQEGIIHHLKILSPIYCAFQNDLLTSSGFTLEWGVYTIIEDLHGAGNFVTEMQLFIGDSPIPQNYSVSASDDVRIEVGLYRQKSNLKVVLTECWATPSSNARDPITFSFINNSCPVPNTYTNVIENGNSNKAQFKLRIFSFINDSIVYLHCKLRVCMESPGATCKINCNNFRLLQNSETSATHQMSWGPLIRSEGEPPHAEAGLGAGYVVLIVVAIFVLVAGTATLLIVRYQRMNGRYNFKIQSNNFSYQVFYE

SEQ ID NO: 95962 - protein, 1374 aa, Homo sapiens
  Payload ID: 19153
  Gene Name: uromodulin-like 1
  Uniprot ID: Q5DID0
  ENSP ID: ENSP00000383279
MVYRTQYLVVEVPESRNVTDCCEGYEQLGLYCVLPLNQSGQFTSRPGACPAEGPEPSTSPCSLDIDCPGLEKCCPWSGGRYCMAPAPQAPERDPVGSWYNVTILVKMDFKELQQVDPRLLNHMRLLHSLVTSALQPMASTVHHLHSAPGNASTTVSRLLLGLPRPLPVADVSTLLGDIAKRVYEVISVQVQDVNECFYEELNACSGRELCANLEGSYWCVCHQEAPATSPRKLNLEWEDCPPVSDYVVLNVTSDSFQVSWRLNSTQNHTFHVRVYRGMELLRSARTQSQALAVAGLEAGVLYRVKTSYQGCGADVSTTLTIKTNAQVFEVTIKIVNHNLTEKLLNRSSVEYQDFSRQLLHEVESSFPPVVSDLYRSGKLRMQIVSLQAGSVVVRLKLTVQDPGFPMGISTLAPILQPLLASTVFQIDRQGTRVQDWDECVDSAEHDCSPAAWCINLEGSYTCQCRTTRDATPSRAGRACEGDLVSPMGGGLSAATGVTVPGLGTGTAALGLENFTLSPSPGYPQGTPAAGQAWTPEPSPRRGGSNVVGYDRNNTGKGVEQEVPSTAPGLGMDQGSPSQVNPSQGSPSQGSLRQESTSQASPSQRSTSQGSPSQVNPSQRSTSHANSSQGSPSQGSPSQESPSQGSTSQASPSHRNTIGVIGTTSSPKATGSTHSFPPGATDGPLALPGQLQGNSIMEPPSWPSPTEDPTGHFLWHATRSTRETLLNPTWLRNEDSGPSGSVDLPLTSTLTALKTPACVPVSIGRIMVSNVTSTGFHLAWEADLAMDSTFQLTLTSMWSPAVVLETWNTSVTLSGLEPGVLHLVEIMAKACGKEGARAHLKVRTAARKLIGKVRIKNVRYSESFRNASSQEYRDFLELFFRMVRGSLPATMCQHMDAGGVRMEVVSVTNGSIVVEFHLLIIADVDVQEVSAAFLTAFQTVPLLEVIRGDTFIQDYDECERKEDDCVPGTSCRNTLGSFTCSCEGGAPDFPVEYSERPCEGDSPGNETWATSPERPLTTAGTKAAFVQGTSPTPQGLPQRLNLTGAVRVLCEIEKVVVAIQKRFLQQESIPESSLYLSHPSCNVSHSNGTHVLLEAGWSECGTLMQSNMTNTVVRTTLRNDLSQEGIIHHLKILSPIYCAFQNDLLTSSGFTLEWGVYTIIEDLHGAGNFVTEMQLFIGDSPIPQNYSVSASDDVRIEVGLYRQKSNLKVVLTECWATPSSNARDPITFSFINNSCPVPNTYTNVIENGNSNKAQFKLRIFSFINDSIVYLHCKLRVCMESPGATCKINCNNFRLLQNSETSATHQMSWGPLIRSEGEPPHAEAGLGAGYVVLIVVAIFVLVAGTATLLIVRYQRMNGRYNFKIQSNNFSYQVFYE

SEQ ID NO: 95963 - protein, 1446 aa, Homo sapiens
  Payload ID: 19153
  Gene Name: uromodulin-like 1
  Uniprot ID: Q5DID0
  ENSP ID: ENSP00000386126
MLRTSGLALLALVSAVGPSQASGFTEKGLSLLGYQLCSHRVTHTVQKVEAVQTSYTSYVSCGGWIPWRRCPKMVYRTQYLVVEVPESRNVTDCCEGYEQLGLYCVLPLNQSGQFTSRPGACPAEGPEPSTSPCSLDIDCPGLEKCCPWSGGRYCMAPAPQAPERDPVGSWYNVTILVKMDFKELQQVDPRLLNHMRLLHSLVTSALQPMASTVHHLHSAPGNASTTVSRLLLGLPRPLPVADVSTLLGDIAKRVYEVISVQVQDVNECFYEELNACSGRELCANLEGSYWCVCHQEAPATSPRKLNLEWEDCPPVSDYVVLNVTSDSFQVSWRLNSTQNHTFHVRVYRGMELLRSARTQSQALAVAGLEAGVLYRVKTSYQGCGADVSTTLTIKTNAQVFEVTIKIVNHNLTEKLLNRSSVEYQDFSRQLLHEVESSFPPVVSDLYRSGKLRMQIVSLQAGSVVVRLKLTVQDPGFPMGISTLAPILQPLLASTVFQIDRQGTRVQDWDECVDSAEHDCSPAAWCINLEGSYTCQCRTTRDATPSRAGRACEGDLVSPMGGGLSAATGVTVPGLGTGTAALGLENFTLSPSPGYPQGTPAAGQAWTPEPSPRRGGSNVVGYDRNNTGKGVEQEVPSTAPGLGMDQGSPSQVNPSQGSPSQGSLRQESTSQASPSQRSTSQGSPSQVNPSQRSTSHANSSQGSPSQGSPSQESPSQGSTSQASPSHRNTIGVIGTTSSPKATGSTHSFPPGATDGPLALPGQLQGNSIMEPPSWPSPTEDPTGHFLWHATRSTRETLLNPTWLRNEDSGPSGSVDLPLTSTLTALKTPACVPVSIGRIMVSNVTSTGFHLAWEADLAMDSTFQLTLTSMWSPAVVLETWNTSVTLSGLEPGVLHLVEIMAKACGKEGARAHLKVRTAARKLIGKVRIKNVRYSESFRNASSQEYRDFLELFFRMVRGSLPATMCQHMDAGGVRMEVVSVTNGSIVVEFHLLIIADVDVQEVSAAFLTAFQTVPLLEVIRGDTFIQDYDECERKEDDCVPGTSCRNTLGSFTCSCEGGAPDFPVEYSERPCEGDSPGNETWATSPERPLTTAGTKAAFVQGTSPTPQGLPQRLNLTGAVRVLCEIEKVVVAIQKRFLQQESIPESSLYLSHPSCNVSHSNGTHVLLEAGWSECGTLMQSNMTNTVVRTTLRNDLSQEGIIHHLKILSPIYCAFQNDLLTSSGFTLEWGVYTIIEDLHGAGNFVTEMQLFIGDSPIPQNYSVSASDDVRIEVGLYRQKSNLKVVLTECWATPSSNARDPITFSFINNSCPVPNTYTNVIENGNSNKAQFKLRIFSFINDSIVYLHCKLRVCMESPGATCKINCNNFRLLQNSETSATHQMSWGPLIRSEGEPPHAEAGLGAGYVVLIVVAIFVLVAGTATLLIVRYQRMNGRYNFKIQSNNFSYQVFYE

SEQ ID NO: 95964 - protein, 1318 aa, Homo sapiens
  Payload ID: 19153
  Gene Name: uromodulin-like 1
  Uniprot ID: Q5DID0
  ENSP ID: ENSP00000386147
MLRTSGLALLALVSAVGPSQASGFTEKGLSLLGYQLCSHRVTHTVQKVEAVQTSYTSYVSCGGWIPWRRCPKMVYRTQYLVVEVPESRNVTDCCEGYEQLGLYCVLPLNQSGQFTSRPGACPAEGPEPSTSPCSLDIDCPGLEKCCPWSGGRYCMAPAPQAPERDPVGSWYNVTILVKMDFKELQQVDPRLLNHMRLLHSLVTSALQPMASTVHHLHSAPGNASTTVSRLLLGLPRPLPVADVSTLLGDIAKRVYEVISVQVQDVNECFYEELNACSGRELCANLEGSYWCVCHQEAPATSPRKLNLEWEDCPPVSDYVVLNVTSDSFQVSWRLNSTQNHTFHVRVYRGMELLRSARTQSQALAVAGLEAGVLYRVKTSYQGCGADVSTTLTIKTNAQVFEVTIKIVNHNLTEKLLNRSSVEYQDFSRQLLHEVESSFPPVVSDLYRSGKLRMQIVSLQAGSVVVRLKLTVQDPGFPMGISTLAPILQPLLASTVFQIDRQGTRVQDWDECVDSAEHDCSPAAWCINLEGSYTCQCRTTRDATPSRAGRACEGDLVSPMGGGLSAATGVTVPGLGTGTAALGLENFTLSPSPGYPQGTPAAGQAWTPEPSPRRGGSNVVGYDRNNTGKGVEQELQGNSIMEPPSWPSPTEDPTGHFLWHATRSTRETLLNPTWLRNEDSGPSGSVDLPLTSTLTALKTPACVPVSIGRIMVSNVTSTGFHLAWEADLAMDSTFQLTLTSMWSPAVVLETWNTSVTLSGLEPGVLHLVEIMAKACGKEGARAHLKVRTAARKLIGKVRIKNVRYSESFRNASSQEYRDFLELFFRMVRGSLPATMCQHMDAGGVRMEVVSVTNGSIVVEFHLLIIADVDVQEVSAAFLTAFQTVPLLEVIRGDTFIQDYDECERKEDDCVPGTSCRNTLGSFTCSCEGGAPDFPVEYSERPCEGDSPGNETWATSPERPLTTAGTKAAFVQGTSPTPQGLPQRLNLTGAVRVLCEIEKVVVAIQKRFLQQESIPESSLYLSHPSCNVSHSNGTHVLLEAGWSECGTLMQSNMTNTVVRTTLRNDLSQEGIIHHLKILSPIYCAFQNDLLTSSGFTLEWGVYTIIEDLHGAGNFVTEMQLFIGDSPIPQNYSVSASDDVRIEVGLYRQKSNLKVVLTECWATPSSNARDPITFSFINNSCPVPNTYTNVIENGNSNKAQFKLRIFSFINDSIVYLHCKLRVCMESPGATCKINCNNFRLLQNSETSATHQMSWGPLIRSEGEPPHAEAGLGAGYVVLIVVAIFVLVAGTATLLIVRYQRMNGRYNFKIQSNNFSYQVFYE

SEQ ID NO: 95965 - protein, 78 aa, Homo sapiens
  Payload ID: 19153
  Gene Name: uromodulin-like 1
  ENSP ID: ENSP00000417444
  MOD_RES (1)..(1): Any amino acid
XPVGSWYNVTILVKMDFKELQQVDPRLLNHMRLLHSLMSMSVSMRSSMPALEGNCAQTWRARTGASVTRKLQPRLHGS

SEQ ID NO: 95966 - protein, 109 aa, Homo sapiens
  Payload ID: 19153
  Gene Name: uromodulin-like 1
  ENSP ID: ENSP00000418135
  MOD_RES (1)..(1): Any amino acid
XPVGSWYNVTILVKMDFKELQQVDPRLLNHMRLLHSLLVKGTAQLASKKLALKPHCLALVLPLISCVTLGHQRPATNGLHRPPPALSPWERLHHSVAAATGPATATACG

SEQ ID NO: 95967 - protein, 174 aa, Homo sapiens
  Payload ID: 19153
  Gene Name: uromodulin-like 1
  ENSP ID: ENSP00000418417
  MOD_RES (1)..(1): Any amino acid
XPVGSWYNVTILVKMDFKELQQVDPRLLNHMRLLHSLVTSALQPMASTVHHLHSAPGNASTTVSRLLLGLPRPLPVADVSTLLGDIAKRVYEVISVQVQDVNECFYEELNACSGRELCANLEGSYWCVCHQEAPATSPRKLNLEWEARGLEIHLELRATSTSHGTPLSSAENCL

SEQ ID NO: 95968 - protein, 113 aa, Homo sapiens
  Payload ID: 19153
  Gene Name: uromodulin-like 1
  ENSP ID: ENSP00000418848
  MOD_RES (1)..(1): Any amino acid
XPVGSWYNVTILVKMDFKELQQVDPRLLNHMRLLHSLVGETDGGCLHPPCGSCSGRPRSPAPCNQWPPPSTTCTQPLGTPPPQCRGCYWACHGHCLWLTSPPCWVTLRSVSMK

SEQ ID NO: 95969 - protein, 138 aa, Homo sapiens
  Payload ID: 19153
  Gene Name: uromodulin-like 1
  ENSP ID: ENSP00000420468
  MOD_RES (1)..(1): Any amino acid
XPVGSWYNVTILVKMDFKELQQVDPRLLNHMRLLHSLVTSALQPMASTVHHLHSAPGNASTTVSRLLLGLPRPLPVADVSTLLGDIAKRVYEVISVQMSMSVSMRSSMPALEGNCAQTWRARTGASVTRKLQPRLHGS

SEQ ID NO: 95970 - protein, 406 aa, Homo sapiens
  Payload ID: 19154
  Gene Name: uronyl-2-sulfotransferase
  Uniprot ID: Q9Y2C2
  ENSP ID: ENSP00000356433
MKKKQQHPGGGADPWPHGAPMGGAPPGLGSWKRRVPLLPFLRFSLRDYGFCMATLLVFCLGSLLYQLSGGPPRFLLDLRQYLGNSTYLDDHGPPPSKVLPFPSQVVYNRVGKCGSRTVVLLLRILSEKHGFNLVTSDIHNKTRLTKNEQMELIKNISTAEQPYLFTRHVHFLNFSRFGGDQPVYINIIRDPVNRFLSNYFFRRFGDWRGEQNHMIRTPSMRQEERYLDINECILENYPECSNPRLFYIIPYFCGQHPRCREPGEWALERAKLNVNENFLLVGILEELEDVLLLLERFLPHYFKGVLSIYKDPEHRKLGNMTVTVKKTVPSPEAVQILYQRMRYEYEFYHYVKEQFHLLKRKFGLKSHVSKPPLRPHFFIPTPLETEEPIDDEEQDDEKWLEDIYKR

SEQ ID NO: 95971 - protein, 258 aa, Homo sapiens
  Payload ID: 19155
  Gene Name: uroplakin 1A
  Uniprot ID: O00322
  ENSP ID: ENSP00000222275
MASAAAAEAEKGSPVVVGLLVVGNIIILLSGLSLFAETIWVTADQYRVYPLMGVSGKDDVFAGAWIAIFCGFSFFMVASFGVGAALCRRRSMVLTYLVLMLIVYIFECASCITSYTHRDYMVSNPSLITKQMLTFYSADTDQGQELTRLWDRVMIEQECCGTSGPMDWVNFTSAFRAATPEVVFPWPPLCCRRTGNFIPLNEEGCRLGHMDYLFTKGCFEHIGHAIDSYTWGISWFGFAILMWTLPVMLIAMYFYTML

SEQ ID NO: 95972 - protein, 273 aa, Homo sapiens
  Payload ID: 19155
  Gene Name: uroplakin 1A
  Uniprot ID: O00322
  ENSP ID: ENSP00000368298
MASAAAAEAEKGSPVVVGLLVVGNIIILLSGLSLFAETIWVTADQYRVYPLMGVSGKDDVFAGAWIAIFCGFSFFMVASFGVGAALCRRRSMVLTYLVLMLIVYIFECASCITSYTHRDYMVSNPSLITKQMLTFYSADTDQGQELTRLWDRVMIEQECCGTSGPMDWVNFTSAFRAATPEVVFPWPPLCCRRTGNFIPLNEEGCRLGHMDYLFTKAGVQWHNLSSLQRLPPGFKGFSHLSFQSSWDYRAASNTSATPSTATRGVSRGLGLPS

SEQ ID NO: 95973 - protein, 273 aa, Homo sapiens; identical to SEQ ID NO: 95972
  Payload ID: 19155
  Gene Name: uroplakin 1A
  Uniprot ID: O00322
  ENSP ID: ENSP00000478942

SEQ ID NO: 95974 - protein, 258 aa, Homo sapiens; identical to SEQ ID NO: 95971
  Payload ID: 19155
  Gene Name: uroplakin 1A
  Uniprot ID: O00322
  ENSP ID: ENSP00000483176

SEQ ID NO: 95975 - protein, 260 aa, Homo sapiens
  Payload ID: 19156
  Gene Name: uroplakin 1B
  Uniprot ID: O75841
  ENSP ID: ENSP00000264234
MAKDNSTVRCFQGLLIFGNVIIGCCGIALTAECIFFVSDQHSLYPLLEATDNDDIYGAAWIGIFVGICLFCLSVLGIVGIMKSSRKILLAYFILMFIVYAFEVASCITAATQQDFFTPNLFLKQMLERYQNNSPPNNDDQWKNNGVTKTWDRLMLQDNCCGVNGPSDWQKYTSAFRTENNDADYPWPRQCCVMNNLKEPLNLEACKLGVPGFYHNQGCYELISGPMNRHAWGVAWFGFAILCWTFWVLLGTMFYWSRIEY

SEQ ID NO: 95976 - protein, 252 aa, Homo sapiens
  Payload ID: 19156
  Gene Name: uroplakin 1B
  ENSP ID: ENSP00000418116
MAKDNSTVRCFQGLLIFGNVIIGCCGIALTAECIFFVSDQHSLYPLLEATDNDDIYGAAWIGIFVGICLFCLSVLGIVGIMKSSRKILLAYFILMFIVYAFEVASCITAATQQDFQMLERYQNNSPPNNDDQWKNNGVTKTWDRLMLQDNCCGVNGPSDWQKYTSAFRTENNDADYPWPRQCCVMNNLKEPLNLEACKLGVPGFYHNQGCYELISGPMNRHAWGVAWFGFAILCWTFWVLLGTMFYWSRIEY

SEQ ID NO: 95977 - protein, 169 aa, Homo sapiens
  Payload ID: 19156
  Gene Name: uroplakin 1B
  ENSP ID: ENSP00000418399
MAKDNSTVRCFQGLLIFGNVIIGCCGIALTAECIFFVSDQHSLYPLLEATDNDDIYGAAWIGIFVGICLFCLSVLGIVGIMKSSRKILLAYFILMFIVYAFEVASCITAATQQDFFTPNLFLKQMLERYQNNSPPNNDDQWKNNGVTKTWDRLMLQDNCCGVNGPSDWQ

SEQ ID NO: 95978 - protein, 189 aa, Homo sapiens
  Payload ID: 19156
  Gene Name: uroplakin 1B
  ENSP ID: ENSP00000418597
MAKDNSTVRCFQGLLIFGNVIIGCCGIALTAECIFFVSDQHSLYPLLEATDNDDIYGAAWIGIFVGICLFCLSVLGIVGIMKSSRKILLAYFILMFIVYAFEVASCITAATQQDFFTPNLFLKQMLERYQNNSPPNNDDQWKNNGVTKTWDRLMLQDNCCGVNGPSDWQKYTSAFRTENNDADYPWPRQ

SEQ ID NO: 95979 - protein, 180 aa, Homo sapiens
  Payload ID: 19156
  Gene Name: uroplakin 1B
  ENSP ID: ENSP00000418972
MKSSRKILLAYFILMFIVYAFEVASCITAATQQDFFTPNLFLKQMLERYQNNSPPNNDDQWKNNGVTKTWDRLMLQDNCCGVNGPSDWQKYTSAFRTENNDADYPWPRQCCVMNNLKEPLNLEACKLGVPGFYHNQGCYELISGPMNRHAWGVAWFGFAILCWTFWVLLGTMFYWSRIEY

SEQ ID NO: 95980 - protein, 184 aa, Homo sapiens
  Payload ID: 19157
  Gene Name: uroplakin 2
  Uniprot ID: O00526
  ENSP ID: ENSP00000264031
MAPLLPIRTLPLILILLALLSPGAADFNISSLSGLLSPALTESLLVALPPCHLTGGNATLMVRRANDSKVVTSSFVVPPCRGRRELVSVVDSGAGFTVTRLSAYQVTNLVPGTKFYISYLVKKGTATESSREIPMSTLPRRNMESIGLGMARTGGMVVITVLLSVAMFLLVLGFIIALALGSRK

SEQ ID NO: 95981 - protein, 287 aa, Homo sapiens
  Payload ID: 19158
  Gene Name: uroplakin 3A
  Uniprot ID: O75631
  ENSP ID: ENSP00000216211
MPPLWALLALGCLRFGSAVNLQPQLASVTFATNNPTLTTVALEKPLCMFDSKEALTGTHEVYLYVLVDSAISRNASVQDSTNTPLGSTFLQTEGGRTGPYKAVAFDLIPCSDLPSLDAIGDVSKASQILNAYLVRVGANGTCLWDPNFQGLCNAPLSAATEYRFKYVLVNMSTGLVEDQTLWSDPIRTNQLTPYSTIDTWPGRRSGGMIVITSILGSLPFFLLVGFAGAIALSLVDMGSSDGETTHDSQITQEAVPKSLGASESSYTSVNRGPPLDRAEVYSSKLQD

SEQ ID NO: 95982 - protein, 166 aa, Homo sapiens
  Payload ID: 19158
  Gene Name: uroplakin 3A
  Uniprot ID: O75631
  ENSP ID: ENSP00000379391
MPPLWALLALGCLRFGSAVNLQPQLASVTFATNNPTLTTVALEKPLCMFDSKEALTGTHEVYLYVLVDSVTPYSTIDTWPGRRSGGMIVITSILGSLPFFLLVGFAGAIALSLVDMGSSDGETTHDSQITQEAVPKSLGASESSYTSVNRGPPLDRAEVYSSKLQD

SEQ ID NO: 95983 - protein, 320 aa, Homo sapiens
  Payload ID: 19159
  Gene Name: uroplakin 3B
  Uniprot ID: Q9BT76
  ENSP ID: ENSP00000257632
MGLPWGQPHLGLQMLLLALNCLRPSLSLGEWGSWMDASSQTQGAGGPAGVIGPWAPAPLRLGEAAPGTPTPVSVAHLLSPVATELVPYTPQITAWDLEGKVTATTFSLEQPRCVFDGLASASDTVWLVVAFSNASRGFQNPETLADIPASPQLLTDGHYMTLPLSPDQLPCGDPMAGSGGAPVLRVGHDHGCHQQPFCNAPLPGPGPYREDPRIHRHLARAAKWQHDRHYLHPLFSGRPPTLGLLGSLYHALLQPVVAGGGPGAAADRLLHGQALHDPPHPTQRGRHTAGGLQAWPGPPPQPQPLAWPLCMGLGEMGRWE

SEQ ID NO: 95984 - protein, 276 aa, Homo sapiens
  Payload ID: 19159
  Gene Name: uroplakin 3B
  Uniprot ID: Q9BT76
  ENSP ID: ENSP00000334938
MGLPWGQPHLGLQMLLLALNCLRPSLSLELVPYTPQITAWDLEGKVTATTFSLEQPRCVFDGLASASDTVWLVVAFSNASRGFQNPETLADIPASPQLLTDGHYMTLPLSPDQLPCGDPMAGSGGAPVLRVGHDHGCHQQPFCNAPLPGPGPYRVKFLLMDTRGSPRAETKWSDPITLHQGKTPGSIDTWPGRRSGSMIVITSILSSLAGLLLLAFLAASTMRFSSLWWPEEAPEQLRIGSFMGKRYMTHHIPPREAATLPVGCKPGLDPLPSLSP

SEQ ID NO: 95985 - protein, 265 aa, Homo sapiens
  Payload ID: 19159
  Gene Name: uroplakin 3B
  Uniprot ID: Q9BT76
  ENSP ID: ENSP00000378319
MGLPWGQPHLGLQMLLLALNCLRPSLSLELVPYTPQITAWDLEGKVTATTFSLEQPRCVFDGLASASDTVWLVVAFSNASRGFQNPETLADIPASPQLLTDGHYMTLPLSPDQLPCGDPMAGSGGAPVLRVGHDHGCHQQPFCNAPLPGPGPYREDPRIHRHLARAAKWQHDRHYLHPLFSGRPPTLGLLGSLYHALLQPVVAGGGPGAAADRLLHGQALHDPPHPTQRGRHTAGGLQAWPGPPPQPQPLAWPLCMGLGEMGRWE

SEQ ID NO: 95986 - protein, 320 aa, Homo sapiens
  Payload ID: 19159
  Gene Name: uroplakin 3B
  Uniprot ID: Q9BT76
  ENSP ID: ENSP00000441284
MGLPWGQPHLGLQMLLLALNCLRPSLSLGEWGSWMDASSQTQGAGGPAGVIGPWAPAPLRLGEAAPGTPTPVSVAHLLSPVATELVPYTPQITAWDLEGKVTATTFSLEQPRCVFDGLASASDTVWLVVAFSNASRGFQNPETLADIPASPQLLTDGHYMTLPLSPDQLPCGDPMAGSGGAPVLRVGHDHGCHQQPFCNAPLPGPGPYREDPRIHRHLARAAKWQHDRHYLHPLFSGRPPTLGLLGSLYHALLQPVVAGGGPGAAADRLLHGQALHDPPHPTQRGRHTAGGLQAWPGPPPQPQPLAWPLCMGLGEMGRRE

SEQ ID NO: 95987 - protein, 276 aa, Homo sapiens
  Payload ID: 19159
  Gene Name: uroplakin 3B
  Uniprot ID: Q9BT76
  ENSP ID: ENSP00000479568
MGLPWGQPHLGLQMLLLALNCLRPSLSLELVPYTPQITAWDLEGKVTATTFSLEQPRCVFDGLASASDTVWLVVAFSNASRGFQNPETLADIPASPQLLTDGHYMTLPLSPDQLPCGDPMAGSGGAPVLRVGHDHGCHQQPFCNAPLPGPGPYRVKFLLMDTRGSPRAETKWSDPITLHQGKTPGSIDTWPGRRSGSMIVITSILSSLAGLLLLAFLAASTMRFSSLWWPEEAPEQLRIGSFMGKRYMTHHIPPSEAATLPVGCKPGLDPLPSLSP

SEQ ID NO: 95988 - protein, 265 aa, Homo sapiens
  Payload ID: 19159
  Gene Name: uroplakin 3B
  ENSP ID: ENSP00000487650
MGLPWGQPHLGLQMLLLALNCLRPSLSLELVPYTPQITAWDLEGKVTATTFSLEQPRCVFDGLASASDTVWLVVAFSNASRGFQNPETLADIPASPQLLTDGHYMTLPLSPDQLPCGDPMAGSGGAPVLRVGHDHGCHQQPFCNAPLPGPGPYREDPRIHRHLARAAKWQHDRHYLHPLFSGRPPTLGLLGSLYHALLQPVVAGGGPGAAADRLLHGQALHDPPHPTQRGRHTAGGLQAWPGPPPQPQPLAWPLCMGLGEMGRRE

SEQ ID NO: 95989 - protein, 263 aa, Homo sapiens
  Payload ID: 19160
  Gene Name: uroplakin 3B-like
  Uniprot ID: B0FP48
  ENSP ID: ENSP00000342938
MDNSWRLGPAIGLSAGQSQLLVSLLLLLTRVQPGTDVAAPEHISYVPQLSNDTLAGRLTLSTFTLEQPLGQFSSHNISDLDTIWLVVALSNATQSFTAPRTNQDIPAPANFSQRGYYLTLRANRVLYQTRGQLHVLRVGNDTHCQPTKIGCNHPLPGPGPYRVKFLVMNDEGPVAETKWSSDTRLQQAQALRAVPGPQSPGTVVIIAILSILLAVLLTVLLAVLIYTCFNSCRSTSLSGPEEAGSVRRYTTHLAFSTPAEGAS

SEQ ID NO: 95990 - protein, 367 aa, Homo sapiens
  Payload ID: 19161
  Gene Name: uroporphyrinogen decarboxylase
  Uniprot ID: P06132
  ENSP ID: ENSP00000246337
MEANGLGPQGFPELKNDTFLRAAWGEETDYTPVWCMRQAGRYLPEFRETRAAQDFFSTCRSPEACCELTLQPLRRFPLDAAIIFSDILVVPQALGMEVTMVPGKGPSFPEPLREEQDLERLRDPEVVASELGYVFQAITLTRQRLAGRVPLIGFAGAPWTLMTYMVEGGGSSTMAQAKRWLYQRPQASHQLLRILTDALVPYLVGQVVAGAQALQLFESHAGHLGPQLFNKFALPYIRDVAKQVKARLREAGLAPVPMIIFAKDGHFALEELAQAGYEVVGLDWTVAPKKARECVGKTVTLQGNLDPCALYASEEEIGQLVKQMLDDFGPHRYIANLGHGLYPDMDPEHVGAFVDAVHKHSRLLRQN

SEQ ID NO: 95991 - protein, 228 aa, Homo sapiens
  Payload ID: 19161
  Gene Name: uroporphyrinogen decarboxylase
  ENSP ID: ENSP00000400253
  MOD_RES (1)..(1): Any amino acid
XPQGFPELKNDTFLRAAWGEETDYTPVWCMRQAGRYLPEFRETRAAQDFFSTCRSPEACCELTLQPLRRFPLDAAIIFSDILVVPQALGMEVTMVPGKGPSFPEPLREEQDLERLRDPEVVASELGYVFQAITLTRQRLAGRVPLIGFAGAPALQLFESHAGHLGPQLFNKFALPYIRDVAKQVKARLREAGLAPVPMIIFAKDGHFALEELAQAGYEVVGLDWTVAP

SEQ ID NO: 95992 - protein, 193 aa, Homo sapiens
  Payload ID: 19161
  Gene Name: uroporphyrinogen decarboxylase
  ENSP ID: ENSP00000404489
MEANGLGPQGFPELKNDTFLRAAWGEETDYTPVWCMRQAGRYLPEFRETRAAQDFFSTCRSPEACCELTLQALGMEVTMVPGKGPSFPEPLREEQDLERLRDPEVVASELGYVFQAITLTRQRLAGRVPLIGFAGAPWTLMTYMVEGGGSSTMAQAKRWLYQRPQASHQLLRILTDALVPYLVGQVVAGAQAL

SEQ ID NO: 95993 - protein, 133 aa, Homo sapiens
  Payload ID: 19162
  Gene Name: uroporphyrinogen III synthase
  ENSP ID: ENSP00000357763
MKVLLLKDAKEDDCGQDPYIRELGLYGLEATLIPVLSFEFLSLPSFSEKLSHPEDYGGLIFTSPRAVEAAELCLEQNNKTEVWERSLKEKWNAKSVYVVGNATASLVSKIGLDTEGETCGNAEKLAEYICSSK

SEQ ID NO: 95994 - protein, 139 aa, Homo sapiens
  Payload ID: 19162
  Gene Name: uroporphyrinogen III synthase
  ENSP ID: ENSP00000357767
MKVLLLKDAKEDDCGQDPYIRELGLYGLEATLIPVLSFEFLSLPSFSEKLSHPEDYGGLIFTSPRAVEAAELCLEQNNKTEVWERSLKEKWNAKSVYVVGNATASLVSKIGLDTEGETCGNAEKLAEYICSSEEVKGIF

SEQ ID NO: 95995 - protein, 265 aa, Homo sapiens
  Payload ID: 19162
  Gene Name: uroporphyrinogen III synthase
  Uniprot ID: P10746
  ENSP ID: ENSP00000357775
MKVLLLKDAKEDDCGQDPYIRELGLYGLEATLIPVLSFEFLSLPSFSEKLSHPEDYGGLIFTSPRAVEAAELCLEQNNKTEVWERSLKEKWNAKSVYVVGNATASLVSKIGLDTEGETCGNAEKLAEYICSRESSALPLLFPCGNLKREILPKALKDKGIAMESITVYQTVAHPGIQGNLNSYYSQQGVPASITFFSPSGLTYSLKHIQELSGDNIDQIKFAAIGPTTARALAAQGLPVSCTAESPTPQALATGIRKALQPHGCC

SEQ ID NO: 95996 - protein, 265 aa, Homo sapiens; identical to SEQ ID NO: 95995
  Payload ID: 19162
  Gene Name: uroporphyrinogen III synthase
  Uniprot ID: P10746
  ENSP ID: ENSP00000357787

SEQ ID NO: 95997 - protein, 185 aa, Homo sapiens
  Payload ID: 19162
  Gene Name: uroporphyrinogen III synthase
  ENSP ID: ENSP00000414833
MKVLLLKDAKEDDCGQDPYIRLSHPEDYGGLIFTSPRAVEAAELCLEQNNKTEVWERSLKEKWNAKSVYVVGNATASLVSKIGLDTEGETCGNAEKLAEYICSRESSALPLLFPCGNLKREILPKALKDKGIAMESITVYQTVAHPGIQGNLNSYYSQQGVPASITFFSPSGLTYSLKHIQELSG

SEQ ID NO: 95998 - protein, 110 aa, Homo sapiens
  Payload ID: 19162
  Gene Name: uroporphyrinogen III synthase
  ENSP ID: ENSP00000478957
  MOD_RES (1)..(1): Any amino acid
XEGETCGNAEKLAEYICSRESSALPLLFPCGNLKREILPKALKDKGIAMESITVYQTVAHPGIQGNLNSYYSQQGVPASITFFSPSGLTYSLKHIQELSGDNIDQIKKHP

SEQ ID NO: 95999 - protein, 68 aa, Homo sapiens
  Payload ID: 19162
  Gene Name: uroporphyrinogen III synthase
  ENSP ID: ENSP00000482520
  MOD_RES (1)..(1): Any amino acid
XYQTVAHPGIQGNLNSYYSQQGVPASITFFSPSGLTYSLKHIQELSGDNIDQIKIEELELQWASWALR

SEQ ID NO: 96000 - protein, 122 aa, Homo sapiens
  Payload ID: 19162
  Gene Name: uroporphyrinogen III synthase
  ENSP ID: ENSP00000483041
FPCGNLKREILPKALKDKGIAMESITVYQTVAHPGIQGNLNSYYSQQGVPASITFFSPSGLTYSLKHIQELSGDNIDQIKLLDGGELLKKFMQGRNKGSHRNLRAKVKCNWPPRPRGASSEN

SEQ ID NO: 96001 - protein, 139 aa, Homo sapiens
  Payload ID: 19163
  Gene Name: urotensin 2
  Uniprot ID: O95399
  ENSP ID: ENSP00000054668
METNVFHLMLCVTSARTHKSTSLCFGHFNSYPSLPLIHDLLLEISFQLSAPHEDARLTPEELERASLLQILPEMLGAERGDILRKADSSTNIFNPRGNLRKFQDFSGQDPNILLSHLLARIWKPYKKRETPDCFWKYCV

SEQ ID NO: 96002 - protein, 124 aa, Homo sapiens
  Payload ID: 19163
  Gene Name: urotensin 2
  Uniprot ID: O95399
  ENSP ID: ENSP00000355163
MYKLASCCLLFIGFLNPLLSLPLLDSREISFQLSAPHEDARLTPEELERASLLQILPEMLGAERGDILRKADSSTNIFNPRGNLRKFQDFSGQDPNILLSHLLARIWKPYKKRETPDCFWKYCV

SEQ ID NO: 96003 - protein, 139 aa, Homo sapiens
  Payload ID: 19163
  Gene Name: urotensin 2
  ENSP ID: ENSP00000366738
MYKLASCCLLFIGFLNPLLSLPLLDSREISFQLSAPHEDARLTPEELERASLLQILPEMLGAERGDILRKADSSTNIFNPRGNLRKFQDFSGQDPNILLSHLLARIWKPYKKQRRKLRQDLRLWKKEPGLRIFKNYVWV

SEQ ID NO: 96004 - protein, 389 aa, Homo sapiens
  Payload ID: 19164
  Gene Name: urotensin 2 receptor
  Uniprot ID: Q9UKP6
  ENSP ID: ENSP00000323516
MALTPESPSSFPGLAATGSSVPEPPGGPNATLNSSWASPTEPSSLEDLVATGTIGTLLSAMGVVGVVGNAYTLVVTCRSLRAVASMYVYVVNLALADLLYLLSIPFIVATYVTKEWHFGDVGCRVLFGLDFLTMHASIFTLTVMSSERYAAVLRPLDTVQRPKGYRKLLALGTWLLALLLTLPVMLAMRLVRRGPKSLCLPAWGPRAHRAYLTLLFATSIAGPGLLIGLLYARLARAYRRSQRASFKRARRPGARALRLVLGIVLLFWACFLPFWLWQLLAQYHQAPLAPRTARIVNYLTTCLTYGNSCANPFLYTLLTRNYRDHLRGRVRGPGSGGGRGPVPSLQPRARFQRCSGRSLSSCSPQPTDSLVLAPAAPARPAPEGPRAPA

SEQ ID NO: 96005 - protein, 119 aa, Homo sapiens
  Payload ID: 19165
  Gene Name: urotensin 2B
  Uniprot ID: Q765I0
  ENSP ID: ENSP00000340526
MNKILSSTVCFGLLTLLSVLSFLQSVHGRPYLTQGNEIFPDKKYTNREELLLALLNKNFDFQRPFNTDLALPNKLEELNQLEKLKEQLVEEKDSETSYAVDGLFSSHPSKRACFWKYCV

SEQ ID NO: 96006 - protein, 81 aa, Homo sapiens
  Payload ID: 19165
  Gene Name: urotensin 2B
  ENSP ID: ENSP00000398540
MNKILSSTVCFGLLTLLSVLSFLQSVHGRPYLTQGNEIFPDKKYTNREELLLALLNKNFDFQRPFNTAGKAKRTASGGEGF

SEQ ID NO: 96007 - protein, 119 aa, Homo sapiens; identical to SEQ ID NO: 96005
  Payload ID: 19165
  Gene Name: urotensin 2B
  Uniprot ID: Q765I0
  ENSP ID: ENSP00000398761

SEQ ID NO: 96008 - protein, 38 aa, Homo sapiens
  Payload ID: 19165
  Gene Name: urotensin 2B
  ENSP ID: ENSP00000401028
MNKILSSTVCFGLLTLLSVLSFLQSVHGRPYLTQGNEI

SEQ ID NO: 96009 - protein, 81 aa, Homo sapiens; identical to SEQ ID NO: 96006
  Payload ID: 19165
  Gene Name: urotensin 2B
  ENSP ID: ENSP00000404406

SEQ ID NO: 96010 - protein, 132 aa, Homo sapiens
  Payload ID: 19165
  Gene Name: urotensin 2B
  ENSP ID: ENSP00000415628
MNKILSSTVCFGLLTLLSVLSFLQSVHGRPYLTQGNEIFPDKKYTNREELLLALLNKNFDFQRPFNTDLALPNKLEELNQLEKLKEQLVEEKDSETSYAVDGLFSSHPSKRALSSRTLIQLNCLQHCQNRRG

SEQ ID NO: 96011 - protein, 899 aa, Homo sapiens
  Payload ID: 19166
  Gene Name: Usher syndrome 1C
  Uniprot ID: Q9Y6N9
  ENSP ID: ENSP00000005226
MDRKVAREFRHKVDFLIENDAEKDYLYDVLRMYHQTMDVAVLVGDLKLVINEPSRLPLFDAIRPLIPLKHQVEYDQLTPRRSRKLKEVRLDRLHPEGLGLSVRGGLEFGCGLFISHLIKGGQADSVGLQVGDEIVRINGYSISSCTHEEVINLIRTKKTVSIKVRHIGLIPVKSSPDEPLTWQYVDQFVSESGGVRGSLGSPGNRENKEKKVFISLVGSRGLGCSISSGPIQKPGIFISHVKPGSLSAEVGLEIGDQIVEVNGVDFSNLDHKEAVNVLKSSRSLTISIVAAAGRELFMTDRERLAEARQRELQRQELLMQKRLAMESNKILQEQQEMERQRRKEIAQKAAEENERYRKEMEQIVEEEEKFKKQWEEDWGSKEQLLLPKTITAEVHPVPLRKPKSFGWFYRYDGKFPTIRKKGKDKKKAKYGSLQDLRKNKKELEFEQKLYKEKEEMLEKEKQLKINRLAQEVSETEREDLEESEKIQYWVERLCQTRLEQISSADNEISEMTTGPPPPPPSVSPLAPPLRRFAGGLHLHTTDLDDIPLDMFYYPPKTPSALPVMPHPPPSNPPHKVPAPPVLPLSGHVSASSSPWVQRTPPPIPIPPPPSVPTQDLTPTRPLPSALEEALSNHPFRTGDTGNPVEDWEAKNHSGKPTNSPVPEQSFPPTPKTFCPSPQPPRGPGVSTISKPVMVHQEPNFIYRPAVKSEVLPQEMLKRMVVYQTAFRQDFRKYEEGFDPYSMFTPEQIMGKDVRLLRIKKEGSLDLALEGGVDSPIGKVVVSAVYERGAAERHGGIVKGDEIMAINGKIVTDYTLAEAEAALQKAWNQGGDWIDLVVAVCPPKEYDDELASLPSSVAESPQPVRKLLEDRAAVHRHGFLLQLEPTDLLLKSKRGNQIHR

SEQ ID NO: 96012 - protein, 552 aa, Homo sapiens
  Payload ID: 19166
  Gene Name: Usher syndrome 1C
  Uniprot ID: Q9Y6N9
  ENSP ID: ENSP00000317018
MDRKVAREFRHKVDFLIENDAEKDYLYDVLRMYHQTMDVAVLVGDLKLVINEPSRLPLFDAIRPLIPLKHQVEYDQLTPRRSRKLKEVRLDRLHPEGLGLSVRGGLEFGCGLFISHLIKGGQADSVGLQVGDEIVRINGYSISSCTHEEVINLIRTKKTVSIKVRHIGLIPVKSSPDEPLTWQYVDQFVSESGGVRGSLGSPGNRENKEKKVFISLVGSRGLGCSISSGPIQKPGIFISHVKPGSLSAEVGLEIGDQIVEVNGVDFSNLDHKEAVNVLKSSRSLTISIVAAAGRELFMTDRERLAEARQRELQRQELLMQKRLAMESNKILQEQQEMERQRRKEIAQKAAEENERYRKEMEQIVEEEEKFKKQWEEDWGSKEQLLLPKTITAEVHPVPLRKPKYDQGVEPELEPADDLDGGTEEQGEQDFRKYEEGFDPYSMFTPEQIMGKDVRLLRIKKEGSLDLALEGGVDSPIGKVVVSAVYERGAAERHGGIVKGDEIMAINGKIVTDYTLAEAEAALQKAWNQGGDWIDLVVAVCPPKEYDDELTFF

SEQ ID NO: 96013 - protein, 403 aa, Homo sapiens
  Payload ID: 19166
  Gene Name: Usher syndrome 1C
  Uniprot ID: Q9Y6N9
  ENSP ID: ENSP00000432236
MDRKVAREFRHKVDFLIENDAEKDYLYDVLRMYHQTMDVAVLVGDLKLVINEPSRLPLFDAIRPLIPLKHQVEYDQLTPRRSRKLKEVRLDRLHPEGLGLSVRGGLEFGCGLFISHLIKGGQADSVGLQVGDEIVRINGYSISSCTHEEVINLIRTKKTVSIKVRHIGLIPVKSSPDEPLTWQYVDQFVSESGGVRGSLGSPGNRENKEKKVFISLVGSRGLGCSISSGPIQKPGIFISHVKPGSLSAEVGLEIGDQIVEVNGVDFSNLDHKEAVNVLKSSRSLTISIVAAAGRELFMTDRERLAEARQRELQRQELLMQKRLAMESNKILQEQQEMERQRRKEIAQKAAEENERYRKEMEQIVEEEEKFKKQWEEDWGSKEQLLLPKTITAEVHPVPLRKPK

SEQ ID NO: 96014 - protein, 521 aa, Homo sapiens
  Payload ID: 19166
  Gene Name: Usher syndrome 1C
  Uniprot ID: Q9Y6N9
  ENSP ID: ENSP00000432944
MYHQTMDVAVLVGDLKLVINEPSRLPLFDAIRPLIPLKHQVEYDQLTPRRSRKLKEVRLDRLHPEGLGLSVRGGLEFGCGLFISHLIKGGQADSVGLQVGDEIVRINGYSISSCTHEEVINLIRTKKTVSIKVRHIGLIPVKSSPDEPLTWQYVDQFVSESGGVRGSLGSPGNRENKEKKVFISLVGSRGLGCSISSGPIQKPGIFISHVKPGSLSAEVGLEIGDQIVEVNGVDFSNLDHKEAVNVLKSSRSLTISIVAAAGRELFMTDRERLAEARQRELQRQELLMQKRLAMESNKILQEQQEMERQRRKEIAQKAAEENERYRKEMEQIVEEEEKFKKQWEEDWGSKEQLLLPKTITAEVHPVPLRKPKYDQGVEPELEPADDLDGGTEEQGEQDFRKYEEGFDPYSMFTPEQIMGKDVRLLRIKKEGSLDLALEGGVDSPIGKVVVSAVYERGAAERHGGIVKGDEIMAINGKIVTDYTLAEAEAALQKAWNQGGDWIDLVVAVCPPKEYDDELTFF

SEQ ID NO: 96015 - protein, 533 aa, Homo sapiens
  Payload ID: 19166
  Gene Name: Usher syndrome 1C
  Uniprot ID: Q9Y6N9
  ENSP ID: ENSP00000436934
MDRKVAREFRHKVDFLIENDAEKDYLYDVLRMYHQTMDVAVLVGDLKLVINEPSRLPLFDAIRPLIPLKHQVEYDQLTPRRSRKLKEVRLDRLHPEGLGLSVRGGLEFGCGLFISHLIKGGQADSVGLQVGDEIVRINGYSISSCTHEEVINLIRTKKTVSIKVRHIGLIPVKSSPDEPLTWQYVDQFVSESGGVRGSLGSPGNRENKEKKVFISLVGSRGLGCSISSGPIQKPGIFISHVKPGSLSAEVGLEIGDQIVEVNGVDFSNLDHKEGRELFMTDRERLAEARQRELQRQELLMQKRLAMESNKILQEQQEMERQRRKEIAQKAAEENERYRKEMEQIVEEEEKFKKQWEEDWGSKEQLLLPKTITAEVHPVPLRKPKYDQGVEPELEPADDLDGGTEEQGEQDFRKYEEGFDPYSMFTPEQIMGKDVRLLRIKKEGSLDLALEGGVDSPIGKVVVSAVYERGAAERHGGIVKGDEIMAINGKIVTDYTLAEAEAALQKAWNQGGDWIDLVVAVCPPKEYDDELTFF

SEQ ID NO: 96016 - protein, 317 aa, Homo sapiens
  Payload ID: 19166
  Gene Name: Usher syndrome 1C
  ENSP ID: ENSP00000437128
MCYLSEWPKSFLKAFIRHYSHHQVDFLIENDAEKDYLYDVLRMYHQTMDVAVLVGDLKLVINEPSRLPLFDAIRPLIPLKHQVEYDQLTPRRSRKLKEVRLDRLHPEGLGLSVRGGLEFGCGLFISHLIKGGQADSVGLQVGDEIVRINGYSISSCTHEEVINLIRTKKTVSIKVRHIGLIPVKSSPDEPLTWQYVDQFVSESGGVRGSLGSPGNRENKEKKVFISLVGSRGLGCSISSGPIQKPGIFISHVKPGSLSAEVGLEIGDQIVEVNGVDFSNLDHKEAVNVLKSSRSLTISIVAAAGRELFMTDRERLAE

SEQ ID NO: 96017 - protein, 703 aa, Homo sapiens
  Payload ID: 19167
  Gene Name: Usher syndrome 1C binding protein 1
  Uniprot ID: Q8N6Y0
  ENSP ID: ENSP00000252597
MSARATRPRSRRGRHAPPGELDPVAESSEEVEAASGSSKPSFAPPPVSSGLEQLGPMEEVSGQGLGSRTDKKMDGGSGRELASAPEVPHKPAVEAHQAPEAALQYKETVPPGNGAPDVFQTLQHTLSSLEAAAAAWRHQPPSHSGPMEFEGTSEGGAGSLGKQEGAGSCQREAARLAERNAWLRLALSSREDELVRTQASLEAIRAEKETLQKEVQELQDSLLRLEPCPHLSHNQAGGSGSGSSSSEADREPWETQDSFSLAHPLLRRLRSHSSTQILGSLPNQPLSPEMHIMEAQMEQLRGSIEKLKCFNRLLSAVLQGYKGRCEGLSMQLGQREAEATALHLALQYSEHCEEAYRVLLALREADSGAGDEAPMSDLQAAEKEAWRLLAQEEAAMDAGAQQNPQPSPEGSSVDKPTPQEVAFQLRSYVQRLQERRSLMKILSEPGPTLAPMPTVPRAEAMVQAILGTQAGPALPRLEKTQIQQDLVAAREALADLMLRLQLVRREKRGLELREAALRALGPAHVLLLEQLRWERAELQAGGANSSGGHSSGGGSSGDEEEWYQGLPAVPGGTSGIDGGQVGRAWDPEKLAQELAASLTRTLDLQEQLQSLRRELEQVAQKGRARRSQSAELNRDLCKAHSALVLAFRGAHRKQEEQRRKLEQQMALMEAQQAEEVAVLEATARALGKPRPPLPPPQLGDTFL

SEQ ID NO: 96018 - protein, 383 aa, Homo sapiens
  Payload ID: 19167
  Gene Name: Usher syndrome 1C binding protein 1
  ENSP ID: ENSP00000324174
MSARATRPRSRRGRHAPPGELDPVAESSEEVEAASGSSKPSFAPPPVSSGLEQLGPMEEVSGQGLGSRTDKKMDGGSGRELASAPEVPHKPAVEAHQAPEAALQYKETVPPGNGAPDVFQTLQHTLSSLEAAAAAWRHQPPSHSGPMEFEGTSEGGAGSLGKQEGAGSCQREAARLAERNAWLRLALSSREDELVRTQASLEAIRAEKETLQKEVQELQDSLLRLEPCPHLSHNQAGGSGSGSSSSEADREPWETQDSFSLAHPLLRRLRSHSSTQILGSLPNQPLSPEMHIMEAQMEQLRGSIEKLKCFNRLLSAVLQGYKGRCEGLSMQLGQREAEATALHLALQYRVLLCHPGWSAVVPSWLTATSASPVQVILLPQPPE

SEQ ID NO: 96019 - protein, 639 aa, Homo sapiens
  Payload ID: 19167
  Gene Name: Usher syndrome 1C binding protein 1
  ENSP ID: ENSP00000407902
MLHPTDKKMDGGSGRELASAPEVPHKPAVEAHQAPEAALQYKETVPPGNGAPDVFQTLQHTLSSLEAAAAAWRHQPPSHSGPMEFEGTSEGGAGSLGKQEGAGSCQREAARLAERNAWLRLALSSREDELVRTQASLEAIRAEKETLQKEVQELQDSLLRLEPCPHLSHNQAGGSGSGSSSSEADREPWETQDSFSLAHPLLRRLRSHSSTQILGSLPNQPLSPEMHIMEAQMEQLRGSIEKLKCFNRLLSAVLQGYKGRCEGLSMQLGQREAEATALHLALQYSEHCEEAYRVLLALREADSGAGDEAPMSDLQAAEKEAWRLLAQEEAAMDAGAQQNPQPSPEGSSVDKPTPQEVAFQLRSYVQRLQERRSLMKILSEPGPTLAPMPTVPRAEAMVQAILGTQAGPALPRLEKTQIQQDLVAAREALADLMLRLQLVRREKRGLELREAALRALGPAHVLLLEQLRWERAELQAGGANSSGGHSSGGGSSGDEEEWYQGLPAVPGGTSGIDGGQVGRAWDPEKLAQELAASLTRTLDLQEQLQSLRRELEQVAQKGRARRSQSAELNRDLCKAHSALVLAFRGAHRKQEEQRRKLEQQMALMEAQQAEEVAVLEATARALGKPRPPLPPPQLGDTFL

SEQ ID NO: 96020 - protein, 68 aa, Homo sapiens
  Payload ID: 19167
  Gene Name: Usher syndrome 1C binding protein 1
  Uniprot ID: Q8N6Y0
  ENSP ID: ENSP00000469562
MSARATRPRSRRGRHAPPGELDPVAESSEEVEAASGSSKPSFAPPPVSSGLEQLGPMEEVSGQGLGSR

SEQ ID NO: 96021 - protein, 32 aa, Homo sapiens
  Payload ID: 19167
  Gene Name: Usher syndrome 1C binding protein 1
  ENSP ID: ENSP00000471680
MSARATRPRSRRGRHAPPGELDPVAESSEEVE

SEQ ID NO: 96022 - protein, 121 aa, Homo sapiens
  Payload ID: 19167
  Gene Name: Usher syndrome 1C binding protein 1
  ENSP ID: ENSP00000473108
MSARATRPRSRRGRHAPPGELDPVAESSEEVEAASGSSKPSFAPPPVSSGLEQLGPMEEVSGQGLGSRTDKKMDGGSGRELASAPEVPHKPAVEAHQAPEAALQYKETVPPGNGAPDVFQT

SEQ ID NO: 96023 - protein, 115 aa, Homo sapiens
  Payload ID: 19168
  Gene Name: Usher syndrome 1G (autosomal recessive)
  ENSP ID: ENSP00000462568
MNDQYHRAARDGYLELLKEATRKELNAPDEDGMTPTLWAAYHGNLESLRLIVSRGFQWPLALPVLPGVLRSQHLVPRQRLPHAAGHGCHEGPHGMRALPGLHRGQAEQPQPQAGG

SEQ ID NO: 96024 - protein, 461 aa, Homo sapiens
  Payload ID: 19168
  Gene Name: Usher syndrome 1G (autosomal recessive)
  Uniprot ID: Q495M9
  ENSP ID: ENSP00000480279
MNDQYHRAARDGYLELLKEATRKELNAPDEDGMTPTLWAAYHGNLESLRLIVSRGGDPDKCDIWGNTPLHLAASNGHLHCLSFLVSFGANIWCLDNDYHTPLDMAAMKGHMECVRYLDSIAAKQSSLNPKLVGKLKDKAFREAERRIRECAKLQRRHHERMERRYRRELAERSDTLSFSSLTSSTLSRRLQHLALGSHLPYSQATLHGTARGKTKMQKKLERRKQGGEGTFKVSEDGRKSARSLSGLQLGSDVMFVRQGTYANPKEWGRAPLRDMFLSDEDSVSRATLAAEPAHSEVSTDSGHDSLFTRPGLGTMVFRRNYLSSGLHGLGREDGGLDGVGAPRGRLQSSPSLDDDSLGSANSLQDRSCGEELPWDELDLGLDEDLEPETSPLETFLASLHMEDFAALLRQEKIDLEALMLCSDLDLRSISVPLGPRKKILGAVRRRRQAMERPPALEDTEL

SEQ ID NO: 96025 - protein, 5202 aa, Homo sapiens
  Payload ID: 19169
  Gene Name: Usher syndrome 2A (autosomal recessive, mild)
  Uniprot ID: O75445
  ENSP ID: ENSP00000305941
MNCPVLSLGSGFLFQVIEMLIFAYFASISLTESRGLFPRLENVGAFKKVSIVPTQAVCGLPDRSTFCHSSAAAESIQFCTQRFCIQDCPYRSSHPTYTALFSAGLSSCITPDKNDLHPNAHSNSASFIFGNHKSCFSSPPSPKLMASFTLAVWLKPEQQGVMCVIEKTVDGQIVFKLTISEKETMFYYRTVNGLQPPIKVMTLGRILVKKWIHLSVQVHQTKISFFINGVEKDHTPFNARTLSGSITDFASGTVQIGQSLNGLEQFVGRMQDFRLYQVALTNREILEVFSGDLLRLHAQSHCRCPGSHPRVHPLAQRYCIPNDAGDTADNRVSRLNPEAHPLSFVNDNDVGTSWVSNVFTNITQLNQGVTISVDLENGQYQVFYIIIQFFSPQPTEIRIQRKKENSLDWEDWQYFARNCGAFGMKNNGDLEKPDSVNCLQLSNFTPYSRGNVTFSILTPGPNYRPGYNNFYNTPSLQEFVKATQIRFHFHGQYYTTETAVNLRHRYYAVDEITISGRCQCHGHADNCDTTSQPYRCLCSQESFTEGLHCDRCLPLYNDKPFRQGDQVYAFNCKPCQCNSHSKSCHYNISVDPFPFEHFRGGGGVCDDCEHNTTGRNCELCKDYFFRQVGADPSAIDVCKPCDCDTVGTRNGSILCDQIGGQCNCKRHVSGRQCNQCQNGFYNLQELDPDGCSPCNCNTSGTVDGDITCHQNSGQCKCKANVIGLRCDHCNFGFKFLRSFNDVGCEPCQCNLHGSVNKFCNPHSGQCECKKEAKGLQCDTCRENFYGLDVTNCKACDCDTAGSLPGTVCNAKTGQCICKPNVEGRQCNKCLEGNFYLRQNNSFLCLPCNCDKTGTINGSLLCNKSTGQCPCKLGVTGLRCNQCEPHRYNLTIDNFQHCQMCECDSLGTLPGTICDPISGQCLCVPNRQGRRCNQCQPGFYISPGNATGCLPCSCHTTGAVNHICNSLTGQCVCQDASIAGQRCDQCKDHYFGFDPQTGRCQPCNCHLSGALNETCHLVTGQCFCKQFVTGSKCDACVPSASHLDVNNLLGCSKTPFQQPPPRGQVQSSSAINLSWSPPDSPNAHWLTYSLLRDGFEIYTTEDQYPYSIQYFLDTDLLPYTKYSYYIETTNVHGSTRSVAVTYKTKPGVPEGNLTLSYIIPIGSDSVTLTWTTLSNQSGPIEKYILSCAPLAGGQPCVSYEGHETSATIWNLVPFAKYDFSVQACTSGGCLHSLPITVTTAQAPPQRLSPPKMQKISSTELHVEWSPPAELNGIIIRYELYMRRLRSTKETTSEESRVFQSSGWLSPHSFVESANENALKPPQTMTTITGLEPYTKYEFRVLAVNMAGSVSSAWVSERTGESAPVFMIPPSVFPLSSYSLNISWEKPADNVTRGKVVGYDINMLSEQSPQQSIPMAFSQLLHTAKSQELSYTVEGLKPYRIYEFTITLCNSVGCVTSASGAGQTLAAAPAQLRPPLVKGINSTTIHLRWFPPEELNGPSPIYQLERRESSLPALMTTMMKGIRFIGNGYCKFPSSTHPVNTDFTGIKASFRTKVPEGLIVFAASPGNQEEYFALQLKKGRLYFLFDPQGSPVEVTTTNDHGKQYSDGKWHEIIAIRHQAFGQITLDGIYTGSSAILNGSTVIGDNTGVFLGGLPRSYTILRKDPEIIQKGFVGCLKDVHFMKNYNPSAIWEPLDWQSSEEQINVYNSWEGCPASLNEGAQFLGAGFLELHPYMFHGGMNFEISFKFRTDQLNGLLLFVYNKDGPDFLAMELKSGILTFRLNTSLAFTQVDLLLGLSYCNGKWNKVIIKKEGSFISASVNGLMKHASESGDQPLVVNSPVYVGGIPQELLNSYQHLCLEQGFGGCMKDVKFTRGAVVNLASVSSGAVRVNLDGCLSTDSAVNCRGNDSILVYQGKEQSVYEGGLQPFTEYLYRVIASHEGGSVYSDWSRGRTTGAAPQSVPTPSRVRSLNGYSIEVTWDEPVVRGVIEKYILKAYSEDSTRPPRMPSASAEFVNTSNLTGILTGLLPFKNYAVTLTACTLAGCTESSHALNISTPQEAPQEVQPPVAKSLPSSLLLSWNPPKKANGIITQYCLYMDGRLIYSGSEENYIVTDLAVFTPHQFLLSACTHVGCTNSSWVLLYTAQLPPEHVDSPVLTVLDSRTIHIQWKQPRKISGILERYVLYMSNHTHDFTIWSVIYNSTELFQDHMLQYVLPGNKYLIKLGACTGGGCTVSEASEALTDEDIPEGVPAPKAHSYSPDSFNVSWTEPEYPNGVITSYGLYLDGILIHNSSELSYRAYGFAPWSLHSFRVQACTAKGCALGPLVENRTLEAPPEGTVNVFVKTQGSRKAHVRWEAPFRPNGLLTHSVLFTGIFYVDPVGNNYTLLNVTKVMYSGEETNLWVLIDGLVPFTNYTVQVNISNSQGSLITDPITIAMPPGAPDGVLPPRLSSATPTSLQVVWSTPARNNAPGSPRYQLQMRSGDSTHGFLELFSNPSASLSYEVSDLQPYTEYMFRLVASNGFGSAHSSWIPFMTAEDKPGPVVPPILLDVKSRMMLVTWQHPRKSNGVITHYNIYLHGRLYLRTPGNVTNCTVMHLHPYTAYKFQVEACTSKGCSLSPESQTVWTLPGAPEGIPSPELFSDTPTSVIISWQPPTHPNGLVENFTIERRVKGKEEVTTLVTLPRSHSMRFIDKTSALSPWTKYEYRVLMSTLHGGTNSSAWVEVTTRPSRPAGVQPPVVTVLEPDAVQVTWKPPLIQNGDILSYEIHMPDPHITLTNVTSAVLSQKVTHLIPFTNYSVTIVACSGGNGYLGGCTESLPTYVTTHPTVPQNVGPLSVIPLSESYVVISWQPPSKPNGPNLRYELLRRKIQQPLASNPPEDLNRWHNIYSGTQWLYEDKGLSRFTTYEYMLFVHNSVGFTPSREVTVTTLAGLPERGANLTASVLNHTAIDVRWAKPTVQDLQGEVEYYTLFWSSATSNDSLKILPDVNSHVIGHLKPNTEYWIFISVFNGVHSINSAGLHATTCDGEPQGMLPPEVVIINSTAVRVIWTSPSNPNGVVTEYSIYVNNKLYKTGMNVPGSFILRDLSPFTIYDIQVEVCTIYACVKSNGTQITTVEDTPSDIPTPTIRGITSRSLQIDWVSPRKPNGIILGYDLLWKTWYPCAKTQKLVQDQSDELCKAVRCQKPESICGHICYSSEAKVCCNGVLYNPKPGHRCCEEKYIPFVLNSTGVCCGGRIQEAQPNHQCCSGYYARILPGEVCCPDEQHNRVSVGIGDSCCGRMPYSTSGNQICCAGRLHDGHGQKCCGRQIVSNDLECCGGEEGVVYNRLPGMFCCGQDYVNMSDTICCSASSGESKAHIKKNDPVPVKCCETELIPKSQKCCNGVGYNPLKYVCSDKISTGMMMKETKECRILCPASMEATEHCGRCDFNFTSHICTVIRGSHNSTGKASIEEMCSSAEETIHTGSVNTYSYTDVNLKPYMTYEYRISAWNSYGRGLSKAVRARTKEDVPQGVSPPTWTKIDNLEDTIVLNWRKPIQSNGPIIYYILLRNGIERFRGTSLSFSDKEGIQPFQEYSYQLKACTVAGCATSSKVVAATTQGVPESILPPSITALSAVALHLSWSVPEKSNGVIKEYQIRQVGKGLIHTDTTDRRQHTVTGLQPYTNYSFTLTACTSAGCTSSEPFLGQTLQAAPEGVWVTPRHIIINSTTVELYWSLPEKPNGLVSQYQLSRNGNLLFLGGSEEQNFTDKNLEPNSRYTYKLEVKTGGGSSASDDYIVQTPMSTPEEIYPPYNITVIGPYSIFVAWIPPGILIPEIPVEYNVLLNDGSVTPLAFSVGHHQSTLLENLTPFTQYEIRIQACQNGSCGVSSRMFVKTPEAAPMDLNSPVLKALGSACIEIKWMPPEKPNGIIINYFIYRRPAGIEEESVLFVWSEGALEFMDEGDTLRPFTLYEYRVRACNSKGSVESLWSLTQTLEAPPQDFPAPWAQATSAHSVLLNWTKPESPNGIISHYRVVYQERPDDPTFNSPTVHAFTVKGTSHQAHLYGLEPFTTYRIGVVAANHAGEILSPWTLIQTLESSPSGLRNFIVEQKENGRALLLQWSEPMRTNGVIKTYNIFSDGFLEYSGLNRQFLFRRLDPFTLYTLTLEACTRAGCAHSAPQPLWTDEAPPDSQLAPTVHSVKSTSVELSWSEPVNPNGKIIRYEVIRRCFEGKAWGNQTIQADEKIVFTEYNTERNTFMYNDTGLQPWTQCEYKIYTWNSAGHTCSSWNVVRTLQAPPEGLSPPVISYVSMNPQKLLISWIPPEQSNGIIQSYRLQRNEMLYPFSFDPVTFNYTDEELLPFSTYSYALQACTSGGCSTSKPTSITTLEAAPSEVSPPDLWAVSATQMNVCWSPPTVQNGKITKYLVRYDNKESLAGQGLCLLVSHLQPYSQYNFSLVACTNGGCTASVSKSAWTMEALPENMDSPTLQVTGSESIEITWKPPRNPNGQIRSYELRRDGTIVYTGLETRYRDFTLTPGVEYSYTVTASNSQGGILSPLVKDRTSPSAPSGMEPPKLQARGPQEILVNWDPPVRTNGDIINYTLFIRELFERETKIIHINTTHNSFGMQSYIVNQLKPFHRYEIRIQACTTLGCASSDWTFIQTPEIAPLMQPPPHLEVQMAPGGFQPTVSLLWTGPLQPNGKVLYYELYRRQIATQPRKSNPVLIYNGSSTSFIDSELLPFTEYEYQVWAVNSAGKAPSSWTWCRTGPAPPEGLRAPTFHVISSTQAVVNISAPGKPNGIVSLYRLFSSSAHGAETVLSEGMATQQTLHGLQAFTNYSIGVEACTCFNCCSKGPTAELRTHPAPPSGLSSPQIGTLASRTASFRWSPPMFPNGVIHSYELQFHVACPPDSALPCTPSQIETKYTGLGQKASLGGLQPYTTYKLRVVAHNEVGSTASEWISFTTQKELPQYRAPFSVDSNLSVVCVNWSDTFLLNGQLKEYVLTDGGRRVYSGLDTTLYIPRTADKTFFFQVICTTDEGSVKTPLIQYDTSTGLGLVLTTPGKKKGSRSKSTEFYSELWFIVLMAMLGLILLAIFLSLILQRKIHKEPYIRERPPLVPLQKRMSPLNVYPPGENHMGLADTKIPRSGTPVSIRSNRSACVLRIPSQNQTSLTYSQGSLHRSVSQLMDIQDKKVLMDNSLWEAIMGHNSGLYVDEEDLMNAIKDFSSVTKERTTFTDTHL

SEQ ID NO: 96026 - protein, 1546 aa, Homo sapiens
  Payload ID: 19169
  Gene Name: Usher syndrome 2A (autosomal recessive, mild)
  Uniprot ID: O75445
  ENSP ID: ENSP00000355909
MNCPVLSLGSGFLFQVIEMLIFAYFASISLTESRGLFPRLENVGAFKKVSIVPTQAVCGLPDRSTFCHSSAAAESIQFCTQRFCIQDCPYRSSHPTYTALFSAGLSSCITPDKNDLHPNAHSNSASFIFGNHKSCFSSPPSPKLMASFTLAVWLKPEQQGVMCVIEKTVDGQIVFKLTISEKETMFYYRTVNGLQPPIKVMTLGRILVKKWIHLSVQVHQTKISFFINGVEKDHTPFNARTLSGSITDFASGTVQIGQSLNGLEQFVGRMQDFRLYQVALTNREILEVFSGDLLRLHAQSHCRCPGSHPRVHPLAQRYCIPNDAGDTADNRVSRLNPEAHPLSFVNDNDVGTSWVSNVFTNITQLNQGVTISVDLENGQYQVFYIIIQFFSPQPTEIRIQRKKENSLDWEDWQYFARNCGAFGMKNNGDLEKPDSVNCLQLSNFTPYSRGNVTFSILTPGPNYRPGYNNFYNTPSLQEFVKATQIRFHFHGQYYTTETAVNLRHRYYAVDEITISGRCQCHGHADNCDTTSQPYRCLCSQESFTEGLHCDRCLPLYNDKPFRQGDQVYAFNCKPCQCNSHSKSCHYNISVDPFPFEHFRGGGGVCDDCEHNTTGRNCELCKDYFFRQVGADPSAIDVCKPCDCDTVGTRNGSILCDQIGGQCNCKRHVSGRQCNQCQNGFYNLQELDPDGCSPCNCNTSGTVDGDITCHQNSGQCKCKANVIGLRCDHCNFGFKFLRSFNDVGCEPCQCNLHGSVNKFCNPHSGQCECKKEAKGLQCDTCRENFYGLDVTNCKACDCDTAGSLPGTVCNAKTGQCICKPNVEGRQCNKCLEGNFYLRQNNSFLCLPCNCDKTGTINGSLLCNKSTGQCPCKLGVTGLRCNQCEPHRYNLTIDNFQHCQMCECDSLGTLPGTICDPISGQCLCVPNRQGRRCNQCQPGFYISPGNATGCLPCSCHTTGAVNHICNSLTGQCVCQDASIAGQRCDQCKDHYFGFDPQTGRCQPCNCHLSGALNETCHLVTGQCFCKQFVTGSKCDACVPSASHLDVNNLLGCSKTPFQQPPPRGQVQSSSAINLSWSPPDSPNAHWLTYSLLRDGFEIYTTEDQYPYSIQYFLDTDLLPYTKYSYYIETTNVHGSTRSVAVTYKTKPGVPEGNLTLSYIIPIGSDSVTLTWTTLSNQSGPIEKYILSCAPLAGGQPCVSYEGHETSATIWNLVPFAKYDFSVQACTSGGCLHSLPITVTTAQAPPQRLSPPKMQKISSTELHVEWSPPAELNGIIIRYELYMRRLRSTKETTSEESRVFQSSGWLSPHSFVESANENALKPPQTMTTITGLEPYTKYEFRVLAVNMAGSVSSAWVSERTGESAPVFMIPPSVFPLSSYSLNISWEKPADNVTRGKVVGYDINMLSEQSPQQSIPMAFSQLLHTAKSQELSYTVEGLKPYRIYEFTITLCNSVGCVTSASGAGQTLAAAPAQLRPPLVKGINSTTIHLRWFPPEELNGPSPIYQLERRESSLPALMTTMMKGIRFIGNGYCKFPSSTHPVNTDFTGKCV

SEQ ID NO: 96027 - protein, 973 aa, Homo sapiens
  Payload ID: 19170
  Gene Name: USO1 vesicle transport factor
  Uniprot ID: O60763
  ENSP ID: ENSP00000264904
MNFLRGVMGGQSAGPQHTEAETIQKLCDRVASSTLLDDRRNAVRALKSLSKKYRLEVGIQAMEHLIHVLQTDRSDSEIIGYALDTLYNIISNEEEEEVDDVEEENSTRQSEDLGSQFTEIFIKQQENVTLLLSLLEEFDFHVRWPGVKLLTSLLKQLGPQVQQIILVSPMGVSRLMDLLADSREVIRNDGVLLLQALTRSNGAIQKIVAFENAFERLLDIISEEGNSDGGIVVEDCLILLQNLLKNNNSNQNFFKEGSYIQRMKPWFEVGDENSGWSAQKVTNLHLMLQLVRVLVSPTNPPGATSSCQKAMFQCGLLQQLCTILMATGVPADILTETINTVSEVIRGCQVNQDYFASVNAPSNPPRPAIVVLLMSMVNERQPFVLRCAVLYCFQCFLYKNQKGQGEIVSTLLPSTIDATGNSVSAGQLLCGGLFSTDSLSNWCAAVALAHALQENATQKEQLLRVQLATSIGNPPVSLLQQCTNILSQGDKIDRRGSKIQTRVGLLMLLCTWLSNCPIAVTHFLHNSANVPFLTGQIAENLGEEEQLVQGLCALLLGISIYFNDNSLESYMKEKLKQLIEKRIGKENFIEKLGFISKHELYSRASQKPQPNFPSPEYMIFDHEFTKLVKELEGVITKAIYKSSEEDKKEEEVKKTLEQHDNIVTHYKNMIREQDLQLEELRQQVSTLKCQNEQLQTAVTQQVSQIQQHKDQYNLLKIQLGKDNQHQGSYSEGAQMNGIQPEEIGRLREEIEELKRNQELLQSQLTEKDSMIENMKSSQTSGTNEQSSAIVSARDSEQVAELKQELATLKSQLNSQSVEITKLQTEKQELLQKTEAFAKSVEVQGETETIIATKTTDVEGRLSALLQETKELKNEIKALSEERTAIKEQLDSSNSTIAILQTEKDKLELEITDSKKEQDDLLVLLADQDQKILSLKNKLKDLGHPVEEEDELESGDQEDEDDESEDPGKDLDHI

SEQ ID NO: 96028 - protein, 962 aa, Homo sapiens
  Payload ID: 19170
  Gene Name: USO1 vesicle transport factor
  Uniprot ID: O60763
  ENSP ID: ENSP00000444850
MNFLRGVMGGQSAGPQHTEAETIQKLCDRVASSTLLDDRRNAVRALKSLSKKYRLEVGIQAMEHLIHVLQTDRSDSEIIGYALDTLYNIISNEEEEEVEENSTRQSEDLGSQFTEIFIKQQENVTLLLSLLEEFDFHVRWPGVKLLTSLLKQLGPQVQQIILVSPMGVSRLMDLLADSREVIRNDGVLLLQALTRSNGAIQKIVAFENAFERLLDIISEEGNSDGGIVVEDCLILLQNLLKNNNSNQNFFKEGSYIQRMKPWFEVGDENSGWSAQKVTNLHLMLQLVRVLVSPTNPPGATSSCQKAMFQCGLLQQLCTILMATGVPADILTETINTVSEVIRGCQVNQDYFASVNAPSNPPRPAIVVLLMSMVNERQPFVLRCAVLYCFQCFLYKNQKGQGEIVSTLLPSTIDATGNSVSAGQLLCGGLFSTDSLSNWCAAVALAHALQENATQKEQLLRVQLATSIGNPPVSLLQQCTNILSQGSKIQTRVGLLMLLCTWLSNCPIAVTHFLHNSANVPFLTGQIAENLGEEEQLVQGLCALLLGISIYFNDNSLESYMKEKLKQLIEKRIGKENFIEKLGFISKHELYSRASQKPQPNFPSPEYMIFDHEFTKLVKELEGVITKAIYKSSEEDKKEEEVKKTLEQHDNIVTHYKNMIREQDLQLEELRQQVSTLKCQNEQLQTAVTQQVSQIQQHKDQYNLLKIQLGKDNQHQGSYSEGAQMNGIQPEEIGRLREEIEELKRNQELLQSQLTEKDSMIENMKSSQTSGTNEQSSAIVSARDSEQVAELKQELATLKSQLNSQSVEITKLQTEKQELLQKTEAFAKSVEVQGETETIIATKTTDVEGRLSALLQETKELKNEIKALSEERTAIKEQLDSSNSTIAILQTEKDKLELEITDSKKEQDDLLVLLADQDQKILSLKNKLKDLGHPVEEEDELESGDQEDEDDESEDPGKDLDHI

SEQ ID NO: 96029 - protein, 845 aa, Homo sapiens
  Payload ID: 19171
  Gene Name: USP6 N-terminal like
  Uniprot ID: Q92738
  ENSP ID: ENSP00000277575
MRTEAVVNSQGQTDYLTKDSDQDVALKLAQERAEIVAKYDRGREGAEIEPWEDADYLVYKVTDRFGFLHEEELPDHNVAVERQKHLEIERTTKWLKMLKGWEKYKNTEKFHRRIYKGIPLQLRGEVWALLLEIPKMKEETRDLYSKLKHRARGCSPDIRQIDLDVNRTFRDHIMFRDRYGVKQQSLFHVLAAYSIYNTEVGYCQGMSQITALLLMYMNEEDAFWALVKLFSGPKHAMHGFFVQGFPKLLRFQEHHEKILNKFLSKLKQHLDSQEIYTSFYTMKWFFQCFLDRTPFTLNLRIWDIYIFEGERVLTAMSYTILKLHKKHLMKLSMEELVEFFQETLAKDFFFEDDFVIEQLQISMTELKRAKLDLPEPGKEDEYPKKPLGQLPPELQSWGVHHLSNGQRSVGRPSPLASGRRESGAPHRRHEHSPHPQSRTGTPERAQPPRRKSVEEESKKLKDEADFQRKLPSGPQDSSRQYNHAAANQNSNATSNIRKEFVPKWNKPSDVSATERTAKYTMEGKGRAAHPALAVTVPGPAEVRVSNVRPKMKALDAEDGKRGSTASQYDNVPGPELDSGASVEEALERAYSQSPRHALYPPSPRKHAEPSSSPSKVSNKFTFKVQPPSHARYPSQLDGEARGLAHPPSYSNPPVYHGNSPKHFPTANSSFASPQFSPGTQLNPSRRPHGSTLSVSASPEKSYSRPSPLVLPSSRIEVLPVDTGAGGYSGNSGSPKNGKLIIPPVDYLPDNRTWSEVSYTYRPETQGQSWTRDASRGNLPKYSAFQLAPFQDHGLPAVSVDSPVRYKASPAAEDASPSGYPYSGPPPPAYHYRNRDGLSIQESVLL

SEQ ID NO: 96030 - protein, 851 aa, Homo sapiens
  Payload ID: 19171
  Gene Name: USP6 N-terminal like
  ENSP ID: ENSP00000368539
MIQVLQIVKELVTPSRQKAATVKEDSDQDVALKLAQERAEIVAKYDRGREGAEIEPWEDADYLVYKVTDRFGFLHEEELPDHNVAVERQKHLEIERTTKWLKMLKGWEKYKNTEKFHRRIYKGIPLQLRGEVWALLLEIPKMKEETRDLYSKLKHRARGCSPDIRQIDLDVNRTFRDHIMFRDRYGVKQQSLFHVLAAYSIYNTEVGYCQGMSQITALLLMYMNEEDAFWALVKLFSGPKHAMHGFFVQGFPKLLRFQEHHEKILNKFLSKLKQHLDSQEIYTSFYTMKWFFQCFLDRTPFTLNLRIWDIYIFEGERVLTAMSYTILKLHKKHLMKLSMEELVEFFQETLAKDFFFEDDFVIEQLQISMTELKRAKLDLPEPGKEDEYPKKPLGQLPPELQSWGVHHLSNGQRSVGRPSPLASGRRESGAPHRRHEHSPHPQSRTGTPERAQPPRRKSVEEESKKLKDEADFQRKLPSGPQDSSRQYNHAAANQNSNATSNIRKEFVPKWNKPSDVSATERTAKYTMEGKGRAAHPALAVTVPGPAEVRVSNVRPKMKALDAEDGKRGSTASQYDNVPGPELDSGASVEEALERAYSQSPRHALYPPSPRKHAEPSSSPSKVSNKFTFKVQPPSHARYPSQLDGEARGLAHPPSYSNPPVYHGNSPKHFPTANSSFASPQFSPGTQLNPSRRPHGSTLSVSASPEKSYSRPSPLVLPSSRIEVLPVDTGAGGYSGNSGSPKNGKLIIPPVDYLPDNRTWSEVSYTYRPETQGQSWTRDASRGNLPKYSAFQLAPFQDHGLPAVSVDSPVRYKASPAAEDASPSGYPYSGPPPPAYHYRNRDGLSIQESVLL

SEQ ID NO: 96031 - protein, 828 aa, Homo sapiens
  Payload ID: 19171
  Gene Name: USP6 N-terminal like
  Uniprot ID: Q92738
  ENSP ID: ENSP00000476462
MNSDQDVALKLAQERAEIVAKYDRGREGAEIEPWEDADYLVYKVTDRFGFLHEEELPDHNVAVERQKHLEIERTTKWLKMLKGWEKYKNTEKFHRRIYKGIPLQLRGEVWALLLEIPKMKEETRDLYSKLKHRARGCSPDIRQIDLDVNRTFRDHIMFRDRYGVKQQSLFHVLAAYSIYNTEVGYCQGMSQITALLLMYMNEEDAFWALVKLFSGPKHAMHGFFVQGFPKLLRFQEHHEKILNKFLSKLKQHLDSQEIYTSFYTMKWFFQCFLDRTPFTLNLRIWDIYIFEGERVLTAMSYTILKLHKKHLMKLSMEELVEFFQETLAKDFFFEDDFVIEQLQISMTELKRAKLDLPEPGKEDEYPKKPLGQLPPELQSWGVHHLSNGQRSVGRPSPLASGRRESGAPHRRHEHSPHPQSRTGTPERAQPPRRKSVEEESKKLKDEADFQRKLPSGPQDSSRQYNHAAANQNSNATSNIRKEFVPKWNKPSDVSATERTAKYTMEGKGRAAHPALAVTVPGPAEVRVSNVRPKMKALDAEDGKRGSTASQYDNVPGPELDSGASVEEALERAYSQSPRHALYPPSPRKHAEPSSSPSKVSNKFTFKVQPPSHARYPSQLDGEARGLAHPPSYSNPPVYHGNSPKHFPTANSSFASPQFSPGTQLNPSRRPHGSTLSVSASPEKSYSRPSPLVLPSSRIEVLPVDTGAGGYSGNSGSPKNGKLIIPPVDYLPDNRTWSEVSYTYRPETQGQSWTRDASRGNLPKYSAFQLAPFQDHGLPAVSVDSPVRYKASPAAEDASPSGYPYSGPPPPAYHYRNRDGLSIQESVLL

SEQ ID NO: 96032 - protein, 48 aa, Homo sapiens
  Payload ID: 19171
  Gene Name: USP6 N-terminal like
  ENSP ID: ENSP00000476748
MIQVLQIVKELVTPSRQKAATVKEDGVLPCHPGWSAVAQSRLTASSAS

SEQ ID NO: 96033 - protein, 253 aa, Homo sapiens
  Payload ID: 19172
  Gene Name: UTP11-like, U3 small nucleolar ribonucleoprotein (yeast)
  Uniprot ID: Q9Y3A2
  ENSP ID: ENSP00000362105
MAAAFRKAAKSRQREHRERSQPGFRKHLGLLEKKKDYKLRADDYRKKQEYLKALRKKALEKNPDEFYYKMTRVKLQDGVHIIKETKEEVTPEQLKLMRTQDVKYIEMKRVAEAKKIERLKSELHLLDFQGKQQNKHVFFFDTKKEVEQFDVATHLQTAPELVDRVFNRPRIETLQKEKVKGVTNQTGLKRIAKERQKQYNCLTQRIEREKKLFVIAQKIQTRKDLMDKTQKVKVKKETVNSPAIYKFQSRRKR

SEQ ID NO: 96034 - protein, 766 aa, Homo sapiens
  Payload ID: 19173
  Gene Name: UTP14, U3 small nucleolar ribonucleoprotein, homolog C (yeast)
  Uniprot ID: Q5TAP6
  ENSP ID: ENSP00000428619
MNVNQVAENLALSHQEELVDLPKNYPLSENEDEGDSDGERKHQKLLEAIISLDGKNRRKLAERSEASLKVSEFSVSSEGSGEKLGLADLLEPVKTSSSLATVKKQLNRVKSKKVVELPLNKEKIEQIHREVAFSKTSQVLSKWDPIILKNQQAEQLVFPLGKEQPAIAPIEHALSGWKARTPLEQEIFNLLHKNKQPVTDPLLTPMEKASLQAMSLEEAKMHRAELQRARALQSYYEAKARKEKKIKSKKYHKVVKKGKAKKALKEFEQLQKVNPTVALEEMEKIENARMMERMSLKHQNSGKWAKSKAIMAKYDLEARQAMQEQLAKNKELTQKLQVASESEEEEGGTEVEELLVPHVANEVQMNVDGPNPWMFRSCTSDTKEAATQEDPEQVPELAAHEVSASEAEERPVAEEEILLREFEERQSLRKRSELNQDAEPASSQETKDSSSQEVLSELRALSQKLKEKHQSRKQKASSEGTVPQVQREEPAPEEAEPLLLQRSERVQTLEELEELGKEDCFQNKELPRPVLEGQQSERTPNNRPDAPKEKKEKEQLINLQNFLTTQSPSVRSLAVPTIIEELEDEEERDQRQMIKEAFAGDDVIRDFLKEKREAVEASKPKDVDLTLPGWGEWGGVGLKPSAKKRRQFLIKAPEGPPRKDKNLPNVIISEKRNIHAAAHQVQVLPYPFTHHRQFERTIQTPIGSTWNTQRAFQKLTTPKVVTKPGHIIKPIKAEDVGYQSSSRSDLPVIQRNPKRITTRHNKEEKL

SEQ ID NO: 96035 - protein, 771 aa, Homo sapiens
  Payload ID: 19174
  Gene Name: UTP14A small subunit (SSU) processome component
  Uniprot ID: Q9BVJ6
  ENSP ID: ENSP00000377944
MTANRLAESLLALSQQEELADLPKDYLLSESEDEGDNDGERKHQKLLEAISSLDGKNRRKLAERSEASLKVSEFNVSSEGSGEKLVLADLLEPVKTSSSLATVKKQLSRVKSKKTVELPLNKEEIERIHREVAFNKTAQVLSKWDPVVLKNRQAEQLVFPLEKEEPAIAPIEHVLSGWKARTPLEQEIFNLLHKNKQPVTDPLLTPVEKASLRAMSLEEAKMRRAELQRARALQSYYEAKARREKKIKSKKYHKVVKKGKAKKALKEFEQLRKVNPAAALEELEKIEKARMMERMSLKHQNSGKWAKSKAIMAKYDLEARQAMQEQLSKNKELTQKLQVASESEEEEGGTEDVEELLVPDVVNEVQMNADGPNPWMLRSCTSDTKEAATQEDPEQLPELEAHGVSESEGEERPVAEEEILLREFEERRSLRKRSELSQDAEPAGSQETKDSGSQEVLSELRVLSQKLKENHQSRKQKASSEGTIPQVQREEPAPEEEEPLLLQRPERVQTLEELEELGKEECFQNKELPRPVLEGQQSERTPNNRPDAPKEKKKKEQMIDLQNLLTTQSPSVKSLAVPTIEELEDEEERNHRQMIKEAFAGDDVIRDFLKEKREAVEASKPKDVDLTLPGWGEWGGVGLKPSAKKRRRFLIKAPEGPPRKDKNLPNVIINEKRNIHAAAHQVRVLPYPFTHHWQFERTIQTPIGSTWNTQRAFQKLTTPKVVTKPGHIINPIKAEDVGYRSSSRSDLSVIQRNPKRITTRHKKQLKKCSVD

SEQ ID NO: 96036 - protein, 719 aa, Homo sapiens
  Payload ID: 19174
  Gene Name: UTP14A small subunit (SSU) processome component
  Uniprot ID: Q9BVJ6
  ENSP ID: ENSP00000388669
MTANRLAESLLALSQQEELADLPKDYLLSESEDEGDNDGERKHQKLLEAISSLDGKNRRKLAERSEASLKVSEFNVSSEGSGEKLVLADLLEPVKTSSSLATVKKQLSRVKSKKTVELPLNKEEIERARTPLEQEIFNLLHKNKQPVTDPLLTPVEKASLRAMSLEEAKMRRAELQRARALQSYYEAKARREKKIKSKKYHKVVKKGKAKKALKEFEQLRKVNPAAALEELEKIEKARMMERMSLKHQNSGKWAKSKAIMAKYDLEARQAMQEQLSKNKELTQKLQVASESEEEEGGTEDVEELLVPDVVNEVQMNADGPNPWMLRSCTSDTKEAATQEDPEQLPELEAHGVSESEGEERPVAEEEILLREFEERRSLRKRSELSQDAEPAGSQETKDSGSQEVLSELRVLSQKLKENHQSRKQKASSEGTIPQVQREEPAPEEEEPLLLQRPERVQTLEELEELGKEECFQNKELPRPVLEGQQSERTPNNRPDAPKEKKKKEQMIDLQNLLTTQSPSVKSLAVPTIEELEDEEERNHRQMIKEAFAGDDVIRDFLKEKREAVEASKPKDVDLTLPGWGEWGGVGLKPSAKKRRRFLIKAPEGPPRKDKNLPNVIINEKRNIHAAAHQVRVLPYPFTHHWQFERTIQTPIGSTWNTQRAFQKLTTPKVVTKPGHIINPIKAEDVGYRSSSRSDLSVIQRNPKRITTRHKKQLKKCSVD

SEQ ID NO: 96037 - protein, 320 aa, Homo sapiens
  Payload ID: 19174
  Gene Name: UTP14A small subunit (SSU) processome component
  ENSP ID: ENSP00000413187
MKGDFRKKKSEARTPLEQEIFNLLHKNKQPVTDPLLTPVEKASLRAMSLEEAKMRRAELQRARALQSYYEAKARREKKIKSKKYHKVVKKGKAKKALKEFEQLRKVNPAAALEELEKIEKARMMERMSLKHQNSGKWAKSKAIMAKYDLEARQAMQEQLSKNKELTQKLQVASESEEEEGGTEDVEELLVPDVVNEVQMNADGPNPWMLRSCTSDTKEAATQEDPEQLPELEAHGVSESEGEERPVAEEEILLREFEERRSLRKRSELSQDAEPAGSQETKDSGSQEVLSELRVLSQKLKENHQSRKQKASSEGTIPQVQ

SEQ ID NO: 96038 - protein, 518 aa, Homo sapiens
  Payload ID: 19175
  Gene Name: UTP15, U3 small nucleolar ribonucleoprotein, homolog (S. cerevisiae)
  Uniprot ID: Q8TED0
  ENSP ID: ENSP00000296792
MAGYKPVAIQTYPILGEKITQDTLYWNNYKTPVQIKEFGAVSKVDFSPQPPYNYAVTASSRIHIYGRYSQEPIKTFSRFKDTAYCATFRQDGRLLVAGSEDGGVQLFDISGRAPLRQFEGHTKAVHTVDFTADKYHVVSGADDYTVKLWDIPNSKEILTFKEHSDYVRCGCASKLNPDLFITGSYDHTVKMFDARTSESVLSVEHGQPVESVLLFPSGGLLVSAGGRYVKVWDMLKGGQLLVSLKNHHKTVTCLCLSSSGQRLLSGSLDRKVKVYSTTSYKVVHSFDYAASILSLALAHEDETIVVGMTNGILSVKHRKSEAKKESLPRRRRPAYRTFIKGKNYMKQRDDILINRPAKKHLELYDRDLKHFRISKALDRVLDPTCTIKTPEITVSIIKELNRRGVLANALAGRDEKEISHVLNFLIRNLSQPRFAPVLINAAEIIIDIYLPVIGQSPVVDKKFLLLQGLVEKEIDYQRELLETLGMMDMLFATMRRKEGTSVLEHTSDGFPENKKIES

SEQ ID NO: 96039 - protein, 545 aa, Homo sapiens
  Payload ID: 19175
  Gene Name: UTP15, U3 small nucleolar ribonucleoprotein, homolog (S. cerevisiae)
  ENSP ID: ENSP00000421669
  MOD_RES (1)..(1): Any amino acid
XVIFARRSVRCVCRRLLEGPCDFYASAAELCRVGSWHSPINCPWVEVSRRTLWGSVETPVQIKEFGAVSKVDFSPQPPYNYAVTASSRIHIYGRYSQEPIKTFSRFKDTAYCATFRQDGRLLVAGSEDGGVQLFDISGRAPLRQFEGHTKAVHTVDFTADKYHVVSGADDYTVKLWDIPNSKEILTFKEHSDYVRCGCASKLNPDLFITGSYDHTVKMFDARTSESVLSVEHGQPVESVLLFPSGGLLVSAGGRYVKVWDMLKGGQLLVSLKNHHKTVTCLCLSSSGQRLLSGSLDRKVKVYSTTSYKVVHSFDYAASILSLALAHEDETIVVGMTNGILSVKHRKSEAKKESLPRRRRPAYRTFIKGKNYMKQRDDILINRPAKKHLELYDRDLKHFRISKALDRVLDPTCTIKTPEITVSIIKELNRRGVLANALAGRDEKEISHVLNFLIRNLSQPRFAPVLINAAEIIIDIYLPVIGQSPVVDKKFLLLQGLVEKEIDYQRELLETLGMMDMLFATMRRKEGTSVLEHTSDGFPENKKIES

SEQ ID NO: 96040 - protein, 7 aa, Homo sapiens
  Payload ID: 19175
  Gene Name: UTP15, U3 small nucleolar ribonucleoprotein, homolog (S. cerevisiae)
  ENSP ID: ENSP00000424334
MAGYKPV

SEQ ID NO: 96041 - protein, 499 aa, Homo sapiens
  Payload ID: 19175
  Gene Name: UTP15, U3 small nucleolar ribonucleoprotein, homolog (S. cerevisiae)
  Uniprot ID: Q8TED0
  ENSP ID: ENSP00000424609
MAGYKPVAIQTYPILGEKITQDTLYWNNYKPPYNYAVTASSRIHIYGRYSQEPIKTFSRFKDTAYCATFRQDGRLLVAGSEDGGVQLFDISGRAPLRQFEGHTKAVHTVDFTADKYHVVSGADDYTVKLWDIPNSKEILTFKEHSDYVRCGCASKLNPDLFITGSYDHTVKMFDARTSESVLSVEHGQPVESVLLFPSGGLLVSAGGRYVKVWDMLKGGQLLVSLKNHHKTVTCLCLSSSGQRLLSGSLDRKVKVYSTTSYKVVHSFDYAASILSLALAHEDETIVVGMTNGILSVKHRKSEAKKESLPRRRRPAYRTFIKGKNYMKQRDDILINRPAKKHLELYDRDLKHFRISKALDRVLDPTCTIKTPEITVSIIKELNRRGVLANALAGRDEKEISHVLNFLIRNLSQPRFAPVLINAAEIIIDIYLPVIGQSPVVDKKFLLLQGLVEKEIDYQRELLETLGMMDMLFATMRRKEGTSVLEHTSDGFPENKKIES

SEQ ID NO: 96042 - protein, 65 aa, Homo sapiens
  Payload ID: 19175
  Gene Name: UTP15, U3 small nucleolar ribonucleoprotein, homolog (S. cerevisiae)
  ENSP ID: ENSP00000424902
MAGYKPVAIQTYPILGEKITQDTLYWNNYKTPVQIKEFGAVSKVDFSPQPPYNYAVTASSRIHIY

SEQ ID NO: 96043 - protein, 328 aa, Homo sapiens
  Payload ID: 19175
  Gene Name: UTP15, U3 small nucleolar ribonucleoprotein, homolog (S. cerevisiae)
  Uniprot ID: Q8TED0
  ENSP ID: ENSP00000440796
MFDARTSESVLSVEHGQPVESVLLFPSGGLLVSAGGRYVKVWDMLKGGQLLVSLKNHHKTVTCLCLSSSGQRLLSGSLDRKVKVYSTTSYKVVHSFDYAASILSLALAHEDETIVVGMTNGILSVKHRKSEAKKESLPRRRRPAYRTFIKGKNYMKQRDDILINRPAKKHLELYDRDLKHFRISKALDRVLDPTCTIKTPEITVSIIKELNRRGVLANALAGRDEKEISHVLNFLIRNLSQPRFAPVLINAAEIIIDIYLPVIGQSPVVDKKFLLLQGLVEKEIDYQRELLETLGMMDMLFATMRRKEGTSVLEHTSDGFPENKKIES

SEQ ID NO: 96044 - protein, 556 aa, Homo sapiens
  Payload ID: 19176
  Gene Name: UTP18 small subunit (SSU) processome component
  Uniprot ID: Q9Y5J1
  ENSP ID: ENSP00000225298
MPPERRRRMKLDRRTGAKPKRKPGMRPDWKAGAGPGGPPQKPAPSSQRKPPARPSAAAAAIAVAAAEEERRLRQRNRLRLEEDKPAVERCLEELVFGDVENDEDALLRRLRGPRVQEHEDSGDSEVENEAKGNFPPQKKPVWVDEEDEDEEMVDMMNNRFRKDMMKNASESKLSKDNLKKRLKEEFQHAMGGVPAWAETTKRKTSSDDESEEDEDDLLQRTGNFISTSTSLPRGILKMKNCQHANAERPTVARISSVQFHPGAQIVMVAGLDNAVSLFQVDGKTNPKIQSIYLERFPIFKACFSANGEEVLATSTHSKVLYVYDMLAGKLIPVHQVRGLKEKIVRSFEVSPDGSFLLINGIAGYLHLLAMKTKELIGSMKINGRVAASTFSSDSKKVYASSGDGEVYVWDVNSRKCLNRFVDEGSLYGLSIATSRNGQYVACGSNCGVVNIYNQDSCLQETNPKPIKAIMNLVTGVTSLTFNPTTEILAIASEKMKEAVRLVHLPSCTVFSNFPVIKNKNISHVHTMDFSPRSGYFALGNEKGKALMYRLHHYSDF

SEQ ID NO: 96045 - protein, 43 aa, Homo sapiens
  Payload ID: 19176
  Gene Name: UTP18 small subunit (SSU) processome component
  ENSP ID: ENSP00000441335
  MOD_RES (1)..(1): Any amino acid
XKNCQHANAERPTVARISSVQFHPGAQIVMVAGLDNAVSLFQV

SEQ ID NO: 96046 - protein, 177 aa, Homo sapiens
  Payload ID: 19176
  Gene Name: UTP18 small subunit (SSU) processome component
  ENSP ID: ENSP00000462614
IYLERFPIFKACFSANGEEVLATSTHSKVLYVYDMLAGKLIPVHQVRGLKEKIVRSFEVSPDGSFLLINGIAGYLHLLAMKTKELIGSMKINGRVAASTFSSDSKKVYASSGDGEVYVWDVNSRKCLNRFVDEGSLYGLSIATSRNGQYVACGLKLGKLLVYISLPPFANWSLGGKF

SEQ ID NO: 96047 - protein, 115 aa, Homo sapiens
  Payload ID: 19176
  Gene Name: UTP18 small subunit (SSU) processome component
  ENSP ID: ENSP00000463499
DVNSRKCLNRFVDEGSLYGLSIATSRNGQYVACGSNCGVVNIYNQDSCLQETNPKPIKAIMNLVTGVTSLTFNPTTEILAIASEKMKEAVRLVAPLLRLLKRLFEVQLSHKRSLS

SEQ ID NO: 96048 - protein, 143 aa, Homo sapiens
  Payload ID: 19176
  Gene Name: UTP18 small subunit (SSU) processome component
  ENSP ID: ENSP00000464095
KIVRSFEVSPDGSFLLINGIAGYLHLLAMKTKELIGSMKINGRVAASTFSSDSKKVYASSGDGEVYVWDVNSRKCLNRFVDEGSLYGLSIATSRNGQYVACGCYFSDLQSYYRNLGNCFRKNERSSQIGSSSFLYSIFKLPSH

SEQ ID NO: 96049 - protein, 123 aa, Homo sapiens
  Payload ID: 19176
  Gene Name: UTP18 small subunit (SSU) processome component
  ENSP ID: ENSP00000464194
  MOD_RES (1)..(1): Any amino acid
XDSKKVYASSGDGEVYVWDVNSRKCLNRFVDEGSLYGLSIATSRNGQYVACGSNCGVVNIYNQDSCLQETNPKPIKAIMNLVTGVTSLTFNPTTEILAIASEKMKEAVRLACCLNRTEAILGF

SEQ ID NO: 96050 - protein, 2785 aa, Homo sapiens
  Payload ID: 19177
  Gene Name: UTP20 small subunit (SSU) processome component
  Uniprot ID: O75691
  ENSP ID: ENSP00000261637
MKTKPVSHKTENTYRFLTFAERLGNVNIDIIHRIDRTASYEEEVETYFFEGLLKWRELNLTEHFGKFYKEVIDKCQSFNQLVYHQNEIVQSLKTHLQVKNSFAYQPLLDLVVQLARDLQMDFYPHFPEFFLTITSILETQDTELLEWAFTSLSYLYKYLWRLMVKDMSSIYSMYSTLLAHKKLHIRNFAAESFTFLMRKVSDKNALFNLMFLDLDKHPEKVEGVGQLLFEMCKGVRNMFHSCTGQAVKLILRKLGPVTETETQLPWMLIGETLKNMVKSTVSYISKEHFGTFFECLQESLLDLHTKVTKTNCCESSEQIKRLLETYLILVKHGSGTKIPTPADVCKVLSQTLQVASLSTSCWETLLDVISALILGENVSLPETLIKETIEKIFESRFEKRLIFSFSEVMFAMKQFEQLFLPSFLSYIVNCFLIDDAVVKDEALAILAKLILNKAAPPTAGSMAIEKYPLVFSPQMVGFYIKQKKTRSKGRNEQFPVLDHLLSIIKLPPNKDTTYLSQSWAALVVLPHIRPLEKEKVIPLVTGFIEALFMTVDKGSFGKGNLFVLCQAVNTLLSLEESSELLHLVPVERVKNLVLTFPLEPSVLLLTDLYYQRLALCGCKGPLSQEALMELFPKLQANISTGVSKIRLLTIRILNHFDVQLPESMEDDGLSERQSVFAILRQAELVPATVNDYREKLLHLRKLRHDVVQTAVPDGPLQEVPLRYLLGMLYINFSALWDPVIELISSHAHEMENKQFWKVYYEHLEKAATHAEKELQNDMTDEKSVGDESWEQTQEGDVGALYHEQLALKTDCQERLDHTNFRFLLWRALTKFPERVEPRSRELSPLFLRFINNEYYPADLQVAPTQDLRRKGKGMVAEEIEEEPAAGDDEELEEEAVPQDESSQKKKTRRAAAKQLIAHLQVFSKFSNPRALYLESKLYELYLQLLLHQDQMVQKITLDCIMTYKHPHVLPYRENLQRLLEDRSFKEEIVHFSISEDNAVVKTAHRADLFPILMRILYGRMKNKTGSKTQGKSASGTRMAIVLRFLAGTQPEEIQIFLDLLFEPVRHFKNGECHSAVIQAVEDLDLSKVLPLGRQHGILNSLEIVLKNISHLISAYLPKILQILLCMTATVSHILDQREKIQLRFINPLKNLRRLGIKMVTDIFLDWESYQFRTEEIDAVFHGAVWPQISRLGSESQYSPTPLLKLISIWSRNARYFPLLAKQKPGHPECDILTNVFAILSAKNLSDATASIVMDIVDDLLNLPDFEPTETVLNLLVTGCVYPGIAENIGESITIGGRLILPHVPAILQYLSKTTISAEKVKKKKNRAQVSKELGILSKISKFMKDKEQSSVLITLLLPFLHRGNIAEDTEVDILVTVQNLLKHCVDPTSFLKPIAKLFSVIKNKLSRKLLCTVFETLSDFESGLKYITDVVKLNAFDQRHLDDINFDVRFETFQTITSYIKEMQIVDVNYLIPVMHNCFYNLELGDMSLSDNASMCLMSIIKKLAALNVTEKDYREIIHRSLLEKLRKGLKSQTESIQQDYTTILSCLIQTFPNQLEFKDLVQLTHYHDPEMDFFENMKHIQIHRRARALKKLAKQLMEGKVVLSSKSLQNYIMPYAMTPIFDEKMLKHENITTAATEIIGAICKHLSWSAYMYYLKHFIHVLQTGQINQKLGVSLLVIVLEAFHFDHKTLEEQMGKIENEENAIEAIELPEPEAMELERVDEEEKEYTCKSLSDNGQPGTPDPADSGGTSAKESECITKPVSFLPQNKEEIERTIKNIQGTITGDILPRLHKCLASTTKREEEHKLVKSKVVNDEEVVRVPLAFAMVKLMQSLPQEVMEANLPSILLKVCALLKNRAQEIRDIARSTLAKIIEDLGVHFLLYVLKELQTTLVRGYQVHVLTFTVHMLLQGLTNKLQVGDLDSCLDIMIEIFNHELFGAVAEEKEVKQILSKVMEARRSKSYDSYEILGKFVGKDQVTKLILPLKEILQNTTSLKLARKVHETLRRITVGLIVNQEMTAESILLLSYGLISENLPLLTEKEKNPVAPAPDPRLPPQSCLLLPPTPVRGGQKAVVSRKTNMHIFIESGLRLLHLSLKTSKIKSSGECVLEMLDPFVSLLIDCLGSMDVKVITGALQCLIWVLRFPLPSIETKAEQLTKHLFLLLKDYAKLGAARGQNFHLVVNCFKCVTILVKKVKSYQITEKQLQVLLAYAEEDIYDTSRQATAFGLLKAILSRKLLVPEIDEVMRKVSKLAVSAQSEPARVQCRQVFLKYILDYPLGDKLRPNLEFMLAQLNYEHETGRESTLEMIAYLFDTFPQGLLHENCGMFFIPLCLMTINDDSATCKKMASMTIKSLLGKISLEKKDWLFDMVTTWFGAKKRLNRQLAALICGLFVESEGVDFEKRLGTVLPVIEKEIDPENFKDIMEETEEKAADRLLFSFLTLITKLIKECNIIQFTKPAETLSKIWSHVHSHLRHPHNWVWLTAAQIFGLLFASCQPEELIQKWNTKKTKKHLPEPVAIKFLASDLDQKMKSISLASCHQLHSKFLDQSLGEQVVKNLLFAAKVLYLLELYCEDKQSKIKEDLEEQEALEDGVACADEKAESDGEEKEEVKEELGRPATLLWLIQKLSRIAKLEAAYSPRNPLKRTCIFKFLGAVAMDLGIDKVKPYLPMIIAPLFRELNSTYSEQDPLLKNLSQEIIELLKKLVGLESFSLAFASVQKQANEKRALRKKRKALEFVTNPDIAAKKKMKKHKNKSEAKKRKIEFLRPGYKAKRQKSHSLKDLAMVE

SEQ ID NO: 96051 - protein, 249 aa, Homo sapiens
  Payload ID: 19178
  Gene Name: UTP23, small subunit (SSU) processome component, homolog (yeast)
  Uniprot ID: Q9BRU9
  ENSP ID: ENSP00000308332
MKITRQKHAKKHLGFFRNNFGVREPYQILLDGTFCQAALRGRIQLREQLPRYLMGETQLCTTRCVLKELETLGKDLYGAKLIAQKCQVRNCPHFKNAVSGSECLLSMVEEGNPHHYFVATQDQNLSVKVKKKPGVPLMFIIQNTMVLDKPSPKTIAFVKAVESGQLVSVHEKESIKHLKEEQGLVKNTEQSRRKKRKKISGPNPLSCLKKKKKAPDTQSSASEKKRKRKRIRNRSNPKVLSEKQNAEGE

SEQ ID NO: 96052 - protein, 105 aa, Homo sapiens
  Payload ID: 19178
  Gene Name: UTP23, small subunit (SSU) processome component, homolog (yeast)
  ENSP ID: ENSP00000427767
MKITRQKHAKKHLGFFRNNFGVREPYQILLDGTFCQAALRGRIQLREQLPRYLMGETQLCTTREQWQKPLMKHFPLRQQRQYLKTMKHLLSPFVPSSFFLILIAP

SEQ ID NO: 96053 - protein, 80 aa, Homo sapiens
  Payload ID: 19178
  Gene Name: UTP23, small subunit (SSU) processome component, homolog (yeast)
  ENSP ID: ENSP00000428455
MKITRQKHAKKHLGFFRNNFGVREPYQILLDGTFCQAALRGRIQLREQLPRYLMGETQLCTTSISQECTHSAPIMEDNSM

SEQ ID NO: 96054 - protein, 64 aa, Homo sapiens
  Payload ID: 19178
  Gene Name: UTP23, small subunit (SSU) processome component, homolog (yeast)
  ENSP ID: ENSP00000429384
MVEEGNPHHYFVATQGTMAKAFDEAFSSETTAAIPEDHEASAESFCSIFFLPDLDRPLMHLHPE

SEQ ID NO: 96055 - protein, 155 aa, Homo sapiens
  Payload ID: 19178
  Gene Name: UTP23, small subunit (SSU) processome component, homolog (yeast)
  ENSP ID: ENSP00000429962
MKITRQKHAKKHLGFFRNNFGVREPYQILLDGTFCQAALRGRIQLREQLPRYLMGETQLCTTRCVLKELETLGKDLYGAKLIAQKCQVRNCPHFKNAVSGSECLLSMVEEGNPHHYFVATQWISASLLMLTVHHLMQSERCHLFSSAAKVSQVTH

SEQ ID NO: 96056 - protein, 69 aa, Homo sapiens
  Payload ID: 19178
  Gene Name: UTP23, small subunit (SSU) processome component, homolog (yeast)
  ENSP ID: ENSP00000430029
MKITRQKHAKKHLGFFRNNFGVREPYQILLDGTFCQAALRGRIQLREQLPRYLMGETQLCTTSGSLLAY

SEQ ID NO: 96057 - protein, 67 aa, Homo sapiens
  Payload ID: 19178
  Gene Name: UTP23, small subunit (SSU) processome component, homolog (yeast)
  ENSP ID: ENSP00000430309
MVEEGNPHHYFVATQWISASLLMLTVHHLMQSERCHLFSSAAKVSQVTHSISQECTHSAPIMEDNSM

SEQ ID NO: 96058 - protein, 479 aa, Homo sapiens
  Payload ID: 19179
  Gene Name: UTP3, small subunit (SSU) processome component, homolog (S. cerevisiae)
  Uniprot ID: Q9NQZ2
  ENSP ID: ENSP00000254803
MVGRSRRRGAAKWAAVRAKAGPTLTDENGDDLGLPPSPGDTSYYQDQVDDFHEARSRAALAKGWNEVQSGDEEDGEEEEEEVLALDMDDEDDEDGGNAGEEEEEENADDDGGSSVQSEAEASVDPSLSWGQRKKLYYDTDYGSKSRGRQSQQEAEEEEREEEEEAQIIQRRLAQALQEDDFGVAWVEAFAKPVPQVDEAETRVVKDLAKVSVKEKLKMLRKESPELLELIEDLKVKLTEVKDELEPLLELVEQGIIPPGKGSQYLRTKYNLYLNYCSNISFYLILKARRVPAHGHPVIERLVTYRNLINKLSVVDQKLSSEIRHLLTLKDDAVKKELIPKAKSTKPKPKSVSKTSAAACAVTDLSDDSDFDEKAKLKYYKEIEDRQKLKRKKEENSTEEQALEDQNAKRAITYQIAKNRGLTPRRKKIDRNPRVKHREKFRRAKIRRRGQVREVRKEEQRYSGELSGIRAGVKKSIKLK

SEQ ID NO: 96059 - protein, 597 aa, Homo sapiens
  Payload ID: 19180
  Gene Name: UTP6, small subunit (SSU) processome component, homolog (yeast)
  Uniprot ID: Q9NYH9
  ENSP ID: ENSP00000261708
MAEIIQERIEDRLPELEQLERIGLFSHAEIKAIIKKASDLEYKIQRRTLFKEDFINYVQYEINLLELIQRRRTRIGYSFKKDEIENSIVHRVQGVFQRASAKWKDDVQLWLSYVAFCKKWATKTRLSKVFSAMLAIHSNKPALWIMAAKWEMEDRLSSESARQLFLRALRFHPECPKLYKEYFRMELMHAEKLRKEKEEFEKASMDVENPDYSEEILKGELAWIIYKNSVSIIKGAEFHVSLLSIAQLFDFAKDLQKEIYDDLQALHTDDPLTWDYVARRELEIESQTEEQPTTKQAKAVEVGRKEERCCAVYEEAVKTLPTEAMWKCYITFCLERFTKKSNSGFLRGKRLERTMTVFRKAHELKLLSECQYKQLSVSLLCYNFLREALEVAVAGTELFRDSGTMWQLKLQVLIESKSPDIAMLFEEAFVHLKPQVCLPLWISWAEWSEGAKSQEDTEAVFKKALLAVIGADSVTLKNKYLDWAYRSGGYKKARAVFKSLQESRPFSVDFFRKMIQFEKEQESCNMANIREYYERALREFGSADSDLWMDYMKEELNHPLGRPENCGQIYWRAMKMLQGESAEAFVAKHAMHQTGHL

SEQ ID NO: 96060 - protein, 61 aa, Homo sapiens
  Payload ID: 19180
  Gene Name: UTP6, small subunit (SSU) processome component, homolog (yeast)
  ENSP ID: ENSP00000462135
  MOD_RES (1)..(1): Any amino acid
XRAVFKSLQESRPFSVDFFRKMIQFEKEQTESLSVAQAGLLAHCNLCFPGILQYGEHKRIL

SEQ ID NO: 96061 - protein, 29 aa, Homo sapiens
  Payload ID: 19180
  Gene Name: UTP6, small subunit (SSU) processome component, homolog (yeast)
  ENSP ID: ENSP00000464599
  MOD_RES (1)..(1): Any amino acid
XLQESRPFSVDFFRKMIQFEKEQIFGWII

SEQ ID NO: 96062 - protein, 251 aa, Homo sapiens
  Payload ID: 19181
  Gene Name: utrophin
  ENSP ID: ENSP00000356494
  MOD_RES (1)..(1): Any amino acid
XIGLMSLSKGLLEEKYRYLFKEVAGPTEMCDQRQLGLLLHDAIQIPRQLGEVAAFGGSNIEPSVRSCFQQNNNKPEISVKEFIDWMHLEPQSMVWLPVLHRVAAAETAKHQAKCNICKECPIVGFRYRSLKHFNYDVCQSCFFSGRTAKGHKLHYPMVEYCIPTTSGEDVRDFTKVLKNKFRSKKYFAKHPRLGYLPVQTVLEGDNLETPSQSPQLFHDDTHSRIEQYATRLAQMERTNGSFLTDSSSTTG

SEQ ID NO: 96063 - protein, 66 aa, Homo sapiens
  Payload ID: 19181
  Gene Name: utrophin
  ENSP ID: ENSP00000356495
MIGLNFNLRELLTKFEKDIQAEIDAHNDIFKSIDGNRQKMVKALGNSEEATMLQHRLDDMNQRWND

SEQ ID NO: 96064 - protein, 988 aa, Homo sapiens
  Payload ID: 19181
  Gene Name: utrophin
  ENSP ID: ENSP00000356496
MQILRCLQKCGKLKMMAVVRTSLQKVVVLLHRLQRMAVSSPRYQKLCKDIQAEIDAHNDIFKSIDGNRQKMVKALGNSEEATMLQHRLDDMNQRWNDLKAKSASIRAHLEASAEKWNRLLMSLEELIKWLNMKDEELKKQMPIGGDVPALQLQYDHCKALRRELKEKEYSVLNAVDQARVFLADQPIEAPEEPRRNLQSKTELTPEERAQKIAKAMRKQSSEVKEKWESLNAVTSNWQKQVDKALEKLRDLQGAMDDLDADMKEAESVRNGWKPVGDLLIDSLQDHIEKIMAFREEIAPINFKVKTVNDLSSQLSPLDLHPSLKMSRQLDDLNMRWKLLQVSVDDRLKQLQEAHRDFGPSSQHFLSTSVQLPWQRSISHNKVPYYINHQTQTTCWDHPKMTELFQSLADLNNVRFSAYRTAIKIRRLQKALCLDLLELSTTNEIFKQHKLNQNDQLLSVPDVINCLTTTYDGLEQMHKDLVNVPLCVDMCLNWLLNVYDTGRTGKIRVQSLKIGLMSLSKGLLEEKYRYLFKEVAGPTEMCDQRQLGLLLHDAIQIPRQLGEVAAFGGSNIEPSVRSCFQQNNNKPEISVKEFIDWMHLEPQSMVWLPVLHRVAAAETAKHQAKCNICKECPIVGFRYRSLKHFNYDVCQSCFFSGRTAKGHKLHYPMVEYCIPTTSGEDVRDFTKVLKNKFRSKKYFAKHPRLGYLPVQTVLEGDNLETPITLISMWPEHYDPSQSPQLFHDDTHSRIEQYATRLAQMERTNGSFLTDSSSTTGSVEDEHALIQQYCQTLGGESPVSQPQSPAQILKSVEREERGELERIIADLEEEQRNLQVEYEQLKDQHLRRGLPVGSPPESIISPHHTSEDSELIAEAKLLRQHKGRLEARMQILEDHNKQLESQLHRLRQLLEQPESDSRINGVSPWASPQHSALSYSLDPDASGPQFHQAAGEDLLAPPHDTSTDLTEVMEQIHSTFPSCCPNVPSRPQAM

SEQ ID NO: 96065 - protein, 3433 aa, Homo sapiens
  Payload ID: 19181
  Gene Name: utrophin
  Uniprot ID: P46939
  ENSP ID: ENSP00000356515
MAKYGEHEASPDNGQNEFSDIIKSRSDEHNDVQKKTFTKWINARFSKSGKPPINDMFTDLKDGRKLLDLLEGLTGTSLPKERGSTRVHALNNVNRVLQVLHQNNVELVNIGGTDIVDGNHKLTLGLLWSIILHWQVKDVMKDVMSDLQQTNSEKILLSWVRQTTRPYSQVNVLNFTTSWTDGLAFNAVLHRHKPDLFSWDKVVKMSPIERLEHAFSKAQTYLGIEKLLDPEDVAVQLPDKKSIIMYLTSLFEVLPQQVTIDAIREVETLPRKYKKECEEEAINIQSTAPEEEHESPRAETPSTVTEVDMDLDSYQIALEEVLTWLLSAEDTFQEQDDISDDVEEVKDQFATHEAFMMELTAHQSSVGSVLQAGNQLITQGTLSDEEEFEIQEQMTLLNARWEALRVESMDRQSRLHDVLMELQKKQLQQLSAWLTLTEERIQKMETCPLDDDVKSLQKLLEEHKSLQSDLEAEQVKVNSLTHMVVIVDENSGESATAILEDQLQKLGERWTAVCRWTEERWNRLQEINILWQELLEEQCLLKAWLTEKEEALNKVQTSNFKDQKELSVSVRRLAILKEDMEMKRQTLDQLSEIGQDVGQLLDNSKASKKINSDSEELTQRWDSLVQRLEDSSNQVTQAVAKLGMSQIPQKDLLETVRVREQAITKKSKQELPPPPPPKKRQIHVDIEAKKKFDAISAELLNWILKWKTAIQTTEIKEYMKMQDTSEMKKKLKALEKEQRERIPRADELNQTGQILVEQMGKEGLPTEEIKNVLEKVSSEWKNVSQHLEDLERKIQLQEDINAYFKQLDELEKVIKTKEEWVKHTSISESSRQSLPSLKDSCQRELTNLLGLHPKIEMARASCSALMSQPSAPDFVQRGFDSFLGRYQAVQEAVEDRQQHLENELKGQPGHAYLETLKTLKDVLNDSENKAQVSLNVLNDLAKVEKALQEKKTLDEILENQKPALHKLAEETKALEKNVHPDVEKLYKQEFDDVQGKWNKLKVLVSKDLHLLEEIALTLRAFEADSTVIEKWMDGVKDFLMKQQAAQGDDAGLQRQLDQCSAFVNEIETIESSLKNMKEIETNLRSGPVAGIKTWVQTRLGDYQTQLEKLSKEIATQKSRLSESQEKAANLKKDLAEMQEWMTQAEEEYLERDFEYKSPEELESAVEEMKRAKEDVLQKEVRVKILKDNIKLLAAKVPSGGQELTSELNVVLENYQLLCNRIRGKCHTLEEVWSCWIELLHYLDLETTWLNTLEERMKSTEVLPEKTDAVNEALESLESVLRHPADNRTQIRELGQTLIDGGILDDIISEKLEAFNSRYEDLSHLAESKQISLEKQLQVLRETDQMLQVLQESLGELDKQLTTYLTDRIDAFQVPQEAQKIQAEISAHELTLEELRRNMRSQPLTSPESRTARGGSQMDVLQRKLREVSTKFQLFQKPANFEQRMLDCKRVLDGVKAELHVLDVKDVDPDVIQTHLDKCMKLYKTLSEVKLEVETVIKTGRHIVQKQQTDNPKGMDEQLTSLKVLYNDLGAQVTEGKQDLERASQLARKMKKEAASLSEWLSATETELVQKSTSEGLLGDLDTEISWAKNVLKDLEKRKADLNTITESSAALQNLIEGSEPILEERLCVLNAGWSRVRTWTEDWCNTLMNHQNQLEIFDGNVAHISTWLYQAEALLDEIEKKPTSKQEEIVKRLVSELDDANLQVENVRDQALILMNARGSSSRELVEPKLAELNRNFEKVSQHIKSAKLLIAQEPLYQCLVTTETFETGVPFSDLEKLENDIENMLKFVEKHLESSDEDEKMDEESAQIEEVLQRGEEMLHQPMEDNKKEKIRLQLLLLHTRYNKIKAIPIQQRKMGQLASGIRSSLLPTDYLVEINKILLCMDDVELSLNVPELNTAIYEDFSFQEDSLKNIKDQLDKLGEQIAVIHEKQPDVILEASGPEAIQIRDTLTQLNAKWDRINRMYSDRKGCFDRAMEEWRQFHCDLNDLTQWITEAEELLVDTCAPGGSLDLEKARIHQQELEVGISSHQPSFAALNRTGDGIVQKLSQADGSFLKEKLAGLNQRWDAIVAEVKDRQPRLKGESKQVMKYRHQLDEIICWLTKAEHAMQKRSTTELGENLQELRDLTQEMEVHAEKLKWLNRTELEMLSDKSLSLPERDKISESLRTVNMTWNKICREVPTTLKECIQEPSSVSQTRIAAHPNVQKVVLVSSASDIPVQSHRTSEISIPADLDKTITELADWLVLIDQMLKSNIVTVGDVEEINKTVSRMKITKADLEQRHPQLDYVFTLAQNLKNKASSSDMRTAITEKLERVKNQWDGTQHGVELRQQQLEDMIIDSLQWDDHREETEELMRKYEARLYILQQARRDPLTKQISDNQILLQELGPGDGIVMAFDNVLQKLLEEYGSDDTRNVKETTEYLKTSWINLKQSIADRQNALEAEWRTVQASRRDLENFLKWIQEAETTVNVLVDASHRENALQDSILARELKQQMQDIQAEIDAHNDIFKSIDGNRQKMVKALGNSEEATMLQHRLDDMNQRWNDLKAKSASIRAHLEASAEKWNRLLMSLEELIKWLNMKDEELKKQMPIGGDVPALQLQYDHCKALRRELKEKEYSVLNAVDQARVFLADQPIEAPEEPRRNLQSKTELTPEERAQKIAKAMRKQSSEVKEKWESLNAVTSNWQKQVDKALEKLRDLQGAMDDLDADMKEAESVRNGWKPVGDLLIDSLQDHIEKIMAFREEIAPINFKVKTVNDLSSQLSPLDLHPSLKMSRQLDDLNMRWKLLQVSVDDRLKQLQEAHRDFGPSSQHFLSTSVQLPWQRSISHNKVPYYINHQTQTTCWDHPKMTELFQSLADLNNVRFSAYRTAIKIRRLQKALCLDLLELSTTNEIFKQHKLNQNDQLLSVPDVINCLTTTYDGLEQMHKDLVNVPLCVDMCLNWLLNVYDTGRTGKIRVQSLKIGLMSLSKGLLEEKYRYLFKEVAGPTEMCDQRQLGLLLHDAIQIPRQLGEVAAFGGSNIEPSVRSCFQQNNNKPEISVKEFIDWMHLEPQSMVWLPVLHRVAAAETAKHQAKCNICKECPIVGFRYRSLKHFNYDVCQSCFFSGRTAKGHKLHYPMVEYCIPTTSGEDVRDFTKVLKNKFRSKKYFAKHPRLGYLPVQTVLEGDNLETPITLISMWPEHYDPSQSPQLFHDDTHSRIEQYATRLAQMERTNGSFLTDSSSTTGSVEDEHALIQQYCQTLGGESPVSQPQSPAQILKSVEREERGELERIIADLEEEQRNLQVEYEQLKDQHLRRGLPVGSPPESIISPHHTSEDSELIAEAKLLRQHKGRLEARMQILEDHNKQLESQLHRLRQLLEQPESDSRINGVSPWASPQHSALSYSLDPDASGPQFHQAAGEDLLAPPHDTSTDLTEVMEQIHSTFPSCCPNVPSRPQAM

SEQ ID NO: 96066 - protein, 186 aa, Homo sapiens
  Payload ID: 19181
  Gene Name: utrophin
  ENSP ID: ENSP00000387927
MLEEEEWYRSLKHFNYDVCQSCFFSGRTAKGHKLHYPMVEYCIPTTSGEDVRDFTKVLKNKFRSKKYFAKHPRLGYLPVQTVLEGDNLETPSQSPQLFHDDTHSRIEQYATRLAQMERTNGSFLTDSSSTTGSVEDEHALIQQYCQTLGGESPVSQPQSPAQILKSVEREERGELERIIADLEEEQ

SEQ ID NO: 96067 - protein, 47 aa, Homo sapiens
  Payload ID: 19181
  Gene Name: utrophin
  ENSP ID: ENSP00000390879
MAKYGEHEASPDNGQNEFSDIIKSRSDEHNDVQKKTFTKWINARFSK

SEQ ID NO: 96068 - protein, 154 aa, Homo sapiens
  Payload ID: 19181
  Gene Name: utrophin
  ENSP ID: ENSP00000396276
MSGLAATTFHWKKCRLDLPGHVALQACKRLPDEHNDVQKKTFTKWINARFSKSGKPPINDMFTDLKDGRKLLDLLEGLTGTSLPKERGSTRVHALNNVNRVLQVLHQNNVELVNIGGTDIVDGNHKLTLGLLWSIILHWQVKDVMKDVMSDLQQ

SEQ ID NO: 96069 - protein, 180 aa, Homo sapiens
  Payload ID: 19181
  Gene Name: utrophin
  ENSP ID: ENSP00000398923
MHLEPQSMVWLPVLHRVAAAETAKHQAKCNICKECPIVGFRYRSLKHFNYDVCQSCFFSGRTAKGHKLHYPMVEYCIPTTSGEDVRDFTKVLKNKFRSKKYFAKHPRLGYLPVQTVLEGDNLETPITLISMWPEHYDPSQSPQLFHDDTHSRIEQYATRLAQMERTNGSFLTDSSSTTGS

SEQ ID NO: 96070 - protein, 184 aa, Homo sapiens
  Payload ID: 19181
  Gene Name: utrophin
  ENSP ID: ENSP00000404205
MHLEPQSMVWLPVLHRVAAAETAKHQAKCNICKECPIVGFRYRSLKHFNYDVCQSCFFSGRTAKGHKLHYPMVEYCIPTTSGEDVRDFTKVLKNKFRSKKYFAKHPRLGYLPVQTVLEGDNLETPSQSPQLFHDDTHSRIEQYATRLAQMERTNGSFLTDSSSTTGSVEDEHALIQQYCQTLGG

SEQ ID NO: 96071 - protein, 150 aa, Homo sapiens
  Payload ID: 19181
  Gene Name: utrophin
  ENSP ID: ENSP00000487153
MEVRSESTNGDGRQSQADEHNDVQKKTFTKWINARFSKSGKPPINDMFTDLKDGRKLLDLLEGLTGTSLPKERGSTRVHALNNVNRVLQVLHQNNVELVNIGGTDIVDGNHKLTLGLLWSIILHWQVKDVMKDVMSDLQQTNSEKILLSW

SEQ ID NO: 96072 - protein, 699 aa, Homo sapiens
  Payload ID: 19182
  Gene Name: UV radiation resistance associated
  Uniprot ID: Q9P2Y5
  ENSP ID: ENSP00000348455
MSASASVGGPVPQPPPGPAAALPPGSAARALHVELPSQQRRLRHLRNIAARNIVNRNGHQLLDTYFTLHLCSTEKIYKEFYRSEVIKNSLNPTWRSLDFGIMPDRLDTSVSCFVVKIWGGKENIYQLLIEWKVCLDGLKYLGQQIHARNQNEIIFGLNDGYYGAPFEHKGYSNAQKTILLQVDQNCVRNSYDVFSLLRLHRAQCAIKQTQVTVQKIGKEIEEKLRLTSTSNELKKKSECLQLKILVLQNELERQKKALGREVALLHKQQIALQDKGSAFSAEHLKLQLQKESLNELRKECTAKRELFLKTNAQLTIRCRQLLSELSYIYPIDLNEHKDYFVCGVKLPNSEDFQAKDDGSIAVALGYTAHLVSMISFFLQVPLRYPIIHKGSRSTIKDNINDKLTEKEREFPLYPKGGEKLQFDYGVYLLNKNIAQLRYQHGLGTPDLRQTLPNLKNFMEHGLMVRCDRHHTSSAIPVPKRQSSIFGGADVGFSGGIPSPDKGHRKRASSENERLQYKTPPPSYNSALAQPVTTVPSMGETERKITSLSSSLDTSLDFSKENKKKGEDLVGSLNGGHANVHPSQEQGEALSGHRATVNGTLLPSEQAGSASVQLPGEFHPVSEAELCCTVEQAEEIIGLEATGFASGDQLEAFNCIPVDSAVAVECDEQVLGEFEEFSRRIYALNENVSSFRRPRRSSDK

SEQ ID NO: 96073 - protein, 327 aa, Homo sapiens
  Payload ID: 19182
  Gene Name: UV radiation resistance associated
  Uniprot ID: Q9P2Y5
  ENSP ID: ENSP00000431256
MISFFLQVPLRYPIIHKGSRSTIKDNINDKLTEKEREFPLYPKGGEKLQFDYGVYLLNKNIAQLRYQHGLGTPDLRQTLPNLKNFMEHGLMVRCDRHHTSSAIPVPKRQSSIFGGADVGFSGGIPSPDKGHRKRASSENERLQYKTPPPSYNSALAQPVTTVPSMGETERKITSLSSSLDTSLDFSKENKKKGEDLVGSLNGGHANVHPSQEQGEALSGHRATVNGTLLPSEQAGSASVQLPGEFHPVSEAELCCTVEQAEEIIGLEATGFASGDQLEAFNCIPVDSAVAVECDEQVLGEFEEFSRRIYALNENVSSFRRPRRSSDK

SEQ ID NO: 96074 - protein, 90 aa, Homo sapiens
  Payload ID: 19182
  Gene Name: UV radiation resistance associated
  ENSP ID: ENSP00000433414
NSIFSPSQLRYQHGLGTPDLRQTLPNLKNFMEHGLMVRWTSALQEHSKLRKGIVATAGRGTDSTTHSARGDSKNPRQAYLQTCVLQNRHH

SEQ ID NO: 96075 - protein, 132 aa, Homo sapiens
  Payload ID: 19182
  Gene Name: UV radiation resistance associated
  ENSP ID: ENSP00000433613
MPDRLDTSVSCFVVKIWGGKENIYQLLIEWKVCLDGLKYLGQQIHARNQNEIIFGLNDGYYGAPFEHKGYSNAQKTILLQVDQNCVRNSYDVFSLLRLHRAQCAIKQTQVTVQKIGKEIEEKLRLTSTSNEL

SEQ ID NO: 96076 - protein, 327 aa, Homo sapiens; identical to SEQ ID NO: 96073
  Payload ID: 19182
  Gene Name: UV radiation resistance associated
  Uniprot ID: Q9P2Y5
  ENSP ID: ENSP00000434082

SEQ ID NO: 96077 - protein, 598 aa, Homo sapiens
  Payload ID: 19182
  Gene Name: UV radiation resistance associated
  ENSP ID: ENSP00000436039
MPDRLDTSVSCFVVKIWGGKENIYQLLIEWKVCLDGLKYLGQQIHARNQNEIIFGLNDGYYGAPFEHKGYSNAQKTILLQVDQNCVRNSYDVFSLLRLHRAQCAIKQTQVTVQKIGKEIEEKLRLTSTSNELKKKSECLQLKILVLQNELERQKKALGREVALLHKQQIALQDKGSAFSAEHLKLQLQKESLNELRKECTAKRELFLKTNAQLTIRCRQLLSELSYIYPIDLNEHKDYFVCGVKLPNSEDFQAKDDGSIAVALGYTAHLVSMISFFLQVPLRYPIIHKGSRSTIKDNINDKLTEKEREFPLYPKGGEKLQFDYGVYLLNKNIAQLRYQHGLGTPDLRQTLPNLKNFMEHGLMVRCDRHHTSSAIPVPKRQSSIFGGADVGFSGGIPSPDKGHRKRASSENERLQYKTPPPSYNSALAQPVTTVPSMGETERKITSLSSSLDTSLDFSKENKKKGEDLVGSLNGGHANVHPSQEQGEALSGHRATVNGTLLPSEQAGSASVQLPGEFHPVSEAELCCTVEQAEEIIGLEATGFASGDQLEAFNCIPVDSAVAVECDEQVLGEFEEFSRRIYALNENVSSFRRPRRSSDK

SEQ ID NO: 96078 - protein, 327 aa, Homo sapiens; identical to SEQ ID NO: 96073
  Payload ID: 19182
  Gene Name: UV radiation resistance associated
  Uniprot ID: Q9P2Y5
  ENSP ID: ENSP00000436270

SEQ ID NO: 96079 - protein, 1416 aa, Homo sapiens
  Payload ID: 19183
  Gene Name: uveal autoantigen with coiled-coil domains and ankyrin repeats
  Uniprot ID: Q9BZF9
  ENSP ID: ENSP00000314556
MKSLKSRLRRQDVPGPASSGAAAASAHAADWNKYDDRLMKAAERGDVEKVTSILAKKGVNPGKLDVEGRSVFHVVTSKGNLECLNAILIHGVDITTSDTAGRNALHLAAKYGHALCLQKLLQYNCPTEHADLQGRTALHDAAMADCPSSIQLLCDHGASVNAKDVDGRTPLVLATQMSRPTICQLLIDRGADVNSRDKQNRTALMLGCEYGCRDAVEVLIKNGADISLLDALGHDSSYYARIGDNLDILTLLKTASENTNKGRELWKKGPSLQQRNLTHMQDEVNVKSHQREHQNIQDLEIENEDLKERLRKIQQEQRILLDKVNGLQLQLNEEVMVADDLESEREKLKSLLAAKEKQHEESLRTIEALKNRFKYFESDHLGSGSHFSNRKEDMLLKQGQMYMADSQCTSPGIPAHMQSRSMLRPLELSLPSQTSYSENEILKKELEAMRTFCESAKQDRLKLQNELAHKVAECKALALECERVKEDSDEQIKQLEDALKDVQKRMYESEGKVKQMQTHFLALKEHLTSEAASGNHRLTEELKDQLKDLKVKYEGASAEVGKLRNQIKQNEMIVEEFKRDEGKLIEENKRLQKELSMCEMEREKKGRKVTEMEGQAKELSAKLALSIPAEKFENMKSSLSNEVNEKAKKLVEMEREHEKSLSEIRQLKRELENVKAKLAQHVKPEEHEQVKSRLEQKSGELGKKITELTLKNQTLQKEIEKVYLDNKLLKEQAHNLTIEMKNHYVPLKVSEDMKKSHDAIIDDLNRKLLDVTQKYTEKKLEMEKLLLENDSLSKDVSRLETVFVPPEKHEKEIIALKSNIVELKKQLSELKKKCGEDQEKIHALTSENTNLKKMMSNQYVPVKTHEEVKMTLNDTLAKTNRELLDVKKKFEDINQEFVKIKDKNEILKRNLENTQNQIKAEYISLAEHEAKMSSLSQSMRKVQDSNAEILANYRKGQEEIVTLHAEIKAQKKELDTIQECIKVKYAPIVSFEECERKFKATEKELKDQLSEQTQKYSVSEEEVKKNKQENDKLKKEIFTLQKDLRDKTVLIEKSHEMERALSRKTDELNKQLKDLSQKYTEVKNVKEKLVEENAKQTSEILAVQNLLQKQHVPLEQVEALKKSLNGTIENLKEELKSMQRCYEKEQQTVTKLHQLLENQKNSSVPLAEHLQIKEAFEKEVGIIKASLREKEEESQNKMEEVSKLQSEVQNTKQALKKLETREVVDLSKYKATKSDLETQISSLNEKLANLNRKYEEVCEEVLHAKKKEISAKDEKELLHFSIEQEIKDQKERCDKSLTTITELQRRIQESAKQIEAKDNKITELLNDVERLKQALNGLSQLTYTSGNPTKRQSQLIDTLQHQVKSLEQQLADADRQHQEVIAIYRTHLLSAAQGHMDEDVQEALLQIIQMRQGLVC

SEQ ID NO: 96080 - protein, 1403 aa, Homo sapiens
  Payload ID: 19183
  Gene Name: uveal autoantigen with coiled-coil domains and ankyrin repeats
  Uniprot ID: Q9BZF9
  ENSP ID: ENSP00000369319
MMNCWFSCTPKNRHAADWNKYDDRLMKAAERGDVEKVTSILAKKGVNPGKLDVEGRSVFHVVTSKGNLECLNAILIHGVDITTSDTAGRNALHLAAKYGHALCLQKLLQYNCPTEHADLQGRTALHDAAMADCPSSIQLLCDHGASVNAKDVDGRTPLVLATQMSRPTICQLLIDRGADVNSRDKQNRTALMLGCEYGCRDAVEVLIKNGADISLLDALGHDSSYYARIGDNLDILTLLKTASENTNKGRELWKKGPSLQQRNLTHMQDEVNVKSHQREHQNIQDLEIENEDLKERLRKIQQEQRILLDKVNGLQLQLNEEVMVADDLESEREKLKSLLAAKEKQHEESLRTIEALKNRFKYFESDHLGSGSHFSNRKEDMLLKQGQMYMADSQCTSPGIPAHMQSRSMLRPLELSLPSQTSYSENEILKKELEAMRTFCESAKQDRLKLQNELAHKVAECKALALECERVKEDSDEQIKQLEDALKDVQKRMYESEGKVKQMQTHFLALKEHLTSEAASGNHRLTEELKDQLKDLKVKYEGASAEVGKLRNQIKQNEMIVEEFKRDEGKLIEENKRLQKELSMCEMEREKKGRKVTEMEGQAKELSAKLALSIPAEKFENMKSSLSNEVNEKAKKLVEMEREHEKSLSEIRQLKRELENVKAKLAQHVKPEEHEQVKSRLEQKSGELGKKITELTLKNQTLQKEIEKVYLDNKLLKEQAHNLTIEMKNHYVPLKVSEDMKKSHDAIIDDLNRKLLDVTQKYTEKKLEMEKLLLENDSLSKDVSRLETVFVPPEKHEKEIIALKSNIVELKKQLSELKKKCGEDQEKIHALTSENTNLKKMMSNQYVPVKTHEEVKMTLNDTLAKTNRELLDVKKKFEDINQEFVKIKDKNEILKRNLENTQNQIKAEYISLAEHEAKMSSLSQSMRKVQDSNAEILANYRKGQEEIVTLHAEIKAQKKELDTIQECIKVKYAPIVSFEECERKFKATEKELKDQLSEQTQKYSVSEEEVKKNKQENDKLKKEIFTLQKDLRDKTVLIEKSHEMERALSRKTDELNKQLKDLSQKYTEVKNVKEKLVEENAKQTSEILAVQNLLQKQHVPLEQVEALKKSLNGTIENLKEELKSMQRCYEKEQQTVTKLHQLLENQKNSSVPLAEHLQIKEAFEKEVGIIKASLREKEEESQNKMEEVSKLQSEVQNTKQALKKLETREVVDLSKYKATKSDLETQISSLNEKLANLNRKYEEVCEEVLHAKKKEISAKDEKELLHFSIEQEIKDQKERCDKSLTTITELQRRIQESAKQIEAKDNKITELLNDVERLKQALNGLSQLTYTSGNPTKRQSQLIDTLQHQVKSLEQQLADADRQHQEVIAIYRTHLLSAAQGHMDEDVQEALLQIIQMRQGLVC

SEQ ID NO: 96081 - protein, 1307 aa, Homo sapiens
  Payload ID: 19183
  Gene Name: uveal autoantigen with coiled-coil domains and ankyrin repeats
  ENSP ID: ENSP00000438667
MKSLKSRLRRQDVPGPASSGAAAASAHAADWNKYDDRLMKAAERGDVEKVTSILAKKGVNPGKLDVEGRSVFHVVTSKGNLECLNAILIHGVDITTSDTAGRNALHLAAKYGHALCLQKLLQYNCPTEHADLQGRTALHDAAMADCPSSIQLLCDHGASVNAKDVRNLTHMQDEVNVKSHQREHQNIQDLEIENEDLKERLRKIQQEQRILLDKVNGLQLQLNEEVMVADDLESEREKLKSLLAAKEKQHEESLRTIEALKNRFKYFESDHLGSGSHFSNRKEDMLLKQGQMYMADSQCTSPGIPAHMQSRSMLRPLELSLPSQTSYSENEILKKELEAMRTFCESAKQDRLKLQNELAHKVAECKALALECERVKEDSDEQIKQLEDALKDVQKRMYESEGKVKQMQTHFLALKEHLTSEAASGNHRLTEELKDQLKDLKVKYEGASAEVGKLRNQIKQNEMIVEEFKRDEGKLIEENKRLQKELSMCEMEREKKGRKVTEMEGQAKELSAKLALSIPAEKFENMKSSLSNEVNEKAKKLVEMEREHEKSLSEIRQLKRELENVKAKLAQHVKPEEHEQVKSRLEQKSGELGKKITELTLKNQTLQKEIEKVYLDNKLLKEQAHNLTIEMKNHYVPLKVSEDMKKSHDAIIDDLNRKLLDVTQKYTEKKLEMEKLLLENDSLSKDVSRLETVFVPPEKHEKEIIALKSNIVELKKQLSELKKKCGEDQEKIHALTSENTNLKKMMSNQYVPVKTHEEVKMTLNDTLAKTNRELLDVKKKFEDINQEFVKIKDKNEILKRNLENTQNQIKAEYISLAEHEAKMSSLSQSMRKVQDSNAEILANYRKGQEEIVTLHAEIKAQKKELDTIQECIKVKYAPIVSFEECERKFKATEKELKDQLSEQTQKYSVSEEEVKKNKQENDKLKKEIFTLQKDLRDKTVLIEKSHEMERALSRKTDELNKQLKDLSQKYTEVKNVKEKLVEENAKQTSEILAVQNLLQKQHVPLEQVEALKKSLNGTIENLKEELKSMQRCYEKEQQTVTKLHQLLENQKNSSVPLAEHLQIKEAFEKEVGIIKASLREKEEESQNKMEEVSKLQSEVQNTKQALKKLETREVVDLSKYKATKSDLETQISSLNEKLANLNRKYEEVCEEVLHAKKKEISAKDEKELLHFSIEQEIKDQKERCDKSLTTITELQRRIQESAKQIEAKDNKITELLNDVERLKQALNGLSQLTYTSGNPTKRQSQLIDTLQHQVKSLEQQLADADRQHQEVIAIYRTHLLSAAQGHMDEDVQEALLQIIQMRQGLVC

SEQ ID NO: 96082 - protein, 225 aa, Homo sapiens
  Payload ID: 19183
  Gene Name: uveal autoantigen with coiled-coil domains and ankyrin repeats
  ENSP ID: ENSP00000453616
MVKKQQQQPPQKNHPEFAPALHAADWNKYDDRLMKAAERGDVEKVTSILAKKGVNPGKLDVEGRSVFHVVTSKGNLECLNAILIHGVDITTSDTAGRNALHLAAKYGHALCLQKLLQYNCPTEHADLQGRTALHDAAMADCPSSIQLLCDHGASVNAKDVDGRTPLVLATQMSRPTICQLLIDRGADVNSRDKQNRTALMLGCEYGCRDAVEVLIKNGADISLLD

SEQ ID NO: 96083 - protein, 564 aa, Homo sapiens
  Payload ID: 19183
  Gene Name: uveal autoantigen with coiled-coil domains and ankyrin repeats
  ENSP ID: ENSP00000453865
MMNCWFSCTPKNRHAADWNKYDDRLMKAAERGDVEKVTSILAKKGVNPGKLDVEGRSVFHVVTSKGNLECLNAILIHGVDITTSDTAGRNALHLAAKYGHALCLQKLLQYNCPTEHADLQGRTALHDAAMADCPSSIQLLCDHGASVNAKDVDGRTPLVLATQMSRPTICQLLIDRGADVNSRDKQNRTALMLGCEYGCRDAVEVLIKNGADISLLDALGHDSSYYARIGDNLDILTLLKTASENTNKGRELWKKGPSLQQRNLTHMQDEVNVKSHQREHQNIQDLEIENEDLKERLRKIQQEQRILLDKVNGLQLQLNEREKLKSLLAAKEKQHEESLRTIEALKNRFKYFESDHLGSGSHFSNRKEDMLLKQGQMYMADSQCTSPGIPAHMQSRSMLRPLELSLPSQTSYSENEILKKELEAMRTFCESAKQDRLKLQNELAHKVAECKALALECERVKEDSDEQIKQLEDALKDVQKRMYESEGKVKQMQTHFLALKEHLTSEAASGNHRLTEELKDQLKDLKVKYEGASAEVGKLRNQIKQNEMIVEEFKRDEGKLIEEN

SEQ ID NO: 96084 - protein, 1401 aa, Homo sapiens
  Payload ID: 19183
  Gene Name: uveal autoantigen with coiled-coil domains and ankyrin repeats
  ENSP ID: ENSP00000454018
MMNCWFSCTPKNRHAADWNKYDDRLMKAAERGDVEKVTSILAKKGVNPGKLDVEGRSVFHVVTSKGNLECLNAILIHGVDITTSDTAGRNALHLAAKYGHALCLQKLLQYNCPTEHADLQGRTALHDAAMADCPSSIQLLCDHGASVNAKDVDGRTPLVLATQMSRPTICQLLIDRGADVNSRDKQNRTALMLGCEYGCRDAVEVLIKNGADISLLDALGHDSSYYARIGDNLDILTLLKTASENTNKGRELWKKGPSLQQRNLTHMQDEVNVKSHQREHQNIQDLEIENEDLKERLRKIQQEQRILLDKVNGLQLQLNEEVMVADDLESEREKLKSLLAAKEKQHEESLRTIEALKNRFKYFESDHLGSGSHFRKEDMLLKQGQMYMADSQCTSPGIPAHMQSRSMLRPLELSLPSQTSYSENEILKKELEAMRTFCESAKQDRLKLQNELAHKVAECKALALECERVKEDSDEQIKQLEDALKDVQKRMYESEGKVKQMQTHFLALKEHLTSEAASGNHRLTEELKDQLKDLKVKYEGASAEVGKLRNQIKQNEMIVEEFKRDEGKLIEENKRLQKELSMCEMEREKKGRKVTEMEGQAKELSAKLALSIPAEKFENMKSSLSNEVNEKAKKLVEMEREHEKSLSEIRQLKRELENVKAKLAQHVKPEEHEQVKSRLEQKSGELGKKITELTLKNQTLQKEIEKVYLDNKLLKEQAHNLTIEMKNHYVPLKVSEDMKKSHDAIIDDLNRKLLDVTQKYTEKKLEMEKLLLENDSLSKDVSRLETVFVPPEKHEKEIIALKSNIVELKKQLSELKKKCGEDQEKIHALTSENTNLKKMMSNQYVPVKTHEEVKMTLNDTLAKTNRELLDVKKKFEDINQEFVKIKDKNEILKRNLENTQNQIKAEYISLAEHEAKMSSLSQSMRKVQDSNAEILANYRKGQEEIVTLHAEIKAQKKELDTIQECIKVKYAPIVSFEECERKFKATEKELKDQLSEQTQKYSVSEEEVKKNKQENDKLKKEIFTLQKDLRDKTVLIEKSHEMERALSRKTDELNKQLKDLSQKYTEVKNVKEKLVEENAKQTSEILAVQNLLQKQHVPLEQVEALKKSLNGTIENLKEELKSMQRCYEKEQQTVTKLHQLLENQKNSSVPLAEHLQIKEAFEKEVGIIKASLREKEEESQNKMEEVSKLQSEVQNTKQALKKLETREVVDLSKYKATKSDLETQISSLNEKLANLNRKYEEVCEEVLHAKKKEISAKDEKELLHFSIEQEIKDQKERCDKSLTTITELQRRIQESAKQIEAKDNKITELLNDVERLKQALNGLSQLTYTSGNPTKRQSQLIDTLQHQVKSLEQQLADADRQHQEVIAIYRTHLLSAAQGHMDEDVQEALLQIIQMRQGLVC

SEQ ID NO: 96085 - protein, 709 aa, Homo sapiens
  Payload ID: 19184
  Gene Name: UV-stimulated scaffold protein A
  Uniprot ID: Q2YD98
  ENSP ID: ENSP00000374501
MDQKLSKLVEELTTSGEPRLNPEKMKELKKICKSSEEQLSRAYRLLIAQLTQEHAEIRLSAFQIVEELFVRSHQFRMLVVSNFQEFLELTLGTDPAQPLPPPREAAQRLRQATTRAVEGWNEKFGEAYKKLALGYHFLRHNKKVDFQDTNARSLAERKREEEKQKHLDKIYQERASQAEREMQEMSGEIESCLTEVESCFRLLVPFDFDPNPETESLGMASGMSDALRSSCAGQVGPCRSGTPDPRDGEQPCCSRDLPASAGHPRAGGGAQPSQTATGDPSDEDEDSDLEEFVRSHGLGSHKYTLDVELCSEGLKVQENEDNLALIHAARDTLKLIRNKFLPAVCSWIQRFTRVGTHGGCLKRAIDLKAELELVLRKYKELDIEPEGGERRRTEALGDAEEDEDDEDFVEVPEKEGYEPHIPDHLRPEYGLEAAPEKDTVVRCLRTRTRMDEEVSDPTSAAAQLRQLRDHLPPPSSASPSRALPEPQEAQKLAAERARAPVVPYGVDLHYWGQELPTAGKIVKSDSQHRFWKPSEVEEEVVNADISEMLRSRHITFAGKFEPVQHWCRAPRPDGRLCERQDRLKCPFHGKIVPRDDEGRPLDPEDRAREQRRQLQKQERPEWQDPELMRDVEAATGQDLGSSRYSGKGRGKKRRYPSLTNLKAQADTARARIGRKVFAKAAVRRVVAAMNRMDQKKHEKFSNQFNYALN

SEQ ID NO: 96086 - protein, 709 aa, Homo sapiens; identical to SEQ ID NO: 96085
  Payload ID: 19184
  Gene Name: UV-stimulated scaffold protein A
  Uniprot ID: Q2YD98
  ENSP ID: ENSP00000421741

SEQ ID NO: 96087 - protein, 136 aa, Homo sapiens
  Payload ID: 19184
  Gene Name: UV-stimulated scaffold protein A
  ENSP ID: ENSP00000422795
  MOD_RES (1)..(1): Any amino acid
XPSRALPEPQEAQKLAAERARAPVVPYGVDLHYWGQELPTAGKIVKSDSQHRFWKPSEVEEEVVNADISEMLRSRHITFAGKFEPVQHWCRAPRPDGRLCERQDRLKTFHSCPRPSGSRGGTEPSPRPCGSQDALL

SEQ ID NO: 96088 - protein, 260 aa, Homo sapiens
  Payload ID: 19184
  Gene Name: UV-stimulated scaffold protein A
  Uniprot ID: Q2YD98
  ENSP ID: ENSP00000423340
MDEEVSDPTSAAAQLRQLRDHLPPPSSASPSRALPEPQEAQKLAAERARAPVVPYGVDLHYWGQELPTAGKIVKSDSQHRFWKPSEVEEEVVNADISEMLRSRHITFAGKFEPVQHWCRAPRPDGRLCERQDRLKCPFHGKIVPRDDEGRPLDPEDRAREQRRQLQKQERPEWQDPELMRDVEAATGQDLGSSRYSGKGRGKKRRYPSLTNLKAQADTARARIGRKVFAKAAVRRVVAAMNRMDQKKHEKFSNQFNYALN

SEQ ID NO: 96089 - protein, 709 aa, Homo sapiens; identical to SEQ ID NO: 96085
  Payload ID: 19184
  Gene Name: UV-stimulated scaffold protein A
  Uniprot ID: Q2YD98
  ENSP ID: ENSP00000425130

SEQ ID NO: 96090 - protein, 260 aa, Homo sapiens; identical to SEQ ID NO: 96088
  Payload ID: 19184
  Gene Name: UV-stimulated scaffold protein A
  Uniprot ID: Q2YD98
  ENSP ID: ENSP00000427701

SEQ ID NO: 96091 - protein, 782 aa, Homo sapiens
  Payload ID: 19185
  Gene Name: Vac14 homolog (S. cerevisiae)
  Uniprot ID: Q08AM6
  ENSP ID: ENSP00000261776
MNPEKDFAPLTPNIVRALNDKLYEKRKVAALEIEKLVREFVAQNNTVQIKHVIQTLSQEFALSQHPHSRKGGLIGLAACSIALGKDSGLYLKELIEPVLTCFNDADSRLRYYACEALYNIVKVARGAVLPHFNVLFDGLSKLAADPDPNVKSGSELLDRLLKDIVTESNKFDLVSFIPLLRERIYSNNQYARQFIISWILVLESVPDINLLDYLPEILDGLFQILGDNGKEIRKMCEVVLGEFLKEIKKNPSSVKFAEMANILVIHCQTTDDLIQLTAMCWMREFIQLAGRVMLPYSSGILTAVLPCLAYDDRKKSIKEVANVCNQSLMKLVTPEDDELDELRPGQRQAEPTPDDALPKQEGTASGGPDGSCDSSFSSGISVFTAASTERAPVTLHLDGIVQVLNCHLSDTAIGMMTRIAVLKWLYHLYIKTPRKMFRHTDSLFPILLQTLSDESDEVILKDLEVLAEIASSPAGQTDDPGPLDGPDLQASHSELQVPTPGRAGLLNTSGTKGLECSPSTPTMNSYFYKFMINLLKRFSSERKLLEVRGPFIIRQLCLLLNAENIFHSMADILLREEDLKFASTMVHALNTILLTSTELFQLRNQLKDLKTLESQNLFCCLYRSWCHNPVTTVSLCFLTQNYRHAYDLIQKFGDLEVTVDFLAEVDKLVQLIECPIFTYLRLQLLDVKNNPYLIKALYGLLMLLPQSSAFQLLSHRLQCVPNPELLQTEDSLKAAPKSQKADSPSIDYAELLQHFEKVQNKHLEVRHQRSGRGDHLDRRVVL

SEQ ID NO: 96092 - protein, 214 aa, Homo sapiens
  Payload ID: 19185
  Gene Name: Vac14 homolog (S. cerevisiae)
  Uniprot ID: Q08AM6
  ENSP ID: ENSP00000439284
MADILLREEDLKFASTMVHALNTILLTSTELFQLRNQLKDLKTLESQNLFCCLYRSWCHNPVTTVSLCFLTQNYRHAYDLIQKFGDLEVTVDFLAEVDKLVQLIECPIFTYLRLQLLDVKNNPYLIKALYGLLMLLPQSSAFQLLSHRLQCVPNPELLQTEDSLKAAPKSQKADSPSIDYAELLQHFEKVQNKHLEVRHQRSGRGDHLDRRVVL

SEQ ID NO: 96093 - protein, 40 aa, Homo sapiens
  Payload ID: 19185
  Gene Name: Vac14 homolog (S. cerevisiae)
  ENSP ID: ENSP00000454650
MNPEKDFAPLTPNIVRALNDKLYEKRKVAALEIEKTQGST

SEQ ID NO: 96094 - protein, 260 aa, Homo sapiens
  Payload ID: 19185
  Gene Name: Vac14 homolog (S. cerevisiae)
  ENSP ID: ENSP00000455731
  MOD_RES (1)..(1): Any amino acid
XVILKDLEVLAEIASSPAGQTDDPGPLDGPDLQASHSELQVPTPGRAGLLNTSGTKGLECSPSTPTMNSYFYKFMINLLKRFSSERKLLEVRGPFIIRQLCLLLNAENIFHSMADILLREEDLKFASTMVHALNTILLTSTELFQLRNQLKDLKTLNYRHAYDLIQKFGDLEVTVDFLAEVDKLVQLIECPIFTYLRLQLLDVKNNPYLIKALYGLLMLLPQSSAFQLLSHRLQCVPNPELLQTEDSLKAAPKSQKADSP

SEQ ID NO: 96095 - protein, 201 aa, Homo sapiens
  Payload ID: 19185
  Gene Name: Vac14 homolog (S. cerevisiae)
  ENSP ID: ENSP00000457809
MNPEKDFAPLTPNIVRALNDKLYEKRKVAALEIEKLVREFVAQNNTVQIKHVIQTLSQEFALSQHPHSRKGGLIGLAACSIALGKDSGLYLKELIEPVLTCFNDADSRLRYYACEALYNIVKVARGAVLPHFNVLFDGLSKLAADPDPNVKSGSELLDRLLKVFFSSGSTTSTSKLLGRCSGTRTASFPSYCRRYRMNRMR

SEQ ID NO: 96096 - protein, 17 aa, Homo sapiens
  Payload ID: 19185
  Gene Name: Vac14 homolog (S. cerevisiae)
  ENSP ID: ENSP00000463485
  MOD_RES (1)..(1): Any amino acid
XAEVDKLVQLIECPIFT

SEQ ID NO: 96097 - protein, 185 aa, Homo sapiens
  Payload ID: 19185
  Gene Name: Vac14 homolog (S. cerevisiae)
  ENSP ID: ENSP00000477536
  MOD_RES (1)..(1): Any amino acid
XPRKMFRHTDSLFPILLQTLSDESDEVILKDLEVLAEIASSPAGQTDDPGPLDGPDLQASHSELQVPTPGRAGLLNTSGTKGLECSPSTPTMNSYFYKFMINLLKRFSSERKLLEVRGPFIIRSALAARFLLFLPRPRLFTFTPFKCQSSHLLFPFSLLLFLTFGSVRNEEGCPFILVADASDMK

SEQ ID NO: 96098 - protein, 396 aa, Homo sapiens
  Payload ID: 19186
  Gene Name: vaccinia related kinase 1
  Uniprot ID: Q99986
  ENSP ID: ENSP00000216639
MPRVKAAQAGRQSSAKRHLAEQFAVGEIITDMAKKEWKVGLPIGQGGFGCIYLADMNSSESVGSDAPCVVKVEPSDNGPLFTELKFYQRAAKPEQIQKWIRTRKLKYLGVPKYWGSGLHDKNGKSYRFMIMDRFGSDLQKIYEANAKRFSRKTVLQLSLRILDILEYIHEHEYVHGDIKASNLLLNYKNPDQVYLVDYGLAYRYCPEGVHKEYKEDPKRCHDGTIEFTSIDAHNGVAPSRRGDLEILGYCMIQWLTGHLPWEDNLKDPKYVRDSKIRYRENIASLMDKCFPEKNKPGEIAKYMETVKLLDYTEKPLYENLRDILLQGLKAIGSKDDGKLDLSVVENGGLKAKTITKKRKKEIEESKEPGVEDTEWSNTQTEEAIQTRSRTRKRVQK

SEQ ID NO: 96099 - protein, 232 aa, Homo sapiens
  Payload ID: 19186
  Gene Name: vaccinia related kinase 1
  ENSP ID: ENSP00000450820
  MOD_RES (1)..(1): Any amino acid
XNAKRFSRKTVLQLSLRILDILEYIHEHEYVHGDIKASNLLLNYKNPDQVYLVDYGLAYRYCPEGVHKEYKEDPKRCHDGTIEFTSIDAHNGVAPSRRGDLEILGYCMIQWLTGHLPWEDNLKDPKYVRDSKIRYRENIASLMDKCFPEKNKPGEIAKYMETVKLLDYTEKPLYENLRDILLQGLKAIGSKDDGKLDLSVVENGGLKAKTITKVGLMRDVESSSRGCLVIME

SEQ ID NO: 96100 - protein, 65 aa, Homo sapiens
  Payload ID: 19186
  Gene Name: vaccinia related kinase 1
  ENSP ID: ENSP00000451412
  MOD_RES (1)..(1): Any amino acid
XKRKKEIEESKEPGVEDTEWSNTQTEEAIQTRSEESQGAIHRSMSQPEASSSSYDSSRTRKRVQK

SEQ ID NO: 96101 - protein, 176 aa, Homo sapiens
  Payload ID: 19186
  Gene Name: vaccinia related kinase 1
  ENSP ID: ENSP00000451682
  MOD_RES (1)..(1): Any amino acid
XCHDGTIEFTSIDAHNGVAPSRRGDLEILGYCMIQWLTGHLPWEDNLKDPKYVRDSKIRYRENIASLMDKCFPEKNKPGEIAKYMETVKLLDYTEKPLYENLRDILLQGLKAIGSKDDGKLDLSVVENGGLKAKTITKVNFVIKLFFGLLVFIIAINTKRKYSSSSMKNNNRLHGN

SEQ ID NO: 96102 - protein, 508 aa, Homo sapiens
  Payload ID: 19187
  Gene Name: vaccinia related kinase 2
  Uniprot ID: Q86Y07
  ENSP ID: ENSP00000342381
MPPKRNEKYKLPIPFPEGKVLDDMEGNQWVLGKKIGSGGFGLIYLAFPTNKPEKDARHVVKVEYQENGPLFSELKFYQRVAKKDCIKKWIERKQLDYLGIPLFYGSGLTEFKGRSYRFMVMERLGIDLQKISGQNGTFKKSTVLQLGIRMLDVLEYIHENEYVHGDIKAANLLLGYKNPDQVYLADYGLSYRYCPNGNHKQYQENPRKGHNGTIEFTSLDAHKGVALSRRSDVEILGYCMLRWLCGKLPWEQNLKDPVAVQTAKTNLLDELPQSVLKWAPSGSSCCEIAQFLVCAHSLAYDEKPNYQALKKILNPHGIPLGPLDFSTKGQSINVHTPNSQKVDSQKAATKQVNKAHNRLIEKKVHSERSAESCATWKVQKEEKLIGLMNNEAAQESTRRRQKYQESQEPLNEVNSFPQKISYTQFPNSFYEPHQDFTSPDIFKKSRSPSWYKYTSTVSTGITDLESSTGLWPTISQFTLSEETNADVYYYRIIIPVLLMLVFLALFFL

SEQ ID NO: 96103 - protein, 485 aa, Homo sapiens
  Payload ID: 19187
  Gene Name: vaccinia related kinase 2
  Uniprot ID: Q86Y07
  ENSP ID: ENSP00000398323
MEGNQWVLGKKIGSGGFGLIYLAFPTNKPEKDARHVVKVEYQENGPLFSELKFYQRVAKKDCIKKWIERKQLDYLGIPLFYGSGLTEFKGRSYRFMVMERLGIDLQKISGQNGTFKKSTVLQLGIRMLDVLEYIHENEYVHGDIKAANLLLGYKNPDQVYLADYGLSYRYCPNGNHKQYQENPRKGHNGTIEFTSLDAHKGVALSRRSDVEILGYCMLRWLCGKLPWEQNLKDPVAVQTAKTNLLDELPQSVLKWAPSGSSCCEIAQFLVCAHSLAYDEKPNYQALKKILNPHGIPLGPLDFSTKGQSINVHTPNSQKVDSQKAATKQVNKAHNRLIEKKVHSERSAESCATWKVQKEEKLIGLMNNEAAQESTRRRQKYQESQEPLNEVNSFPQKISYTQFPNSFYEPHQDFTSPDIFKKSRSPSWYKYTSTVSTGITDLESSTGLWPTISQFTLSEETNADVYYYRIIIPVLLMLVFLALFFL

SEQ ID NO: 96104 - protein, 59 aa, Homo sapiens
  Payload ID: 19187
  Gene Name: vaccinia related kinase 2
  ENSP ID: ENSP00000400006
MPPKRNEKYKLPIPFPEGKVLDDMEGNQWVLGKKIGSGGFGLIYLETLAIFLSPMLSVE

SEQ ID NO: 96105 - protein, 396 aa, Homo sapiens
  Payload ID: 19187
  Gene Name: vaccinia related kinase 2
  Uniprot ID: Q86Y07
  ENSP ID: ENSP00000402375
MPPKRNEKYKLPIPFPEGKVLDDMEGNQWVLGKKIGSGGFGLIYLAFPTNKPEKDARHVVKVEYQENGPLFSELKFYQRVAKKDCIKKWIERKQLDYLGIPLFYGSGLTEFKGRSYRFMVMERLGIDLQKISGQNGTFKKSTVLQLGIRMLDVLEYIHENEYVHGDIKAANLLLGYKNPDQVYLADYGLSYRYCPNGNHKQYQENPRKGHNGTIEFTSLDAHKGVALSRRSDVEILGYCMLRWLCGKLPWEQNLKDPVAVQTAKTNLLDELPQSVLKWAPSGSSCCEIAQFLVCAHSLAYDEKPNYQALKKILNPHGIPLGPLDFSTKGQSINVHTPNSQKVDSQKAATKQVNKAHNRLIEKKVHSERSAESCATWKVQKEEKLIGLMNNEAAQFR

SEQ ID NO: 96106 - protein, 390 aa, Homo sapiens
  Payload ID: 19187
  Gene Name: vaccinia related kinase 2
  Uniprot ID: Q86Y07
  ENSP ID: ENSP00000404156
MVMERLGIDLQKISGQNGTFKKSTVLQLGIRMLDVLEYIHENEYVHGDIKAANLLLGYKNPDQVYLADYGLSYRYCPNGNHKQYQENPRKGHNGTIEFTSLDAHKGVALSRRSDVEILGYCMLRWLCGKLPWEQNLKDPVAVQTAKTNLLDELPQSVLKWAPSGSSCCEIAQFLVCAHSLAYDEKPNYQALKKILNPHGIPLGPLDFSTKGQSINVHTPNSQKVDSQKAATKQVNKAHNRLIEKKVHSERSAESCATWKVQKEEKLIGLMNNEAAQESTRRRQKYQESQEPLNEVNSFPQKISYTQFPNSFYEPHQDFTSPDIFKKSRSPSWYKYTSTVSTGITDLESSTGLWPTISQFTLSEETNADVYYYRIIIPVLLMLVFLALFFL

SEQ ID NO: 96107 - protein, 82 aa, Homo sapiens
  Payload ID: 19187
  Gene Name: vaccinia related kinase 2
  ENSP ID: ENSP00000404961
MKFEVMPPKRNEKYKLPIPFPEGKVLDDMEGNQWVLGKKIGSGGFGLIYLAFPTNKPEKDARHVVKVEYQENGPLFSELKFY

SEQ ID NO: 96108 - protein, 508 aa, Homo sapiens; identical to SEQ ID NO: 96102
  Payload ID: 19187
  Gene Name: vaccinia related kinase 2
  Uniprot ID: Q86Y07
  ENSP ID: ENSP00000408002

SEQ ID NO: 96109 - protein, 474 aa, Homo sapiens
  Payload ID: 19188
  Gene Name: vaccinia related kinase 3
  Uniprot ID: Q8IV63
  ENSP ID: ENSP00000324636
MISFCPDCGKSIQAAFKFCPYCGNSLPVEEHVGSQTFVNPHVSSFQGSKRGLNSSFETSPKKVKWSSTVTSPRLSLFSDGDSSESEDTLSSSERSKGSGSRPPTPKSSPQKTRKSPQVTRGSPQKTSCSPQKTRQSPQTLKRSRVTTSLEALPTGTVLTDKSGRQWKLKSFQTRDNQGILYEAAPTSTLTCDSGPQKQKFSLKLDAKDGRLFNEQNFFQRAAKPLQVNKWKKLYSTPLLAIPTCMGFGVHQDKYRFLVLPSLGRSLQSALDVSPKHVLSERSVLQVACRLLDALEFLHENEYVHGNVTAENIFVDPEDQSQVTLAGYGFAFRYCPSGKHVAYVEGSRSPHEGDLEFISMDLHKGCGPSRRSDLQSLGYCMLKWLYGFLPWTNCLPNTEDIMKQKQKFVDKPGPFVGPCGHWIRPSETLQKYLKVVMALTYEEKPPYAMLRNNLEALLQDLRVSPYDPIGLPMVP

SEQ ID NO: 96110 - protein, 424 aa, Homo sapiens
  Payload ID: 19188
  Gene Name: vaccinia related kinase 3
  Uniprot ID: Q8IV63
  ENSP ID: ENSP00000366210
MISFCPDCGKSIQAAFKFCPYCGNSLPVEEHVGSQTFVNPHVSSFQGSGSRPPTPKSSPQKTRKSPQVTRGSPQKTSCSPQKTRQSPQTLKRSRVTTSLEALPTGTVLTDKSGRQWKLKSFQTRDNQGILYEAAPTSTLTCDSGPQKQKFSLKLDAKDGRLFNEQNFFQRAAKPLQVNKWKKLYSTPLLAIPTCMGFGVHQDKYRFLVLPSLGRSLQSALDVSPKHVLSERSVLQVACRLLDALEFLHENEYVHGNVTAENIFVDPEDQSQVTLAGYGFAFRYCPSGKHVAYVEGSRSPHEGDLEFISMDLHKGCGPSRRSDLQSLGYCMLKWLYGFLPWTNCLPNTEDIMKQKQKFVDKPGPFVGPCGHWIRPSETLQKYLKVVMALTYEEKPPYAMLRNNLEALLQDLRVSPYDPIGLPMVP

SEQ ID NO: 96111 - protein, 177 aa, Homo sapiens
  Payload ID: 19188
  Gene Name: vaccinia related kinase 3
  ENSP ID: ENSP00000468979
MISFCPDCGKSIQAAFKFCPYCGNSLPVEEHVGSQTFVNPHVSSFQGSGSRPPTPKSSPQKTRKSPQVTRGSPQKTSCSPQKTRQSPQTLKRSRVTTSLEALPTGTVLTDKSGRQWKLKSFQTRDNQGILYEAAPTSTLTCDSGPQKQKFSLKLSTSGRSCTRPHCWPSLPAWVSVF

SEQ ID NO: 96112 - protein, 169 aa, Homo sapiens
  Payload ID: 19188
  Gene Name: vaccinia related kinase 3
  ENSP ID: ENSP00000469092
MISFCPDCGKSIQAAFKFCPYCGNSLPVEEHVGSQTFVNPHVSSFQGSKRGLNSSFETSPKKVKWSSTVTSPRLSLFSDGDSSESEDTLSSSERSKGSGSRPPTPKSSPQKTRKSPQVTRGSPQKTSCSPQKTRQSPQTLKRSRVTTSLEALPTGTVLTDKSGRQWKLK

SEQ ID NO: 96113 - protein, 72 aa, Homo sapiens
  Payload ID: 19188
  Gene Name: vaccinia related kinase 3
  ENSP ID: ENSP00000469325
MISFCPDCGKSIQAAFKFCPYCGNSLPVEEHVGSQTFVNPHVSSFQASLDSPAWRRYMCSLPAWHLQAQREG

SEQ ID NO: 96114 - protein, 150 aa, Homo sapiens
  Payload ID: 19188
  Gene Name: vaccinia related kinase 3
  ENSP ID: ENSP00000469400
MISFCPDCGKSIQAAFKFCPYCGNSLPVEEHVGSQTFVNPHVSSFQDGDSSESEDTLSSSERSKGSGSRPPTPKSSPQKTRKSPQVTRGSPQKTSCSPQKTRQSPQTLKRSRVTTSLEALPTGTVLTDKSGRQWKLKSFQTRDNQGILYE

SEQ ID NO: 96115 - protein, 406 aa, Homo sapiens
  Payload ID: 19188
  Gene Name: vaccinia related kinase 3
  ENSP ID: ENSP00000469710
MISFCPDCGKSIQAAFKFCPYCGNSLPVEEHVGSQTFVNPHVSSFQGSKRGLNSSFETSPKKVKWSSTVTSPRLSLFSDGDSSESEDTLSSSERSKGSGSRPPTPKSSPQKTRKSPQVTRGSPQKTSCSPQKTRQSPQTLKRSRVTTSLEALPTGTVLTDKSGRQWKLKSFQTRDNQGILYEAAPTSTLTCDSGPQKQKFSLKLDAKDGRLFNEQNFFQRAAKPLQVNKWKKLYSTPLLAIPTCMGFGVHQDKYRFLVLPSLGRSLQSALDVSPKHVLSERSVLQVACRLLDALEFLHENEYVHGNVTAENIFVDPEDQSQVTLAGYGFAFRYCPSGKHVAYVEGSRSPHEGDLEFISMDLHKGCGPSRRSDLQSLGYCMLKWLYGFLPWTNCLPNTEDIMKQKQK

SEQ ID NO: 96116 - protein, 247 aa, Homo sapiens
  Payload ID: 19188
  Gene Name: vaccinia related kinase 3
  ENSP ID: ENSP00000469802
MISFCPDCGKSIQAAFKFCPYCGNSLPVEEHVGSQTFVNPHVSSFQGSKRGLNSSFETSPKKVKWSSTVTSPRLSLFSDGDSSESEDTLSSSERSKGSGSRPPTPKSSPQKTRKSPQVTRGSPQKTSCSPQKTRQSPQTLKRSRVTTSLEALPTGTVLTDKSGRQWKLKSFQTRDNQGILYEAAPTSTLTCDSGPQKQKFSLKLVLGVTQPGEEPSVGPGCQPKACAVREVCAAGGLPAAGCPGVPP

SEQ ID NO: 96117 - protein, 474 aa, Homo sapiens; identical to SEQ ID NO: 96109
  Payload ID: 19188
  Gene Name: vaccinia related kinase 3
  Uniprot ID: Q8IV63
  ENSP ID: ENSP00000469880

SEQ ID NO: 96118 - protein, 424 aa, Homo sapiens; identical to SEQ ID NO: 96110
  Payload ID: 19188
  Gene Name: vaccinia related kinase 3
  Uniprot ID: Q8IV63
  ENSP ID: ENSP00000470156

SEQ ID NO: 96119 - protein, 112 aa, Homo sapiens
  Payload ID: 19188
  Gene Name: vaccinia related kinase 3
  ENSP ID: ENSP00000470359
MISFCPDCGKSIQAAFKFCPYCGNSLPVEEHVGSQTFVNPHVSSFQGSKRGLNSSFETSPKKVKWSSTVTSPRLSLFSDGDSSESEDTLSSSERSKGSGSRPPTPKSSPQKT

SEQ ID NO: 96120 - protein, 182 aa, Homo sapiens
  Payload ID: 19188
  Gene Name: vaccinia related kinase 3
  ENSP ID: ENSP00000470940
MISFCPDCGKSIQAAFKFCPYCGNSLPVEEHVGSQTFVNPHVSSFQGSKRGLNSSFETSPKKVKWSSTVTSPRLSLFSDGDSSESEDTLSSSERSKGSGSRPPTPKSSPQKTRKSPQVTRGSPQKTSCSPQKTRQSPQTLKRSRVTTSLEALPTGTVLTDKSGRQWKLKSFQTRDNQGILYE

SEQ ID NO: 96121 - protein, 362 aa, Homo sapiens
  Payload ID: 19188
  Gene Name: vaccinia related kinase 3
  ENSP ID: ENSP00000471061
MISFCPDCGKSIQAAFKFCPYCGNSLPVEEHVGSQTFVNPHVSSFQGSGSRPPTPKSSPQKTRKSPQVTRGSPQKTSCSPQKTRQSPQTLKRSRVTTSLEALPTGTVLTDKSGRQWKLKSFQTRDNQGILYEAAPTSTLTCDSGPQKQKFSLKLDAKDGRLFNEQNFFQRAAKPLQVNKWKKLYSTPLLAIPTCMGFGVHQDKYRFLVLPSLGRSLQSALDVSPKHVLSERSVLQVACRLLDALEFLHENEYVHGNVTAENIFVDPEDQSQVTLAGYGFAFRYCPSGKHVAYVEGSRSPHEGDLEFISMDLHKGCGPSRRSDLQSLGYCMLKWLYGFLPWTNCLPNTEDIMKQKQKLPWDSF

SEQ ID NO: 96122 - protein, 72 aa, Homo sapiens; identical to SEQ ID NO: 96113
  Payload ID: 19188
  Gene Name: vaccinia related kinase 3
  ENSP ID: ENSP00000471661

SEQ ID NO: 96123 - protein, 197 aa, Homo sapiens
  Payload ID: 19188
  Gene Name: vaccinia related kinase 3
  ENSP ID: ENSP00000472217
MISFCPDCGKSIQAAFKFCPYCGNSLPVEEHVGSQTFVNPHVSSFQGSGSRPPTPKSSPQKTRKSPQVTRGSPQKTSCSPQKTRQSPQTLKRSRVTTSLEALPTGTVLTDKSGRQWKLKSFQTRDNQGILYEAAPTSTLTCDSGPQKQKFSLKLVLGVTQPGEEPSVGPGCQPKACAVREVCAAGGLPAAGCPGVPP

SEQ ID NO: 96124 - protein, 412 aa, Homo sapiens
  Payload ID: 19188
  Gene Name: vaccinia related kinase 3
  Uniprot ID: Q8IV63
  ENSP ID: ENSP00000472541
MISFCPDCGKSIQAAFKFCPYCGNSLPVEEHVGSQTFVNPHVSSFQGSKRGLNSSFETSPKKVKWSSTVTSPRLSLFSDGDSSESEDTLSSSERSKGSGSRPPTPKSSPQKTRKSPQVTRGSPQKTSCSPQKTRQSPQTLKRSRVTTSLEALPTGTVLTDKSGRQWKLKSFQTRDNQGILYEAAPTSTLTCDSGPQKQKFSLKLDAKDGRLFNEQNFFQRAAKPLQVNKWKKLYSTPLLAIPTCMGFGVHQDKYRFLVLPSLGRSLQSALDVSPKHVLSERSVLQVACRLLDALEFLHENEYVHGNVTAENIFVDPEDQSQVTLAGYGFAFRYCPSGKHVAYVEGSRSPHEGDLEFISMDLHKGCGPSRRSDLQSLGYCMLKWLYGFLPWTNCLPNTEDIMKQKQKLPWDSF

SEQ ID NO: 96125 - protein, 474 aa, Homo sapiens; identical to SEQ ID NO: 96109
  Payload ID: 19188
  Gene Name: vaccinia related kinase 3
  Uniprot ID: Q8IV63
  ENSP ID: ENSP00000473171

SEQ ID NO: 96126 - protein, 117 aa, Homo sapiens
  Payload ID: 19188
  Gene Name: vaccinia related kinase 3
  ENSP ID: ENSP00000473222
GNVTAENIFVDPEDQSQVTLAGYGFAFRYCPSGKHVAYVEGSRSPHEGDLEFISMDLHKGCGPSRRSDLQSLGYCMLKWLYGFLPWTNCLPNTEDIMKQKQKCICTLKIACWPWCCV

SEQ ID NO: 96127 - protein, 484 aa, Homo sapiens
  Payload ID: 19189
  Gene Name: vacuolar protein sorting 11 homolog (S. cerevisiae)
  Uniprot ID: Q9H270
  ENSP ID: ENSP00000479680
MKRYGKILMHHIPEQTTQLLKGLCTDYRPSLEGRSDREAPGCRANSEEFIPIFANNPRELKAFLEHMSEVQPDSPQGIYDTLLELRLQNWAHEKDPQVKEKLHAEAISLLKSGRFCDVFDKALVLCQMHDFQDGVLYLYEQGKLFQQIMHYHMQHEQYRQVISVCERHGEQDPSLWEQALSYFARKEEDCKEYVAAVLKHIENKNLMPPLLVVQTLAHNSTATLSVIRDYLVQKLQKQSQQIAQDELRVRRYREETTRIRQEIQELKASPKIFQKTKCSICNSALELPSVHFLCGHSFHQHCFESYSESDADCPTCLPENRKVMDMIRAQEQKRDLHDQFQHQLKCSNDSFSVIADYFGRGVFNKLTLLTDPPTARLTSAWRLGCNATYSCTPGGALKQPGGRCGQQWRTKRTDTMGPGRALHRRLADMPRAPLSSNVTALRTKADFLSLPSYLVSLPSLLFTSSVDHSRSVGEGTSATSECGQ

SEQ ID NO: 96128 - protein, 941 aa, Homo sapiens
  Payload ID: 19189
  Gene Name: vacuolar protein sorting 11 homolog (S. cerevisiae)
  ENSP ID: ENSP00000481126
MAAYLQWRRFVFFDKELVKEPLSNDGAAPGATPASGSAASKFLCLPPGITVCDSGRGSLVFGDMEGQIWFLPRSLQLTGFQAYKLRVTHLYQLKQHNILASVGEDEEGINPLVKIWNLEKRDGGNPLCTRIFPAIPGTEPTVVSCLTVHENLNFMAIGFTDGSVTLNKGDITRDRHSKTQILHKGNYPVTGLAFRQAGKTTHLFVVTTENVQSYIVSGKDYPRVELDTHGCGLRCSALSDPSQDLQFIVAGDECVYLYQPDERGPCFAFEGHKLIAHWFRGYLIIVSRDRKVSPKSEFTSRDSQSSDKQILNIYDLCNKFIAYSTVFEDVVDVLAEWGSLYVLTRDGRVHALQEKDTQTKLEMLFKKNLFEMAINLAKSQHLDSDGLAQIFMQYGDHLYSKGNHDGAVQQYIRTIGKLEPSYVIRKFLDAQRIHNLTAYLQTLHRQSLANADHTTLLLNCYTKLKDSSKLEEFIKKKSESEVHFDVETAIKVLRQAGYYSHALYLAENHAHHEWYLKIQLEDIKNYQEALRYIGKLPFEQAESNMKRYGKILMHHIPEQTTQLLKGLCTDYRPSLEGRSDREAPGCRANSEEFIPIFANNPRELKAFLEHMSEVQPDSPQGIYDTLLELRLQNWAHEKDPQVKEKLHAEAISLLKSGRFCDVFDKALVLCQMHDFQDGVLYLYEQGKLFQQIMHYHMQHEQYRQVISVCERHGEQDPSLWEQALSYFARKEEDCKEYVAAVLKHIENKNLMPPLLVVQTLAHNSTATLSVIRDYLVQKLQKQSQQIAQDELRVRRYREETTRIRQEIQELKASPKIFQKTKCSICNSALELPSVHFLCGHSFHQHCFESYSESDADCPTCLPENRKVMDMIRAQEQKRDLHDQFQHQLKCSNDSFSVIADYFGRGVFNKLTLLTDPPTARLTSSLEAGLQRDLLMHSRRGT

SEQ ID NO: 96129 - protein, 931 aa, Homo sapiens
  Payload ID: 19189
  Gene Name: vacuolar protein sorting 11 homolog (S. cerevisiae)
  ENSP ID: ENSP00000481807
MKSVCRRGPCRAPLWFSWSSRVVLWSTGRKKEVHLLTCYQLSNPGRLLDYPAHMEGQIWFLPRSLQLTGFQAYKLRVTHLYQLKQHNILASVGEDEEGINPLVKIWNLEKRDGGNPLCTRIFPAIPGTEPTVVSCLTVHENLNFMAIGFTDGSVTLNKGDITRDRHSKTQILHKGNYPVTGLAFRQAGKTTHLFVVTTENVQSYIVSGKDYPRVELDTHGCGLRCSALSDPSQDLQFIVAGDECVYLYQPDERGPCFAFEGHKLIAHWFRGYLIIVSRDRKVSPKSEFTSRDSQSSDKQILNIYDLCNKFIAYSTVFEDVVDVLAEWGSLYVLTRDGRVHALQEKDTQTKLEMLFKKNLFEMAINLAKSQHLDSDGLAQIFMQYGDHLYSKGNHDGAVQQYIRTIGKLEPSYVIRKFLDAQRIHNLTAYLQTLHRQSLANADHTTLLLNCYTKLKDSSKLEEFIKKKSESEVHFDVETAIKVLRQAGYYSHALYLAENHAHHEWYLKIQLEDIKNYQEALRYIGKLPFEQAESNMKRYGKILMHHIPEQTTQLLKGLCTDYRPSLEGRSDREAPGCRANSEEFIPIFANNPRELKAFLEHMSEVQPDSPQGIYDTLLELRLQNWAHEKDPQVKEKLHAEAISLLKSGRFCDVFDKALVLCQMHDFQDGVLYLYEQGKLFQQIMHYHMQHEQYRQVISVCERHGEQDPSLWEQALSYFARKEEDCKEYVAAVLKHIENKNLMPPLLVVQTLAHNSTATLSVIRDYLVQKLQKQSQQIAQDELRVRRYREETTRIRQEIQELKASPKIFQKTKCSICNSALELPSVHFLCGHSFHQHCFESYSESDADCPTCLPENRKVMDMIRAQEQKRDLHDQFQHQLKCSNDSFSVIADYFGRGVFNKLTLLTDPPTARLTSSLEAGLQRDLLMHSRRGT

SEQ ID NO: 96130 - protein, 181 aa, Homo sapiens
  Payload ID: 19189
  Gene Name: vacuolar protein sorting 11 homolog (S. cerevisiae)
  ENSP ID: ENSP00000485025
  MOD_RES (1)..(1): Any amino acid
XEMAINLAKSQHLDSDGLAQIFMQYGDHLYSKGNHDGAVQQYIRSASDSCVHELEKYTDSDAIGCTCLPRTIGKLEPSYVIRKFLDAQRIHNLTAYLQTLHRQSLANADHTTLLLNCYTKLKDSSKLEEFIKKKSESEVHFDVETAIKVLRQAGYYSHALYLAENHAHHEWYLKIQLEDIK

SEQ ID NO: 96131 - protein, 3095 aa, Homo sapiens
  Payload ID: 19190
  Gene Name: vacuolar protein sorting 13 homolog A (S. cerevisiae)
  Uniprot ID: Q96RL7
  ENSP ID: ENSP00000349985
MVFESVVVDVLNRFLGDYVVDLDTSQLSLGIWKGAVALKNLQIKENALSQLDVPFKVKVGHIGNLKLIIPWKNLYTQPVEAVLEEIYLLIVPSSRIKYDPLKEEKQLMEAKQQELKRIEEAKQKVVDQEQHLPEKQDTFAEKLVTQIIKNLQVKISSIHIRYEDDITNRDKPLSFGISLQNLSMQTTDQYWVPCLHDETEKLVRKLIRLDNLFAYWNVKSQMFYLSDYDNSLDDLKNGIVNENIVPEGYDFVFRPISANAKLVMNRRSDFDFSAPKINLEIELHNIAIEFNKPQYFSIMELLESVDMMAQNLPYRKFKPDVPLHHHAREWWAYAIHGVLEVNVCPRLWMWSWKHIRKHRQKVKQYKELYKKKLTSKKPPGELLVSLEELEKTLDVFNITIARQTAEVEVKKAGYKIYKEGVKDPEDNKGWFSWLWSWSEQNTNEQQPDVQPETLEEMLTPEEKALLYEAIGYSETAVDPTLLKTFEALKFFVHLKSMSIVLRENHQKPELVDIVIEEFSTLIVQRPGAQAIKFETKIDSFHITGLPDNSEKPRLLSSLDDAMSLFQITFEINPLDETVSQRCIIEAEPLEIIYDARTVNSIVEFFRPPKEVHLAQLTAATLTKLEEFRSKTATGLLYIIETQKVLDLKINLKASYIIVPQDGIFSPTSNLLLLDLGHLKVTSKSRSELPDVKQGEANLKEIMDRAYDSFDIQLTSVQLLYSRVGDNWREARKLSVSTQHILVPMHFNLELSKAMVFMDVRMPKFKIYGKLPLISLRISDKKLQGIMELIESIPKPEPVTEVSAPVKSFQIQTSTSLGTSQISQKIIPLLELPSVSEDDSEEEFFDAPCSPLEEPLQFPTGVKSIRTRKLQKQDCSVNMTTFKIRFEVPKVLIEFYHLVGDCELSVVEILVLGLGAEIEIRTYDLKANAFLKEFCLKCPEYLDENKKPVYLVTTLDNTMEDLLTLEYVKAEKNVPDLKSTYNNVLQLIKVNFSSLDIHLHTEALLNTINYLHNILPQSEEKSAPVSTTETEDKGDVIKKLALKLSTNEDIITLQILAELSCLQIFIQDQKCNISEIKIEGLDSEMIMRPSETEINAKLRNIIVLDSDITAIYKKAVYITGKEVFSFKMVSYMDATAGSAYTDMNVVDIQVNLIVGCIEVVFVTKFLYSILAFIDNFQAAKQALAEATVQAAGMAATGVKELAQRSSRMALDINIKAPVVVIPQSPVSENVFVADFGLITMTNTFHMITESQSSPPPVIDLITIKLSEMRLYRSRFINDAYQEVLDLLLPLNLEVVVERNLCWEWYQEVPCFNVNAQLKPMEFILSQEDITTIFKTLHGNIWYEKDGSASPAVTKDQYSATSGVTTNASHHSGGATVVTAAVVEVHSRALLVKTTLNISFKTDDLTMVLYSPGPKQASFTDVRDPSLKLAEFKLENIISTLKMYTDGSTFSSFSLKNCILDDKRPHVKKATPRMIGLTVGFDKKDMMDIKYRKVRDGCVTDAVFQEMYICASVEFLQTVANVFLEAYTTGTAVETSVQTWTAKEEVPTQESVKWEINVIIKNPEIVFVADMTKNDAPALVITTQCEICYKGNLENSTMTAAIKDLQVRACPFLPVKRKGKITTVLQPCDLFYQTTQKGTDPQVIDMSVKSLTLKVSPVIINTMITITSALYTTKETIPEETASSTAHLWEKKDTKTLKMWFLEESNETEKIAPTTELVPKGEMIKMNIDSIFIVLEAGIGHRTVPMLLAKSRFSGEGKNWSSLINLHCQLELEVHYYNEMFGVWEPLLEPLEIDQTEDFRPWNLGIKMKKKAKMAIVESDPEEENYKVPEYKTVISFHSKDQLNITLSKCGLVMLNNLVKAFTEAATGSSADFVKDLAPFMILNSLGLTISVSPSDSFSVLNIPMAKSYVLKNGESLSMDYIRTKDNDHFNAMTSLSSKLFFILLTPVNHSTADKIPLTKVGRRLYTVRHRESGVERSIVCQIDTVEGSKKVTIRSPVQIRNHFSVPLSVYEGDTLLGTASPENEFNIPLGSYRSFIFLKPEDENYQMCEGIDFEEIIKNDGALLKKKCRSKNPSKESFLINIVPEKDNLTSLSVYSEDGWDLPYIMHLWPPILLRNLLPYKIAYYIEGIENSVFTLSEGHSAQICTAQLGKARLHLKLLDYLNHDWKSEYHIKPNQQDISFVSFTCVTEMEKTDLDIAVHMTYNTGQTVVAFHSPYWMVNKTGRMLQYKADGIHRKHPPNYKKPVLFSFQPNHFFNNNKVQLMVTDSELSNQFSIDTVGSHGAVKCKGLKMDYQVGVTIDLSSFNITRIVTFTPFYMIKNKSKYHISVAEEGNDKWLSLDLEQCIPFWPEYASSKLLIQVERSEDPPKRIYFNKQENCILLRLDNELGGIIAEVNLAEHSTVITFLDYHDGAATFLLINHTKNELVQYNQSSLSEIEDSLPPGKAVFYTWADPVGSRRLKWRCRKSHGEVTQKDDMMMPIDLGEKTIYLVSFFEGLQRIILFTEDPRVFKVTYESEKAELAEQEIAVALQDVGISLVNNYTKQEVAYIGITSSDVVWETKPKKKARWKPMSVKHTEKLEREFKEYTESSPSEDKVIQLDTNVPVRLTPTGHNMKILQPHVIALRRNYLPALKVEYNTSAHQSSFRIQIYRIQIQNQIHGAVFPFVFYPVKPPKSVTMDSAPKPFTDVSIVMRSAGHSQISRIKYFKVLIQEMDLRLDLGFIYALTDLMTEAEVTENTEVELFHKDIEAFKEEYKTASLVDQSQVSLYEYFHISPIKLHLSVSLSSGREEAKDSKQNGGLIPVHSLNLLLKSIGATLTDVQDVVFKLAFFELNYQFHTTSDLQSEVIRHYSKQAIKQMYVLILGLDVLGNPFGLIREFSEGVEAFFYEPYQGAIQGPEEFVEGMALGLKALVGGAVGGLAGAASKITGAMAKGVAAMTMDEDYQQKRREAMNKQPAGFREGITRGGKGLVSGFVSGITGIVTKPIKGAQKGGAAGFFKGVGKGLVGAVARPTGGIIDMASSTFQGIKRATETSEVESLRPPRFFNEDGVIRPYRLRDGTGNQMLQKIQFYREWIMTHSSSSDDDDDDDDDDESDLNH

SEQ ID NO: 96132 - protein, 3174 aa, Homo sapiens
  Payload ID: 19190
  Gene Name: vacuolar protein sorting 13 homolog A (S. cerevisiae)
  Uniprot ID: Q96RL7
  ENSP ID: ENSP00000353422
MVFESVVVDVLNRFLGDYVVDLDTSQLSLGIWKGAVALKNLQIKENALSQLDVPFKVKVGHIGNLKLIIPWKNLYTQPVEAVLEEIYLLIVPSSRIKYDPLKEEKQLMEAKQQELKRIEEAKQKVVDQEQHLPEKQDTFAEKLVTQIIKNLQVKISSIHIRYEDDITNRDKPLSFGISLQNLSMQTTDQYWVPCLHDETEKLVRKLIRLDNLFAYWNVKSQMFYLSDYDNSLDDLKNGIVNENIVPEGYDFVFRPISANAKLVMNRRSDFDFSAPKINLEIELHNIAIEFNKPQYFSIMELLESVDMMAQNLPYRKFKPDVPLHHHAREWWAYAIHGVLEVNVCPRLWMWSWKHIRKHRQKVKQYKELYKKKLTSKKPPGELLVSLEELEKTLDVFNITIARQTAEVEVKKAGYKIYKEGVKDPEDNKGWFSWLWSWSEQNTNEQQPDVQPETLEEMLTPEEKALLYEAIGYSETAVDPTLLKTFEALKFFVHLKSMSIVLRENHQKPELVDIVIEEFSTLIVQRPGAQAIKFETKIDSFHITGLPDNSEKPRLLSSLDDAMSLFQITFEINPLDETVSQRCIIEAEPLEIIYDARTVNSIVEFFRPPKEVHLAQLTAATLTKLEEFRSKTATGLLYIIETQKVLDLKINLKASYIIVPQDGIFSPTSNLLLLDLGHLKVTSKSRSELPDVKQGEANLKEIMDRAYDSFDIQLTSVQLLYSRVGDNWREARKLSVSTQHILVPMHFNLELSKAMVFMDVRMPKFKIYGKLPLISLRISDKKLQGIMELIESIPKPEPVTEVSAPVKSFQIQTSTSLGTSQISQKIIPLLELPSVSEDDSEEEFFDAPCSPLEEPLQFPTGVKSIRTRKLQKQDCSVNMTTFKIRFEVPKVLIEFYHLVGDCELSVVEILVLGLGAEIEIRTYDLKANAFLKEFCLKCPEYLDENKKPVYLVTTLDNTMEDLLTLEYVKAEKNVPDLKSTYNNVLQLIKVNFSSLDIHLHTEALLNTINYLHNILPQSEEKSAPVSTTETEDKGDVIKKLALKLSTNEDIITLQILAELSCLQIFIQDQKCNISEIKIEGLDSEMIMRPSETEINAKLRNIIVLDSDITAIYKKAVYITGKEVFSFKMVSYMDATAGSAYTDMNVVDIQVNLIVGCIEVVFVTKFLYSILAFIDNFQAAKQALAEATVQAAGMAATGVKELAQRSSRMALDINIKAPVVVIPQSPVSENVFVADFGLITMTNTFHMITESQSSPPPVIDLITIKLSEMRLYRSRFINDAYQEVLDLLLPLNLEVVVERNLCWEWYQEVPCFNVNAQLKPMEFILSQEDITTIFKTLHGNIWYEKDGSASPAVTKDQYSATSGVTTNASHHSGGATVVTAAVVEVHSRALLVKTTLNISFKTDDLTMVLYSPGPKQASFTDVRDPSLKLAEFKLENIISTLKMYTDGSTFSSFSLKNCILDDKRPHVKKATPRMIGLTVGFDKKDMMDIKYRKVRDGCVTDAVFQEMYICASVEFLQTVANVFLEAYTTGTAVETSVQTWTAKEEVPTQESVKWEINVIIKNPEIVFVADMTKNDAPALVITTQCEICYKGNLENSTMTAAIKDLQVRACPFLPVKRKGKITTVLQPCDLFYQTTQKGTDPQVIDMSVKSLTLKVSPVIINTMITITSALYTTKETIPEETASSTAHLWEKKDTKTLKMWFLEESNETEKIAPTTELVPKGEMIKMNIDSIFIVLEAGIGHRTVPMLLAKSRFSGEGKNWSSLINLHCQLELEVHYYNEMFGVWEPLLEPLEIDQTEDFRPWNLGIKMKKKAKMAIVESDPEEENYKVPEYKTVISFHSKDQLNITLSKCGLVMLNNLVKAFTEAATGSSADFVKDLAPFMILNSLGLTISVSPSDSFSVLNIPMAKSYVLKNGESLSMDYIRTKDNDHFNAMTSLSSKLFFILLTPVNHSTADKIPLTKVGRRLYTVRHRESGVERSIVCQIDTVEGSKKVTIRSPVQIRNHFSVPLSVYEGDTLLGTASPENEFNIPLGSYRSFIFLKPEDENYQMCEGIDFEEIIKNDGALLKKKCRSKNPSKESFLINIVPEKDNLTSLSVYSEDGWDLPYIMHLWPPILLRNLLPYKIAYYIEGIENSVFTLSEGHSAQICTAQLGKARLHLKLLDYLNHDWKSEYHIKPNQQDISFVSFTCVTEMEKTDLDIAVHMTYNTGQTVVAFHSPYWMVNKTGRMLQYKADGIHRKHPPNYKKPVLFSFQPNHFFNNNKVQLMVTDSELSNQFSIDTVGSHGAVKCKGLKMDYQVGVTIDLSSFNITRIVTFTPFYMIKNKSKYHISVAEEGNDKWLSLDLEQCIPFWPEYASSKLLIQVERSEDPPKRIYFNKQENCILLRLDNELGGIIAEVNLAEHSTVITFLDYHDGAATFLLINHTKNELVQYNQSSLSEIEDSLPPGKAVFYTWADPVGSRRLKWRCRKSHGEVTQKDDMMMPIDLGEKTIYLVSFFEGLQRIILFTEDPRVFKVTYESEKAELAEQEIAVALQDVGISLVNNYTKQEVAYIGITSSDVVWETKPKKKARWKPMSVKHTEKLEREFKEYTESSPSEDKVIQLDTNVPVRLTPTGHNMKILQPHVIALRRNYLPALKVEYNTSAHQSSFRIQIYRIQIQNQIHGAVFPFVFYPVKPPKSVTMDSAPKPFTDVSIVMRSAGHSQISRIKYFKVLIQEMDLRLDLGFIYALTDLMTEAEVTENTEVELFHKDIEAFKEEYKTASLVDQSQVSLYEYFHISPIKLHLSVSLSSGREEAKDSKQNGGLIPVHSLNLLLKSIGATLTDVQDVVFKLAFFELNYQFHTTSDLQSEVIRHYSKQAIKQMYVLILGLDVLGNPFGLIREFSEGVEAFFYEPYQGAIQGPEEFVEGMALGLKALVGGAVGGLAGAASKITGAMAKGVAAMTMDEDYQQKRREAMNKQPAGFREGITRGGKGLVSGFVSGITGIVTKPIKGAQKGGAAGFFKGVGKGLVGAVARPTGGIIDMASSTFQGIKRATETSEVESLRPPRFFNEDGVIRPYRLRDGTGNQMLQVMENGRFAKYKYFTHVMINKTDMLMITRRGVLFVTKGTFGQLTCEWQYSFDEFTKEPFIVHGRRLRIEAKERVKSVFHAREFGKIINFKTPEDARWILTKLQEAREPSPSL

SEQ ID NO: 96133 - protein, 3069 aa, Homo sapiens
  Payload ID: 19190
  Gene Name: vacuolar protein sorting 13 homolog A (S. cerevisiae)
  Uniprot ID: Q96RL7
  ENSP ID: ENSP00000365821
MVFESVVVDVLNRFLGDYVVDLDTSQLSLGIWKGAVALKNLQIKENALSQLDVPFKVKVGHIGNLKLIIPWKNLYTQPVEAVLEEIYLLIVPSSRIKYDPLKEEKQLMEAKQQELKRIEEAKQKVVDQEQHLPEKQDTFAEKLVTQIIKNLQVKISSIHIRYEDDITNRDKPLSFGISLQNLSMQTTDQYWVPCLHDETEKLVRKLIRLDNLFAYWNVKSQMFYLSDYDNSLDDLKNGIVNENIVPEGYDFVFRPISANAKLVMNRRSDFDFSAPKINLEIELHNIAIEFNKPQYFSIMELLESVDMMAQNLPYRKFKPDVPLHHHAREWWAYAIHGVLEVNVCPRLWMWSWKHIRKHRQKVKQYKELYKKKLTSKKPPGELLVSLEELEKTLDVFNITIARQTAEVEVKKAGYKIYKEGVKDPEDNKGWFSWLWSWSEQNTNEQQPDVQPETLEEMLTPEEKALLYEAIGYSETAVDPTLLKTFEALKFFVHLKSMSIVLRENHQKPELVDIVIEEFSTLIVQRPGAQAIKFETKIDSFHITGLPDNSEKPRLLSSLDDAMSLFQITFEINPLDETVSQRCIIEAEPLEIIYDARTVNSIVEFFRPPKEVHLAQLTAATLTKLEEFRSKTATGLLYIIETQKVLDLKINLKASYIIVPQDGIFSPTSNLLLLDLGHLKVTSKSRSELPDVKQGEANLKEIMDRAYDSFDIQLTSVQLLYSRVGDNWREARKLSVSTQHILVPMHFNLELSKAMVFMDVRMPKFKIYGKLPLISLRISDKKLQGIMELIESIPKPEPVTEVSAPVKSFQIQTSTSLGTSQISQKIIPLLELPSVSEDDSEEEFFDAPCSPLEEPLQFPTGVKSIRTRKLQKQDCSVNMTTFKIRFEVPKVLIEFYHLVGDCELSVVEILVLGLGAEIEIRTYDLKANAFLKEFCLKCPEYLDENKKPVYLVTTLDNTMEDLLTLEYVKAEKNVPDLKSTYNNVLQLIKVNFSSLDIHLHTEALLNTINYLHNILPQSEEKSAPVSTTETEDKGDVIKKLALKLSTNEDIITLQILAELSCLQIFIQDQKCNISEIKIEGLDSEMIMRPSETEINAKLRNIIVLDSDITAIYKKAVYITGKEVFSFKMVSYMDATAGSAYTDMNVVDIQVNLIVGCIEVVFVTKFLYSILAFIDNFQAAKQALAEATVQAAGMAATGVKELAQRSSRMALDINIKAPVVVIPQSPVSENVFVADFGLITMTNTFHMITESQSSPPPVIDLITIKLSEMRLYRSRFINDAYQEVLDLLLPLNLEVVVERNLCWEWYQEVPCFNVNAQLKPMEFILSQEDITTIFKTLHGNIWYEKDGSASPAVTKDQYSATSGVTTNASHHSGGATVVTAAVVEVHSRALLVKTTLNISFKTDDLTMVLYSPGPKQASFTDVRDPSLKLAEFKLENIISTLKMYTDGSTFSSFSLKNCILDDKRPHVKKATPRMIGLTVGFDKKDMMDIKYRKVRDGCVTDAVFQEMYICASVEFLQTVANVFLEAYTTGTAVETSVQTWTAKEEVPTQESVKWEINVIIKNPEIVFVADMTKNDAPALVITTQCEICYKGNLENSTMTAAIKDLQVRACPFLPVKRKGKITTVLQPCDLFYQTTQKGTDPQVIDMSVKSLTLKVSPVIINTMITITSALYTTKETIPEETASSTAHLWEKKDTKTLKMWFLEESNETEKIAPTTELVPKGEMIKMNIDSIFIVLEAGIGHRTVPMLLAKSRFSGEGKNWSSLINLHCQLELEVHYYNEMFGVWEPLLEPLEIDQTEDFRPWNLGIKMKKKAKMAIVESDPEEENYKVPEYKTVISFHSKDQLNITLSKCGLVMLNNLVKAFTEAATGSSADFVKDLAPFMILNSLGLTISVSPSDSFSVLNIPMAKSYVLKNGESLSMDYIRTKDNDHFNAMTSLSSKLFFILLTPVNHSTADKIPLTKVGRRLYTVRHRESGVERSIVCQIDTVEGSKKVTIRSPVQIRNHFSVPLSVYEGDTLLGTASPENEFNIPLGSYRSFIFLKPEDENYQMCEGIDFEEIIKNDGALLKKKCRSKNPSKESFLINIVPEKDNLTSLSVYSEDGWDLPYIMHLWPPILLRNLLPYKIAYYIEGIENSVFTLSEGHSAQICTAQLGKARLHLKLLDYLNHDWKSEYHIKPNQQDISFVSFTCVTEMEKTDLDIAVHMTYNTGQTVVAFHSPYWMVNKTGRMLQYKADGIHRKHPPNYKKPVLFSFQPNHFFNNNKVQLMVTDSELSNQFSIDTVGSHGAVKCKGLKMDYQVGVTIDLSSFNITRIVTFTPFYMIKNKSKYHISVAEEGNDKWLSLDLEQCIPFWPEYASSKLLIQVERSEDPPKRIYFNKQENCILLRLDNELGGIIAEVNLAEHSTVITFLDYHDGAATFLLINHTKNELVQYNQSSLSEIEDSLPPGKAVFYTWADPVGSRRLKWRCRKSHGEVTQKDDMMMPIDLGEKTIYLVSFFEGLQRIILFTEDPRVFKVTYESEKAELAEQEIAVALQDVGISLVNNYTKQEVAYIGITSSDVVWETKPKKKARWKPMSVKHTEKLEREFKEYTESSPSEDKVIQLDTNVPVRLTPTGHNMKILQPHVIALRRNYLPALKVEYNTSAHQSSFRIQIYRIQIQNQIHGAVFPFVFYPVKPPKSVTMDSAPKPFTDVSIVMRSAGHSQISRIKYFKVLIQEMDLRLDLGFIYALTDLMTEAEVTENTEVELFHKDIEAFKEEYKTASLVDQSQVSLYEYFHISPIKLHLSVSLSSGREEAKDSKQNGGLIPVHSLNLLLKSIGATLTDVQDVVFKLAFFELNYQFHTTSDLQSEVIRHYSKQAIKQMYVLILGLDVLGNPFGLIREFSEGVEAFFYEPYQGAIQGPEEFVEGMALGLKALVGGAVGGLAGAASKITGAMAKGVAAMTMDEDYQQKRREAMNKQPAGFREGITRGGKGLVSGFVSGITGIVTKPIKGAQKGGAAGFFKGVGKGLVGAVARPTGGIIDMASSTFQGIKRATETSEVESLRPPRFFNEDGVIRPYRLRDGTGNQMLQASKSLI

SEQ ID NO: 96134 - protein, 3135 aa, Homo sapiens
  Payload ID: 19190
  Gene Name: vacuolar protein sorting 13 homolog A (S. cerevisiae)
  Uniprot ID: Q96RL7
  ENSP ID: ENSP00000365823
MVFESVVVDVLNRFLGDYVVDLDTSQLSLGIWKGAVALKNLQIKENALSQLDVPFKVKVGHIGNLKLIIPWKNLYTQPVEAVLEEIYLLIVPSSRIKYDPLKEEKQLMEAKQQELKRIEEAKQKVVDQEQHLPEKQDTFAEKLVTQIIKNLQVKISSIHIRYEDDITNRDKPLSFGISLQNLSMQTTDQYWVPCLHDETEKLVRKLIRLDNLFAYWNVKSQMFYLSDYDNSLDDLKNGIVNENIVPEGYDFVFRPISANAKLVMNRRSDFDFSAPKINLEIELHNIAIEFNKPQYFSIMELLESVDMMAQNLPYRKFKPDVPLHHHAREWWAYAIHGVLEVNVCPRLWMWSWKHIRKHRQKVKQYKELYKKKLTSKKPPGELLVSLEELEKTLDVFNITIARQTAEVEVKKAGYKIYKEGVKDPEDNKGWFSWLWSWSEQNTNEQQPDVQPETLEEMLTPEEKALLYEAIGYSETAVDPTLLKTFEALKFFVHLKSMSIVLRENHQKPELVDIVIEEFSTLIVQRPGAQAIKFETKIDSFHITGLPDNSEKPRLLSSLDDAMSLFQITFEINPLDETVSQRCIIEAEPLEIIYDARTVNSIVEFFRPPKEVHLAQLTAATLTKLEEFRSKTATGLLYIIETQKVLDLKINLKASYIIVPQDGIFSPTSNLLLLDLGHLKVTSKSRSELPDVKQGEANLKEIMDRAYDSFDIQLTSVQLLYSRVGDNWREARKLSVSTQHILVPMHFNLELSKAMVFMDVRMPKFKIYGKLPLISLRISDKKLQGIMELIESIPKPEPVTEVSAPVKSFQIQTSTSLGTSQISQKIIPLLELPSVSEDDSEEEFFDAPCSPLEEPLQFPTGVKSIRTRKLQKQDCSVNMTTFKIRFEVPKVLIEFYHLVGDCELSVVEILVLGLGAEIEIRTYDLKANAFLKEFCLKCPEYLDENKKPVYLVTTLDNTMEDLLTLEYVKAEKNVPDLKSTYNNVLQLIKVNFSSLDIHLHTEALLNTINYLHNILPQSEEKSAPVSTTETEDKGDVIKKLGLDSEMIMRPSETEINAKLRNIIVLDSDITAIYKKAVYITGKEVFSFKMVSYMDATAGSAYTDMNVVDIQVNLIVGCIEVVFVTKFLYSILAFIDNFQAAKQALAEATVQAAGMAATGVKELAQRSSRMALDINIKAPVVVIPQSPVSENVFVADFGLITMTNTFHMITESQSSPPPVIDLITIKLSEMRLYRSRFINDAYQEVLDLLLPLNLEVVVERNLCWEWYQEVPCFNVNAQLKPMEFILSQEDITTIFKTLHGNIWYEKDGSASPAVTKDQYSATSGVTTNASHHSGGATVVTAAVVEVHSRALLVKTTLNISFKTDDLTMVLYSPGPKQASFTDVRDPSLKLAEFKLENIISTLKMYTDGSTFSSFSLKNCILDDKRPHVKKATPRMIGLTVGFDKKDMMDIKYRKVRDGCVTDAVFQEMYICASVEFLQTVANVFLEAYTTGTAVETSVQTWTAKEEVPTQESVKWEINVIIKNPEIVFVADMTKNDAPALVITTQCEICYKGNLENSTMTAAIKDLQVRACPFLPVKRKGKITTVLQPCDLFYQTTQKGTDPQVIDMSVKSLTLKVSPVIINTMITITSALYTTKETIPEETASSTAHLWEKKDTKTLKMWFLEESNETEKIAPTTELVPKGEMIKMNIDSIFIVLEAGIGHRTVPMLLAKSRFSGEGKNWSSLINLHCQLELEVHYYNEMFGVWEPLLEPLEIDQTEDFRPWNLGIKMKKKAKMAIVESDPEEENYKVPEYKTVISFHSKDQLNITLSKCGLVMLNNLVKAFTEAATGSSADFVKDLAPFMILNSLGLTISVSPSDSFSVLNIPMAKSYVLKNGESLSMDYIRTKDNDHFNAMTSLSSKLFFILLTPVNHSTADKIPLTKVGRRLYTVRHRESGVERSIVCQIDTVEGSKKVTIRSPVQIRNHFSVPLSVYEGDTLLGTASPENEFNIPLGSYRSFIFLKPEDENYQMCEGIDFEEIIKNDGALLKKKCRSKNPSKESFLINIVPEKDNLTSLSVYSEDGWDLPYIMHLWPPILLRNLLPYKIAYYIEGIENSVFTLSEGHSAQICTAQLGKARLHLKLLDYLNHDWKSEYHIKPNQQDISFVSFTCVTEMEKTDLDIAVHMTYNTGQTVVAFHSPYWMVNKTGRMLQYKADGIHRKHPPNYKKPVLFSFQPNHFFNNNKVQLMVTDSELSNQFSIDTVGSHGAVKCKGLKMDYQVGVTIDLSSFNITRIVTFTPFYMIKNKSKYHISVAEEGNDKWLSLDLEQCIPFWPEYASSKLLIQVERSEDPPKRIYFNKQENCILLRLDNELGGIIAEVNLAEHSTVITFLDYHDGAATFLLINHTKNELVQYNQSSLSEIEDSLPPGKAVFYTWADPVGSRRLKWRCRKSHGEVTQKDDMMMPIDLGEKTIYLVSFFEGLQRIILFTEDPRVFKVTYESEKAELAEQEIAVALQDVGISLVNNYTKQEVAYIGITSSDVVWETKPKKKARWKPMSVKHTEKLEREFKEYTESSPSEDKVIQLDTNVPVRLTPTGHNMKILQPHVIALRRNYLPALKVEYNTSAHQSSFRIQIYRIQIQNQIHGAVFPFVFYPVKPPKSVTMDSAPKPFTDVSIVMRSAGHSQISRIKYFKVLIQEMDLRLDLGFIYALTDLMTEAEVTENTEVELFHKDIEAFKEEYKTASLVDQSQVSLYEYFHISPIKLHLSVSLSSGREEAKDSKQNGGLIPVHSLNLLLKSIGATLTDVQDVVFKLAFFELNYQFHTTSDLQSEVIRHYSKQAIKQMYVLILGLDVLGNPFGLIREFSEGVEAFFYEPYQGAIQGPEEFVEGMALGLKALVGGAVGGLAGAASKITGAMAKGVAAMTMDEDYQQKRREAMNKQPAGFREGITRGGKGLVSGFVSGITGIVTKPIKGAQKGGAAGFFKGVGKGLVGAVARPTGGIIDMASSTFQGIKRATETSEVESLRPPRFFNEDGVIRPYRLRDGTGNQMLQVMENGRFAKYKYFTHVMINKTDMLMITRRGVLFVTKGTFGQLTCEWQYSFDEFTKEPFIVHGRRLRIEAKERVKSVFHAREFGKIINFKTPEDARWILTKLQEAREPSPSL

SEQ ID NO: 96135 - protein, 110 aa, Homo sapiens
  Payload ID: 19190
  Gene Name: vacuolar protein sorting 13 homolog A (S. cerevisiae)
  ENSP ID: ENSP00000365834
MENGRFAKYKYFTHVMINKTDMLMITRRGVLFVTKGTFGQLTCEWQYSFDEFTKEPFIVHGRRLRIEAKERVKSVFHAREFGKIINFKTPEDARWILTKLQEAREPSPSL

SEQ ID NO: 96136 - protein, 383 aa, Homo sapiens
  Payload ID: 19190
  Gene Name: vacuolar protein sorting 13 homolog A (S. cerevisiae)
  ENSP ID: ENSP00000414410
  MOD_RES (1)..(1): Any amino acid
XSRFSGEGKNWSSLINLHCQLELEVHYYNEMFGVWEPLLEPLEIDQTEDFRPWNLGIKMKKKAKMAIVESDPEEENYKVPEYKTVISFHSKDQLNITLSKCGLVMLNNLVKAFTEAATGSSADFVKDLAPFMILNSLGLTISVSPSDSFSVLNIPMAKSYVLKNGESLSMDYIRTKDNDHFNAMTSLSSKLFFILLTPVNHSTADKIPLTKVGRRLYTVRHRESGVERSIVCQIDTVEGSKKVTIRSPVQIRNHFSVPLSVYEGDTLLGTASPENEFNIPLGSYRSFIFLKPEDENYQMCEGIDFEEIIKNDGALLKKKCRSKNPSKESFLINIVPEKDNLTSLSVYSEDGWDLPYIMHLWPPILLRNLLPYKIAYYIEVSAN

SEQ ID NO: 96137 - protein, 177 aa, Homo sapiens
  Payload ID: 19190
  Gene Name: vacuolar protein sorting 13 homolog A (S. cerevisiae)
  ENSP ID: ENSP00000437478
LYSILAFIDNFQAAKQALAEATVQAAGMAATGVKELAQRSSRMALDINIKAPVVVIPQSPVSENVFVADFGLITMTNTFHMITESQSSPPPVIDLITIKLSEMRLYRSRFINDAYQEVLDLLLPLNLEVVVERNLCWEWYQEVPCFNVNAQLKPMEVESIQNVLVMLPTICKCPAAF

SEQ ID NO: 96138 - protein, 41 aa, Homo sapiens
  Payload ID: 19190
  Gene Name: vacuolar protein sorting 13 homolog A (S. cerevisiae)
  ENSP ID: ENSP00000441840
  MOD_RES (1)..(1): Any amino acid
XLRIEAKERVKSVFHAREFGKIINFKTPEDARVNIINLLFK

SEQ ID NO: 96139 - protein, 110 aa, Homo sapiens; identical to SEQ ID NO: 96135
  Payload ID: 19190
  Gene Name: vacuolar protein sorting 13 homolog A (S. cerevisiae)
  ENSP ID: ENSP00000446020

SEQ ID NO: 96140 - protein, 863 aa, Homo sapiens
  Payload ID: 19191
  Gene Name: vacuolar protein sorting 13 homolog B (yeast)
  Uniprot ID: Q7Z7G8
  ENSP ID: ENSP00000347281
MLESYVTPILMSYVNRYIKNLKPSDLQLSLWGGDVVLSKLELKLDVLEQELKLPFTFLSGHIHELRIHVPWTKLGSEPVVITINTMECILKLKDGIQDDHESCGSNSTNRSTAESTKSSIKPRRMQQAAPTDPDLPPGYVQSLIRRVVNNVNIVINNLILKYVEDDIVLSVNITSAECYTVGELWDRAFMDISATDLVLRKVINFSDCTVCLDKRNASGKIEFYQDPLLYKCSFRTRLHFTYENLNSKMPSVIKIHTLVESLKLSITDQQLPMFIRIMQLGIALYYGEIGNFKEGEIEDLTCHNKDMLGNITGSEDETRIDMQYPAQHKGQELYSQQDEEQPQGWVSWAWSFVPAIVSYDDGEEDFVGNDPASTMHQQKAQTLKDPIVSIGFYCTKATVTFKLTEMQVESSYYSPQKVKSKEVLCWEQEGTTVEALMMGEPFFDCQIGFVGCRAMCLKGIMGVKDFEENMNRSETEACFFICGDNLSTKGFTYLTNSLFDYRSPENNGTRAEFILDSTHHKETYTEIAGMQRFGAFYMDYLYTMENTSGKGSTNQQDFSSGKSEDLGTVQEKSTKSLVIGPLDFRLDSSAVHRILKMIVCALEHEYEPYSRLKSDIKDENETILNPEEVALLEEYIPTRHTSVTLLKCTCTISMAEFNLLDHLLPVIMGEKNSSNFMNTTNFQSLRPLPSIRILVDKINLEHSVPMYAEQLVHVVSSLTQPSDNLLHYCYVHCYLKIFGFQAGLTSLDCSGSYCLPVPVIPSFSTALYGKLLKLPTCWTKRSQIAITEGIFELPNLTIQATRAQTLLLQAIYQSWSHLGNVSSSAVIEALINEIFLSIEIGSCYVAQVDLELLASNDPPTSTS

SEQ ID NO: 96141 - protein, 3997 aa, Homo sapiens
  Payload ID: 19191
  Gene Name: vacuolar protein sorting 13 homolog B (yeast)
  Uniprot ID: Q7Z7G8
  ENSP ID: ENSP00000349685
MLESYVTPILMSYVNRYIKNLKPSDLQLSLWGGDVVLSKLELKLDVLEQELKLPFTFLSGHIHELRIHVPWTKLGSEPVVITINTMECILKLKDGIQDDHESCGSNSTNRSTAESTKSSIKPRRMQQAAPTDPDLPPGYVQSLIRRVVNNVNIVINNLILKYVEDDIVLSVNITSAECYTVGELWDRAFMDISATDLVLRKVINFSDCTVCLDKRNASGKIEFYQDPLLYKCSFRTRLHFTYENLNSKMPSVIKIHTLVESLKLSITDQQLPMFIRIMQLGIALYYGEIGNFKEGEIEDLTCHNKDMLGNITGSEDETRIDMQYPAQHKGQELYSQQDEEQPQGWVSWAWSFVPAIVSYDDGEEDFVGNDPASTMHQQKAQTLKDPIVSIGFYCTKATVTFKLTEMQVESSYYSPQKVKSKEVLCWEQEGTTVEALMMGEPFFDCQIGFVGCRAMCLKGIMGVKDFEENMNRSETEACFFICGDNLSTKGFTYLTNSLFDYRSPENNGTRAEFILDSTHHKETYTEIAGMQRFGAFYMDYLYTMENTSGKGSTNQQDFSSGKSEDLGTVQEKSTKSLVIGPLDFRLDSSAVHRILKMIVCALEHEYEPYSRLKSDIKDENETILNPEEVALLEEYIPTRHTSVTLLKCTCTISMAEFNLLDHLLPVIMGEKNSSNFMNTTNFQSLRPLPSIRILVDKINLEHSVPMYAEQLVHVVSSLTQPSDNLLHYCYVHCYLKIFGFQAGLTSLDCSGSYCLPVPVIPSFSTALYGKLLKLPTCWTKRSQIAITEGIFELPNLTIQATRAQTLLLQAIYQSWSHLGNVSSSAVIEALINEIFLSIGVKSKNPLPTLEGSIQNVELKYCSTSLVKCASGTMGSIKICAKAPVDSGKEKLIPLLQGPSDTKDLHSTKWLNESRKPESLLAPDLMAFTIQVPQYIDYCHNSGAVLLCSIQGLAVNIDPILYTWLIYQPQKRTSRHMQQQPVVAVPLVMPVCRRKEDEVSIGSAPLAKQQSYQASEYASSPVKTKTVTESRPLSVPVKAMLNISESCRSPEERMKEFIGIVWNAVKHLTLQLEVQSCCVFIPNDSLPSPSTIVSGDIPGTVRSWYHGQTSMPGTLVLCLPQIKIISAGHKYMEPLQEIPFVIPRPILEEGDAFPWTISLHNFSIYTLLGKQVTLCLVEPMGCTSTLAVTSQKLLATGPDTRHSFVVCLHVDLESLEIKCSNPQVQLFYELTDIMNKVWNKIQKRGNLNLSPTSPETMAGPVPTSPVRSSIGTAPPDTSTCSPSADIGTTTEGDSIQAGEESPFSDSVTLEQTTSNIGGTSGRVSLWMQWVLPKITIKLFAPDPENKGTEVCMVSELEDLSASIDVQDVYTKVKCKIESFNIDHYRSRPGEGWQSGHFEGVFLQCKEKSVTTTKLLDGTHQQHGFLSLTYTKAVTKNVRHKLTSRNERRSFHKLSEGLMDGSPHFLHEILLSAQAFDIVLYFPLLNAIASIFQAKLPKTQKEKRKSPGQPMRTHTLTSRNLPLIYVNTSVIRIFIPKTEEMQPTVEANQAAKEDTVVLKIGSVAMAPQADNPLGRSVLRKDIYQRALNLGILRDPGSEIEDRQYQIDLQSINIGTAQWHQLKPEKESVSGGVVTETERNSQNPALEWNMASSIRRHQERRAILTPVLTDFSVRITGAPAVIFTKVVSPENLHTEEILVCGHSLEVNITTNLDFFLSVAQVQLLHQLIVANMTGLEPSNKAAEISKQEQKKVDIFDGGMAETSSRYSGAQDSGIGSDSVKIRIVQIEQHSGASQHRIARPSRQSSIVKNLNFIPFDIFITASRISLMTYSCMALSKSKSQEQKNNEKTDKSSLNLPEVDSDVAKPNQACISTVTAEDLLRSSISFPSGKKIGVLSLESLHASTRSSARQALGITIVRQPGRRGTGDLQLEPFLYFIVSQPSLLLSCHHRKQRVEVSIFDAVLKGVASDYKCIDPGKTLPEALDYCTVWLQTVPGEIDSKSGIPPSFITLQIKDFLNGPADVNLDISKPLKANLSFTKLDQINLFLKKIKNAHSLAHSEETSAMSNTMVNKDDLPVSKYYRGKLSKPKIHGDGVQKISAQENMWRAVSCFQKISVQTTQIVISMETVPHTSKPCLLASLSNLNGSLSVKATQKVPGIILGSSFLLSINDFLLKTSLKERSRILIGPCCATANLEAKWCKHSGNPGPEQSIPKISIDLRGGLLQVFWGQEHLNCLVLLHELLNGYLNEEGNFEVQVSEPVPQMSSPVEKNQTFKSEQSSDDLRTGLFQYVQDAESLKLPGVYEVLFYNETEDCPGMMLWRYPEPRVLTLVRITPVPFNTTEDPDISTADLGDVLQVPCSLEYWDELQKVFVAFREFNLSESKVCELQLPDINLVNDQKKLVSSDLWRIVLNSSQNGADDQSSASESGSQSTCDPLVTPTALAACTRVDSCFTPWFVPSLCVSFQFAHLEFHLCHHLDQLGTAAPQYLQPFVSDRNMPSELEYMIVSFREPHMYLRQWNNGSVCQEIQFLAQADCKLLECRNVTMQSVVKPFSIFGQMAVSSDVVEKLLDCTVIVDSVFVNLGQHVVHSLNTAIQAWQQNKCPEVEELVFSHFVICNDTQETLRFGQVDTDENILLASLHSHQYSWRSHKSPQLLHICIEGWGNWRWSEPFSVDHAGTFIRTIQYRGRTASLIIKVQQLNGVQKQIIICGRQIICSYLSQSIELKVVQHYIGQDGQAVVREHFDCLTAKQKLPSYILENNELTELCVKAKGDEDWSRDVCLESKAPEYSIVIQVPSSNSSIIYVWCTVLTLEPNSQVQQRMIVFSPLFIMRSHLPDPIIIHLEKRSLGLSETQIIPGKGQEKPLQNIEPDLVHHLTFQAREEYDPSDCAVPISTSLIKQIATKVHPGGTVNQILDEFYGPEKSLQPIWPYNKKDSDRNEQLSQWDSPMRVKLSIWKPYVRTLLIELLPWALLINESKWDLWLFEGEKIVLQVPAGKIIIPPNFQEAFQIGIYWANTNTVHKSVAIKLVHNLTSPKWKDGGNGEVVTLDEEAFVDTEIRLGAFPGHQKLCQFCISSMVQQGIQIIQIEDKTTIINNTPYQIFYKPQLSVCNPHSGKEYFRVPDSATFSICPGGEQPAMKSSSLPCWDLMPDISQSVLDASLLQKQIMLGFSPAPGADSSQCWSLPAIVRPEFPRQSVAVPLGNFRENGFCTRAIVLTYQEHLGVTYLTLSEDPSPRVIIHNRCPVKMLIKENIKDIPKFEVYCKKIPSECSIHHELYHQISSYPDCKTKDLLPSLLLRVEPLDEVTTEWSDAIDINSQGTQVVFLTGFGYVYVDVVHQCGTVFITVAPEGKAGPILTNTNRAPEKIVTFKMFITQLSLAVFDDLTHHKASAELLRLTLDNIFLCVAPGAGPLPGEEPVAALFELYCVEICCGDLQLDNQLYNKSNFHFAVLVCQGEKAEPIQCSKMQSLLISNKELEEYKEKCFIKLCITLNEGKSILCDINEFSFELKPARLYVEDTFVYYIKTLFDTYLPNSRLAGHSTHLSGGKQVLPMQVTQHARALVNPVKLRKLVIQPVNLLVSIHASLKLYIASDHTPLSFSVFERGPIFTTARQLVHALAMHYAAGALFRAGWVVGSLDILGSPASLVRSIGNGVADFFRLPYEGLTRGPGAFVSGVSRGTTSFVKHISKGTLTSITNLATSLARNMDRLSLDEEHYNRQEEWRRQLPESLGEGLRQGLSRLGISLLGAIAGIVDQPMQNFQKTSEAQASAGHKAKGVISGVGKGIMGVFTKPIGGAAELVSQTGYGILHGAGLSQLPKQRHQPSDLHADQAPNSHVKYVWKMLQSLGRPEVHMALDVVLVRGSGQEHEGCLLLTSEVLFVVSVSEDTQQQAFPVTEIDCAQDSKQNNLLTVQLKQPRVACDVEVDGVRERLSEQQYNRLVDYITKTSCHLAPSCSSMQIPCPVVAAEPPPSTVKTYHYLVDPHFAQVFLSKFTMVKNKALRKGFP

SEQ ID NO: 96142 - protein, 4022 aa, Homo sapiens
  Payload ID: 19191
  Gene Name: vacuolar protein sorting 13 homolog B (yeast)
  Uniprot ID: Q7Z7G8
  ENSP ID: ENSP00000351346
MLESYVTPILMSYVNRYIKNLKPSDLQLSLWGGDVVLSKLELKLDVLEQELKLPFTFLSGHIHELRIHVPWTKLGSEPVVITINTMECILKLKDGIQDDHESCGSNSTNRSTAESTKSSIKPRRMQQAAPTDPDLPPGYVQSLIRRVVNNVNIVINNLILKYVEDDIVLSVNITSAECYTVGELWDRAFMDISATDLVLRKVINFSDCTVCLDKRNASGKIEFYQDPLLYKCSFRTRLHFTYENLNSKMPSVIKIHTLVESLKLSITDQQLPMFIRIMQLGIALYYGEIGNFKEGEIEDLTCHNKDMLGNITGSEDETRIDMQYPAQHKGQELYSQQDEEQPQGWVSWAWSFVPAIVSYDDGEEDFVGNDPASTMHQQKAQTLKDPIVSIGFYCTKATVTFKLTEMQVESSYYSPQKVKSKEVLCWEQEGTTVEALMMGEPFFDCQIGFVGCRAMCLKGIMGVKDFEENMNRSETEACFFICGDNLSTKGFTYLTNSLFDYRSPENNGTRAEFILDSTHHKETYTEIAGMQRFGAFYMDYLYTMENTSGKGSTNQQDFSSGKSEDLGTVQEKSTKSLVIGPLDFRLDSSAVHRILKMIVCALEHEYEPYSRLKSDIKDENETILNPEEVALLEEYIPTRHTSVTLLKCTCTISMAEFNLLDHLLPVIMGEKNSSNFMNTTNFQSLRPLPSIRILVDKINLEHSVPMYAEQLVHVVSSLTQPSDNLLHYCYVHCYLKIFGFQAGLTSLDCSGSYCLPVPVIPSFSTALYGKLLKLPTCWTKRSQIAITEGIFELPNLTIQATRAQTLLLQAIYQSWSHLGNVSSSAVIEALINEIFLSIGVKSKNPLPTLEGSIQNVELKYCSTSLVKCASGTMGSIKICAKAPVDSGKEKLIPLLQGPSDTKDLHSTKWLNESRKPESLLAPDLMAFTIQVPQYIDYCHNSGAVLLCSIQGLAVNIDPILYTWLIYQPQKRTSRHMQQQPVVAVPLVMPVCRRKEDEVSIGSAPLAKQQSYQASEYASSPVKTKTVTESRPLSVPVKAMLNISESCRSPEERMKEFIGIVWNAVKHLTLQLEVQSCCVFIPNDSLPSPSTIVSGDIPGTVRSWYHGQTSMPGTLVLCLPQIKIISAGHKYMEPLQEIPFVIPRPILEEGDAFPWTISLHNFSIYTLLGKQVTLCLVEPMGCTSTLAVTSQKLLATGPDTRHSFVVCLHVDLESLEIKCSNPQVQLFYELTDIMNKVWNKIQKRGNLNLSPTSPETMAGPVPTSPVRSSIGTAPPDTSTCSPSADIGTTTEGDSIQAGEESPFSDSVTLEQTTSNIGGTSGRVSLWMQWVLPKITIKLFAPDPENKGTEVCMVSELEDLSASIDVQDVYTKVKCKIESFNIDHYRSSLGEECWSLGQCGGVFLSCTDKLNRRTLLVRPISKQDPFSNCSGFFPSTTTKLLDGTHQQHGFLSLTYTKAVTKNVRHKLTSRNERRSFHKLSEGLMDGSPHFLHEILLSAQAFDIVLYFPLLNAIASIFQAKLPKTQKEKRKSPGQPMRTHTLTSRNLPLIYVNTSVIRIFIPKTEEMQPTVEANQAAKEDTVVLKIGSVAMAPQADNPLGRSVLRKDIYQRALNLGILRDPGSEIEDRQYQIDLQSINIGTAQWHQLKPEKESVSGGVVTETERNSQNPALEWNMASSIRRHQERRAILTPVLTDFSVRITGAPAVIFTKVVSPENLHTEEILVCGHSLEVNITTNLDFFLSVAQVQLLHQLIVANMTGLEPSNKAAEISKQEQKKVDIFDGGMAETSSRYSGAQDSGIGSDSVKIRIVQIEQHSGASQHRIARPSRQSSIVKNLNFIPFDIFITASRISLMTYSCMALSKSKSQEQKNNEKTDKSSLNLPEVDSDVAKPNQACISTVTAEDLLRSSISFPSGKKIGVLSLESLHASTRSSARQALGITIVRQPGRRGTGDLQLEPFLYFIVSQPSLLLSCHHRKQRVEVSIFDAVLKGVASDYKCIDPGKTLPEALDYCTVWLQTVPGEIDSKSGIPPSFITLQIKDFLNGPADVNLDISKPLKANLSFTKLDQINLFLKKIKNAHSLAHSEETSAMSNTMVNKDDLPVSKYYRGKLSKPKIHGDGVQKISAQENMWRAVSCFQKISVQTTQIVISMETVPHTSKPCLLASLSNLNGSLSVKATQKVPGIILGSSFLLSINDFLLKTSLKERSRILIGPCCATANLEAKWCKHSGNPGPEQSIPKISIDLRGGLLQVFWGQEHLNCLVLLHELLNGYLNEEGNFEVQVSEPVPQMSSPVEKNQTFKSEQSSDDLRTGLFQYVQDAESLKLPGVYEVLFYNETEDCPGMMLWRYPEPRVLTLVRITPVPFNTTEDPDISTADLGDVLQVPCSLEYWDELQKVFVAFREFNLSESKVCELQLPDINLVNDQKKLVSSDLWRIVLNSSQNGADDQSSASESGSQSTCDPLVTPTALAACTRVDSCFTPWFVPSLCVSFQFAHLEFHLCHHLDQLGTAAPQYLQPFVSDRNMPSELEYMIVSFREPHMYLRQWNNGSVCQEIQFLAQADCKLLECRNVTMQSVVKPFSIFGQMAVSSDVVEKLLDCTVIVDSVFVNLGQHVVHSLNTAIQAWQQNKCPEVEELVFSHFVICNDTQETLRFGQVDTDENILLASLHSHQYSWRSHKSPQLLHICIEGWGNWRWSEPFSVDHAGTFIRTIQYRGRTASLIIKVQQLNGVQKQIIICGRQIICSYLSQSIELKVVQHYIGQDGQAVVREHFDCLTAKQKLPSYILENNELTELCVKAKGDEDWSRDVCLESKAPEYSIVIQVPSSNSSIIYVWCTVLTLEPNSQVQQRMIVFSPLFIMRSHLPDPIIIHLEKRSLGLSETQIIPGKGQEKPLQNIEPDLVHHLTFQAREEYDPSDCAVPISTSLIKQIATKVHPGGTVNQILDEFYGPEKSLQPIWPYNKKDSDRNEQLSQWDSPMRVKLSIWKPYVRTLLIELLPWALLINESKWDLWLFEGEKIVLQVPAGKIIIPPNFQEAFQIGIYWANTNTVHKSVAIKLVHNLTSPKWKDGGNGEVVTLDEEAFVDTEIRLGAFPGHQKLCQFCISSMVQQGIQIIQIEDKTTIINNTPYQIFYKPQLSVCNPHSGKEYFRVPDSATFSICPGGEQPAMKSSSLPCWDLMPDISQSVLDASLLQKQIMLGFSPAPGADSSQCWSLPAIVRPEFPRQSVAVPLGNFRENGFCTRAIVLTYQEHLGVTYLTLSEDPSPRVIIHNRCPVKMLIKENIKDIPKFEVYCKKIPSECSIHHELYHQISSYPDCKTKDLLPSLLLRVEPLDEVTTEWSDAIDINSQGTQVVFLTGFGYVYVDVVHQCGTVFITVAPEGKAGPILTNTNRAPEKIVTFKMFITQLSLAVFDDLTHHKASAELLRLTLDNIFLCVAPGAGPLPGEEPVAALFELYCVEICCGDLQLDNQLYNKSNFHFAVLVCQGEKAEPIQCSKMQSLLISNKELEEYKEKCFIKLCITLNEGKSILCDINEFSFELKPARLYVEDTFVYYIKTLFDTYLPNSRLAGHSTHLSGGKQVLPMQVTQHARALVNPVKLRKLVIQPVNLLVSIHASLKLYIASDHTPLSFSVFERGPIFTTARQLVHALAMHYAAGALFRAGWVVGSLDILGSPASLVRSIGNGVADFFRLPYEGLTRGPGAFVSGVSRGTTSFVKHISKGTLTSITNLATSLARNMDRLSLDEEHYNRQEEWRRQLPESLGEGLRQGLSRLGISLLGAIAGIVDQPMQNFQKTSEAQASAGHKAKGVISGVGKGIMGVFTKPIGGAAELVSQTGYGILHGAGLSQLPKQRHQPSDLHADQAPNSHVKYVWKMLQSLGRPEVHMALDVVLVRGSGQEHEGCLLLTSEVLFVVSVSEDTQQQAFPVTEIDCAQDSKQNNLLTVQLKQPRVACDVEVDGVRERLSEQQYNRLVDYITKTSCHLAPSCSSMQIPCPVVAAEPPPSTVKTYHYLVDPHFAQVFLSKFTMVKNKALRKGFP

SEQ ID NO: 96143 - protein, 415 aa, Homo sapiens
  Payload ID: 19191
  Gene Name: vacuolar protein sorting 13 homolog B (yeast)
  Uniprot ID: Q7Z7G8
  ENSP ID: ENSP00000398472
MLESYVTPILMSYVNRYIKNLKPSDLQLSLWGGDVVLSKLELKLDVLEQELKLPFTFLSGHIHELRIHVPWTKLGSEPVVITINTMECILKLKDGIQDDHESCGSNSTNRSTAESTKSSIKPRRMQQAAPTDPDLPPGYVQSLIRRVVNNVNIVINNLILKYVEDDIVLSVNITSAECYTVGELWDRAFMDISATDLVLRKVINFSDCTVCLDKRNASGKIEFYQDPLLYKCSFRTRLHFTYENLNSKMPSVIKIHTLVESLKLSITDQQLPMFIRIMQLGIALYYGEIGNFKEGEIEDLTCHNKDMLGNITGSEDETRIDMQYPAQHKGQELYSQQDEEQPQGWVSWAWSFVPAIVSYDDGEEDFVGNDPASTMHQQKAQTLKDPIVSIGFYCTKATVTFKVGLFSCCLYLYQL

SEQ ID NO: 96144 - protein, 155 aa, Homo sapiens
  Payload ID: 19191
  Gene Name: vacuolar protein sorting 13 homolog B (yeast)
  ENSP ID: ENSP00000428809
  MOD_RES (1)..(1): Any amino acid
XNQAAKEDTVVLKIGSVAMAPQADNPLGRSVLRKDIYHIRRHQERRAILTPVLTDFSVRITGAPAVIFTKVVSPENLHTEEILVCGHSLEVNITTNLDFFLSVAQVQLLHQLIVANMTGLEPSNKAAEISKQEQKKVDIFDGGMAETSSRYSGAQ

SEQ ID NO: 96145 - protein, 1427 aa, Homo sapiens
  Payload ID: 19191
  Gene Name: vacuolar protein sorting 13 homolog B (yeast)
  Uniprot ID: Q7Z7G8
  ENSP ID: ENSP00000430900
MLESYVTPILMSYVNRYIKNLKPSDLQLSLWGGDVVLSKLELKLDVLEQELKLPFTFLSGHIHELRIHVPWTKLGSEPVVITINTMECILKLKDGIQDDHESCGSNSTNRSTAESTKSSIKPRRMQQAAPTDPDLPPGYVQSLIRRVVNNVNIVINNLILKYVEDDIVLSVNITSAECYTVGELWDRAFMDISATDLVLRKVINFSDCTVCLDKRNASGKIEFYQDPLLYKCSFRTRLHFTYENLNSKMPSVIKIHTLVESLKLSITDQQLPMFIRIMQLGIALYYGEIGNFKEGEIEDLTCHNKDMLGNITGSEDETRIDMQYPAQHKGQELYSQQDEEQPQGWVSWAWSFVPAIVSYDDGEEDFVGNDPASTMHQQKAQTLKDPIVSIGFYCTKATVTFKLTEMQVESSYYSPQKVKSKEVLCWEQEGTTVEALMMGEPFFDCQIGFVGCRAMCLKGIMGVKDFEENMNRSETEACFFICGDNLSTKGFTYLTNSLFDYRSPENNGTRAEFILDSTHHKETYTEIAGMQRFGAFYMDYLYTMENTSGKGSTNQQDFSSGKSEDLGTVQEKSTKSLVIGPLDFRLDSSAVHRILKMIVCALEHEYEPYSRLKSDIKDENETILNPEEVALLEEYIPTRHTSVTLLKCTCTISMAEFNLLDHLLPVIMGEKNSSNFMNTTNFQSLRPLPSIRILVDKINLEHSVPMYAEQLVHVVSSLTQPSDNLLHYCYVHCYLKIFGFQAGLTSLDCSGSYCLPVPVIPSFSTALYGKLLKLPTCWTKRSQIAITEGIFELPNLTIQATRAQTLLLQAIYQSWSHLGNVSSSAVIEALINEIFLSIGVKSKNPLPTLEGSIQNVELKYCSTSLVKCASGTMGSIKICAKAPVDSGKEKLIPLLQGPSDTKDLHSTKWLNESRKPESLLAPDLMAFTIQVPQYIDYCHNSGAVLLCSIQGLAVNIDPILYTWLIYQPQKRTSRHMQQQPVVAVPLVMPVCRRKEDEVSIGSAPLAKQQSYQASEYASSPVKTKTVTESRPLSVPVKAMLNISESCRSPEERMKEFIGIVWNAVKHLTLQLEVQSCCVFIPNDSLPSPSTIVSGDIPGTVRSWYHGQTSMPGTLVLCLPQIKIISAGHKYMEPLQEIPFVIPRPILEEGDAFPWTISLHNFSIYTLLGKQVTLCLVEPMGCTSTLAVTSQKLLATGPDTRHSFVVCLHVDLESLEIKCSNPQVQLFYELTDIMNKVWNKIQKRGNLNLSPTSPETMAGPVPTSPVRSSIGTAPPDTSTCSPSADIGTTTEGDSIQAGEESPFSDSVTLEQTTSNIGGTSGRVSLWMQWVLPKITIKLFAPDPENKGTEVCMVSELEDLSASIDVQDVYTKVKCKIESFNIDHYRSRPGEGWQSGHFEGVFLQCKEKSVPWGRVLVFGAMWRCLPFLY

SEQ ID NO: 96146 - protein, 3710 aa, Homo sapiens
  Payload ID: 19192
  Gene Name: vacuolar protein sorting 13 homolog C (S. cerevisiae)
  Uniprot ID: Q709C8
  ENSP ID: ENSP00000249837
MVLESVVADLLNRFLGDYVENLNKSQLKLGIWGGNVALDNLQIKENALSELDVPFKVKAGQIDKLTLKIPWKNLYGEAVVATLEGLYLLVVPGASIKYDAVKEEKSLQDVKQKELSRIEEALQKAAEKDKPKEAKKDTFVEKLATQVIKNVQVKITDIHIKYEDDVTDPKRPLSFGVTLGELSLLTANEHWTPCILNEADKIIYKLIRLDSLSAYWNVNCSMSYQRSREQILDQLKNEILTSGNIPPNYQYIFQPISASAKLYMNPYAESELKTPKLDCNIEIQNIAIELTKPQYLSMIDLLESVDYMVRNAPYRKYKPYLPLHTNGRRWWKYAIDSVLEVHIRRYTQMWSWSNIKKHRQLLKSYKIAYKNKLTQSKVSEEIQKEIQDLEKTLDVFNIILARQQAQVEVIRSGQKLRKKSADTGEKRGGWFSGLWGKKESKKKDEESLIPETIDDLMTPEEKDKLFTAIGYSESTHNLTLPKQYVAHIMTLKLVSTSVTIRENKNIPEILKIQIIGLGTQVSQRPGAQALKVEAKLEHWYITGLRQQDIVPSLVASIGDTTSSLLKIKFETNPEDSPADQTLIVQSQPVEVIYDAKTVNAVVEFFQSNKGLDLEQITSATLMKLEEIKERTATGLTHIIETRKVLDLRINLKPSYLVVPQTGFHHEKSDLLILDFGTFQLNSKDQGLQKTTNSSLEEIMDKAYDKFDVEIKNVQLLFARAEETWKKCRFQHPSTMHILQPMDIHVELAKAMVEKDIRMARFKVSGGLPLMHVRISDQKMKDVLYLMNSIPLPQKSSAQSPERQVSSIPIISGGTKGLLGTSLLLDTVESESDDEYFDAEDGEPQTCKSMKGSELKKAAEVPNEELINLLLKFEIKEVILEFTKQQKEEDTILVFNVTQLGTEATMRTFDLTVVSYLKKISLDYHEIEGSKRKPLHLISSSDKPGLDLLKVEYIKADKNGPSFQTAFGKTEQTVKVAFSSLNLLLQTQALVASINYLTTIIPSDDQSISVAKEVQISTEKQQKNSTLPKAIVSSRDSDIIDFRLFAKLNAFCVIVCNEKNNIAEIKIQGLDSSLSLQSRKQSLFARLENIIVTDVDPKTVHKKAVSIMGNEVFRFNLDLYPDATEGDLYTDMSKVDGVLSLNVGCIQIVYLHKFLMSLLNFLNNFQTAKESLSAATAQAAERAATSVKDLAQRSFRVSINIDLKAPVIVIPQSSISTNAVVVDLGLIRVHNQFSLVSDEDYLNPPVIDRMDVQLTKLTLYRTVIQPGIYHPDIQLLHPINLEFLVNRNLAASWYHKVPVVEIKGHLDSMNVSLNQEDLNLLFRILTENLCEGTEDLDKVKPRVQETGEIKEPLEISISQDVHDSKNTLTTGVEEIRSVDIINMLLNFEIKEVVVTLMKKSEKKGRPLHELNVLQLGMEAKVKTYDMTAKAYLKKISMQCFDFTDSKGEPLHIINSSNVTDEPLLKMLLTKADSDGPEFKTIHDSTKQRLKVSFASLDLVLHLEALLSFMDFLSSAAPFSEPSSSEKESELKPLVGESRSIAVKAVSSNISQKDVFDLKITAELNAFNVFVCDQKCNIADIKIHGMDASISVKPKQTDVFARLKDIIVMNVDLQSIHKKAVSILGDEVFRFQLTLYPDATEGEAYADMSKVDGKLSFKVGCIQIVYVHKFFMSLLNFLNNFQTAKEALSTATVQAAERAASSMKDLAQKSFRLLMDINLKAPVIIIPQSSVSPNAVIADLGLIRVENKFSLVPMEHYSLPPVIDKMNIELTQLKLSRTILQASLPQNDIEILKPVNMLLSIQRNLAAAWYVQIPGMEIKGKLKPMQVALSEDDLTVLMKILLENLGEASSQPSPTQSVQETVRVRKVDVSSVPDHLKEQEDWTDSKLSMNQIVSLQFDFHFESLSIILYNNDINQESGVAFHNDSFQLGELRLHLMASSGKMFKDGSMNVSVKLKTCTLDDLREGIERATSRMIDRKNDQDNNSSMIDISYKQDKNGSQIDAVLDKLYVCASVEFLMTVADFFIKAVPQSPENVAKETQILPRQTATGKVKIEKDDSVRPNMTLKAMITDPEVVFVASLTKADAPALTASFQCNLSLSTSKLEQMMEASVRDLKVLACPFLREKRGKNITTVLQPCSLFMEKCTWASGKQNINIMVKEFIIKISPIILNTVLTIMAALSPKTKEDGSKDTSKEMENLWGIKSINDYNTWFLGVDTATEITESFKGIEHSLIEENCGVVVESIQVTLECGLGHRTVPLLLAESKFSGNIKNWTSLMAAVADVTLQVHYYNEIHAVWEPLIERVEGKRQWNLRLDVKKNPVQDKSLLPGDDFIPEPQMAIHISSGNTMNITISKSCLNVFNNLAKGFSEGTASTFDYSLKDRAPFTVKNAVGVPIKVKPNCNLRVMGFPEKSDIFDVDAGQNLELEYASMVPSSQGNLSILSRQESSFFTLTIVPHGYTEVANIPVARPGRRLYNVRNPNASHSDSVLVQIDATEGNKVITLRSPLQIKNHFSIAFIIYKFVKNVKLLERIGIARPEEEFHVPLDSYRCQLFIQPAGILEHQYKESTTYISWKEELHRSREVRCMLQCPSVEVSFLPLIVNTVALPDELSYICTHGEDWDVAYIIHLYPSLTLRNLLPYSLRYLLEGTAETHELAEGSTADVLHSRISGEIMELVLVKYQGKNWNGHFRIRDTLPEFFPVCFSSDSTEVTTVDLSVHVRRIGSRMVLSVFSPYWLINKTTRVLQYRSEDIHVKHPADFRDIILFSFKKKNIFTKNKVQLKISTSAWSSSFSLDTVGSYGCVKCPANNMEYLVGVSIKMSSFNLSRIVTLTPFCTIANKSSLELEVGEIASDGSMPTNKWNYIASSECLPFWPESLSGKLCVRVVGCEGSSKPFFYNRQDNGTLLSLEDLNGGILVDVNTAEHSTVITFSDYHEGSAPALIMNHTPWDILTYKQSGSPEEMVLLPRQARLFAWADPTGTRKLTWTYAANVGEHDLLKDGCGQFPYDANIQIHWVSFLDGRQRVLLFTDDVALVSKALQAEEMEQADYEITLSLHSLGLSLVNNESKQEVSYIGITSSGVVWEVKPKQKWKPFSQKQIILLEQSYQKHQISRDHGWIKLDNNFEVNFDKDPMEMRLPIRSPIKRDFLSGIQIEFKQSSHQRSLRARLYWLQVDNQLPGAMFPVVFHPVAPPKSIALDSEPKPFIDVSVITRFNEYSKVLQFKYFMVLIQEMALKIDQGFLGAIIALFTPTTDPEAERRRTKLIQQDIDALNAELMETSMTDMSILSFFEHFHISPVKLHLSLSLGSGGEESDKEKQEMFAVHSVNLLLKSIGATLTDVDDLIFKLAYYEIRYQFYKRDQLIWSVVRHYSEQFLKQMYVLVLGLDVLGNPFGLIRGLSEGVEALFYEPFQGAVQGPEEFAEGLVIGVRSLFGHTVGGAAGVVSRITGSVGKGLAAITMDKEYQQKRREELSRQPRDFGDSLARGGKGFLRGVVGGVTGIITKPVEGAKKEGAAGFFKGIGKGLVGAVARPTGGIVDMASSTFQGIQRAAESTEEVSSLRPPRLIHEDGIIRPYDRQESEGSDLLENHIKKLEGETYRYHCAIPGSKKTILMVTNRRVLCIKEVEILGLMCVDWQCPFEDFVFPPSVSENVLKISVKEQGLFHKKDSANQGCVRKVYLKDTATAERACNAIEDAQSTRQQQKLMKQSSVRLLRPQLPS

SEQ ID NO: 96147 - protein, 3753 aa, Homo sapiens
  Payload ID: 19192
  Gene Name: vacuolar protein sorting 13 homolog C (S. cerevisiae)
  Uniprot ID: Q709C8
  ENSP ID: ENSP00000261517
MVLESVVADLLNRFLGDYVENLNKSQLKLGIWGGNVALDNLQIKENALSELDVPFKVKAGQIDKLTLKIPWKNLYGEAVVATLEGLYLLVVPGASIKYDAVKEEKSLQDVKQKELSRIEEALQKAAEKGTHSGEFIYGLENFVYKDIKPGRKRKKHKKHFKKPFKGLDRSKDKPKEAKKDTFVEKLATQVIKNVQVKITDIHIKYEDDVTDPKRPLSFGVTLGELSLLTANEHWTPCILNEADKIIYKLIRLDSLSAYWNVNCSMSYQRSREQILDQLKNEILTSGNIPPNYQYIFQPISASAKLYMNPYAESELKTPKLDCNIEIQNIAIELTKPQYLSMIDLLESVDYMVRNAPYRKYKPYLPLHTNGRRWWKYAIDSVLEVHIRRYTQMWSWSNIKKHRQLLKSYKIAYKNKLTQSKVSEEIQKEIQDLEKTLDVFNIILARQQAQVEVIRSGQKLRKKSADTGEKRGGWFSGLWGKKESKKKDEESLIPETIDDLMTPEEKDKLFTAIGYSESTHNLTLPKQYVAHIMTLKLVSTSVTIRENKNIPEILKIQIIGLGTQVSQRPGAQALKVEAKLEHWYITGLRQQDIVPSLVASIGDTTSSLLKIKFETNPEDSPADQTLIVQSQPVEVIYDAKTVNAVVEFFQSNKGLDLEQITSATLMKLEEIKERTATGLTHIIETRKVLDLRINLKPSYLVVPQTGFHHEKSDLLILDFGTFQLNSKDQGLQKTTNSSLEEIMDKAYDKFDVEIKNVQLLFARAEETWKKCRFQHPSTMHILQPMDIHVELAKAMVEKDIRMARFKVSGGLPLMHVRISDQKMKDVLYLMNSIPLPQKSSAQSPERQVSSIPIISGGTKGLLGTSLLLDTVESESDDEYFDAEDGEPQTCKSMKGSELKKAAEVPNEELINLLLKFEIKEVILEFTKQQKEEDTILVFNVTQLGTEATMRTFDLTVVSYLKKISLDYHEIEGSKRKPLHLISSSDKPGLDLLKVEYIKADKNGPSFQTAFGKTEQTVKVAFSSLNLLLQTQALVASINYLTTIIPSDDQSISVAKEVQISTEKQQKNSTLPKAIVSSRDSDIIDFRLFAKLNAFCVIVCNEKNNIAEIKIQGLDSSLSLQSRKQSLFARLENIIVTDVDPKTVHKKAVSIMGNEVFRFNLDLYPDATEGDLYTDMSKVDGVLSLNVGCIQIVYLHKFLMSLLNFLNNFQTAKESLSAATAQAAERAATSVKDLAQRSFRVSINIDLKAPVIVIPQSSISTNAVVVDLGLIRVHNQFSLVSDEDYLNPPVIDRMDVQLTKLTLYRTVIQPGIYHPDIQLLHPINLEFLVNRNLAASWYHKVPVVEIKGHLDSMNVSLNQEDLNLLFRILTENLCEGTEDLDKVKPRVQETGEIKEPLEISISQDVHDSKNTLTTGVEEIRSVDIINMLLNFEIKEVVVTLMKKSEKKGRPLHELNVLQLGMEAKVKTYDMTAKAYLKKISMQCFDFTDSKGEPLHIINSSNVTDEPLLKMLLTKADSDGPEFKTIHDSTKQRLKVSFASLDLVLHLEALLSFMDFLSSAAPFSEPSSSEKESELKPLVGESRSIAVKAVSSNISQKDVFDLKITAELNAFNVFVCDQKCNIADIKIHGMDASISVKPKQTDVFARLKDIIVMNVDLQSIHKKAVSILGDEVFRFQLTLYPDATEGEAYADMSKVDGKLSFKVGCIQIVYVHKFFMSLLNFLNNFQTAKEALSTATVQAAERAASSMKDLAQKSFRLLMDINLKAPVIIIPQSSVSPNAVIADLGLIRVENKFSLVPMEHYSLPPVIDKMNIELTQLKLSRTILQASLPQNDIEILKPVNMLLSIQRNLAAAWYVQIPGMEIKGKLKPMQVALSEDDLTVLMKILLENLGEASSQPSPTQSVQETVRVRKVDVSSVPDHLKEQEDWTDSKLSMNQIVSLQFDFHFESLSIILYNNDINQESGVAFHNDSFQLGELRLHLMASSGKMFKDGSMNVSVKLKTCTLDDLREGIERATSRMIDRKNDQDNNSSMIDISYKQDKNGSQIDAVLDKLYVCASVEFLMTVADFFIKAVPQSPENVAKETQILPRQTATGKVKIEKDDSVRPNMTLKAMITDPEVVFVASLTKADAPALTASFQCNLSLSTSKLEQMMEASVRDLKVLACPFLREKRGKNITTVLQPCSLFMEKCTWASGKQNINIMVKEFIIKISPIILNTVLTIMAALSPKTKEDGSKDTSKEMENLWGIKSINDYNTWFLGVDTATEITESFKGIEHSLIEENCGVVVESIQVTLECGLGHRTVPLLLAESKFSGNIKNWTSLMAAVADVTLQVHYYNEIHAVWEPLIERVEGKRQWNLRLDVKKNPVQDKSLLPGDDFIPEPQMAIHISSGNTMNITISKSCLNVFNNLAKGFSEGTASTFDYSLKDRAPFTVKNAVGVPIKVKPNCNLRVMGFPEKSDIFDVDAGQNLELEYASMVPSSQGNLSILSRQESSFFTLTIVPHGYTEVANIPVARPGRRLYNVRNPNASHSDSVLVQIDATEGNKVITLRSPLQIKNHFSIAFIIYKFVKNVKLLERIGIARPEEEFHVPLDSYRCQLFIQPAGILEHQYKESTTYISWKEELHRSREVRCMLQCPSVEVSFLPLIVNTVALPDELSYICTHGEDWDVAYIIHLYPSLTLRNLLPYSLRYLLEGTAETHELAEGSTADVLHSRISGEIMELVLVKYQGKNWNGHFRIRDTLPEFFPVCFSSDSTEVTTVDLSVHVRRIGSRMVLSVFSPYWLINKTTRVLQYRSEDIHVKHPADFRDIILFSFKKKNIFTKNKVQLKISTSAWSSSFSLDTVGSYGCVKCPANNMEYLVGVSIKMSSFNLSRIVTLTPFCTIANKSSLELEVGEIASDGSMPTNKWNYIASSECLPFWPESLSGKLCVRVVGCEGSSKPFFYNRQDNGTLLSLEDLNGGILVDVNTAEHSTVITFSDYHEGSAPALIMNHTPWDILTYKQSGSPEEMVLLPRQARLFAWADPTGTRKLTWTYAANVGEHDLLKDGCGQFPYDANIQIHWVSFLDGRQRVLLFTDDVALVSKALQAEEMEQADYEITLSLHSLGLSLVNNESKQEVSYIGITSSGVVWEVKPKQKWKPFSQKQIILLEQSYQKHQISRDHGWIKLDNNFEVNFDKDPMEMRLPIRSPIKRDFLSGIQIEFKQSSHQRSLRARLYWLQVDNQLPGAMFPVVFHPVAPPKSIALDSEPKPFIDVSVITRFNEYSKVLQFKYFMVLIQEMALKIDQGFLGAIIALFTPTTDPEAERRRTKLIQQDIDALNAELMETSMTDMSILSFFEHFHISPVKLHLSLSLGSGGEESDKEKQEMFAVHSVNLLLKSIGATLTDVDDLIFKLAYYEIRYQFYKRDQLIWSVVRHYSEQFLKQMYVLVLGLDVLGNPFGLIRGLSEGVEALFYEPFQGAVQGPEEFAEGLVIGVRSLFGHTVGGAAGVVSRITGSVGKGLAAITMDKEYQQKRREELSRQPRDFGDSLARGGKGFLRGVVGGVTGIITKPVEGAKKEGAAGFFKGIGKGLVGAVARPTGGIVDMASSTFQGIQRAAESTEEVSSLRPPRLIHEDGIIRPYDRQESEGSDLLENHIKKLEGETYRYHCAIPGSKKTILMVTNRRVLCIKEVEILGLMCVDWQCPFEDFVFPPSVSENVLKISVKEQGLFHKKDSANQGCVRKVYLKDTATAERACNAIEDAQSTRQQQKLMKQSSVRLLRPQLPS

SEQ ID NO: 96148 - protein, 3628 aa, Homo sapiens
  Payload ID: 19192
  Gene Name: vacuolar protein sorting 13 homolog C (S. cerevisiae)
  Uniprot ID: Q709C8
  ENSP ID: ENSP00000379233
MVLESVVADLLNRFLGDYVENLNKSQLKLGIWGGNVALDNLQIKENALSELDVPFKVKAGQIDKLTLKIPWKNLYGEAVVATLEGLYLLVVPGASIKYDAVKEEKSLQDVKQKELSRIEEALQKAAEKGTHSGEFIYGLENFVYKDIKPGRKRKKHKKHFKKPFKGLDRSKDKPKEAKKDTFVEKLATQVIKNVQVKITDIHIKYEDDVTDPKRPLSFGVTLGELSLLTANEHWTPCILNEADKIIYKLIRLDSLSAYWNVNCSMSYQRSREQILDQLKNEILTSGNIPPNYQYIFQPISASAKLYMNPYAESELKTPKLDCNIEIQNIAIELTKPQYLSMIDLLESVDYMVRNAPYRKYKPYLPLHTNGRRWWKYAIDSVLEVHIRRYTQMWSWSNIKKHRQLLKSYKIAYKNKLTQSKVSEEIQKEIQDLEKTLDVFNIILARQQAQVEVIRSGQKLRKKSADTGEKRGGWFSGLWGKKESKKKDEESLIPETIDDLMTPEEKDKLFTAIGYSESTHNLTLPKQYVAHIMTLKLVSTSVTIRENKNIPEILKIQIIGLGTQVSQRPGAQALKVEAKLEHWYITGLRQQDIVPSLVASIGDTTSSLLKIKFETNPEDSPADQTLIVQSQPVEVIYDAKTVNAVVEFFQSNKGLDLEQITSATLMKLEEIKERTATGLTHIIETRKVLDLRINLKPSYLVVPQTGFHHEKSDLLILDFGTFQLNSKDQGLQKTTNSSLEEIMDKAYDKFDVEIKNVQLLFARAEETWKKCRFQHPSTMHILQPMDIHVELAKAMVEKDIRMARFKVSGGLPLMHVRISDQKMKDVLYLMNSIPLPQKSSAQSPERQVSSIPIISGGTKGLLGTSLLLDTVESESDDEYFDAEDGEPQTCKSMKGSELKKAAEVPNEELINLLLKFEIKEVILEFTKQQKEEDTILVFNVTQLGTEATMRTFDLTVVSYLKKISLDYHEIEGSKRKPLHLISSSDKPGLDLLKVEYIKADKNGPSFQTAFGKTEQTVKVAFSSLNLLLQTQALVASINYLTTIIPSDDQSISVAKEVQISTEKQQKNSTLPKAIVSSRDSDIIDFRLFAKLNAFCVIVCNEKNNIAEIKIQGLDSSLSLQSRKQSLFARLENIIVTDVDPKTVHKKAVSIMGNEVFRFNLDLYPDATEGDLYTDMSKVDGVLSLNVGCIQIVYLHKFLMSLLNFLNNFQTAKESLSAATAQAAERAATSVKDLAQRSFRVSINIDLKAPVIVIPQSSISTNAVVVDLGLIRVHNQFSLVSDEDYLNPPVIDRMDVQLTKLTLYRTVIQPGIYHPDIQLLHPINLEFLVNRNLAASWYHKVPVVEIKGHLDSMNVSLNQEDLNLLFRILTENLCEGTEDLDKVKPRVQETGEIKEPLEISISQDVHDSKNTLTTGVEEIRSVDIINMLLNFEIKEVVVTLMKKSEKKGRPLHELNVLQLGMEAKVKTYDMTAKAYLKKISMQCFDFTDSKGEPLHIINSSNVTDEPLLKMLLTKADSDGPEFKTIHDSTKQRLKVSFASLDLVLHLEALLSFMDFLSSAAPFSEPSSSEKESELKPLVGESRSIAVKAVSSNISQKDVFDLKITAELNAFNVFVCDQKCNIADIKIHGMDASISVKPKQTDVFARLKDIIVMNVDLQSIHKKAVSILGDEVFRFQLTLYPDATEGEAYADMSKVDGKLSFKVGCIQIVYVHKFFMSLLNFLNNFQTAKEALSTATVQAAERAASSMKDLAQKSFRLLMDINLKAPVIIIPQSSVSPNAVIADLGLIRVENKFSLVPMEHYSLPPVIDKMNIELTQLKLSRTILQASLPQNDIEILKPVNMLLSIQRNLAAAWYVQIPGMEIKGKLKPMQVALSEDDLTVLMKILLENLGEASSQPSPTQSVQETVRVRKVDVSSVPDHLKEQEDWTDSKLSMNQIVSLQFDFHFESLSIILYNNDINQESGVAFHNDSFQLGELRLHLMASSGKMFKDGSMNVSVKLKTCTLDDLREGIERATSRMIDRKNDQDNNSSMIDISYKQDKNGSQIDAVLDKLYVCASVEFLMTVADFFIKAVPQSPENVAKETQILPRQTATGKVKIEKDDSVRPNMTLKAMITDPEVVFVASLTKADAPALTASFQCNLSLSTSKLEQMMEASVRDLKVLACPFLREKRGKNITTVLQPCSLFMEKCTWASGKQNINIMVKEFIIKISPIILNTVLTIMAALSPKTKEDGSKDTSKEMENLWGIKSINDYNTWFLGVDTATEITESFKGIEHSLIEENCGVVVESIQVTLECGLGHRTVPLLLAESKFSGNIKNWTSLMAAVADVTLQVHYYNEIHAVWEPLIERVEGKRQWNLRLDVKKNPVQDKSLLPGDDFIPEPQMAIHISSGNTMNITISKSCLNVFNNLAKGFSEGTASTFDYSLKDRAPFTVKNAVGVPIKVKPNCNLRVMGFPEKSDIFDVDAGQNLELEYASMVPSSQGNLSILSRQESSFFTLTIVPHGYTEVANIPVARPGRRLYNVRNPNASHSDSVLVQIDATEGNKVITLRSPLQIKNHFSIAFIIYKFVKNVKLLERIGIARPEEEFHVPLDSYRCQLFIQPAGILEHQYKESTTYISWKEELHRSREVRCMLQCPSVEVSFLPLIVNTVALPDELSYICTHGEDWDVAYIIHLYPSLTLRNLLPYSLRYLLEGTAETHELAEGSTADVLHSRISGEIMELVLVKYQGKNWNGHFRIRDTLPEFFPVCFSSDSTEVTTVDLSVHVRRIGSRMVLSVFSPYWLINKTTRVLQYRSEDIHVKHPADFRDIILFSFKKKNIFTKNKVQLKISTSAWSSSFSLDTVGSYGCVKCPANNMEYLVGVSIKMSSFNLSRIVTLTPFCTIANKSSLELEVGEIASDGSMPTNKWNYIASSECLPFWPESLSGKLCVRVVGCEGSSKPFFYNRQDNGTLLSLEDLNGGILVDVNTAEHSTVITFSDYHEGSAPALIMNHTPWDILTYKQSGSPEEMVLLPRQARLFAWADPTGTRKLTWTYAANVGEHDLLKDGCGQFPYDANIQIHWVSFLDGRQRVLLFTDDVALVSKALQAEEMEQADYEITLSLHSLGLSLVNNESKQEVSYIGITSSGVVWEVKPKQKWKPFSQKQIILLEQSYQKHQISRDHGWIKLDNNFEVNFDKDPMEMRLPIRSPIKRDFLSGIQIEFKQSSHQRSLRARLYWLQVDNQLPGAMFPVVFHPVAPPKSIALDSEPKPFIDVSVITRFNEYSKVLQFKYFMVLIQEMALKIDQGFLGAIIALFTPTTDPEAERRRTKLIQQDIDALNAELMETSMTDMSILSFFEHFHISPVKLHLSLSLGSGGEESDKEKQEMFAVHSVNLLLKSIGATLTDVDDLIFKLAYYEIRYQFYKRDQLIWSVVRHYSEQFLKQMYVLVLGLDVLGNPFGLIRGLSEGVEALFYEPFQGAVQGPEEFAEGLVIGVRSLFGHTVGGAAGVVSRITGSVGKGLAAITMDKEYQQKRREELSRQPRDFGDSLARGGKGFLRGVVGGVTGIITKPVEGAKKEGAAGFFKGIGKGLVGAVARPTGGIVDMASSTFQGIQRAAESTEEVSSLRPPRLIHEDGIIRPYDRQESEGSDLLEQELEIQE

SEQ ID NO: 96149 - protein, 3585 aa, Homo sapiens
  Payload ID: 19192
  Gene Name: vacuolar protein sorting 13 homolog C (S. cerevisiae)
  Uniprot ID: Q709C8
  ENSP ID: ENSP00000379235
MVLESVVADLLNRFLGDYVENLNKSQLKLGIWGGNVALDNLQIKENALSELDVPFKVKAGQIDKLTLKIPWKNLYGEAVVATLEGLYLLVVPGASIKYDAVKEEKSLQDVKQKELSRIEEALQKAAEKDKPKEAKKDTFVEKLATQVIKNVQVKITDIHIKYEDDVTDPKRPLSFGVTLGELSLLTANEHWTPCILNEADKIIYKLIRLDSLSAYWNVNCSMSYQRSREQILDQLKNEILTSGNIPPNYQYIFQPISASAKLYMNPYAESELKTPKLDCNIEIQNIAIELTKPQYLSMIDLLESVDYMVRNAPYRKYKPYLPLHTNGRRWWKYAIDSVLEVHIRRYTQMWSWSNIKKHRQLLKSYKIAYKNKLTQSKVSEEIQKEIQDLEKTLDVFNIILARQQAQVEVIRSGQKLRKKSADTGEKRGGWFSGLWGKKESKKKDEESLIPETIDDLMTPEEKDKLFTAIGYSESTHNLTLPKQYVAHIMTLKLVSTSVTIRENKNIPEILKIQIIGLGTQVSQRPGAQALKVEAKLEHWYITGLRQQDIVPSLVASIGDTTSSLLKIKFETNPEDSPADQTLIVQSQPVEVIYDAKTVNAVVEFFQSNKGLDLEQITSATLMKLEEIKERTATGLTHIIETRKVLDLRINLKPSYLVVPQTGFHHEKSDLLILDFGTFQLNSKDQGLQKTTNSSLEEIMDKAYDKFDVEIKNVQLLFARAEETWKKCRFQHPSTMHILQPMDIHVELAKAMVEKDIRMARFKVSGGLPLMHVRISDQKMKDVLYLMNSIPLPQKSSAQSPERQVSSIPIISGGTKGLLGTSLLLDTVESESDDEYFDAEDGEPQTCKSMKGSELKKAAEVPNEELINLLLKFEIKEVILEFTKQQKEEDTILVFNVTQLGTEATMRTFDLTVVSYLKKISLDYHEIEGSKRKPLHLISSSDKPGLDLLKVEYIKADKNGPSFQTAFGKTEQTVKVAFSSLNLLLQTQALVASINYLTTIIPSDDQSISVAKEVQISTEKQQKNSTLPKAIVSSRDSDIIDFRLFAKLNAFCVIVCNEKNNIAEIKIQGLDSSLSLQSRKQSLFARLENIIVTDVDPKTVHKKAVSIMGNEVFRFNLDLYPDATEGDLYTDMSKVDGVLSLNVGCIQIVYLHKFLMSLLNFLNNFQTAKESLSAATAQAAERAATSVKDLAQRSFRVSINIDLKAPVIVIPQSSISTNAVVVDLGLIRVHNQFSLVSDEDYLNPPVIDRMDVQLTKLTLYRTVIQPGIYHPDIQLLHPINLEFLVNRNLAASWYHKVPVVEIKGHLDSMNVSLNQEDLNLLFRILTENLCEGTEDLDKVKPRVQETGEIKEPLEISISQDVHDSKNTLTTGVEEIRSVDIINMLLNFEIKEVVVTLMKKSEKKGRPLHELNVLQLGMEAKVKTYDMTAKAYLKKISMQCFDFTDSKGEPLHIINSSNVTDEPLLKMLLTKADSDGPEFKTIHDSTKQRLKVSFASLDLVLHLEALLSFMDFLSSAAPFSEPSSSEKESELKPLVGESRSIAVKAVSSNISQKDVFDLKITAELNAFNVFVCDQKCNIADIKIHGMDASISVKPKQTDVFARLKDIIVMNVDLQSIHKKAVSILGDEVFRFQLTLYPDATEGEAYADMSKVDGKLSFKVGCIQIVYVHKFFMSLLNFLNNFQTAKEALSTATVQAAERAASSMKDLAQKSFRLLMDINLKAPVIIIPQSSVSPNAVIADLGLIRVENKFSLVPMEHYSLPPVIDKMNIELTQLKLSRTILQASLPQNDIEILKPVNMLLSIQRNLAAAWYVQIPGMEIKGKLKPMQVALSEDDLTVLMKILLENLGEASSQPSPTQSVQETVRVRKVDVSSVPDHLKEQEDWTDSKLSMNQIVSLQFDFHFESLSIILYNNDINQESGVAFHNDSFQLGELRLHLMASSGKMFKDGSMNVSVKLKTCTLDDLREGIERATSRMIDRKNDQDNNSSMIDISYKQDKNGSQIDAVLDKLYVCASVEFLMTVADFFIKAVPQSPENVAKETQILPRQTATGKVKIEKDDSVRPNMTLKAMITDPEVVFVASLTKADAPALTASFQCNLSLSTSKLEQMMEASVRDLKVLACPFLREKRGKNITTVLQPCSLFMEKCTWASGKQNINIMVKEFIIKISPIILNTVLTIMAALSPKTKEDGSKDTSKEMENLWGIKSINDYNTWFLGVDTATEITESFKGIEHSLIEENCGVVVESIQVTLECGLGHRTVPLLLAESKFSGNIKNWTSLMAAVADVTLQVHYYNEIHAVWEPLIERVEGKRQWNLRLDVKKNPVQDKSLLPGDDFIPEPQMAIHISSGNTMNITISKSCLNVFNNLAKGFSEGTASTFDYSLKDRAPFTVKNAVGVPIKVKPNCNLRVMGFPEKSDIFDVDAGQNLELEYASMVPSSQGNLSILSRQESSFFTLTIVPHGYTEVANIPVARPGRRLYNVRNPNASHSDSVLVQIDATEGNKVITLRSPLQIKNHFSIAFIIYKFVKNVKLLERIGIARPEEEFHVPLDSYRCQLFIQPAGILEHQYKESTTYISWKEELHRSREVRCMLQCPSVEVSFLPLIVNTVALPDELSYICTHGEDWDVAYIIHLYPSLTLRNLLPYSLRYLLEGTAETHELAEGSTADVLHSRISGEIMELVLVKYQGKNWNGHFRIRDTLPEFFPVCFSSDSTEVTTVDLSVHVRRIGSRMVLSVFSPYWLINKTTRVLQYRSEDIHVKHPADFRDIILFSFKKKNIFTKNKVQLKISTSAWSSSFSLDTVGSYGCVKCPANNMEYLVGVSIKMSSFNLSRIVTLTPFCTIANKSSLELEVGEIASDGSMPTNKWNYIASSECLPFWPESLSGKLCVRVVGCEGSSKPFFYNRQDNGTLLSLEDLNGGILVDVNTAEHSTVITFSDYHEGSAPALIMNHTPWDILTYKQSGSPEEMVLLPRQARLFAWADPTGTRKLTWTYAANVGEHDLLKDGCGQFPYDANIQIHWVSFLDGRQRVLLFTDDVALVSKALQAEEMEQADYEITLSLHSLGLSLVNNESKQEVSYIGITSSGVVWEVKPKQKWKPFSQKQIILLEQSYQKHQISRDHGWIKLDNNFEVNFDKDPMEMRLPIRSPIKRDFLSGIQIEFKQSSHQRSLRARLYWLQVDNQLPGAMFPVVFHPVAPPKSIALDSEPKPFIDVSVITRFNEYSKVLQFKYFMVLIQEMALKIDQGFLGAIIALFTPTTDPEAERRRTKLIQQDIDALNAELMETSMTDMSILSFFEHFHISPVKLHLSLSLGSGGEESDKEKQEMFAVHSVNLLLKSIGATLTDVDDLIFKLAYYEIRYQFYKRDQLIWSVVRHYSEQFLKQMYVLVLGLDVLGNPFGLIRGLSEGVEALFYEPFQGAVQGPEEFAEGLVIGVRSLFGHTVGGAAGVVSRITGSVGKGLAAITMDKEYQQKRREELSRQPRDFGDSLARGGKGFLRGVVGGVTGIITKPVEGAKKEGAAGFFKGIGKGLVGAVARPTGGIVDMASSTFQGIQRAAESTEEVSSLRPPRLIHEDGIIRPYDRQESEGSDLLEQELEIQE

SEQ ID NO: 96150 - protein, 3210 aa, Homo sapiens
  Payload ID: 19193
  Gene Name: vacuolar protein sorting 13 homolog D (S. cerevisiae)
  ENSP ID: ENSP00000011700
  MOD_RES (1)..(1): Any amino acid
XRTVGMANREKYGRKIATASIGGTKVNVSMGSTFDMNGSLGCLQLMDLTQDNVKNQYVVSIGNSVGYENIISDIGYFESVFVRMEDAALTEALSFTFVERSKQECFLNLKMASLHYNHSAKFLKELTLSMDELEENFRGMLKSAATKVTTVLATKTAEYSEMVSLFETPRKTREPFILEENEIYGFDLASSHLDTVKLILNINIESPVVSIPRKPGSPELLVGHLGQIFIQNFVAGDDESRSDRLQVEIKDIKLYSLNCTQLAGREAVGSEGSRMFCPPSGSGSANSQEEAHFTRHDFFESLHRGQAFHILNNTTIQFKLEKIPIERESELTFSLSPDDLGTSSIMKIEGKFVNPVQVVLAKHVYEQVLQTLDNLVYSEDLNKYPASATSSPCPDSPLPPLSTCGESSVERKENGLFSHSSLSNTSQKSLSVKEVKSFTQIQATFCISELQVQLSGDLTLGAQGLVSLKFQDFEVEFSKDHPQTLSIQIALHSLLMEDLLEKNPDSKYKNLMVSRGAPKPSSLAQKEYLSQSCPSVSNVEYPDMPRSLPSHMEEAPNVFQLYQRPTSASRKKQKEVQDKDYPLTPPPSPTVDEPKILVGKSKFDDSLVHINIFLVDKKHPEFSSSYNRVNRSIDVDFNCLDVLITLQTWVVILDFFGIGSTADNHAMRLPPEGILHNVKLEPHASMESGLQDPVNTKLDLKVHSLSLVLNKTTSELAKANVSKLVAHLEMIEGDLALQGSIGSLSLSDLTCHGEFYRERFTTSGEEALIFQTFKYGRPDPLLRREHDIRVSLRMASVQYVHTQRFQAEVVAFIQHFTQLQDVLGRQRAAIEGQTVRDQAQRCSRVLLDIEAGAPVLLIPESSRSNNLIVANLGKLKVKNKFLFAGFPGTFSLQDKESVPSASPTGIPKHSLRKTTSTEEPRGTHSQGQFTMPLAGMSLGSLKSEFVPSTSTKQQGPQPTLSVGQESSSPEDHVCLLDCVVVDLQDMDIFAAERHPREYSKAPEDSSGDLIFPSYFVRQTGGSLLTEPCRLKLQVERNLDKEISHTVPDISIHGNLSSVHCSLDLYKYKLIRGLLENNLGEPIEEFMRPYDLQDPRIHTVLSGEVYTCMCFLIDMVNVSLELKDPKRKEGAGSLARFDFKKCKLLYESFSNQTKSINLVSHSMMAFDTRYAGQKTSPGMTNVFSCIFQPAKNSSTTQGSIQIELHFRSTKDSSCFTVVLNNLRVFLIFDWLLLVHDFLHTPSDIKKQNHVTPSRHRNSSSESAIVPKTVKSGVVTKRSSLPVSNERHLEVKVNVTGTEFVVIEDVSCFDTNAIILKGTTVLTYKPRFVDRPFSGSLFGIEVFSCRLGNEHDTALSIVDPVQIQMELVGNSSYQNSSGLMDAFNSEDFPPVLEIQLQALDIRLSYNDVQLFLAIAKSIPEQANAAVPDSVALESDSVGTYLPGASRVGEEIREGTRHTLDPVLELQLARLQELGFSMDDCRKALLACQGQLKKAASWLFKNAEPLKSLSLASTSRDSPGAVAAPLISGVEIKAESVCICFIDDCMDCDVPLAELTFSRLNFLQRVRTSPEGYAHFTLSGDYYNRALSGWEPFIEPWPCSVSWQQQAASRLHPPRLKLEAKAKPRLDINITSVLIDQYVSTKESWMADYCKDDKDIESAKSEDWMGSSVDPPCFGQSLPLVYLRTRSTASLTNLEHQIYAREVKTPKRRQPFVPFALRNHTGCTLWFATLTTTPTRAALSHSGSPGVVPEGNGTFLDDTHNVSEWREVLTGEEIPFEFEARGKLRHRHTHDLRIHQLQVRVNGWEQVSPVSVDKVGTFFRYAAPDKNSSSSTIGSPSSRTNIIHPQVYFSSLPPVRVVFAVTMEGSARKVITVRSALIVRNRLETPMELRLDSPSAPDKPVVLPAIMPGDSFAVPLHLTSWRLQARPKGLGVFFCKAPIHWTNVVKTAEISSSKRECHSMDTEKSRFFRFCVAIKKENYPDYMPSNIFSDSAKQIFRQPGHTIYLLPTVVICNLLPCELDFYVKGMPINGTLKPGKEAALHTADTSQNIELGVSLENFPLCKELLIPPGTQNYMVRMRLYDVNRRQLNLTIRIVCRAEGSLKIFISAPYWLINKTGLPLIFRQDNAKTDAAGQFEEHELARSLSPLLFCYADKEQPNLCTMRIGRGIHPEGMPGWCQGFSLDGGSGVRALKVIQQGNRPGLIYNIGIDVKKGRGRYIDTCMVIFAPRYLLDNKSSHKLAFAQREFARGQGTANPEGYISTLPGSSVVFHWPRNDYDQLLCVRLMDVPNCIWSGGFEVNKNNSFHINMRDTLGKCFFLRVEITLRGATYRISFSDTDQLPPPFRIDNFSKVPVVFTQHGVAEPRLRTEVKPMTSLDYAWDEPTLPPFITLTVKGAGSSEINCNMNDFQDNRQLYYENFIYIAATYTFSGLQEGTGRPVASNKAITCAELVLDVSPKTQRVILKKKEPGKRSQLWRMTGTGMLAHEGSSVPHNPNKPSAARSTEGSAILDIAGLAAVTDNRYEPLMLRKPDRRRSTTQTWSFREGKLTCGLHGLVVQAKGGLSGLFDGAEVVLGPDTSMELLGPVPPEQQFINQKMRPGSGMLSIRVIPDGPTRALQITDFCHRKSSRSYEVDELPVTEQELQKLKNPDTEQELEVLVRLEGGIGLSLINKVPEELVFASLTGINVHYTQLATSHMLELSIQDVQVDNQLIGTTQPFMLYVTPLSNENEVIETGPAVQVNAVKFPSKSALTNIYKHLMITAQRFTVQIEEKLLLKLLSFFGYDQAESEVEKYDENLHEKTAEQGGTPIRYYFENLKISIPQIKLSVFTSNKLPLDLKALKSTLGFPLIRFEDAVINLDPFTRVHPYETKEFIINDILKHFQEELLSQAARILGSVDFLGNPMGLLNDVSEGVTGLIKYGNVGGLIRNVTHGVSNSAAKFAGTLSDGLGKTMDNRHQSEREYIRYHAATSGEHLVAGIHGLAHGIIGGLTSVITSTVEGVKTEGGVSGFISGLGKGLVGTVTKPVAGALDFASETAQAVRDTATLSGPRTQAQRVRKPRCCTGPQGLLPRYSESQAEGQEQLFKLTDNIQDEFFIAVENIDSYCVLISSKAVYFLKSGDYVDREAIFLEVKYDDLYHCLVSKDHGKVYVQVTKKAVSTSSGVSIPGPSHQKPMVHVKSEVLAVKLSQEINYAKSLYYEQQLMLRLSENREQLELDS

SEQ ID NO: 96151 - protein, 44 aa, Homo sapiens
  Payload ID: 19193
  Gene Name: vacuolar protein sorting 13 homolog D (S. cerevisiae)
  ENSP ID: ENSP00000441122
MVHVKSEVLAVKLSQEINYAKSLYYEQQLMLRLSENREQLELDS

SEQ ID NO: 96152 - protein, 45 aa, Homo sapiens
  Payload ID: 19193
  Gene Name: vacuolar protein sorting 13 homolog D (S. cerevisiae)
  ENSP ID: ENSP00000473375
ALTNIYKHLMITAQRFTVQIEEKLLLKLLSFFGYDQAESDLEFKL

SEQ ID NO: 96153 - protein, 4388 aa, Homo sapiens
  Payload ID: 19193
  Gene Name: vacuolar protein sorting 13 homolog D (S. cerevisiae)
  Uniprot ID: Q5THJ4
  ENSP ID: ENSP00000478104
MLEGLVAWVLNTYLGKYVNNLNTDQLSVALLKGAVELENLPLKKDALKELELPFEVKAGFIGKVTLQIPFYRPHVDPWVISISSLHLIGAPEKIQDFNDEKEKLLERERKKALLQALEEKWKNDRQQKGESYWYSVTASVVTRIVENIELKIQDVHLRFEDGVTNPSHPFAFGICIKNVSMQNAVNEPVQKLMRKKQLDVAEFSIYWDVDCTLLGDLPQMELQEAMARSMESRSHHYVLEPVFASALLKRNCSKKPLRSRHSPRIDCDIQLETIPLKLSQLQYRQIMEFLKELERKERQVKFRRWKPKVAISKNCREWWYFALNANLYEIREQRKRCTWDFMLHRARDAVSYTDKYFNKLKGGLLSTDDKEEMCRIEEEQSFEELKILRELVHDRFHKQEELAESLREPQFDSPGACPGAPEPGGGSGMLQYLQSWFPGWGGWYGQQTPEGNVVEGLSAEQQEQWIPEEILGTEEFFDPTADASCMNTYTKRDHVFAKLNLQLQRGTVTLLHKEQGTPQMNESAFMQLEFSDVKLLAESLPRRNSSLLSVRLGGLFLRDLATEGTMFPLLVFPNPQKEVGRVSQSFGLQTTSADRSDHYPAADPDGPVFEMLYERNPAHSHFERRLNVSTRPLNIIYNPQAIKKVADFFYKGKVHTSGFGYQSELELRVAEAARRQYNKLKMQTKAEIRQTLDRLLVGDFIEESKRWTVRLDISAPQVIFPDDFKFKNPVLVVVDLGRMLLTNTQDNSRRKSRDGSASEETQFSDDEYKTPLATPPNTPPPESSSSNGEKTPPFSGVEFSEEQLQAHLMSTKMYERYSLSFMDLQIMVGRVKDNWKHVQDIDVGPTHVVEKFNVHLQLERRLIYTSDPKYPGAVLSGNLPDLKIHINEDKISALKNCFALLTTPEMKTSDTQIKEKIFPQEEQRGSLQDSVMNLTQSIVLLEQHTREVLVESQLLLAEFKVNCMQLGVESNGRYISVLKVFGTNAHFVKRPYDAEVSLTVHGLLLVDTMQTYGADFDLLMASHKNLSFDIPTGSLRDSRAQSPVSGPNVAHLTDGATLNDRSATSVSLDKILTKEQESLIKLEYQFVSSECPSMNLDSTLQVISLQVNNLDIILNPETIVELIGFLQKSFPKEKDDLSPQPLMTDFERSFREQGTYQSTYEQNTEVAVEIHRLNLLLLRTVGMANREKYGRKIATASIGGTKVNVSMGSTFDMNGSLGCLQLMDLTQDNVKNQYVVSIGNSVGYENIISDIGYFESVFVRMEDAALTEALSFTFVERSKQECFLNLKMASLHYNHSAKFLKELTLSMDELEENFRGMLKSAATKVTTVLATKTAEYSEMVSLFETPRKTREPFILEENEIYGFDLASSHLDTVKLILNINIESPVVSIPRKPGSPELLVGHLGQIFIQNFVAGDDESRSDRLQVEIKDIKLYSLNCTQLAGREAVGSEGSRMFCPPSGSGSANSQEEAHFTRHDFFESLHRGQAFHILNNTTIQFKLEKIPIERESELTFSLSPDDLGTSSIMKIEGKFVNPVQVVLAKHVYEQVLQTLDNLVYSEDLNKYPASATSSPCPDSPLPPLSTCGESSVERKENGLFSHSSLSNTSQKSLSVKEVKSFTQIQATFCISELQVQLSGDLTLGAQGLVSLKFQDFEVEFSKDHPQTLSIQIALHSLLMEDLLEKNPDSKYKNLMVSRGAPKPSSLAQKEYLSQSCPSVSNVEYPDMPRSLPSHMEEAPNVFQLYQRPTSASRKKQKEVQDKDYPLTPPPSPTVDEPKILVGKSKFDDSLVHINIFLVDKKHPEFSSSYNRVNRSIDVDFNCLDVLITLQTWVVILDFFGIGSTADNHAMRLPPEGILHNVKLEPHASMESGLQDPVNTKLDLKVHSLSLVLNKTTSELAKANVSKLVAHLEMIEGDLALQGSIGSLSLSDLTCHGEFYRERFTTSGEEALIFQTFKYGRPDPLLRREHDIRVSLRMASVQYVHTQRFQAEVVAFIQHFTQLQDVLGRQRAAIEGQTVRDQAQRCSRVLLDIEAGAPVLLIPESSRSNNLIVANLGKLKVKNKFLFAGFPGTFSLQDKESVPSASPTGIPKHSLRKTTSTEEPRGTHSQGQFTMPLAGMSLGSLKSEFVPSTSTKQQGPQPTLSVGQESSSPEDHVCLLDCVVVDLQDMDIFAAERHPREYSKAPEDSSGDLIFPSYFVRQTGGSLLTEPCRLKLQVERNLDKEISHTVPDISIHGNLSSVHCSLDLYKYKLIRGLLENNLGEPIEEFMRPYDLQDPRIHTVLSGEVYTCMCFLIDMVNVSLELKDPKRKEGAGSLARFDFKKCKLLYESFSNQTKSINLVSHSMMAFDTRYAGQKTSPGMTNVFSCIFQPAKNSSTTQGSIQIELHFRSTKDSSCFTVVLNNLRVFLIFDWLLLVHDFLHTPSDIKKQNHVTPSRHRNSSSESAIVPKTVKSGVVTKRSSLPVSNERHLEVKVNVTGTEFVVIEDVSCFDTNAIILKGTTVLTYKPRFVDRPFSGSLFGIEVFSCRLGNEHDTALSIVDPVQIQMELVGNSSYQNSSGLMDAFNSEDFPPVLEIQLQALDIRLSYNDVQLFLAIAKSIPEQANAAVPDSVALESDSVGTYLPGASRVGEEIREGTRHTLDPVLELQLARLQELGFSMDDCRKALLACQGQLKKAASWLFKNAEPLKSLSLASTSRDSPGAVAAPLISGVEIKAESVCICFIDDCMDCDVPLAELTFSRLNFLQRVRTSPEGYAHFTLSGDYYNRALSGWEPFIEPWPCSVSWQQQAASRLHPPRLKLEAKAKPRLDINITSVLIDQYVSTKESWMADYCKDDKDIESAKSEDWMGSSVDPPCFGQSLPLVYLRTRSTASLTNLEHQIYARAEVKTPKRRQPFVPFALRNHTGCTLWFATLTTTPTRAALSHSGSPGVVPEGNGTFLDDTHNVSEWREVLTGEEIPFEFEARGKLRHRHTHDLRIHQLQVRVNGWEQVSPVSVDKVGTFFRYAAPDKNSSSSTIGSPSSRTNIIHPQVYFSSLPPVRVVFAVTMEGSARKVITVRSALIVRNRLETPMELRLDSPSAPDKPVVLPAIMPGDSFAVPLHLTSWRLQARPKGLGVFFCKAPIHWTNVVKTAEISSSKRECHSMDTEKSRFFRFCVAIKKENYPDYMPSNIFSDSAKQIFRQPGHTIYLLPTVVICNLLPCELDFYVKGMPINGTLKPGKEAALHTADTSQNIELGVSLENFPLCKELLIPPGTQNYMVRMRLYDVNRRQLNLTIRIVCRAEGSLKIFISAPYWLINKTGLPLIFRQDNAKTDAAGQFEEHELARSLSPLLFCYADKEQPNLCTMRIGRGIHPEGMPGWCQGFSLDGGSGVRALKVIQQGNRPGLIYNIGIDVKKGRGRYIDTCMVIFAPRYLLDNKSSHKLAFAQREFARGQGTANPEGYISTLPGSSVVFHWPRNDYDQLLCVRLMDVPNCIWSGGFEVNKNNSFHINMRDTLGKCFFLRVEITLRGATYRISFSDTDQLPPPFRIDNFSKVPVVFTQHGVAEPRLRTEVKPMTSLDYAWDEPTLPPFITLTVKGAGSSEINCNMNDFQDNRQLYYENFIYIAATYTFSGLQEGTGRPVASNKAITCAELVLDVSPKTQRVILKKKEPGKRSQLWRMTGTGMLAHEGSSVPHNPNKPSAARSTEGSAILDIAGLAAVTDNRYEPLMLRKPDRRRSTTQTWSFREGKLTCGLHGLVVQAKGGLSGLFDGAEVVLGPDTSMELLGPVPPEQQFINQKMRPGSGMLSIRVIPDGPTRALQITDFCHRKSSRSYEVDELPVTEQELQKLKNPDTEQELEVLVRLEGGIGLSLINKVPEELVFASLTGINVHYTQLATSHMLELSIQDVQVDNQLIGTTQPFMLYVTPLSNENEVIETGPAVQVNAVKFPSKSALTNIYKHLMITAQRFTVQIEEKLLLKLLSFFGYDQAESEVEKYDENLHEKTAEQGGTPIRYYFENLKISIPQIKLSVFTSNKLPLDLKALKSTLGFPLIRFEDAVINLDPFTRVHPYETKEFIINDILKHFQEELLSQAARILGSVDFLGNPMGLLNDVSEGVTGLIKYGNVGGLIRNVTHGVSNSAAKFAGTLSDGLGKTMDNRHQSEREYIRYHAATSGEHLVAGIHGLAHGIIGGLTSVITSTVEGVKTEGGVSGFISGLGKGLVGTVTKPVAGALDFASETAQAVRDTATLSGPRTQAQRVRKPRCCTGPQGLLPRYSESQAEGQEQLFKLTDNIQDEFFIAVENIDSYCVLISSKAVYFLKSGDYVDREAIFLEVKYDDLYHCLVSKDHGKVYVQVTKKAVSTSSGVSIPGPSHQKPMVHVKSEVLAVKLSQEINYAKSLYYEQQLMLRLSENREQLELDS

SEQ ID NO: 96154 - protein, 4363 aa, Homo sapiens
  Payload ID: 19193
  Gene Name: vacuolar protein sorting 13 homolog D (S. cerevisiae)
  Uniprot ID: Q5THJ4
  ENSP ID: ENSP00000482233
MLEGLVAWVLNTYLGKYVNNLNTDQLSVALLKGAVELENLPLKKDALKELELPFEVKAGFIGKVTLQIPFYRPHVDPWVISISSLHLIGAPEKIQDFNDEKEKLLERERKKALLQALEEKWKNDRQQKGESYWYSVTASVVTRIVENIELKIQDVHLRFEDGVTNPSHPFAFGICIKNVSMQNAVNEPVQKLMRKKQLDVAEFSIYWDVDCTLLGDLPQMELQEAMARSMESRSHHYVLEPVFASALLKRNCSKKPLRSRHSPRIDCDIQLETIPLKLSQLQYRQIMEFLKELERKERQVKFRRWKPKVAISKNCREWWYFALNANLYEIREQRKRCTWDFMLHRARDAVSYTDKYFNKLKGGLLSTDDKEEMCRIEEEQSFEELKILRELVHDRFHKQEELAESLREPQFDSPGACPGAPEPGGGSGMLQYLQSWFPGWGGWYGQQTPEGNVVEGLSAEQQEQWIPEEILGTEEFFDPTADASCMNTYTKRDHVFAKLNLQLQRGTVTLLHKEQGTPQMNESAFMQLEFSDVKLLAESLPRRNSSLLSVRLGGLFLRDLATEGTMFPLLVFPNPQKEVGRVSQSFGLQTTSADRSDHYPAADPDGPVFEMLYERNPAHSHFERRLNVSTRPLNIIYNPQAIKKVADFFYKGKVHTSGFGYQSELELRVAEAARRQYNKLKMQTKAEIRQTLDRLLVGDFIEESKRWTVRLDISAPQVIFPDDFKFKNPVLVVVDLGRMLLTNTQDNSRRKSRDGSASEETQFSDDEYKTPLATPPNTPPPESSSSNGEKTPPFSGVEFSEEQLQAHLMSTKMYERYSLSFMDLQIMVGRVKDNWKHVQDIDVGPTHVVEKFNVHLQLERRLIYTSDPKYPGAVLSGNLPDLKIHINEDKISALKNCFALLTTPEMKTSDTQIKEKIFPQEEQRGSLQDSVMNLTQSIVLLEQHTREVLVESQLLLAEFKVNCMQLGVESNGRYISVLKVFGTNAHFVKRPYDAEVSLTVHGLLLVDTMQTYGADFDLLMASHKNLSFDIPTGSLRDSRAQSPVSGPNVAHLTDGATLNDRSATSVSLDKILTKEQESLIKLEYQFVSSECPSMNLDSTLQVISLQVNNLDIILNPETIVELIGFLQKSFPKEKDDLSPQPLMTDFERSFREQGTYQSTYEQNTEVAVEIHRLNLLLLRTVGMANREKYGRKIATASIGGTKVNVSMGSTFDMNGSLGCLQLMDLTQDNVKNQYVVSIGNSVGYENIISDIGYFESVFVRMEDAALTEALSFTFVERSKQECFLNLKMASLHYNHSAKFLKELTLSMDELEENFRGMLKSAATKVTTVLATKTAEYSEMVSLFETPRKTREPFILEENEIYGFDLASSHLDTVKLILNINIESPVVSIPRKPGSPELLVGHLGQIFIQNFVAGDDESRSDRLQVEIKDIKLYSLNCTQLAGREAVGSEGSRMFCPPSGSGSANSQEEAHFTRHDFFESLHRGQAFHILNNTTIQFKLEKIPIERESELTFSLSPDDLGTSSIMKIEGKFVNPVQVVLAKHVYEQVLQTLDNLVYSEDLNKYPASATSSPCPDSPLPPLSTCGESSVERKENGLFSHSSLSNTSQKSLSVKEVKSFTQIQATFCISELQVQLSGDLTLGAQGLVSLKFQDFEVEFSKDHPQTLSIQIALHSLLMEDLLEKNPDSKYKNLMVSRGAPKPSSLAQKEYLSQSCPSVSNVEYPDMPRSLPSHMEEAPNVFQLYQRPTSASRKKQKEVQDKDYPLTPPPSPTVDEPKILVGKSKFDDSLVHINIFLVDKKHPEFSSSYNRVNRSIDVDFNCLDVLITLQTWVVILDFFGIGSTADNHAMRLPPEGILHNVKLEPHASMESGLQDPVNTKLDLKVHSLSLVLNKTTSELAKANVSKLVAHLEMIEGDLALQGSIGSLSLSDLTCHGEFYRERFTTSGEEALIFQTFKYGRPDPLLRREHDIRVSLRMASVQYVHTQRFQAEVVAFIQHFTQLQDVLGRQRAAIEGQTVRDQAQRCSRVLLDIEAGAPVLLIPESSRSNNLIVANLGKLKVKNKFLFAGFPGTFSLQDKESVPSASPTGIPKHSLRKTTSTEEPRGTHSQGQFTMPLAGMSLGSLKSEFVPSTSTKQQGPQPTLSVGQESSSPEDHVCLLDCVVVDLQDMDIFAAERHPREYSKAPEDSSGDLIFPSYFVRQTGGSLLTEPCRLKLQVERNLDKEISHTVPDISIHGNLSSVHCSLDLYKYKLIRGLLENNLGEPIEEFMRPYDLQDPRIHTVLSGEVYTCMCFLIDMVNVSLELKDPKRKEGAGSLARFDFKKCKLLYESFSNQTKSINLVSHSMMAFDTRYAGQKTSPGMTNVFSCIFQPAKNSSTTQGSIQIELHFRSTKDSSCFTVVLNNLRVFLIFDWLLLVHDFLHTPSDIKKQNHVTPSRHRNSSSESAIVPKTVKSGVVTKRSSLPVSNERHLEVKVNVTGTEFVVIEDVSCFDTNAIILKGTTVLTYKPRFVDRPFSGSLFGIEVFSCRLGNEHDTALSIVDPVQIQMELVGNSSYQNSSGLMDAFNSEDFPPVLEIQLQALDIRLSYNDVQLFLAIAKSIPEQANAAVPDSVALESDSVGTYLPGASRVGEEIREGTRHTLDPVLELQLARLQELGFSMDDCRKALLACQGQLKKAASWLFKNAEPLKSLSLASTSRDSPGAVAAPLISGVEIKAESVCICFIDDCMDCDVPLAELTFSRLNFLQRVRTSPEGYAHFTLSGDYYNRALSGWEPFIEPWPCSVSWQQQAASRLHPPRLKLEAKAKPRLDINITSVLIDQYVSTKESWMADYCKDDKDIESAKSEDWMGSSVDPPCFGQTEVKTPKRRQPFVPFALRNHTGCTLWFATLTTTPTRAALSHSGSPGVVPEGNGTFLDDTHNVSEWREVLTGEEIPFEFEARGKLRHRHTHDLRIHQLQVRVNGWEQVSPVSVDKVGTFFRYAAPDKNSSSSTIGSPSSRTNIIHPQVYFSSLPPVRVVFAVTMEGSARKVITVRSALIVRNRLETPMELRLDSPSAPDKPVVLPAIMPGDSFAVPLHLTSWRLQARPKGLGVFFCKAPIHWTNVVKTAEISSSKRECHSMDTEKSRFFRFCVAIKKENYPDYMPSNIFSDSAKQIFRQPGHTIYLLPTVVICNLLPCELDFYVKGMPINGTLKPGKEAALHTADTSQNIELGVSLENFPLCKELLIPPGTQNYMVRMRLYDVNRRQLNLTIRIVCRAEGSLKIFISAPYWLINKTGLPLIFRQDNAKTDAAGQFEEHELARSLSPLLFCYADKEQPNLCTMRIGRGIHPEGMPGWCQGFSLDGGSGVRALKVIQQGNRPGLIYNIGIDVKKGRGRYIDTCMVIFAPRYLLDNKSSHKLAFAQREFARGQGTANPEGYISTLPGSSVVFHWPRNDYDQLLCVRLMDVPNCIWSGGFEVNKNNSFHINMRDTLGKCFFLRVEITLRGATYRISFSDTDQLPPPFRIDNFSKVPVVFTQHGVAEPRLRTEVKPMTSLDYAWDEPTLPPFITLTVKGAGSSEINCNMNDFQDNRQLYYENFIYIAATYTFSGLQEGTGRPVASNKAITCAELVLDVSPKTQRVILKKKEPGKRSQLWRMTGTGMLAHEGSSVPHNPNKPSAARSTEGSAILDIAGLAAVTDNRYEPLMLRKPDRRRSTTQTWSFREGKLTCGLHGLVVQAKGGLSGLFDGAEVVLGPDTSMELLGPVPPEQQFINQKMRPGSGMLSIRVIPDGPTRALQITDFCHRKSSRSYEVDELPVTEQELQKLKNPDTEQELEVLVRLEGGIGLSLINKVPEELVFASLTGINVHYTQLATSHMLELSIQDVQVDNQLIGTTQPFMLYVTPLSNENEVIETGPAVQVNAVKFPSKSALTNIYKHLMITAQRFTVQIEEKLLLKLLSFFGYDQAESEVEKYDENLHEKTAEQGGTPIRYYFENLKISIPQIKLSVFTSNKLPLDLKALKSTLGFPLIRFEDAVINLDPFTRVHPYETKEFIINDILKHFQEELLSQAARILGSVDFLGNPMGLLNDVSEGVTGLIKYGNVGGLIRNVTHGVSNSAAKFAGTLSDGLGKTMDNRHQSEREYIRYHAATSGEHLVAGIHGLAHGIIGGLTSVITSTVEGVKTEGGVSGFISGLGKGLVGTVTKPVAGALDFASETAQAVRDTATLSGPRTQAQRVRKPRCCTGPQGLLPRYSESQAEGQEQLFKLTDNIQDEFFIAVENIDSYCVLISSKAVYFLKSGDYVDREAIFLEVKYDDLYHCLVSKDHGKVYVQVTKKAVSTSSGVSIPGPSHQKPMVHVKSEVLAVKLSQEINYAKSLYYEQQLMLRLSENREQLELDS

SEQ ID NO: 96155 - protein, 839 aa, Homo sapiens
  Payload ID: 19194
  Gene Name: vacuolar protein sorting 16 homolog (S. cerevisiae)
  Uniprot ID: Q9H269
  ENSP ID: ENSP00000369810
MDCYTANWNPLGDSAFYRKYELYSMDWDLKEELRDCLVAAAPYGGPIALLRNPWRKEKAASVRPVLDIYSASGMPLASLLWKSGPVVSLGWSAEEELLCVQEDGAVLVYGLHGDFRRHFSMGNEVLQNRVLDARIFHTEFGSGVAILTGAHRFTLSANVGDLKLRRMPEVPGLQSAPSCWTVLCQDRVAHILLAVGPDLYLLDHAACSAVTPPGLAPGVSSFLQMAVSFTYRHLALFTDTGYIWMGTASLKEKLCEFNCNIRAPPKQMVWCSRPRSKERAVVVAWERRLMVVGDAPESIQFVLDEDSYLVPELDGVRIFSRSTHEFLHEVPAASEEIFKIASMAPGALLLEAQKEYEKESQKADEYLREIQELGQLTQAVQQCIEAAGHEHQPDMQKSLLRAASFGKCFLDRFPPDSFVHMCQDLRVLNAVRDYHIGIPLTYSQYKQLTIQVLLDRLVLRRLYPLAIQICEYLRLPEVQGVSRILAHWACYKVQQKDVSDEDVARAINQKLGDTPGVSYSDIAARAYGCGRTELAIKLLEYEPRSGEQVPLLLKMKRSKLALSKAIESGDTDLVFTVLLHLKNELNRGDFFMTLRNQPMALSLYRQFCKHQELETLKDLYNQDDNHQELGSFHIRASYAAEERIEGRVAALQTAADAFYKAKNEFAAKATEDQMRLLRLQRRLEDELGGQFLDLSLHDTVTTLILGGHNKRAEQLARDFRIPDKRLWWLKLTALADLEDWEELEKFSKSKKSPIGYLPFVEICMKQHNKYEAKKYASRVGPEQKVKALLLVGDVAQAADVAIEHRNEAELSLVLSHCTGATDGATADKIQRARAQAQKK

SEQ ID NO: 96156 - protein, 695 aa, Homo sapiens
  Payload ID: 19194
  Gene Name: vacuolar protein sorting 16 homolog (S. cerevisiae)
  Uniprot ID: Q9H269
  ENSP ID: ENSP00000369836
MDCYTANWNPLGDSAFYRKYELYSMDWDLKEELRDCLVAAAPYGGPIALLRNPWRKEKAASVRPVLDIYSASGMPLASLLWKSGPVVSLGWSAEEELLCVQEDGAVLVYGLHGDFRRHFSMGNEVLQNRVLDARIFHTEFGSGVAILTGAHRFTLSANVGDLKLRRMPEVPGLQSAPSCWTVLCQDRVAHILLAVGPDLYLLDHAACSAVTPPGLAPGVSSFLQMAVSFTYRHLALFTDTGYIWMGTASLKEKLCEFNCNIRAPPKQMVWCSRPRSKERAVVVAWERRLMVVGDAPESIQYKQLTIQVLLDRLVLRRLYPLAIQICEYLRLPEVQGVSRILAHWACYKVQQKDVSDEDVARAINQKLGDTPGVSYSDIAARAYGCGRTELAIKLLEYEPRSGEQVPLLLKMKRSKLALSKAIESGDTDLVFTVLLHLKNELNRGDFFMTLRNQPMALSLYRQFCKHQELETLKDLYNQDDNHQELGSFHIRASYAAEERIEGRVAALQTAADAFYKAKNEFAAKATEDQMRLLRLQRRLEDELGGQFLDLSLHDTVTTLILGGHNKRAEQLARDFRIPDKRLWWLKLTALADLEDWEELEKFSKSKKSPIGYLPFVEICMKQHNKYEAKKYASRVGPEQKVKALLLVGDVAQAADVAIEHRNEAELSLVLSHCTGATDGATADKIQRARAQAQKK

SEQ ID NO: 96157 - protein, 226 aa, Homo sapiens
  Payload ID: 19194
  Gene Name: vacuolar protein sorting 16 homolog (S. cerevisiae)
  ENSP ID: ENSP00000409840
MGAPLEVLQNRVLDARIFHTEFGSGVAILTGAHRFTLSANVGDLKLRRMPEVPGLQSAPSCWTVLCQDRVAHILLAVGPDLYLLDHAACSAVTPPGLAPGVSSFLQMAVSFTYRHLALFTDTGYIWMGTASLKEKLCEFNCNIRAPPKQMVWCSRPRSKERAVVVAWERRLMVVGDAPESIQFVLDEDSYLVPELDGVRIFSRSTHEFLHEVPAASEEIFKIASMA

SEQ ID NO: 96158 - protein, 274 aa, Homo sapiens
  Payload ID: 19194
  Gene Name: vacuolar protein sorting 16 homolog (S. cerevisiae)
  ENSP ID: ENSP00000417031
MGAPLEVLQNRVLDARIFHTEFGSGVAILTGAHRFTLSANVGDLKLRRMPEVPGLQSAPSCWTVLCQDRVAHILLAVGPDLYLLDHAACSAVTPPGLAPGVSSFLQMAVSFTYRHLALFTDTGYIWMGTASLKEKLCEFNCNIRAPPKQMVWCSRPRSKERAVVVAWERRLMVVGDAPESIQYKQLTIQVLLDRLVLRRLYPLAIQICEYLRLPEVQGVSRILAHWACYKVQQKDVSDEDVARAINQKLGDTPGVSYSDIAARAYGCGRTELAI

SEQ ID NO: 96159 - protein, 973 aa, Homo sapiens
  Payload ID: 19195
  Gene Name: vacuolar protein sorting 18 homolog (S. cerevisiae)
  Uniprot ID: Q9P253
  ENSP ID: ENSP00000220509
MASILDEYENSLSRSAVLQPGCPSVGIPHSGYVNAQLEKEVPIFTKQRIDFTPSERITSLVVSSNQLCMSLGKDTLLRIDLGKANEPNHVELGRKDDAKVHKMFLDHTGSHLLIALSSTEVLYVNRNGQKVRPLARWKGQLVESVGWNKALGTESSTGPILVGTAQGHIFEAELSASEGGLFGPAPDLYFRPLYVLNEEGGPAPVCSLEAERGPDGRSFVIATTRQRLFQFIGRAAEGAEAQGFSGLFAAYTDHPPPFREFPSNLGYSELAFYTPKLRSAPRAFAWMMGDGVLYGALDCGRPDSLLSEERVWEYPEGVGPGASPPLAIVLTQFHFLLLLADRVEAVCTLTGQVVLRDHFLEKFGPLKHMVKDSSTGQLWAYTERAVFRYHVQREARDVWRTYLDMNRFDLAKEYCRERPDCLDTVLAREADFCFRQRRYLESARCYALTQSYFEEIALKFLEARQEEALAEFLQRKLASLKPAERTQATLLTTWLTELYLSRLGALQGDPEALTLYRETKECFRTFLSSPRHKEWLFASRASIHELLASHGDTEHMVYFAVIMQDYERVVAYHCQHEAYEEALAVLARHRDPQLFYKFSPILIRHIPRQLVDAWIEMGSRLDARQLIPALVNYSQGGEVQQVSQAIRYMEFCVNVLGETEQAIHNYLLSLYARGRPDSLLAYLEQAGASPHRVHYDLKYALRLCAEHGHHRACVHVYKVLELYEEAVDLALQVDVDLAKQCADLPEEDEELRKKLWLKIARHVVQEEEDVQTAMACLASCPLLKIEDVLPFFPDFVTIDHFKEAICSSLKAYNHHIQELQREMEEATASAQRIRRDLQELRGRYGTVEPQDKCATCDFPLLNRPFYLFLCGHMFHADCLLQAVRPGLPAYKQARLEELQRKLGAAPPPAKGSARAKEAEGGAATAGPSREQLKADLDELVAAECVYCGELMIRSIDRPFIDPQRYEEEQLSWL

SEQ ID NO: 96160 - protein, 130 aa, Homo sapiens
  Payload ID: 19195
  Gene Name: vacuolar protein sorting 18 homolog (S. cerevisiae)
  ENSP ID: ENSP00000453265
MASILDEYENSLSRSAVLQPGCPSVGIPHSGYVNAQLEKEVPIFTKQRIDFTPSERITSLVVSSNQLCMSLGKDTLLRDGISPCCPVWSQTPELKQSTHLGLPKCWDYRLSQCTWPVFSILCIDVYFREH

SEQ ID NO: 96161 - protein, 121 aa, Homo sapiens
  Payload ID: 19195
  Gene Name: vacuolar protein sorting 18 homolog (S. cerevisiae)
  ENSP ID: ENSP00000453555
MASILDEYENSLSRSAVLQPGCPSVGIPHSGYVNAQLEKEVPIFTKQRIDFTPSERITSLVVSSNQLCMSLGKDTLLRIDLGKANEPNHVELGRKDDAKVHKMFLDHTGGCGPGQAVCRPA

SEQ ID NO: 96162 - protein, 176 aa, Homo sapiens
  Payload ID: 19196
  Gene Name: vacuolar protein sorting 25 homolog (S. cerevisiae)
  Uniprot ID: Q9BRG1
  ENSP ID: ENSP00000253794
MAMSFEWPWQYRFPPFFTLQPNVDTRQKQLAAWCSLVLSFCRLHKQSSMTVMEAQESPLFNNVKLQRKLPVESIQIVLEELRKKGNLEWLDKSKSSFLIMWRRPEEWGKLIYQWVSRSGQNNSVFTLYELTNGEDTEDEEFHGLDEATLLRALQALQQEHKAEIITVSDGRGVKFF

SEQ ID NO: 96163 - protein, 111 aa, Homo sapiens
  Payload ID: 19196
  Gene Name: vacuolar protein sorting 25 homolog (S. cerevisiae)
  ENSP ID: ENSP00000465798
  MOD_RES (1)..(1): Any amino acid
XRFPPFFTLQPNVDTRQKQLAAWCSLVLSFCRLHKQSSMTVMEAQESPLFNNVKLQRKLPVESIQIVLEELRKKEFHGLDEATLLRALQALQQEHKAEIITVSDGRGVKFF

SEQ ID NO: 96164 - protein, 108 aa, Homo sapiens
  Payload ID: 19196
  Gene Name: vacuolar protein sorting 25 homolog (S. cerevisiae)
  ENSP ID: ENSP00000466909
MTVMEAQESPLFNNVKLQRKLPVESIQIVLEELRKKGNLEWLDKSKSSFLIMWRRPEEWGKLIYQWVSRSGQNNSVFTLYELTNGEDTEDEEFHGLDEATLLRALQAL

SEQ ID NO: 96165 - protein, 99 aa, Homo sapiens
  Payload ID: 19196
  Gene Name: vacuolar protein sorting 25 homolog (S. cerevisiae)
  ENSP ID: ENSP00000467225
MAMSFEWPWQYRFPPFFTLQPNVDTRQKQLAAWCSLVLSFCRLHKQSSMTVMEAQESPLFNNVKLQRILPQALPQPIHMHFCAFTHAQTPPRASPLLPM

SEQ ID NO: 96166 - protein, 221 aa, Homo sapiens
  Payload ID: 19197
  Gene Name: vacuolar protein sorting 28 homolog (S. cerevisiae)
  Uniprot ID: Q9UK41
  ENSP ID: ENSP00000292510
MFHGIPATPGIGAPGNKPELYEEVKLYKNAREREKYDNMAELFAVVKTMQALEKAYIKDCVSPSEYTAACSRLLVQYKAAFRQVQGSEISSIDEFCRKFRLDCPLAMERIKEDRPITIKDDKGNLNRCIADVVSLFITVMDKLRLEIRAMDEIQPDLRELMETMHRMSHLPPDFEGRQTVSQWLQTLSGMSASDELDDSQVRQMLFDLESAYNAFNRFLHA

SEQ ID NO: 96167 - protein, 233 aa, Homo sapiens
  Payload ID: 19197
  Gene Name: vacuolar protein sorting 28 homolog (S. cerevisiae)
  Uniprot ID: Q9UK41
  ENSP ID: ENSP00000366565
MFHGIPATPGIGAPGNKPELYEEVKLYKNAREREKYDNMAELFAVVKTMQALEKAYIKDCVSPSEYTAACSRLLVQYKAAFRQVQGSEISSIDEFCRKFRLDCPLAMERIKEDRPITIKDDKGNLNRCIADVVSLFITVMDKLRLEIRAMDEIQPDLRELMETMHRMSHLPPDFEGRQTVSQWWVSLPARQSPAVPETLPARRSPAVPLRPSAPTCPVLHSQAADPERHVGVR

SEQ ID NO: 96168 - protein, 185 aa, Homo sapiens
  Payload ID: 19197
  Gene Name: vacuolar protein sorting 28 homolog (S. cerevisiae)
  ENSP ID: ENSP00000431243
MFHGIPATPGIGAPGNKPELYEEVKLYKNAREREKYDNMAELFAVVKTMQALEKAYIKDCVSPSEQVQGSEISSIDEFCRKFRLDCPLAMERIKEDRPITIKDDKGNLNRCIADVVSLFITVMDKLRLEIRAMDEIQPDLRELMETMHRMSHLPPDFEGRQTVSQWLQTLSGMSASDELDDSQVR

SEQ ID NO: 96169 - protein, 53 aa, Homo sapiens
  Payload ID: 19197
  Gene Name: vacuolar protein sorting 28 homolog (S. cerevisiae)
  ENSP ID: ENSP00000432395
MFHGIPATPGIGAPGNKPELYEEVKLYKNAREREKYDNMAELFAVVKTMQALE

SEQ ID NO: 96170 - protein, 35 aa, Homo sapiens
  Payload ID: 19197
  Gene Name: vacuolar protein sorting 28 homolog (S. cerevisiae)
  ENSP ID: ENSP00000433228
MFHGIPATPGIGAPGNKPELYEEVKLYKNAREREK

SEQ ID NO: 96171 - protein, 221 aa, Homo sapiens; identical to SEQ ID NO: 96166
  Payload ID: 19197
  Gene Name: vacuolar protein sorting 28 homolog (S. cerevisiae)
  Uniprot ID: Q9UK41
  ENSP ID: ENSP00000434064

SEQ ID NO: 96172 - protein, 161 aa, Homo sapiens
  Payload ID: 19197
  Gene Name: vacuolar protein sorting 28 homolog (S. cerevisiae)
  ENSP ID: ENSP00000434393
MFHGIPATPGIGAPGNKPELYEEVKLYKNAREREKYDNMAELFAVVKTMQALEKAYIKDCVSPSEYTAACSRLLVQYKAAFRQVQGSEISSIDEFCRKFRLDCPLAMERIKEDRPITIKDDKGNLNRCIADVVSLFITVMDKLRLEIRAMDEIQPDLRELM

SEQ ID NO: 96173 - protein, 233 aa, Homo sapiens; identical to SEQ ID NO: 96167
  Payload ID: 19197
  Gene Name: vacuolar protein sorting 28 homolog (S. cerevisiae)
  Uniprot ID: Q9UK41
  ENSP ID: ENSP00000434556

SEQ ID NO: 96174 - protein, 35 aa, Homo sapiens; identical to SEQ ID NO: 96170
  Payload ID: 19197
  Gene Name: vacuolar protein sorting 28 homolog (S. cerevisiae)
  ENSP ID: ENSP00000436102

SEQ ID NO: 96175 - protein, 596 aa, Homo sapiens
  Payload ID: 19198
  Gene Name: vacuolar protein sorting 33 homolog A (S. cerevisiae)
  Uniprot ID: Q96AX1
  ENSP ID: ENSP00000267199
MAAHLSYGRVNLNVLREAVRRELREFLDKCAGSKAIVWDEYLTGPFGLIAQYSLLKEHEVEKMFTLKGNRLPAADVKNIIFFVRPRLELMDIIAENVLSEDRRGPTRDFHILFVPRRSLLCEQRLKDLGVLGSFIHREEYSLDLIPFDGDLLSMESEGAFKECYLEGDQTSLYHAAKGLMTLQALYGTIPQIFGKGECARQVANMMIRMKREFTGSQNSIFPVFDNLLLLDRNVDLLTPLATQLTYEGLIDEIYGIQNSYVKLPPEKFAPKKQGDGGKDLPTEAKKLQLNSAEELYAEIRDKNFNAVGSVLSKKAKIISAAFEERHNAKTVGEIKQFVSQLPHMQAARGSLANHTSIAELIKDVTTSEDFFDKLTVEQEFMSGIDTDKVNNYIEDCIAQKHSLIKVLRLVCLQSVCNSGLKQKVLDYYKREILQTYGYEHILTLHNLEKAGLLKPQTGGRNNYPTIRKTLRLWMDDVNEQNPTDISYVYSGYAPLSVRLAQLLSRPGWRSIEEVLRILPGPHFEERQPLPTGLQKKRQPGENRVTLIFFLGGVTFAEIAALRFLSQLEDGGTEYVIATTKLMNGTSWIEALMEKPF

SEQ ID NO: 96176 - protein, 154 aa, Homo sapiens
  Payload ID: 19198
  Gene Name: vacuolar protein sorting 33 homolog A (S. cerevisiae)
  ENSP ID: ENSP00000439255
MFCFQQVANMMIRMKREFTGSQNSIFPVFDNLLLLDRNVDLLTPLATQLTYEGLIDEIYGIQNSYVKLPPEKFAPKKQGDGGKDLPTEAKKLQLNSAEELYAEIRDKNFNAVGSVLSKKAKIISAAFEERHNAKTVGEIKQFVSQLPHMQAARG

SEQ ID NO: 96177 - protein, 42 aa, Homo sapiens
  Payload ID: 19198
  Gene Name: vacuolar protein sorting 33 homolog A (S. cerevisiae)
  ENSP ID: ENSP00000442392
MAAHLSYGRVNLNVLREAVRRELREFLDKCAGSKGLSVTLSY

SEQ ID NO: 96178 - protein, 186 aa, Homo sapiens
  Payload ID: 19198
  Gene Name: vacuolar protein sorting 33 homolog A (S. cerevisiae)
  ENSP ID: ENSP00000442951
MAAHLSYGRVNLNVLREAVRRELREFLDKCAGSKAIVWDEYLTGPFGLIAQYSLLKEHEVEKMFTLKGNRLPAADVKNIIFFVRPRLELMDIIAENVLSEDRRGPTRDFHILFVPRRSLLCEQRLKDLGVLGSFIHREEYSLDLIPFDGDLLSMESEGAFKSCSVAPAGVQWHNLSSLQPPPPEFK

SEQ ID NO: 96179 - protein, 617 aa, Homo sapiens
  Payload ID: 19199
  Gene Name: vacuolar protein sorting 33 homolog B (yeast)
  Uniprot ID: Q9H267
  ENSP ID: ENSP00000327650
MAFPHRPDAPELPDFSMLKRLARDQLIYLLEQLPGKKDLFIEADLMSPLDRIANVSILKQHEVDKLYKVENKPALSSNEQLCFLVRPRIKNMRYIASLVNADKLAGRTRKYKVIFSPQKFYACEMVLEEEGIYGDVSCDEWAFSLLPLDVDLLSMELPEFFRDYFLEGDQRWINTVAQALHLLSTLYGPFPNCYGIGRCAKMAYELWRNLEEEEDGETKGRRPEIGHIFLLDRDVDFVTALCSQVVYEGLVDDTFRIKCGSVDFGPEVTSSDKSLKVLLNAEDKVFNEIRNEHFSNVFGFLSQKARNLQAQYDRRRGMDIKQMKNFVSQELKGLKQEHRLLSLHIGACESIMKKKTKQDFQELIKTEHALLEGFNIRESTSYIEEHIDRQVSPIESLRLMCLLSITENGLIPKDYRSLKTQYLQSYGPEHLLTFSNLRRAGLLTEQAPGDTLTAVESKVSKLVTDKAAGKITDAFSSLAKRSNFRAISKKLNLIPRVDGEYDLKVPRDMAYVFGGAYVPLSCRIIEQVLERRSWQGLDEVVRLLNCSDFAFTDMTKEDKASSESLRLILVVFLGGCTFSEISALRFLGREKGYRFIFLTTAVTNSARLMEAMSEVKA

SEQ ID NO: 96180 - protein, 590 aa, Homo sapiens
  Payload ID: 19199
  Gene Name: vacuolar protein sorting 33 homolog B (yeast)
  ENSP ID: ENSP00000444053
MAFPHRPDAPELPDFSMLKRLARDQLIYLLEQQHEVDKLYKVENKPALSSNEQLCFLVRPRIKNMRYIASLVNADKLAGRTRKYKVIFSPQKFYACEMVLEEEGIYGDVSCDEWAFSLLPLDVDLLSMELPEFFRDYFLEGDQRWINTVAQALHLLSTLYGPFPNCYGIGRCAKMAYELWRNLEEEEDGETKGRRPEIGHIFLLDRDVDFVTALCSQVVYEGLVDDTFRIKCGSVDFGPEVTSSDKSLKVLLNAEDKVFNEIRNEHFSNVFGFLSQKARNLQAQYDRRRGMDIKQMKNFVSQELKGLKQEHRLLSLHIGACESIMKKKTKQDFQELIKTEHALLEGFNIRESTSYIEEHIDRQVSPIESLRLMCLLSITENGLIPKDYRSLKTQYLQSYGPEHLLTFSNLRRAGLLTEQAPGDTLTAVESKVSKLVTDKAAGKITDAFSSLAKRSNFRAISKKLNLIPRVDGEYDLKVPRDMAYVFGGAYVPLSCRIIEQVLERRSWQGLDEVVRLLNCSDFAFTDMTKEDKASSESLRLILVVFLGGCTFSEISALRFLGREKGYRFIFLTTAVTNSARLMEAMSEVKA

SEQ ID NO: 96181 - protein, 80 aa, Homo sapiens
  Payload ID: 19199
  Gene Name: vacuolar protein sorting 33 homolog B (yeast)
  ENSP ID: ENSP00000460413
MAFPHRPDAPELPDFSMLKRLARDQLIYLLEQLPGKKDLFIEADLMSPLDRIANVSILKIVLLGQTPHQEYAIHCQSCQC

SEQ ID NO: 96182 - protein, 386 aa, Homo sapiens
  Payload ID: 19200
  Gene Name: vacuolar protein sorting 36 homolog (S. cerevisiae)
  Uniprot ID: Q86VN1
  ENSP ID: ENSP00000367299
MDRFVWTSGLLEINETLVIQQRGVRIYDGEEKIKFDAGTLLLSTHRLIWRDQKNHECCMAILLSQIVFIEEQAAGIGKSAKIVVHLHPAPPNKEPGPFQSSKNSYIKLSFKEHGQIEFYRRLSEEMTQRRWENMPVSQSLQTNRGPQPGRIRAVGIVGIERKLEEKRKETDKNISEAFEDLSKLMIKAKEMVELSKSIANKIKDKQGDITEDETIRFKSYLLSMGIANPVTRETYGSGTQYHMQLAKQLAGILQVPLEERGGIMSLTEVYCLVNRARGMELLSPEDLVNACKMLEALKLPLRLRVFDSGVMVIELQSHKEEEMVASALETVSEKGSLTSEEFAKLVGMSVLLAKERLLLAEKMGHLCRDDSVEGLRFYPNLFMTQS

SEQ ID NO: 96183 - protein, 328 aa, Homo sapiens
  Payload ID: 19200
  Gene Name: vacuolar protein sorting 36 homolog (S. cerevisiae)
  Uniprot ID: Q86VN1
  ENSP ID: ENSP00000484968
MAILLSQIVFIEEQAAGIGKSAKIVVHLHPAPPNKEPGPFQSSKNSYIKLSFKEHGQIEFYRRLSEEMTQRRWENMPVSQSLQTNRGPQPGRIRAVGIVGIERKLEEKRKETDKNISEAFEDLSKLMIKAKEMVELSKSIANKIKDKQGDITEDETIRFKSYLLSMGIANPVTRETYGSGTQYHMQLAKQLAGILQVPLEERGGIMSLTEVYCLVNRARGMELLSPEDLVNACKMLEALKLPLRLRVFDSGVMVIELQSHKEEEMVASALETVSEKGSLTSEEFAKLVGMSVLLAKERLLLAEKMGHLCRDDSVEGLRFYPNLFMTQS

SEQ ID NO: 96184 - protein, 397 aa, Homo sapiens
  Payload ID: 19201
  Gene Name: vacuolar protein sorting 37 homolog A (S. cerevisiae)
  Uniprot ID: Q8NEZ2
  ENSP ID: ENSP00000318629
MSWLFPLTKSASSSAAGSPGGLTSLQQQKQRLIESLRNSHSSIAEIQKDVEYRLPFTINNLTININILLPPQFPQEKPVISVYPPIRHHLMDKQGVYVTSPLVNNFTMHSDLGKIIQSLLDEFWKNPPVLAPTSTAFPYLYSNPSGMSPYASQGFPFLPPYPPQEANRSITSLSVADTVSSSTTSHTTAKPAAPSFGVLSNLPLPIPTVDASIPTSQNGFGYKMPDVPDAFPELSELSVSQLTDMNEQEEVLLEQFLTLPQLKQIITDKDDLVKSIEELARKNLLLEPSLEAKRQTVLDKYELLTQMKSTFEKKMQRQHELSESCSASALQARLKVAAHEAEEESDNIAEDFLEGKMEIDDFLSSFMEKRTICHCRRAKEEKLQQAIAMHSQFHAPL

SEQ ID NO: 96185 - protein, 185 aa, Homo sapiens
  Payload ID: 19201
  Gene Name: vacuolar protein sorting 37 homolog A (S. cerevisiae)
  Uniprot ID: Q8NEZ2
  ENSP ID: ENSP00000412824
MSWLFPLTKSASSSAAGSPGGLTSLQQQKQRLIESLRNSHSSIAEIQKDVEYRLPFTINNLTININILLPPQFPQEKPVISVYPPIRHHLMDKQGVYVTSPLVNNFTMHSDLGKIIQSLLDEFWKNPPVLAPTSTAFPYQLEIRWHHPHCLEISLARSSNSLGFSISSSISSTRSKQEYHFFICC

SEQ ID NO: 96186 - protein, 317 aa, Homo sapiens
  Payload ID: 19201
  Gene Name: vacuolar protein sorting 37 homolog A (S. cerevisiae)
  ENSP ID: ENSP00000428823
MSWLFPLTKSASSSAAGSPGGLTSLQQQKQRLIESLRNSHSSIAEIQKDVEYRLPFTINNLTININILLPPQFPQEKPVISVYPPIRHHLMDKQGVYVTSPLVNNFTMHSDLGKIIQSLLDEFWKNPPVLAPTSTAFPYLYSNPSGMSPYASQGFPFLPPYPPQEANRSITSLSVADTVSSSTTSHTTAKPAAPSFGVLSNLPLPIPTVDASIPTSQNGFGYKMPDVPDAFPELSELRSLYNCEHFPTVVIFKESRYIDISIGPKFTFTDSVKNILQTALCSIVVDVLFDFKVKTGSLRCICKNYLEPYQLTKAEKL

SEQ ID NO: 96187 - protein, 53 aa, Homo sapiens
  Payload ID: 19201
  Gene Name: vacuolar protein sorting 37 homolog A (S. cerevisiae)
  ENSP ID: ENSP00000429227
MSWLFPLTKSASSSAAGSPGGLTSLQQQKQRLIESLRNSHSRYKLCWLSRFCD

SEQ ID NO: 96188 - protein, 372 aa, Homo sapiens
  Payload ID: 19201
  Gene Name: vacuolar protein sorting 37 homolog A (S. cerevisiae)
  Uniprot ID: Q8NEZ2
  ENSP ID: ENSP00000429680
MSWLFPLTKSASSSAAGSPGGLTSLQQQKQRLIESLRNSHSRLLPPQFPQEKPVISVYPPIRHHLMDKQGVYVTSPLVNNFTMHSDLGKIIQSLLDEFWKNPPVLAPTSTAFPYLYSNPSGMSPYASQGFPFLPPYPPQEANRSITSLSVADTVSSSTTSHTTAKPAAPSFGVLSNLPLPIPTVDASIPTSQNGFGYKMPDVPDAFPELSELSVSQLTDMNEQEEVLLEQFLTLPQLKQIITDKDDLVKSIEELARKNLLLEPSLEAKRQTVLDKYELLTQMKSTFEKKMQRQHELSESCSASALQARLKVAAHEAEEESDNIAEDFLEGKMEIDDFLSSFMEKRTICHCRRAKEEKLQQAIAMHSQFHAPL

SEQ ID NO: 96189 - protein, 170 aa, Homo sapiens
  Payload ID: 19201
  Gene Name: vacuolar protein sorting 37 homolog A (S. cerevisiae)
  ENSP ID: ENSP00000429858
PDAFPELSELSVSQLTDMNEQEEVLLEQFLTLPQLKQIITDKDDLVKSIEELARKNLLLEPSLEAKRQTVLDKYELLTQMKSTFEKKMQRQHELSESCSASALQARLKVAAHEAEEESDNIAEDFLEGKMEIDDFLSSFMEKRTICHCRRAKEEKLQQAIAMHSQFHAPL

SEQ ID NO: 96190 - protein, 116 aa, Homo sapiens
  Payload ID: 19201
  Gene Name: vacuolar protein sorting 37 homolog A (S. cerevisiae)
  ENSP ID: ENSP00000430456
MSWLFPLTKSASSSAAGSPGGLTSLQQQKQRLIESLRNSHSRLERSGAISVHCNLRLPDSSNHPPSAPHTPPSSWDYRLLPPQFPQEKPVISVYPPIRHHLMDKQGVYVTSPLVNN

SEQ ID NO: 96191 - protein, 76 aa, Homo sapiens
  Payload ID: 19201
  Gene Name: vacuolar protein sorting 37 homolog A (S. cerevisiae)
  ENSP ID: ENSP00000430933
MSWLFPLTKSASSSAAGSPGGLTSLQQQKQRLIESLRNSHSSLFPVSLAAQASPLIFPFAHLIAASAELLKYNCEE

SEQ ID NO: 96192 - protein, 285 aa, Homo sapiens
  Payload ID: 19202
  Gene Name: vacuolar protein sorting 37 homolog B (S. cerevisiae)
  Uniprot ID: Q9H9H4
  ENSP ID: ENSP00000267202
MAGAGSEARFAGLSLVQLNELLEDEGQLTEMVQKMEETQNVQLNKEMTLASNRSLAEGNLLYQPQLDTLKARLTQKYQELQVLFEAYQIKKTKLDRQSSSASLETLLALLQAEGAKIEEDTENMAEKFLDGELPLDSFIDVYQSKRKLAHMRRVKIEKLQEMVLKGQRLPQALAPLPPRLPELAPTAPLPYPAPEASGPPAVAPRRIPPPPPPVPAGRLATPFTAAMSSGQAVPYPGLQCPPLPPRVGLPTQQGFSSQFVSPYPPPLPQRPPPRLPPHQPGFILQ

SEQ ID NO: 96193 - protein, 184 aa, Homo sapiens
  Payload ID: 19202
  Gene Name: vacuolar protein sorting 37 homolog B (S. cerevisiae)
  ENSP ID: ENSP00000360294
MQSGCVLELRNAGLVACLALITVFVAECCYGDSCQTQNVQLNKEMTLASNRSLAEGNLLYQPQLDTLKARLTQKYQELQVLFEAYQIKKTKLDRQSSSASLETLLALLQAEGAKIEEDTENMAEKFLDGELPLDSFIDVYQSKRKLAHMRRVKIEKLQEMVLKGQRLPQALAPLPPRLPELAPT

SEQ ID NO: 96194 - protein, 271 aa, Homo sapiens
  Payload ID: 19202
  Gene Name: vacuolar protein sorting 37 homolog B (S. cerevisiae)
  ENSP ID: ENSP00000446075
MAGAGSEARFAGLSLVQLNELLEDEGQLTEMVQKMEENVQLNKEMTLASNRSLAEGNLLYQPQLDTLKARLTQKYQELQVLFEAYQIKKTKLDRQSSSASLETLLALLQAEGAKIEEDTENMAEKFLDGELPLDSFIDVYQSKRKLAHMRRVKIEKLQEMVLKGQRLPQALAPLPPRLPELAPTAPLPYPAPEASGPPAVAPRRIPPPPPPVPAGRLATPFTAAMSSGQAVPYPGLQCPPLPPRVGLPTQQGFSSQFVSPYPPPLPQRPPP

SEQ ID NO: 96195 - protein, 355 aa, Homo sapiens
  Payload ID: 19203
  Gene Name: vacuolar protein sorting 37 homolog C (S. cerevisiae)
  Uniprot ID: A5D8V6
  ENSP ID: ENSP00000301765
METLKDKTLQELEELQNDSEAIDQLALESPEVQDLQLEREMALATNRSLAERNLEFQGPLEISRSNLSDRYQELRKLVERCQEQKAKLEKFSSALQPGTLLDLLQVEGMKIEEESEAMAEKFLEGEVPLETFLENFSSMRMLSHLRRVRVEKLQEVVRKPRASQELAGDAPPPRPPPPVRPVPQGTPPVVEEQPQPPLAMPPYPLPYSPSPSLPVGPTAHGALPPAPFPVVSQPSFYSGPLGPTYPAAQLGPRGAAGYSWSPQRSMPPRPGYPGTPMGASGPGYPLRGGRAPSPGYPQQSPYPATGGKPPYPIQPQLPSFPGQPQPSVPLQPPYPPGPAPPYGFPPPPGPAWPGY

SEQ ID NO: 96196 - protein, 148 aa, Homo sapiens
  Payload ID: 19203
  Gene Name: vacuolar protein sorting 37 homolog C (S. cerevisiae)
  ENSP ID: ENSP00000446013
METLKDKTLQELEELQNDSEAIDQLALESPEVQDLQLEREMALATNRSLAERNLEFQGPLEISRSNLSDRYQELRKLVERCQEQKAKLEKFSSALQPGTLLDLLQVEGMKIEEESEAMAEKFLEGEVPLETFLENFSSMRMLSHLRRV

SEQ ID NO: 96197 - protein, 251 aa, Homo sapiens
  Payload ID: 19204
  Gene Name: vacuolar protein sorting 37 homolog D (S. cerevisiae)
  Uniprot ID: Q86XT2
  ENSP ID: ENSP00000320416
MYRARAARAGPEPGSPGRFGILSTGQLRDLLQDEPKLDRIVRLSRKFQGLQLEREACLASNYALAKENLALRPRLEMGRAALAIKYQELREVAENCADKLQRLEESMHRWSPHCALGWLQAELEEAEQEAEEQMEQLLLGEQSLEAFLPAFQRGRALAHLRRTQAEKLQELLRRRERSAQPAPTSAADPPKSFPAAAVLPTGAARGPPAVPRSLPPLDSRPVPPLKGSPGCPLGPAPLLSPRPSQPEPPHR

SEQ ID NO: 96198 - protein, 166 aa, Homo sapiens
  Payload ID: 19204
  Gene Name: vacuolar protein sorting 37 homolog D (S. cerevisiae)
  ENSP ID: ENSP00000413337
MYRARAARAGPEPGSPGRFGILSTGQLRDLLQDEPKLDRIVRLSRKEQMEQLLLGEQSLEAFLPAFQRGRALAHLRRTQAEKLQELLRRRERSAQPAPTSAADPPKSFPAAAVLPTGAARGPPAVPRSLPPLDSRPVPPLKGSPGCPLGPAPLLSPRPSQPEPPHR

SEQ ID NO: 96199 - protein, 875 aa, Homo sapiens
  Payload ID: 19205
  Gene Name: vacuolar protein sorting 39 homolog (S. cerevisiae)
  Uniprot ID: Q96JC1
  ENSP ID: ENSP00000326534
MHDAFEPVPILEKLPLQIDCLAAWEEWLLVGTKQGHLLLYRIRKDVGCNRFEVTLEKSNKNFSKKIQQIHVVSQFKILVSLLENNIYVHDLLTFQQITTVSKAKGASLFTCDLQHTETGEEVLRMCVAVKKKLQLYFWKDREFHELQGDFSVPDVPKSMAWCENSICVGFKRDYYLIRVDGKGSIKELFPTGKQLEPLVAPLADGKVAVGQDDLTVVLNEEGICTQKCALNWTDIPVAMEHQPPYIIAVLPRYVEIRTFEPRLLVQSIELQRPRFITSGGSNIIYVASNHFVWRLIPVPMATQIQQLLQDKQFELALQLAEMKDDSDSEKQQQIHHIKNLYAFNLFCQKRFDESMQVFAKLGTDPTHVMGLYPDLLPTDYRKQLQYPNPLPVLSGAELEKAHLALIDYLTQKRSQLVKKLNDSDHQSSTSPLMEGTPTIKSKKKLLQIIDTTLLKCYLHTNVALVAPLLRLENNHCHIEESEHVLKKAHKYSELIILYEKKGLHEKALQVLVDQSKKANSPLKGHERTVQYLQHLGTENLHLIFSYSVWVLRDFPEDGLKIFTEDLPEVESLPRDRVLGFLIENFKGLAIPYLEHIIHVWEETGSRFHNCLIQLYCEKVQGLMKEYLLSFPAGKTPVPAGEEEGELGEYRQKLLMFLEISSYYDPGRLICDFPFDGLLEERALLLGRMGKHEQALFIYVHILKDTRMAEEYCHKHYDRNKDGNKDVYLSLLRMYLSPPSIHCLGPIKLELLEPKANLQAALQVLELHHSKLDTTKALNLLPANTQINDIRIFLEKVLEENAQKKRFNQVLKNLLHAEFLRVQEERILHQQVKCIITEEKVCMVCKKKIGNSAFARYPNGVVVHYFCSKEVNPADT

SEQ ID NO: 96200 - protein, 886 aa, Homo sapiens
  Payload ID: 19205
  Gene Name: vacuolar protein sorting 39 homolog (S. cerevisiae)
  Uniprot ID: Q96JC1
  ENSP ID: ENSP00000335193
MHDAFEPVPILEKLPLQIDCLAAWEEWLLVGTKQGHLLLYRIRKDVVPADVASPESGSCNRFEVTLEKSNKNFSKKIQQIHVVSQFKILVSLLENNIYVHDLLTFQQITTVSKAKGASLFTCDLQHTETGEEVLRMCVAVKKKLQLYFWKDREFHELQGDFSVPDVPKSMAWCENSICVGFKRDYYLIRVDGKGSIKELFPTGKQLEPLVAPLADGKVAVGQDDLTVVLNEEGICTQKCALNWTDIPVAMEHQPPYIIAVLPRYVEIRTFEPRLLVQSIELQRPRFITSGGSNIIYVASNHFVWRLIPVPMATQIQQLLQDKQFELALQLAEMKDDSDSEKQQQIHHIKNLYAFNLFCQKRFDESMQVFAKLGTDPTHVMGLYPDLLPTDYRKQLQYPNPLPVLSGAELEKAHLALIDYLTQKRSQLVKKLNDSDHQSSTSPLMEGTPTIKSKKKLLQIIDTTLLKCYLHTNVALVAPLLRLENNHCHIEESEHVLKKAHKYSELIILYEKKGLHEKALQVLVDQSKKANSPLKGHERTVQYLQHLGTENLHLIFSYSVWVLRDFPEDGLKIFTEDLPEVESLPRDRVLGFLIENFKGLAIPYLEHIIHVWEETGSRFHNCLIQLYCEKVQGLMKEYLLSFPAGKTPVPAGEEEGELGEYRQKLLMFLEISSYYDPGRLICDFPFDGLLEERALLLGRMGKHEQALFIYVHILKDTRMAEEYCHKHYDRNKDGNKDVYLSLLRMYLSPPSIHCLGPIKLELLEPKANLQAALQVLELHHSKLDTTKALNLLPANTQINDIRIFLEKVLEENAQKKRFNQVLKNLLHAEFLRVQEERILHQQVKCIITEEKVCMVCKKKIGNSAFARYPNGVVVHYFCSKEVNPADT

SEQ ID NO: 96201 - protein, 47 aa, Homo sapiens
  Payload ID: 19205
  Gene Name: vacuolar protein sorting 39 homolog (S. cerevisiae)
  ENSP ID: ENSP00000457325
LHAEFLRVQEERILHQQVKCIITEEKVCMVCKKKIGNREGEHGCWLS

SEQ ID NO: 96202 - protein, 437 aa, Homo sapiens
  Payload ID: 19206
  Gene Name: vacuolar protein sorting 4 homolog A (S. cerevisiae)
  Uniprot ID: Q9UN37
  ENSP ID: ENSP00000254950
MTTSTLQKAIDLVTKATEEDKAKNYEEALRLYQHAVEYFLHAIKYEAHSDKAKESIRAKCVQYLDRAEKLKDYLRSKEKHGKKPVKENQSEGKGSDSDSEGDNPEKKKLQEQLMGAVVMEKPNIRWNDVAGLEGAKEALKEAVILPIKFPHLFTGKRTPWRGILLFGPPGTGKSYLAKAVATEANNSTFFSVSSSDLMSKWLGESEKLVKNLFELARQHKPSIIFIDEVDSLCGSRNENESEAARRIKTEFLVQMQGVGNNNDGTLVLGATNIPWVLDSAIRRRFEKRIYIPLPEEAARAQMFRLHLGSTPHNLTDANIHELARKTEGYSGADISIIVRDSLMQPVRKVQSATHFKKVCGPSRTNPSMMIDDLLTPCSPGDPGAMEMTWMDVPGDKLLEPVVCMSDMLRSLATTRPTVNADDLLKVKKFSEDFGQES

SEQ ID NO: 96203 - protein, 444 aa, Homo sapiens
  Payload ID: 19207
  Gene Name: vacuolar protein sorting 4 homolog B (S. cerevisiae)
  Uniprot ID: O75351
  ENSP ID: ENSP00000238497
MSSTSPNLQKAIDLASKAAQEDKAGNYEEALQLYQHAVQYFLHVVKYEAQGDKAKQSIRAKCTEYLDRAEKLKEYLKNKEKKAQKPVKEGQPSPADEKGNDSDGEGESDDPEKKKLQNQLQGAIVIERPNVKWSDVAGLEGAKEALKEAVILPIKFPHLFTGKRTPWRGILLFGPPGTGKSYLAKAVATEANNSTFFSISSSDLVSKWLGESEKLVKNLFQLARENKPSIIFIDEIDSLCGSRSENESEAARRIKTEFLVQMQGVGVDNDGILVLGATNIPWVLDSAIRRRFEKRIYIPLPEPHARAAMFKLHLGTTQNSLTEADFRELGRKTDGYSGADISIIVRDALMQPVRKVQSATHFKKVRGPSRADPNHLVDDLLTPCSPGDPGAIEMTWMDVPGDKLLEPVVSMSDMLRSLSNTKPTVNEHDLLKLKKFTEDFGQEG

SEQ ID NO: 96204 - protein, 128 aa, Homo sapiens
  Payload ID: 19207
  Gene Name: vacuolar protein sorting 4 homolog B (S. cerevisiae)
  ENSP ID: ENSP00000465846
MSSTSPNLQKAIDLASKAAQEDKAGNYEEALQLYQHAVQYFLHVVKYEAQGDKAKQSIRAKCTEYLDRAEKLKEYLKNKEKKAQKPVKEGQPSPADEKGNDSDGEGESDDPEKKKLQNQLQGCFRFHF

SEQ ID NO: 96205 - protein, 111 aa, Homo sapiens
  Payload ID: 19207
  Gene Name: vacuolar protein sorting 4 homolog B (S. cerevisiae)
  ENSP ID: ENSP00000465944
MSSTSPNLQKAIDLASKAAQEDKAGNYEEALQLYQHAVQYFLHVVKYEAQGDKAKQSIRAKCTEYLDRAEKLKEYLKNKEKKAQKPVKEGQPSPADEKGCHCYRTTKCEME

SEQ ID NO: 96206 - protein, 209 aa, Homo sapiens
  Payload ID: 19208
  Gene Name: vacuolar protein sorting 41 homolog (S. cerevisiae)
  ENSP ID: ENSP00000265745
MAEAEEQETGSLEESTDESEEEESEEEPKLKYERLSNGVTEILQKDAASCMTVHDKFLALGTHYGKVYLLDVQGNITQKFDVSPVKINQISLDESGEHMGVCSEDGKVQVFGLYSGEEFHETFDCPIKIIAVHPHFVRSSCKQFVTGGKKLLLFERSWMNRWKSAVLHEGEGNIRSVKWRGHLIAWANNMSKKPEAWRVAKKMKSYLNN

SEQ ID NO: 96207 - protein, 854 aa, Homo sapiens
  Payload ID: 19208
  Gene Name: vacuolar protein sorting 41 homolog (S. cerevisiae)
  Uniprot ID: P49754
  ENSP ID: ENSP00000309457
MAEAEEQETGSLEESTDESEEEESEEEPKLKYERLSNGVTEILQKDAASCMTVHDKFLALGTHYGKVYLLDVQGNITQKFDVSPVKINQISLDESGEHMGVCSEDGKVQVFGLYSGEEFHETFDCPIKIIAVHPHFVRSSCKQFVTGGKKLLLFERSWMNRWKSAVLHEGEGNIRSVKWRGHLIAWANNMGVKIFDIISKQRITNVPRDDISLRPDMYPCSLCWKDNVTLIIGWGTSVKVCSVKERHASEMRDLPSRYVEIVSQFETEFYISGLAPLCDQLVVLSYVKEISEKTEREYCARPRLDIIQPLSETCEEISSDALTVRGFQENECRDYHLEYSEGESLFYIVSPRDVVVAKERDQDDHIDWLLEKKKYEEALMAAEISQKNIKRHKILDIGLAYINHLVERGDYDIAARKCQKILGKNAALWEYEVYKFKEIGQLKAISPYLPRGDPVLKPLIYEMILHEFLESDYEGFATLIREWPGDLYNNSVIVQAVRDHLKKDSQNKTLLKTLAELYTYDKNYGNALEIYLTLRHKDVFQLIHKHNLFSSIKDKIVLLMDFDSEKAVDMLLDNEDKISIKKVVEELEDRPELQHVYLHKLFKRDHHKGQRYHEKQISLYAEYDRPNLLPFLRDSTHCPLEKALEICQQRNFVEETVYLLSRMGNSRSALKMIMEELHDVDKAIEFAKEQDDGELWEDLILYSIDKPPFITGLLNNIGTHVDPILLIHRIKEGMEIPNLRDSLVKILQDYNLQILLREGCKKILVADSLSLLKKMHRTQMKGVLVDEENICESCLSPILPSDAAKPFSVVVFHCRHMFHKECLPMPSMNSAAQFCNICSAKNRGPGSAILEMKK

SEQ ID NO: 96208 - protein, 829 aa, Homo sapiens
  Payload ID: 19208
  Gene Name: vacuolar protein sorting 41 homolog (S. cerevisiae)
  Uniprot ID: P49754
  ENSP ID: ENSP00000379297
MAEAEEQETGSLEESTDESEEEESEEEPKLKYERLSNGVTEILQKDAASCMTVHDKFLALGTHYGKVYLLDVQGNITQKFDVVQVFGLYSGEEFHETFDCPIKIIAVHPHFVRSSCKQFVTGGKKLLLFERSWMNRWKSAVLHEGEGNIRSVKWRGHLIAWANNMGVKIFDIISKQRITNVPRDDISLRPDMYPCSLCWKDNVTLIIGWGTSVKVCSVKERHASEMRDLPSRYVEIVSQFETEFYISGLAPLCDQLVVLSYVKEISEKTEREYCARPRLDIIQPLSETCEEISSDALTVRGFQENECRDYHLEYSEGESLFYIVSPRDVVVAKERDQDDHIDWLLEKKKYEEALMAAEISQKNIKRHKILDIGLAYINHLVERGDYDIAARKCQKILGKNAALWEYEVYKFKEIGQLKAISPYLPRGDPVLKPLIYEMILHEFLESDYEGFATLIREWPGDLYNNSVIVQAVRDHLKKDSQNKTLLKTLAELYTYDKNYGNALEIYLTLRHKDVFQLIHKHNLFSSIKDKIVLLMDFDSEKAVDMLLDNEDKISIKKVVEELEDRPELQHVYLHKLFKRDHHKGQRYHEKQISLYAEYDRPNLLPFLRDSTHCPLEKALEICQQRNFVEETVYLLSRMGNSRSALKMIMEELHDVDKAIEFAKEQDDGELWEDLILYSIDKPPFITGLLNNIGTHVDPILLIHRIKEGMEIPNLRDSLVKILQDYNLQILLREGCKKILVADSLSLLKKMHRTQMKGVLVDEENICESCLSPILPSDAAKPFSVVVFHCRHMFHKECLPMPSMNSAAQFCNICSAKNRGPGSAILEMKK

SEQ ID NO: 96209 - protein, 150 aa, Homo sapiens
  Payload ID: 19208
  Gene Name: vacuolar protein sorting 41 homolog (S. cerevisiae)
  ENSP ID: ENSP00000391980
  MOD_RES (1)..(1): Any amino acid
XEETVYLLSRMGNSRSALKMIMEELHDVDKAIEFAKEQDDGELWEDLILYSIDKPPFITGLLNNIGTHVDPILLIHRIKEGMEIPNLRDSLVKILQDYNLQILLREGCKKILVADSLSLLKKMHRTQMKGVLVDEENICESCLSPILPSE

SEQ ID NO: 96210 - protein, 109 aa, Homo sapiens
  Payload ID: 19208
  Gene Name: vacuolar protein sorting 41 homolog (S. cerevisiae)
  ENSP ID: ENSP00000395410
LSRMGNSRSALKMIMEELHDVDKAIEFAKEQDDGELWEDLILYSIDKPPFITGLLNNIGTHVDPILLIHRIKEGMEIPNLRDSLVKILQDYNLQVTITIFQDAGNFYRT

SEQ ID NO: 96211 - protein, 73 aa, Homo sapiens
  Payload ID: 19208
  Gene Name: vacuolar protein sorting 41 homolog (S. cerevisiae)
  ENSP ID: ENSP00000398584
MTVHDKFLALGTHYGKVYLLDVQGNITQKFDVSPVKINQISLDESGEHMGVCSEDGKVQVFGLYSGEEFHETF

SEQ ID NO: 96212 - protein, 104 aa, Homo sapiens
  Payload ID: 19208
  Gene Name: vacuolar protein sorting 41 homolog (S. cerevisiae)
  ENSP ID: ENSP00000407835
MTVHDKFLALGTHYGKVYLLDVQGNITQKFDVSPVKINQISLDESGEHMGVCSEDGKVQVFGLYSGEEFHETFDCPIKIIAVHPHFVRSSCKQFVTGGKKVSAV

SEQ ID NO: 96213 - protein, 177 aa, Homo sapiens
  Payload ID: 19208
  Gene Name: vacuolar protein sorting 41 homolog (S. cerevisiae)
  ENSP ID: ENSP00000411919
MAEAEEQEEESEEEPKLKYERLSNGVTEILQKDAASCMTVHDKFLALGTHYGKVYLLDVQGNITQKFDVSPVKINQISLDESGEHMGVCSEDGKVQVFGLYSGEEFHETFDCPIKIIAVHPHFVRSSCKQFVTGGKKLLLFERSWMNRWKSAVLHEGEGNIRSVKWRGHLIAWANNM

SEQ ID NO: 96214 - protein, 156 aa, Homo sapiens
  Payload ID: 19208
  Gene Name: vacuolar protein sorting 41 homolog (S. cerevisiae)
  ENSP ID: ENSP00000412974
MPKKLQSESPVKINQISLDESGEHMGVCSEDGKVQVFGLYSGEEFHETFDCPIKIIAVHPHFVRSSCKQFVTGGKKLLLFERSWMNRWKSAVLHEGEGNIRSVKWRGHLIAWANNMGVKIFDIISKQRITNVPRDDISLRPDMYPCSLCWKDNVTL

SEQ ID NO: 96215 - protein, 538 aa, Homo sapiens
  Payload ID: 19209
  Gene Name: vacuolar protein sorting 45 homolog (S. cerevisiae)
  Uniprot ID: Q9NRW7
  ENSP ID: ENSP00000358124
MVYTQSEILQKEVYLFERIDSQNREIMKHLKAICFLRPTKENVDYIIQELRRPKYTIYFIYFSNVISKSDVKSLAEADEQEVVAEVQQVITKEYELFEFRRTEVPPLLLILDRCDDAITPLLNQWTYQAMVHELLGINNNRIDLSRVPGISKDLREVVLSAENDEFYANNMYLNFAEIGSNIKNLMEDFQKKKPKEQQKLESIADMKAFVENYPQFKKMSGTVSKHVTVVGELSRLVSERNLLEVSEVEQELACQNDHSSALQNIKRLLQNPKVTEFDAARLVMLYALHYERHSSNSLPGLMMDLRNKGVSEKYRKLVSAVVEYGGKRVRGSDLFSPKDAVAITKQFLKGLKGVENVYTQHQPFLHETLDHLIKGRLKENLYPYLGPSTLRDRPQDIIVFVIGGATYEEALTVYNLNRTTPGVRIVLGGTTVHNTKRDGVSLCSPAWFRTPGLKRSTRLSLPKCWDYSFPRGSSGFWTAQPKQGELSSHIKVSEQKMKRWLGEGHSFLSCPHYRFSLLNKGVGEQLWVLCWLLELISR

SEQ ID NO: 96216 - protein, 570 aa, Homo sapiens
  Payload ID: 19209
  Gene Name: vacuolar protein sorting 45 homolog (S. cerevisiae)
  Uniprot ID: Q9NRW7
  ENSP ID: ENSP00000358126
MNVVFAVKQYISKMIEDSGPGMKVLLMDKETTGIVSMVYTQSEILQKEVYLFERIDSQNREIMKHLKAICFLRPTKENVDYIIQELRRPKYTIYFIYFSNVISKSDVKSLAEADEQEVVAEVQEFYGDYIAVNPHLFSLNILGCCQGRNWDPAQLSRTTQGLTALLLSLKKCPMIRYQLSSEAAKRLAECVKQVITKEYELFEFRRTEVPPLLLILDRCDDAITPLLNQWTYQAMVHELLGINNNRIDLSRVPGISKDLREVVLSAENDEFYANNMYLNFAEIGSNIKNLMEDFQKKKPKEQQKLESIADMKAFVENYPQFKKMSGTVSKHVTVVGELSRLVSERNLLEVSEVEQELACQNDHSSALQNIKRLLQNPKVTEFDAARLVMLYALHYERHSSNSLPGLMMDLRNKGVSEKYRKLVSAVVEYGGKRVRGSDLFSPKDAVAITKQFLKGLKGVENVYTQHQPFLHETLDHLIKGRLKENLYPYLGPSTLRDRPQDIIVFVIGGATYEEALTVYNLNRTTPGVRIVLGGTTVHNTKSFLEEVLASGLHSRSKESSQVTSRSASRR

SEQ ID NO: 96217 - protein, 315 aa, Homo sapiens
  Payload ID: 19209
  Gene Name: vacuolar protein sorting 45 homolog (S. cerevisiae)
  ENSP ID: ENSP00000400143
MNVVFAVKQYISKMIEDSGPGMKVLLMDKETTGIVSMVYTQSEILQKEVYLFERIDSQNREIMKHLKAICFLRPTKENVDYIIQELRRPKYTIYFIYFSNVISKSDVKSLAEADEQEVVAEVQQVITKEYELFEFRRTEVPPLLLILDRCDDAITPLLNQWTYQAMVHELLGINNNRIDLSRVPGISKDLREVVLSAENDEFYANNMYLNFAEIGSNIKNLMEDFQKKKPKEQQKLESIADMKAFVENYPQFKKMSGTVSKHVTVVGELSRLVSERNLLEVSEVEQELACQNDHSSALQNIKRLLQNPKVTEFDA

SEQ ID NO: 96218 - protein, 538 aa, Homo sapiens; identical to SEQ ID NO: 96215
  Payload ID: 19209
  Gene Name: vacuolar protein sorting 45 homolog (S. cerevisiae)
  Uniprot ID: Q9NRW7
  ENSP ID: ENSP00000440690

SEQ ID NO: 96219 - protein, 447 aa, Homo sapiens
  Payload ID: 19209
  Gene Name: vacuolar protein sorting 45 homolog (S. cerevisiae)
  ENSP ID: ENSP00000478403
MNVVFAVKQYPHLFSLNILGCCQGRNWDPAQLSRTTQGLTALLLSLKKCPMIRYQLSSEAAKRLAECVKQVITKEYELFEFRRTEVPPLLLILDRCDDAITPLLNQWTYQAMVHELLGINNNRIDLSRVPGISKDLREVVLSAENDEFYANNMYLNFAEIGSNIKNLMEDFQKKKPKEQQKLESIADMKAFVENYPQFKKMSGTVSKHVTVVGELSRLVSERNLLEVSEVEQELACQNDHSSALQNIKRLLQNPKVTEFDAARLVMLYALHYERHSSNSLPGLMMDLRNKGVSEKYRKLVSAVVEYGGKRVRGSDLFSPKDAVAITKQFLKGLKGVENVYTQHQPFLHETLDHLIKGRLKENLYPYLGPSTLRDRPQDIIVFVIGGATYEEALTVYNLNRTTPGVRIVLGGTTVHNTKSFLEEVLASGLHSRSKESSQVTSRSASRR

SEQ ID NO: 96220 - protein, 198 aa, Homo sapiens
  Payload ID: 19209
  Gene Name: vacuolar protein sorting 45 homolog (S. cerevisiae)
  ENSP ID: ENSP00000481356
MVYTQSEILQKEVYLFERIDSQNREIMKHLKAICFLRPTKENVDYIIQELRRPKYTIYFIYFSNVISKSDVKSLAEADEQEVVAEVQEFYGDYIAVNPHLFSLNILGCCQGRNWDPAQLSRTTQGLTALLLSLKKCPMIRYQLSSEAAKRLAECVKQVITKEYELFEFRRTEVPPLLLILDRCDDAITPLLNQSAGNQ

SEQ ID NO: 96221 - protein, 782 aa, Homo sapiens
  Payload ID: 19210
  Gene Name: vacuolar protein sorting 51 homolog (S. cerevisiae)
  Uniprot ID: Q9UID3
  ENSP ID: ENSP00000279281
MAAAAAAGPSPGSGPGDSPEGPEGEAPERRRKAHGMLKLYYGLSEGEAAGRPAGPDPLDPTDLNGAHFDPEVYLDKLRRECPLAQLMDSETDMVRQIRALDSDMQTLVYENYNKFISATDTIRKMKNDFRKMEDEMDRLATNMAVITDFSARISATLQDRHERITKLAGVHALLRKLQFLFELPSRLTKCVELGAYGQAVRYQGRAQAVLQQYQHLPSFRAIQDDCQVITARLAQQLRQRFREGGSGAPEQAECVELLLALGEPAEELCEEFLAHARGRLEKELRNLEAELGPSPPAPDVLEFTDHGGSGFVGGLCQVAAAYQELFAAQGPAGAEKLAAFARQLGSRYFALVERRLAQEQGGGDNSLLVRALDRFHRRLRAPGALLAAAGLADAATEIVERVARERLGHHLQGLRAAFLGCLTDVRQALAAPRVAGKEGPGLAELLANVASSILSHIKASLAAVHLFTAKEVSFSNKPYFRGEFCSQGVREGLIVGFVHSMCQTAQSFCDSPGEKGGATPPALLLLLSRLCLDYETATISYILTLTDEQFLVQDQFPVTPVSTLCAEARETARRLLTHYVKVQGLVISQMLRKSVETRDWLSTLEPRNVRAVMKRVVEDTTAIDVQVGLLYEEGVRKAQSSDSSKRTFSVYSSSRQQGRYAPSYTPSAPMDTNLLSNIQKLFSERIDVFSPVEFNKVSVLTGIIKISLKTLLECVRLRTFGRFGLQQVQVDCHFLQLYLWRFVADEELVHLLLDEVVASAALRCPDPVPMEPSVVEVICERG

SEQ ID NO: 96222 - protein, 110 aa, Homo sapiens
  Payload ID: 19210
  Gene Name: vacuolar protein sorting 51 homolog (S. cerevisiae)
  ENSP ID: ENSP00000431188
MDSETDMVRQIRALDSDMQTLVYENYNKFISATDTIRKMKNDFRKMEDEMDRLATNMAVITDFSARISATLQDRHERITKLAGVHALLRKLQFLFELPSRLTKCVELGAY

SEQ ID NO: 96223 - protein, 99 aa, Homo sapiens
  Payload ID: 19210
  Gene Name: vacuolar protein sorting 51 homolog (S. cerevisiae)
  ENSP ID: ENSP00000431317
VGLLYEEGVRKAQSSDSSKRTFSVYSSSRQQGRYAPSYTPSAPMDTNLLSNIQKLFSERIDVFSPVEFNKMTALILYPSLLIWPRRLSASSQLLPSCRC

SEQ ID NO: 96224 - protein, 81 aa, Homo sapiens
  Payload ID: 19210
  Gene Name: vacuolar protein sorting 51 homolog (S. cerevisiae)
  ENSP ID: ENSP00000433579
MAAAAAAGPSPGSGPGDSPEGPEGEAPERRRKAHGMLKLYYGLSEGEAAGRPAGPDPLDPTDLNGAHFDPEVYLDKTPSGR

SEQ ID NO: 96225 - protein, 233 aa, Homo sapiens
  Payload ID: 19210
  Gene Name: vacuolar protein sorting 51 homolog (S. cerevisiae)
  ENSP ID: ENSP00000434138
MAAAAAAGPSPGSGPGDSPEGPEGEAPERRRKAHGMLKLYYGLSEGEAAGRPAGPDPLDPTDLNGAHFDPEVYLDKLRRECPLAQLMDSETDMVRQIRALDSDMQTLVYENYNKFISATGVHALLRKLQFLFELPSRLTKCVELGAYGQAVRYQGRAQAVLQQYQHLPSFRAIQDDCQVITARLAQQLRQRFREGGSGAPEQAECVELLLALGEPAEELCEEFLAHARGRLEK

SEQ ID NO: 96226 - protein, 72 aa, Homo sapiens
  Payload ID: 19210
  Gene Name: vacuolar protein sorting 51 homolog (S. cerevisiae)
  ENSP ID: ENSP00000434542
  MOD_RES (1)..(1): Any amino acid
XSQGVREGLIVGFVHSMCQTAQSFCDSPGEKGGATPPALLLLLSRLCLDYETATISYILTLTDEQFLVQVKH

SEQ ID NO: 96227 - protein, 334 aa, Homo sapiens
  Payload ID: 19210
  Gene Name: vacuolar protein sorting 51 homolog (S. cerevisiae)
  ENSP ID: ENSP00000435245
MAAAAAAGPSPGSGPGDSPEGPEGEAPERRRKAHGMLKLYYGLSEGEAAGRPAGPDPLDPTDLNGAHFDPEVYLDKLRRECPLAQLMDSETDMVRQIRALDSDMQTLVYENYNKFISATDTIRKMKNDFRKMEDEMDRLATNMAVITDFSARISATLQDRHERITKLAGGRCRAGPAVGLSWGSGANVTLRPPGVHALLRKLQFLFELPSRLTKCVELGAYGQAVRYQGRAQAVLQQYQHLPSFRAIQDDCQVITARLAQQLRQRFREGGSGAPEQAECVELLLALGEPAEELCEEFLAHARGRLEKELRNLEAELGPSPPAPDVLEFTDHGGS

SEQ ID NO: 96228 - protein, 199 aa, Homo sapiens
  Payload ID: 19210
  Gene Name: vacuolar protein sorting 51 homolog (S. cerevisiae)
  ENSP ID: ENSP00000435629
  MOD_RES (1)..(1): Any amino acid
XTAQSFCDSPGEKGGATPPALLLLLSRLCLDYETATISYILTLTDEQFLVQDQFPVTPVSTLCAEARETARRLLTHYVKVQGLVISQMLRKSVETRDWLSTLEPRNVRAVMKRVVEDTTAIDVQVGLLYEEGVRKAQSSDSSKRTFSVYSSSRQQGRYAPSYTPSAPMDTNLLSNIQKLFSERIDVFSPVEFNKVRLPT

SEQ ID NO: 96229 - protein, 255 aa, Homo sapiens
  Payload ID: 19210
  Gene Name: vacuolar protein sorting 51 homolog (S. cerevisiae)
  ENSP ID: ENSP00000435691
MDSETDMVRQIRALDSDMQTLVYENYNKFISATDTIRKMKNDFRKMEDEMDRLATNMAVITDFSARISATLQDRHERITKLAGVHALLRKLQFLFELPSRLTKCVELGAYGQAVRYQGRAQAVLQQYQHLPSFRAIQDDCQVITARLAQQLRQRFREGGSGAPEQAECVELLLALGEPAEELCEEFLAHARGRLEKELRNLEAELGPSPPAPDVLEFTDHGGSGFVGGLCQVAAAYQELFAAQGPAGAEKLAAFA

SEQ ID NO: 96230 - protein, 165 aa, Homo sapiens
  Payload ID: 19210
  Gene Name: vacuolar protein sorting 51 homolog (S. cerevisiae)
  ENSP ID: ENSP00000436134
MIMPLYSKLGDREKKKRKEKASRPWAAVGTMAAAAAAGPSPGSGPGDSPEGPEGEAPERRRKAHGMLKLYYGLSEGEAAGRPAGPDPLDPTDLNGAHFDPEVYLDKLRRECPLAQLMDSETDMVRQIRALDSDMQTLVYENYNKFISATDTIRKMKNDFRKMEDE

SEQ ID NO: 96231 - protein, 163 aa, Homo sapiens
  Payload ID: 19210
  Gene Name: vacuolar protein sorting 51 homolog (S. cerevisiae)
  ENSP ID: ENSP00000436867
MAAAAAAGPSPGSGPGDSPEGPEGEAPERRRKAHGMLKLYYGLSEGEAAGRPAGPDPLDPTDLNGAHFDPEVYLDKLRRECPLAQLMDSETDMVRQIRALDSDMQTLVYENYNKFISATGSALDTQMRLGASGPCLGCLWSDGAVEAQWWQLAKHLRPASDLD

SEQ ID NO: 96232 - protein, 723 aa, Homo sapiens
  Payload ID: 19211
  Gene Name: vacuolar protein sorting 52 homolog (S. cerevisiae)
  Uniprot ID: Q8N1B4
  ENSP ID: ENSP00000372697
MAAAATMAAAARELVLRAGTSDMEEEEGPLAGGPGLQEPLQLGELDITSDEFILDEVDVHIQANLEDELVKEALKTGVDLRHYSKQVELELQQIEQKSIRDYIQESENIASLHNQITACDAVLERMEQMLGAFQSDLSSISSEIRTLQEQSGAMNIRLRNRQAVRGKLGELVDGLVVPSALVTAILEAPVTEPRFLEQLQELDAKAAAVREQEARGTAACADVRGVLDRLRVKAVTKIREFILQKIYSFRKPMTNYQIPQTALLKYRFFYQFLLGNERATAKEIRDEYVETLSKIYLSYYRSYLGRLMKVQYEEVAEKDDLMGVEDTAKKGFFSKPSLRSRNTIFTLGTRGSVISPTELEAPILVPHTAQRGEQRYPFEALFRSQHYALLDNSCREYLFICEFFVVSGPAAHDLFHAVMGRTLSMTLKHLDSYLADCYDAIAVFLCIHIVLRFRNIAAKRDVPALDRYWEQVLALLWPRFELILEMNVQSVRSTDPQRLGGLDTRPHYITRRYAEFSSALVSINQTIPNERTMQLLGQLQVEVENFVLRVAAEFSSRKEQLVFLINNYDMMLGVLMERAADDSKEVESFQQLLNARTQEFIEELLSPPFGGLVAFVKEAEALIERGQAERLRGEEARVTQLIRGFGSSWKSSVESLSQDVMRSFTNFRNGTSIIQGALTQLIQLYHRFHRVLSQPQLRALPARAELINIHHLMVELKKHKPNF

SEQ ID NO: 96233 - protein, 723 aa, Homo sapiens; identical to SEQ ID NO: 96232
  Payload ID: 19211
  Gene Name: vacuolar protein sorting 52 homolog (S. cerevisiae)
  Uniprot ID: Q8N1B4
  ENSP ID: ENSP00000390831

SEQ ID NO: 96234 - protein, 723 aa, Homo sapiens; identical to SEQ ID NO: 96232
  Payload ID: 19211
  Gene Name: vacuolar protein sorting 52 homolog (S. cerevisiae)
  Uniprot ID: Q8N1B4
  ENSP ID: ENSP00000391197

SEQ ID NO: 96235 - protein, 125 aa, Homo sapiens
  Payload ID: 19211
  Gene Name: vacuolar protein sorting 52 homolog (S. cerevisiae)
  ENSP ID: ENSP00000398367
EFIEELLSPPFGGLVAFVKEAEALIERGQAERLRGEEARVTQLIRGFGSSWKSSVESLSQDVMRSFTNFRNGTSIIQGALTQLIQLYHRFHRVLSQPQLRALPARAELINIHHLMVELKKHKPNF

SEQ ID NO: 96236 - protein, 723 aa, Homo sapiens; identical to SEQ ID NO: 96232
  Payload ID: 19211
  Gene Name: vacuolar protein sorting 52 homolog (S. cerevisiae)
  Uniprot ID: Q8N1B4
  ENSP ID: ENSP00000404016

SEQ ID NO: 96237 - protein, 723 aa, Homo sapiens; identical to SEQ ID NO: 96232
  Payload ID: 19211
  Gene Name: vacuolar protein sorting 52 homolog (S. cerevisiae)
  Uniprot ID: Q8N1B4
  ENSP ID: ENSP00000406988

SEQ ID NO: 96238 - protein, 723 aa, Homo sapiens; identical to SEQ ID NO: 96232
  Payload ID: 19211
  Gene Name: vacuolar protein sorting 52 homolog (S. cerevisiae)
  Uniprot ID: Q8N1B4
  ENSP ID: ENSP00000409952

SEQ ID NO: 96239 - protein, 88 aa, Homo sapiens
  Payload ID: 19211
  Gene Name: vacuolar protein sorting 52 homolog (S. cerevisiae)
  ENSP ID: ENSP00000434319
MAAAATMAAAARELVLRAGTSDMEEEEGPLVRARSCFSSVVPVLLASERPELGLGTRVGTWLLPVILPVWLPVPFPVIRPDPERDPSG

SEQ ID NO: 96240 - protein, 88 aa, Homo sapiens; identical to SEQ ID NO: 96239
  Payload ID: 19211
  Gene Name: vacuolar protein sorting 52 homolog (S. cerevisiae)
  ENSP ID: ENSP00000434469

SEQ ID NO: 96241 - protein, 88 aa, Homo sapiens; identical to SEQ ID NO: 96239
  Payload ID: 19211
  Gene Name: vacuolar protein sorting 52 homolog (S. cerevisiae)
  ENSP ID: ENSP00000434720

SEQ ID NO: 96242 - protein, 125 aa, Homo sapiens; identical to SEQ ID NO: 96235
  Payload ID: 19211
  Gene Name: vacuolar protein sorting 52 homolog (S. cerevisiae)
  ENSP ID: ENSP00000435031

SEQ ID NO: 96243 - protein, 88 aa, Homo sapiens; identical to SEQ ID NO: 96239
  Payload ID: 19211
  Gene Name: vacuolar protein sorting 52 homolog (S. cerevisiae)
  ENSP ID: ENSP00000435407

SEQ ID NO: 96244 - protein, 88 aa, Homo sapiens; identical to SEQ ID NO: 96239
  Payload ID: 19211
  Gene Name: vacuolar protein sorting 52 homolog (S. cerevisiae)
  ENSP ID: ENSP00000436612

SEQ ID NO: 96245 - protein, 670 aa, Homo sapiens
  Payload ID: 19212
  Gene Name: vacuolar protein sorting 53 homolog (S. cerevisiae)
  Uniprot ID: Q5VIR6
  ENSP ID: ENSP00000291074
MMEEEELEFVEELEAVLQLTPEVQLAIEQVFPSQDPLDRADFNAVEYINTLFPTEQSLANIDEVVNKIRLKIRRLDDNIRTVVRGQTNVGQDGRQVKEITRDIKQLDHAKRHLTTSITTLNHLHMLAGGVDSLEAMTRRRQYGEVANLLQGVMNVLEHFHKYMGIPQIRQLSERVKAAQTELGQQILADFEEAFPSQGTKRPGGPSNVLRDACLVANILDPRIKQEIIKKFIKQHLSEYLVLFQENQDVAWLDKIDRRYAWIKRQLVDYEEKYGRMFPREWCMAERIAVEFCHVTRAELAKIMRTRAKEIEVKLLLFAIQRTTNFEGFLAKRFSGCTLTDGTLKKLESPPPSTNPFLEDEPTPEMEELATEKGDLDQPKKPKAPDNPFHGIVSKCFEPHLYVYIESQDKNLGELIDRFVADFKAQGPPKPNTDEGGAVLPSCADLFVYYKKCMVQCSQLSTGEPMIALTTIFQKYLREYAWKILSGNLPKTTTSSGGLTISSLLKEKEGSEVAKFTLEELCLICNILSTAEYCLATTQQLEEKLKEKVDVSLIERINLTGEMDTFSTVISSSIQLLVQDLDAACDPALTAMSKMQWQNVEHVGDQSPYVTSVILHIKQNVPIIRDNLASTRKYFTQFCVKFANSFIPKFITHLFKCKPISMVGAEQVRWT

SEQ ID NO: 96246 - protein, 547 aa, Homo sapiens
  Payload ID: 19212
  Gene Name: vacuolar protein sorting 53 homolog (S. cerevisiae)
  ENSP ID: ENSP00000373692
MMEEEELEFVEELEAVLQLTPEVQLAIEQVFPSQDPLDRADFNAVEYINTLFPTEQSLANIDEVVNKIRLKIRRLDDNIRTVVRGQTNVGQDGRQALEEAQKAIQQLFGKIKDIKDKAEKSEQMVKEITRDIKQLDHAKRHLTTSITTLNHLHMLAGGVDSLEAMTRRRQYGEVANLLQGVMNVLEHFHKYMGIPQIRQLSERVKAAQTELGQQILADFEEAFPSQGTKVAWLDKIDRRYAWIKRQLVDYEEKYGRMFPREWCMAERIAVEFCHVTRAELAKIMRTRAKEIEVKLLLFAIQRTTNFEGFLAKRFSGCTLTDGTLKKLESPPPSTNPFLEDEPTPEMEELATEKGDLDQPKKPKAPDNPFHGIVSKCFEPHLYVYIESQDKNLGELIDRFVADFKAQGPPKPNTDEGGAVLPSCADLFVYYKKCMVQCSQLSTGEPMIALTTIFQKYLREYAWKILSGNLPKTTTSSGGLTISSLLKEKEGSEVAKFTLEELCLICNILSTAEYCLATTQQLEEKLKEKVDRHLQQYSAAGSGSGCCL

SEQ ID NO: 96247 - protein, 422 aa, Homo sapiens
  Payload ID: 19212
  Gene Name: vacuolar protein sorting 53 homolog (S. cerevisiae)
  ENSP ID: ENSP00000384294
MMEEEELEFVEELEAVLQLTPEVQLAIEQVFPSQDPLDRADFNAVEYINTLFPTEQSLANIDEVVNKIRLKIRRLDDNIRTVVRGQTNVGQDGRQKKLESPPPSTNPFLEDEPTPEMEELATEKGDLDQPKKPKAPDNPFHGIVSKCFEPHLYVYIESQDKNLGELIDRFVADFKAQGPPKPNTDEGGAVLPSCADLFVYYKKCMVQCSQLSTGEPMIALTTIFQKYLREYAWKILSGNLPKTTTSSGGLTISSLLKEKEGSEVAKFTLEELCLICNILSTAEYCLATTQQLEEKLKEKVDVSLIERINLTGEMDTFSTVISSSIQLLVQDLDAACDPALTAMSKMQWQNVEHVGDQSPYVTSVILHIKQNVPIIRDNLASTRKYFTQFCVKFANSFIPKFITHLFKCKPISMVGAEQVRWT

SEQ ID NO: 96248 - protein, 832 aa, Homo sapiens
  Payload ID: 19212
  Gene Name: vacuolar protein sorting 53 homolog (S. cerevisiae)
  Uniprot ID: Q5VIR6
  ENSP ID: ENSP00000401435
MMEEEELEFVEELEAVLQLTPEVQLAIEQVFPSQDPLDRADFNAVEYINTLFPTEQSLANIDEVVNKIRLKIRRLDDNIRTVVRGQTNVGQDGRQALEEAQKAIQQLFGKIKDIKDKAEKSEQMVKEITRDIKQLDHAKRHLTTSITTLNHLHMLAGGVDSLEAMTRRRQYGEVANLLQGVMNVLEHFHKYMGIPQIRQLSERVKAAQTELGQQILADFEEAFPSQGTKRPGGPSNVLRDACLVANILDPRIKQEIIKKFIKQHLSEYLVLFQENQDVAWLDKIDRRYAWIKRQLVDYEEKYGRMFPREWCMAERIAVEFCHVTRAELAKIMRTRAKEIEVKLLLFAIQRTTNFEGFLAKRFSGCTLTDGTLKKLESPPPSTNPFLEDEPTPEMEELATEKGDLDQPKKPKAPDNPFHGIVSKCFEPHLYVYIESQDKNLGELIDRFVADFKAQGPPKPNTDEGGAVLPSCADLFVYYKKCMVQCSQLSTGEPMIALTTIFQKYLREYAWKILSGNLPKTTTSSGGLTISSLLKEKEGSEVAKFTLEELCLICNILSTAEYCLATTQQLEEKLKEKVDVSLIERINLTGEMDTFSTVISSSIQLLVQDLDAACDPALTAMSKMQWQNVEHVGDQSPYVTSVILHIKQNVPIIRDNLASTRKYFTQFCVKFANSFIPKFITHLFKCKPISMVGAEQLLLDTHSLKMVLLDLPSISSQVVRKAPASYTKIVVKGMTRAEMILKVVMAPHEPLVVFVDNYIKLLTDCNTETFQKILDMKGLKRSEQSSMLELLRQRLPAPPSGAESSGSLSLTAPTPEQESSRIRKLEKLIKKRL

SEQ ID NO: 96249 - protein, 216 aa, Homo sapiens
  Payload ID: 19212
  Gene Name: vacuolar protein sorting 53 homolog (S. cerevisiae)
  ENSP ID: ENSP00000458311
MMEEEELEFVEELEAVLQLTPEVQLAIEQVFPSQDPLDRADFNAVEYINTLFPTEQSLANIDEVVNKIRLKIRRLDDNIRTVVRGQTNVGQDGRQALEEAQKAIQQLFGKIKDIKDKAEKSEQMVKEITRDIKQLDHAKRHLTTSITTLNHLHMLAGGVDSLEAMTRRRQYGEVANLLQGVMNVLEHFHKYMGIPQIRQLSERKPKTLQLHGLNWT

SEQ ID NO: 96250 - protein, 237 aa, Homo sapiens
  Payload ID: 19212
  Gene Name: vacuolar protein sorting 53 homolog (S. cerevisiae)
  ENSP ID: ENSP00000458651
RPGGPSNVLRDACLVANILDPRIKQEIIKKFIKQHLSEYLVLFQENQDVAWLDKIDRRYAWIKRQLVDYEEKYGRMFPREWCMAERIAVEFCHVTRAELAKIMRTRAKEIEVKLLLFAIQRTTNFEGFLAKRFSGCTLTDGTLKKLESPPPSTNPFLEDEPTPEMEELATEKGDLDQTPPKGRLAGRTSSEKPVTMYFAASPAFILSQHHKGRSQESRASRSSSEMMQSNVSGPLIK

SEQ ID NO: 96251 - protein, 145 aa, Homo sapiens
  Payload ID: 19212
  Gene Name: vacuolar protein sorting 53 homolog (S. cerevisiae)
  ENSP ID: ENSP00000459159
MMEEEELEFVEELEAVLQLTPEVQLAIEQVFPSQDPLDRADFNAVEYINTLFPTEQSLANIDEVVNKIRLRQENHLNPGGGGCSEPRFHHCTPAWVTEQDPFSKSFQDRGNFLKIHKTCNSRTVGIRFGNLPGNLISSSPPCFPT

SEQ ID NO: 96252 - protein, 699 aa, Homo sapiens
  Payload ID: 19212
  Gene Name: vacuolar protein sorting 53 homolog (S. cerevisiae)
  Uniprot ID: Q5VIR6
  ENSP ID: ENSP00000459312
MMEEEELEFVEELEAVLQLTPEVQLAIEQVFPSQDPLDRADFNAVEYINTLFPTEQSLANIDEVVNKIRLKIRRLDDNIRTVVRGQTNVGQDGRQALEEAQKAIQQLFGKIKDIKDKAEKSEQMVKEITRDIKQLDHAKRHLTTSITTLNHLHMLAGGVDSLEAMTRRRQYGEVANLLQGVMNVLEHFHKYMGIPQIRQLSERVKAAQTELGQQILADFEEAFPSQGTKRPGGPSNVLRDACLVANILDPRIKQEIIKKFIKQHLSEYLVLFQENQDVAWLDKIDRRYAWIKRQLVDYEEKYGRMFPREWCMAERIAVEFCHVTRAELAKIMRTRAKEIEVKLLLFAIQRTTNFEGFLAKRFSGCTLTDGTLKKLESPPPSTNPFLEDEPTPEMEELATEKGDLDQPKKPKAPDNPFHGIVSKCFEPHLYVYIESQDKNLGELIDRFVADFKAQGPPKPNTDEGGAVLPSCADLFVYYKKCMVQCSQLSTGEPMIALTTIFQKYLREYAWKILSGNLPKTTTSSGGLTISSLLKEKEGSEVAKFTLEELCLICNILSTAEYCLATTQQLEEKLKEKVDVSLIERINLTGEMDTFSTVISSSIQLLVQDLDAACDPALTAMSKMQWQNVEHVGDQSPYVTSVILHIKQNVPIIRDNLASTRKYFTQFCVKFANSFIPKFITHLFKCKPISMVGAEQVRWT

SEQ ID NO: 96253 - protein, 68 aa, Homo sapiens
  Payload ID: 19212
  Gene Name: vacuolar protein sorting 53 homolog (S. cerevisiae)
  ENSP ID: ENSP00000461429
MVKEITRDIKQLDHAKRHLTTSITTLNHLHMLAGGVDSLEAMTRRRQYGEVANLLQGVMNVLEHFHKY

SEQ ID NO: 96254 - protein, 977 aa, Homo sapiens
  Payload ID: 19213
  Gene Name: vacuolar protein sorting 54 homolog (S. cerevisiae)
  Uniprot ID: Q9P1Q0
  ENSP ID: ENSP00000272322
MASSHSSSPVPQGSSSDVFFKIEVDPSKHIRPVPSLPDVCPKEPTGDSHSLYVAPSLVTDQHRWTVYHSKVNLPAALNDPRLAKRESDFFTKTWGLDFVDTEVIPSFYLPQISKEHFTVYQQEISQREKIHERCKNICPPKDTFERTLLHTHDKSRTDLEQVPKIFMKPDFALDDSLTFNSVLPWSHFNTAGGKGNRDAASSKLLQEKLSHYLDIVEVNIAHQISLRSEAFFHAMTSQHELQDYLRKTSQAVKMLRDKIAQIDKVMCEGSLHILRLALTRNNCVKVYNKLKLMATVHQTQPTVQVLLSTSEFVGALDLIATTQEVLQQELQGIHSFRHLGSQLCELEKLIDKMMIAEFSTYSHSDLNRPLEDDCQVLEEERLISLVFGLLKQRKLNFLEIYGEKMVITAKNIIKQCVINKVSQTEEIDTDVVVKLADQMRMLNFPQWFDLLKDIFSKFTIFLQRVKATLNIIHSVVLSVLDKNQRTRELEEISQQKNAAKDNSLDTEVAYLIHEGMFISDAFGEGELTPIAVDTTSQRNASPNSEPCSSDSVSEPECTTDSSSSKEHTSSSAIPGGVDIMVSEDMKLTDSELGKLANNIQELLYSASDICHDRAVKFLMSRAKDGFLEKLNSMEFITLSRLMETFILDTEQICGRKSTSLLGALQSQAIKFVNRFHEERKTKLSLLLDNERWKQADVPAEFQDLVDSLSDGKIALPEKKSGATEERKPAEVLIVEGQQYAVVGTVLLLIRIILEYCQCVDNIPSVTTDMLTRLSDLLKYFNSRSCQLVLGAGALQVVGLKTITTKNLALSSRCLQLIVHYIPVIRAHFEARLPPKQYSMLRHFDHITKDYHDHIAEISAKLVAIMDSLFDKLLSKYEVKAPVPSACFRNICKQMTKMHEAIFDLLPEEQTQMLFLRINASYKLHLKKQLSHLNVINDGGPQNGLVTADVAFYTGNLQALKGLKDLDLNMAEIWEQKR

SEQ ID NO: 96255 - protein, 824 aa, Homo sapiens
  Payload ID: 19213
  Gene Name: vacuolar protein sorting 54 homolog (S. cerevisiae)
  Uniprot ID: Q9P1Q0
  ENSP ID: ENSP00000346499
MLPTKNRIKREKIHERCKNICPPKDTFERTLLHTHDKSRTDLEQVPKIFMKPDFALDDSLTFNSVLPWSHFNTAGGKGNRDAASSKLLQEKLSHYLDIVEVNIAHQISLRSEAFFHAMTSQHELQDYLRKTSQAVKMLRDKIAQIDKVMCEGSLHILRLALTRNNCVKVYNKLKLMATVHQTQPTVQVLLSTSEFVGALDLIATTQEVLQQELQGIHSFRHLGSQLCELEKLIDKMMIAEFSTYSHSDLNRPLEDDCQVLEECVINKVSQTEEIDTDVVVKLADQMRMLNFPQWFDLLKDIFSKFTIFLQRVKATLNIIHSVVLSVLDKNQRTRELEEISQQKNAAKDNSLDTEVAYLIHEGMFISDAFGEGELTPIAVDTTSQRNASPNSEPCSSDSVSEPECTTDSSSSKEHTSSSAIPGGVDIMVSEDMKLTDSELGKLANNIQELLYSASDICHDRAVKFLMSRAKDGFLEKLNSMEFITLSRLMETFILDTEQICGRKSTSLLGALQSQAIKFVNRFHEERKTKLSLLLDNERWKQADVPAEFQDLVDSLSDGKIALPEKKSGATEERKPAEVLIVEGQQYAVVGTVLLLIRIILEYCQCVDNIPSVTTDMLTRLSDLLKYFNSRSCQLVLGAGALQVVGLKTITTKNLALSSRCLQLIVHYIPVIRAHFEARLPPKQYSMLRHFDHITKDYHDHIAEISAKLVAIMDSLFDKLLSKYEVKAPVPSACFRNICKQMTKMHEAIFDLLPEEQTQMLFLRINASYKLHLKKQLSHLNVINDGGPQNGLVTADVAFYTGNLQALKGLKDLDLNMAEIWEQKR

SEQ ID NO: 96256 - protein, 965 aa, Homo sapiens
  Payload ID: 19213
  Gene Name: vacuolar protein sorting 54 homolog (S. cerevisiae)
  Uniprot ID: Q9P1Q0
  ENSP ID: ENSP00000386980
MASSHSSSPVPQGSSSDVFFKIEVDPSKHIRPVPSLPDVCPKEPTVTDQHRWTVYHSKVNLPAALNDPRLAKRESDFFTKTWGLDFVDTEVIPSFYLPQISKEHFTVYQQEISQREKIHERCKNICPPKDTFERTLLHTHDKSRTDLEQVPKIFMKPDFALDDSLTFNSVLPWSHFNTAGGKGNRDAASSKLLQEKLSHYLDIVEVNIAHQISLRSEAFFHAMTSQHELQDYLRKTSQAVKMLRDKIAQIDKVMCEGSLHILRLALTRNNCVKVYNKLKLMATVHQTQPTVQVLLSTSEFVGALDLIATTQEVLQQELQGIHSFRHLGSQLCELEKLIDKMMIAEFSTYSHSDLNRPLEDDCQVLEEERLISLVFGLLKQRKLNFLEIYGEKMVITAKNIIKQCVINKVSQTEEIDTDVVVKLADQMRMLNFPQWFDLLKDIFSKFTIFLQRVKATLNIIHSVVLSVLDKNQRTRELEEISQQKNAAKDNSLDTEVAYLIHEGMFISDAFGEGELTPIAVDTTSQRNASPNSEPCSSDSVSEPECTTDSSSSKEHTSSSAIPGGVDIMVSEDMKLTDSELGKLANNIQELLYSASDICHDRAVKFLMSRAKDGFLEKLNSMEFITLSRLMETFILDTEQICGRKSTSLLGALQSQAIKFVNRFHEERKTKLSLLLDNERWKQADVPAEFQDLVDSLSDGKIALPEKKSGATEERKPAEVLIVEGQQYAVVGTVLLLIRIILEYCQCVDNIPSVTTDMLTRLSDLLKYFNSRSCQLVLGAGALQVVGLKTITTKNLALSSRCLQLIVHYIPVIRAHFEARLPPKQYSMLRHFDHITKDYHDHIAEISAKLVAIMDSLFDKLLSKYEVKAPVPSACFRNICKQMTKMHEAIFDLLPEEQTQMLFLRINASYKLHLKKQLSHLNVINDGGPQNGLVTADVAFYTGNLQALKGLKDLDLNMAEIWEQKR

SEQ ID NO: 96257 - protein, 81 aa, Homo sapiens
  Payload ID: 19213
  Gene Name: vacuolar protein sorting 54 homolog (S. cerevisiae)
  ENSP ID: ENSP00000414725
  MOD_RES (1)..(1): Any amino acid
XSLSDGKIALPEKKSGATEERKPAEVLIVEGQQYAVVGTVLLLIRIILEYCQCVDNIPSVTTDMLTRLSDLLKVLNMTEAT

SEQ ID NO: 96258 - protein, 375 aa, Homo sapiens
  Payload ID: 19214
  Gene Name: vacuolar protein sorting 72 homolog (S. cerevisiae)
  Uniprot ID: Q15906
  ENSP ID: ENSP00000346464
MSLAGGRAPRKTAGNRLSGLLEAEEEDEFYQTTYGGFTEESGDDEYQGDQSDTEDEVDSDFDIDEGDEPSSDGEAEEPRRKRRVVTKAYKEPLKSLRPRKVNTPAGSSQKAREEKALLPLELQDDGSDSRKSMRQSTAEHTRQTFLRVQERQGQSRRRKGPHCERPLTQEELLREAKITEELNLRSLETYERLEADKKKQVHKKRKCPGPIITYHSVTVPLVGEPGPKEENVDIEGSLCFSLSFVLRLDPAPSVSALTPHAGTGPVNPPARCSRTFITFSDDATFEEWFPQGRPPKVPVREVCPVTHRPALYRDPVTDIPYATARAFKIIREAYKKYITAHGLPPTASALGPGPPPPEPLPGSGPRALRQKIVIK

SEQ ID NO: 96259 - protein, 364 aa, Homo sapiens
  Payload ID: 19214
  Gene Name: vacuolar protein sorting 72 homolog (S. cerevisiae)
  Uniprot ID: Q15906
  ENSP ID: ENSP00000357887
MSLAGGRAPRKTAGNRLSGLLEAEEEDEFYQTTYGGFTEESGDDEYQGDQSDTEDEVDSDFDIDEGDEPSSDGEAEEPRRKRRVVTKAYKEPLKSLRPRKVNTPAGSSQKAREEKALLPLELQDDGSDSRKSMRQSTAEHTRQTFLRVQERQGQSRRRKGPHCERPLTQEELLREAKITEELNLRSLETYERLEADKKKQVHKKRKCPGPIITYHSVTVPLVGEPGPKEENVDIEGLDPAPSVSALTPHAGTGPVNPPARCSRTFITFSDDATFEEWFPQGRPPKVPVREVCPVTHRPALYRDPVTDIPYATARAFKIIREAYKKYITAHGLPPTASALGPGPPPPEPLPGSGPRALRQKIVIK

SEQ ID NO: 96260 - protein, 1428 aa, Homo sapiens
  Payload ID: 19215
  Gene Name: vacuolar protein sorting 8 homolog (S. cerevisiae)
  ENSP ID: ENSP00000287546
MENEPDHENVEQSLCAKTSEEELNKSFNLEASLSKFSYIDMDKELEFKNDLIDDKEFDIPQVDTPPTLESILNETDDEDESFILEDPTLLNIDTIDSHSYDTSSVASSDSGDRTNLKRKKKLPDSFSLHGSVMRHSLLKGISAQIVSAADKVDAGLPTAIAVSSLIAVGTSHGLALIFGKYQNQALRLCLGSTSVGGQYGAISALSINNDCSRLLCGFAKGQITMWDLASGKLLRSITDAHPPGTAILHIKFTDDPTLAICNDSGGSVFELTFKRVMGVRTCESRCLFSGSKGEVCCIEPLHSKPELKDHPITQFSLLAMASLTKILVIGLKPSLKVWMTFPYGRMDPSSVPLLAWHFVAVQNYVNPMLAFCRGDVVHFLLVKRDESGAIHVTKQKHLHLYYDLINFTWINSRTVVLLDSVEKLHVIDRQTQEELETVEISEVQLVYNSSHFKSLATGGNVSQALALVGEKACYQSISSYGGQIFYLGTKSVYVMMLRSWRERVDHLLKQDCLTEALALAWSFHEGKAKAVVGLSGDASKRKAIVADRMVEILFHYADRALKKCPDQGKIQVMEQHFQDMVPVIVDYCLLLQRKDLLFSQMYDKLSENSVAKGVFLECLEPYILSDKLVGITPQVMKDLIVHFQDKKLMENVEALIVHMDITSLDIQQVVLMCWENRLYDAMIYVYNRGMNEFISPMEKLFRVIAPPLNAGKTLTDEQVVMGNKLLVYISCCLAGRAYPLGDIPEDLVPLVKNQVFEFLIRLHSAEASPEEEIYPYIRTLLHFDTREFLNVLALTFEDFKNDKQAVEYQQRIVDILLKVMVENSDFTPSQVGCLFTFLARQLAKPDNTLFVNRTLFDQVLEFLCSPDDDSRHSERQQVLLELLQAGGIVQFEESRLIRMAEKAEFYQICEFMYEREHQYDKIIDCYLRDPLREEEVFNYIHNILSIPGHSAEEKQSVWQKAMDHIEELVSLKPCKAAELVATHFSGHIETVIKKLQNQVLLFKFLRSLLDPREGIHVNQELLQISPCITEQFIELLCQFNPTQVIETLQVLECYRLEETIQITQKYQLHEVTAYLLEKKGDIHGAFLIMLERLQSKLQEVTHQGENTKEDPSLKDVEDTMVETIALCQRNSHNLNQQQREALWFPLLEAMMAPQKLSSSAIPHLHSEALKSLTMQVLNSMAAFIALPSILQRILQDPVYGKGKLGEIQGLILGMLDTFNYEQTLLETTTSLLNQDLHWSLCNLRASVTRGLNPKQDYCSICLQQYKRRQEMADEIIVFSCGHLYHSFCLQNKECTVEFEGQTRWTCYKCSSSNKVGKLSENSSEIKKGRITPSQVKMSPSYHQSKGDPTAKKGTSEPVLDPQQIQAFDQLCRLYRGSSRLALLTELSQNRSSESYRPFSGSQSAPAFNSIFQNENFQLQLIPPPVTED

SEQ ID NO: 96261 - protein, 164 aa, Homo sapiens
  Payload ID: 19215
  Gene Name: vacuolar protein sorting 8 homolog (S. cerevisiae)
  ENSP ID: ENSP00000389480
MENEPDHENVEQSLCAKTSEEELNKSFNLEASLSKFSYIDMDKELEFKNDLIDDKEFDIPQVDTPPTLESILNETDDEDESFILEDPTLLNIDTIDSHSYDTSSVASSDSGDRTNLKRKKKLPDSFSLHGSVMRHSLLKGISAQIVSAADKVDAGLPTAIVSIL

SEQ ID NO: 96262 - protein, 57 aa, Homo sapiens
  Payload ID: 19215
  Gene Name: vacuolar protein sorting 8 homolog (S. cerevisiae)
  ENSP ID: ENSP00000393070
  MOD_RES (1)..(1): Any amino acid
XAEASPEEEIYPYIRTLLHFDTREFLNVLALTFEDFKNDKQAVEYQQRIVDILLKHA

SEQ ID NO: 96263 - protein, 74 aa, Homo sapiens
  Payload ID: 19215
  Gene Name: vacuolar protein sorting 8 homolog (S. cerevisiae)
  ENSP ID: ENSP00000394018
MENEPDHENVEQSLCAKTSEEELNKSFNLEASLSKFSYIDMDKELEFKNDLIDDKEFDIPQVDTPPTLESILNE

SEQ ID NO: 96264 - protein, 68 aa, Homo sapiens
  Payload ID: 19215
  Gene Name: vacuolar protein sorting 8 homolog (S. cerevisiae)
  ENSP ID: ENSP00000397553
MENEPDHENVEQSLCAKTSEEELNKSFNLEASLSKFSYIDMDKELEFKNDLGLTLLSRLEYSGANMAH

SEQ ID NO: 96265 - protein, 59 aa, Homo sapiens
  Payload ID: 19215
  Gene Name: vacuolar protein sorting 8 homolog (S. cerevisiae)
  ENSP ID: ENSP00000400267
DRMVEILFHYADRALKKCPDQGKIQVMEQHFQAIGMAYRNDWFLNIEPVLHPGINLTWS

SEQ ID NO: 96266 - protein, 1426 aa, Homo sapiens
  Payload ID: 19215
  Gene Name: vacuolar protein sorting 8 homolog (S. cerevisiae)
  Uniprot ID: Q8N3P4
  ENSP ID: ENSP00000404704
MENEPDHENVEQSLCAKTSEEELNKSFNLEASLSKFSYIDMDKELEFKNDLIDDKEFDIPQVDTPPTLESILNETDDEDESFILEDPTLLNIDTIDSHSYDTSSVASSDSGDRTNLKRKKKLPDSFSLHGSVMRHSLLKGISAQIVSAADKVDAGLPTAIAVSSLIAVGTSHGLALIFDQNQALRLCLGSTSVGGQYGAISALSINNDCSRLLCGFAKGQITMWDLASGKLLRSITDAHPPGTAILHIKFTDDPTLAICNDSGGSVFELTFKRVMGVRTCESRCLFSGSKGEVCCIEPLHSKPELKDHPITQFSLLAMASLTKILVIGLKPSLKVWMTFPYGRMDPSSVPLLAWHFVAVQNYVNPMLAFCRGDVVHFLLVKRDESGAIHVTKQKHLHLYYDLINFTWINSRTVVLLDSVEKLHVIDRQTQEELETVEISEVQLVYNSSHFKSLATGGNVSQALALVGEKACYQSISSYGGQIFYLGTKSVYVMMLRSWRERVDHLLKQDCLTEALALAWSFHEGKAKAVVGLSGDASKRKAIVADRMVEILFHYADRALKKCPDQGKIQVMEQHFQDMVPVIVDYCLLLQRKDLLFSQMYDKLSENSVAKGVFLECLEPYILSDKLVGITPQVMKDLIVHFQDKKLMENVEALIVHMDITSLDIQQVVLMCWENRLYDAMIYVYNRGMNEFISPMEKLFRVIAPPLNAGKTLTDEQVVMGNKLLVYISCCLAGRAYPLGDIPEDLVPLVKNQVFEFLIRLHSAEASPEEEIYPYIRTLLHFDTREFLNVLALTFEDFKNDKQAVEYQQRIVDILLKVMVENSDFTPSQVGCLFTFLARQLAKPDNTLFVNRTLFDQVLEFLCSPDDDSRHSERQQVLLELLQAGGIVQFEESRLIRMAEKAEFYQICEFMYEREHQYDKIIDCYLRDPLREEEVFNYIHNILSIPGHSAEEKQSVWQKAMDHIEELVSLKPCKAAELVATHFSGHIETVIKKLQNQVLLFKFLRSLLDPREGIHVNQELLQISPCITEQFIELLCQFNPTQVIETLQVLECYRLEETIQITQKYQLHEVTAYLLEKKGDIHGAFLIMLERLQSKLQEVTHQGENTKEDPSLKDVEDTMVETIALCQRNSHNLNQQQREALWFPLLEAMMAPQKLSSSAIPHLHSEALKSLTMQVLNSMAAFIALPSILQRILQDPVYGKGKLGEIQGLILGMLDTFNYEQTLLETTTSLLNQDLHWSLCNLRASVTRGLNPKQDYCSICLQQYKRRQEMADEIIVFSCGHLYHSFCLQNKECTVEFEGQTRWTCYKCSSSNKVGKLSENSSEIKKGRITPSQVKMSPSYHQSKGDPTAKKGTSEPVLDPQQIQAFDQLCRLYRGSSRLALLTELSQNRSSESYRPFSGSQSAPAFNSIFQNENFQLQLIPPPVTED

SEQ ID NO: 96267 - protein, 1336 aa, Homo sapiens
  Payload ID: 19215
  Gene Name: vacuolar protein sorting 8 homolog (S. cerevisiae)
  Uniprot ID: Q8N3P4
  ENSP ID: ENSP00000405483
MENEPDHENVEQSLCAKTSEEELNKSFNLEASLSKFSYIDMDKELEFKNDLIDDKEFDIPQVDTPPTLESILNETDDEDESFILEDPTLLNIDTIDSHSYDTSSVASSDSGDRTNLKRKKKLPDSFSLHGSVMRHSLLKGISAQIVSAADKVDAGLPTAIAVSSLIAVGTSHGLALIFDQNQALRLCLGSTSVGGQYGAISALSINNDCSRLLCGFAKGQITMWDLASGKLLRSITDAHPPGTAILHIKFTDDPTLAICNDSGGSVFELTFKRVMGVRTCESRCLFSGSKGEVCCIEPLHSKPELKDHPITQFSLLAMASLTKILVIGLKPSLKVWMTFPYGRMDPSSVPLLAWHFVAVQNYVNPMLAFCRGDVVHFLLVKRDESGAIHVTKQKHLHLYYDLINFTWINSRTVVLLDSVEKLHVIDRQTQEELETVEISEVQLVYNSSHFKSLATGGNVSQALALVGEKACYQSISSYGGQIFYLGTKSVYVMMLRSWRERVDHLLKQDCLTEALALAWSFHEGKAKAVVGLSGDASKRKAIVADRMVEILFHYADRALKKCPDQGKIQVMEQHFQVVLMCWENRLYDAMIYVYNRGMNEFISPMEKLFRVIAPPLNAGKTLTDEQVVMGNKLLVYISCCLAGRAYPLGDIPEDLVPLVKNQVFEFLIRLHSAEASPEEEIYPYIRTLLHFDTREFLNVLALTFEDFKNDKQAVEYQQRIVDILLKVMVENSDFTPSQVGCLFTFLARQLAKPDNTLFVNRTLFDQVLEFLCSPDDDSRHSERQQVLLELLQAGGIVQFEESRLIRMAEKAEFYQICEFMYEREHQYDKIIDCYLRDPLREEEVFNYIHNILSIPGHSAEEKQSVWQKAMDHIEELVSLKPCKAAELVATHFSGHIETVIKKLQNQVLLFKFLRSLLDPREGIHVNQELLQISPCITEQFIELLCQFNPTQVIETLQVLECYRLEETIQITQKYQLHEVTAYLLEKKGDIHGAFLIMLERLQSKLQEVTHQGENTKEDPSLKDVEDTMVETIALCQRNSHNLNQQQREALWFPLLEAMMAPQKLSSSAIPHLHSEALKSLTMQVLNSMAAFIALPSILQRILQDPVYGKGKLGEIQGLILGMLDTFNYEQTLLETTTSLLNQDLHWSLCNLRASVTRGLNPKQDYCSICLQQYKRRQEMADEIIVFSCGHLYHSFCLQNKECTVEFEGQTRWTCYKCSSSNKVGKLSENSSEIKKGRITPSQVKMSPSYHQSKGDPTAKKGTSEPVLDPQQIQAFDQLCRLYRGSSRLALLTELSQNRSSESYRPFSGSQSAPAFNSIFQNENFQLQLIPPPVTED

SEQ ID NO: 96268 - protein, 108 aa, Homo sapiens
  Payload ID: 19215
  Gene Name: vacuolar protein sorting 8 homolog (S. cerevisiae)
  ENSP ID: ENSP00000409115
  MOD_RES (1)..(1): Any amino acid
XALAWSFHEGKAKAVVGLSGDASKRKAIVADRMVEILFHYADRALKKCPDQGKIQVMEQHFQDMVPVIVDYCLLLQRKTSDESKPHPSPFRSFLDVFVELVMKDHTCE

SEQ ID NO: 96269 - protein, 140 aa, Homo sapiens
  Payload ID: 19215
  Gene Name: vacuolar protein sorting 8 homolog (S. cerevisiae)
  ENSP ID: ENSP00000409957
MENEPDHENVEQSLCAKTSEEELNKSFNLEASLSKFSYIDMDKELEFKNDLIDDKEFDIPQVDTPPTLESILNETDDEDESFILEDPTLLNIDTIDSHSYDTSSVASSDSGDRTNLKRKKKLPDSFSLHGSVMRHSLLKG

SEQ ID NO: 96270 - protein, 202 aa, Homo sapiens
  Payload ID: 19215
  Gene Name: vacuolar protein sorting 8 homolog (S. cerevisiae)
  ENSP ID: ENSP00000415161
MENEPDHENVEQSLCAKTSEEELNKSFNLEASLSKFSYIDMDKELEFKNDLIDDKEFDIPQVDTPPTLESILNETDDEDESFILEDPTLLNIDTIDSHSYDTSSVASSDSGDRTNLKRKKKLPDSFSLHGSVMRHSLLKGISAQIVSAADKVDAGLPTAIAVSSLIAVGTSHGLALIFDQNQALRLCLGSTSVGGQYGAISA

SEQ ID NO: 96271 - protein, 62 aa, Homo sapiens
  Payload ID: 19215
  Gene Name: vacuolar protein sorting 8 homolog (S. cerevisiae)
  ENSP ID: ENSP00000416101
  MOD_RES (1)..(1): Any amino acid
XLHGSVMRHSLLKGISAQIVSAAVESNSYLLEWEPPVEDYISMTFSEFNPYDKVDAGLPTAI

SEQ ID NO: 96272 - protein, 121 aa, Homo sapiens
  Payload ID: 19215
  Gene Name: vacuolar protein sorting 8 homolog (S. cerevisiae)
  ENSP ID: ENSP00000416150
MENEPDHENVEQSLCAKTSEEELNKSFNLEASLSKFSYIDMDKELEFKNDLIDDKEFDIPQVDTPPTLESILNETDDEDESFILEDPTLLNIDTIDSHSYDTSSVASSDSGDRTNLKRKKK

SEQ ID NO: 96273 - protein, 68 aa, Homo sapiens; identical to SEQ ID NO: 96264
  Payload ID: 19215
  Gene Name: vacuolar protein sorting 8 homolog (S. cerevisiae)
  ENSP ID: ENSP00000487080

SEQ ID NO: 96274 - protein, 1428 aa, Homo sapiens
  Payload ID: 19215
  Gene Name: vacuolar protein sorting 8 homolog (S. cerevisiae)
  Uniprot ID: Q8N3P4
  ENSP ID: ENSP00000487164
MENEPDHENVEQSLCAKTSEEELNKSFNLEASLSKFSYIDMDKELEFKNDLIDDKEFDIPQVDTPPTLESILNETDDEDESFILEDPTLLNIDTIDSHSYDTSSVASSDSGDRTNLKRKKKLPDSFSLHGSVMRHSLLKGISAQIVSAADKVDAGLPTAIAVSSLIAVGTSHGLALIFGKDQNQALRLCLGSTSVGGQYGAISALSINNDCSRLLCGFAKGQITMWDLASGKLLRSITDAHPPGTAILHIKFTDDPTLAICNDSGGSVFELTFKRVMGVRTCESRCLFSGSKGEVCCIEPLHSKPELKDHPITQFSLLAMASLTKILVIGLKPSLKVWMTFPYGRMDPSSVPLLAWHFVAVQNYVNPMLAFCRGDVVHFLLVKRDESGAIHVTKQKHLHLYYDLINFTWINSRTVVLLDSVEKLHVIDRQTQEELETVEISEVQLVYNSSHFKSLATGGNVSQALALVGEKACYQSISSYGGQIFYLGTKSVYVMMLRSWRERVDHLLKQDCLTEALALAWSFHEGKAKAVVGLSGDASKRKAIVADRMVEILFHYADRALKKCPDQGKIQVMEQHFQDMVPVIVDYCLLLQRKDLLFSQMYDKLSENSVAKGVFLECLEPYILSDKLVGITPQVMKDLIVHFQDKKLMENVEALIVHMDITSLDIQQVVLMCWENRLYDAMIYVYNRGMNEFISPMEKLFRVIAPPLNAGKTLTDEQVVMGNKLLVYISCCLAGRAYPLGDIPEDLVPLVKNQVFEFLIRLHSAEASPEEEIYPYIRTLLHFDTREFLNVLALTFEDFKNDKQAVEYQQRIVDILLKVMVENSDFTPSQVGCLFTFLARQLAKPDNTLFVNRTLFDQVLEFLCSPDDDSRHSERQQVLLELLQAGGIVQFEESRLIRMAEKAEFYQICEFMYEREHQYDKIIDCYLRDPLREEEVFNYIHNILSIPGHSAEEKQSVWQKAMDHIEELVSLKPCKAAELVATHFSGHIETVIKKLQNQVLLFKFLRSLLDPREGIHVNQELLQISPCITEQFIELLCQFNPTQVIETLQVLECYRLEETIQITQKYQLHEVTAYLLEKKGDIHGAFLIMLERLQSKLQEVTHQGENTKEDPSLKDVEDTMVETIALCQRNSHNLNQQQREALWFPLLEAMMAPQKLSSSAIPHLHSEALKSLTMQVLNSMAAFIALPSILQRILQDPVYGKGKLGEIQGLILGMLDTFNYEQTLLETTTSLLNQDLHWSLCNLRASVTRGLNPKQDYCSICLQQYKRRQEMADEIIVFSCGHLYHSFCLQNKECTVEFEGQTRWTCYKCSSSNKVGKLSENSSEIKKGRITPSQVKMSPSYHQSKGDPTAKKGTSEPVLDPQQIQAFDQLCRLYRGSSRLALLTELSQNRSSESYRPFSGSQSAPAFNSIFQNENFQLQLIPPPVTED

SEQ ID NO: 96275 - protein, 406 aa, Homo sapiens
  Payload ID: 19216
  Gene Name: vacuole membrane protein 1
  Uniprot ID: Q96GC9
  ENSP ID: ENSP00000262291
MAENGKNCDQRRVAMNKEHHNGNFTDPSSVNEKKRREREERQNIVLWRQPLITLQYFSLEILVILKEWTSKLWHRQSIVVSFLLLLAVLIATYYVEGVHQQYVQRIEKQFLLYAYWIGLGILSSVGLGTGLHTFLLYLGPHIASVTLAAYECNSVNFPEPPYPDQIICPDEEGTEGTISLWSIISKVRIEACMWGIGTAIGELPPYFMARAARLSGAEPDDEEYQEFEEMLEHAESAQDFASRAKLAVQKLVQKVGFFGILACASIPNPLFDLAGITCGHFLVPFWTFFGATLIGKAIIKMHIQKIFVIITFSKHIVEQMVAFIGAVPGIGPSLQKPFQEYLEAQRQKLHHKSEMGTPQGENWLSWMFEKLVVVMVCYFILSIINSMAQSYAKRIQQRLNSEEKTK

SEQ ID NO: 96276 - protein, 92 aa, Homo sapiens
  Payload ID: 19216
  Gene Name: vacuole membrane protein 1
  ENSP ID: ENSP00000465397
MAENGKNCDQRRVAMNKEHHNGNFTDPSSVNEKKRREREERQNIVLWRQPLITLQYFSLEILVILKEWTSKLWHRQSIVVSFLLLLAVLIAT

SEQ ID NO: 96277 - protein, 58 aa, Homo sapiens
  Payload ID: 19216
  Gene Name: vacuole membrane protein 1
  ENSP ID: ENSP00000465911
  MOD_RES (1)..(1): Any amino acid
XPSSVNEKKRREREERQNIVLWRQPLITLQYFSLEILVILKEWTSKTLPPGPNWQFKN

SEQ ID NO: 96278 - protein, 75 aa, Homo sapiens
  Payload ID: 19216
  Gene Name: vacuole membrane protein 1
  ENSP ID: ENSP00000465947
MAENGKNCDQRRVAMNKEHHNGNFTDPSSVNEKKRREREERQNIVLWRQPLITLQYFSLEILVILKEWTSNMCNV

SEQ ID NO: 96279 - protein, 74 aa, Homo sapiens
  Payload ID: 19216
  Gene Name: vacuole membrane protein 1
  ENSP ID: ENSP00000465972
MAENGKNCDQRRVAMNKEHHNGNFTDPSSVNEKKRREREERQNIVLWRQPLITLQYFSLEILVILKEWTSKVHI

SEQ ID NO: 96280 - protein, 167 aa, Homo sapiens
  Payload ID: 19216
  Gene Name: vacuole membrane protein 1
  ENSP ID: ENSP00000466198
MAENGKNCDQRRVAMNKEHHNGNFTDPSSVNEKKRREREERQNIVLWRQPLITLQYFSLEILVILKEWTSKLWHRQSIVVSFLLLLAVLIATYYVEGVHQQYVQRIEKQFLLYAYWIGLGILSSVGLGTGLHTFLLYLIICPDEEGTEGTISLWSIISKVRIEACMW

SEQ ID NO: 96281 - protein, 44 aa, Homo sapiens
  Payload ID: 19216
  Gene Name: vacuole membrane protein 1
  ENSP ID: ENSP00000466413
MWGIGTAIGELPPYFMARAARLSGAEPDDEEYQEFEEMLEHAES

SEQ ID NO: 96282 - protein, 138 aa, Homo sapiens
  Payload ID: 19216
  Gene Name: vacuole membrane protein 1
  ENSP ID: ENSP00000466511
MAENGKNCDQRRVAMNKEHHNGNFTDPSSVNEKKRREREERQNIVLWRQPLITLQYFSLEILVILKEWTSKLWHRQSIVVSFLLLLAVLIATYYVEGVHQQYVQRIEKQFLLYAYWIGLGILSSVGLGTGLHTFLLYL

SEQ ID NO: 96283 - protein, 44 aa, Homo sapiens
  Payload ID: 19216
  Gene Name: vacuole membrane protein 1
  ENSP ID: ENSP00000466579
MAENGKNCDQRRVAMNKEHHNGNFTDYGIVKALWCLFYCCLLCL

SEQ ID NO: 96284 - protein, 78 aa, Homo sapiens
  Payload ID: 19216
  Gene Name: vacuole membrane protein 1
  ENSP ID: ENSP00000467093
MAENGKNCDQRRVAMNKEHHNGNFTDPSSVNEKKRREREERQNIVLWRQPLITLQYFSLEILVILKEWTSKLWHRQSI

SEQ ID NO: 96285 - protein, 225 aa, Homo sapiens
  Payload ID: 19216
  Gene Name: vacuole membrane protein 1
  ENSP ID: ENSP00000467350
GIGTAIGELPPYFMARAARLSGAEPDDEEYQEFEEMLEHAESAQDFASRAKLAVQKLVQKVGFFGILACASIPNPLFDLAGITCGHFLVPFWTFFGATLIGKAIIKMHIQKIFVIITFSKHIVEQMVAFIGLEDNGALQPPPPSAVPGIGPSLQKPFQEYLEAQRQKLHHKSEMGTPQGENWLSWMFEKLVVVMVCYFILSIINSMAQSYAKRIQQRLNSEEKTK

SEQ ID NO: 96286 - protein, 480 aa, Homo sapiens [sequence omitted]

SEQ ID NO: 96287 - protein, 480 aa, Homo sapiens [sequence omitted]

SEQ ID NO: 96288 - protein, 480 aa, Homo sapiens [sequence omitted]

SEQ ID NO: 96289 - protein, 184 aa, Homo sapiens
  Payload ID: 19217
  Gene Name: v-akt murine thymoma viral oncogene homolog 1
  ENSP ID: ENSP00000450681
  MOD_RES (1)..(1): Any amino acid
XHSEKNVVYRDLKLENLMLDKDGHIKITDFGLCKEGIKDGATMKTFCGTPEYLAPEDHEKLFELILMEEIRFPRTLGPEAKSLLSGLLKKDPKQRLGGGSEDAKEIMQHRFFAGIVWQHVYEKKLSPPFKPQVTSETDTRYFDEEFTAQMITITPPDQDDSMECVDSERRPHFPQFSYSASGTA

SEQ ID NO: 96290 - protein, 480 aa, Homo sapiens [sequence omitted]

SEQ ID NO: 96291 - protein, 480 aa, Homo sapiens [sequence omitted]

SEQ ID NO: 96292 - protein, 170 aa, Homo sapiens
  Payload ID: 19217
  Gene Name: v-akt murine thymoma viral oncogene homolog 1
  ENSP ID: ENSP00000451470
  MOD_RES (1)..(1): Any amino acid
XGIKDGATMKTFCGTPEYLAPEVLEDNDYGRAVDWWGLGVVMYEMMCGRLPFYNQDHEKLFELILMEEIRFPRTLGPEAKSLLSGLLKKDPKQRLGGGSEDAKEIMQHRFFAGIVWQHVYEKKLSPPFKPQVTSETDTRYFDEEFTAQMITITPPDQVLGDCPTGSLPLR

SEQ ID NO: 96293 - protein, 91 aa, Homo sapiens
  Payload ID: 19217
  Gene Name: v-akt murine thymoma viral oncogene homolog 1
  ENSP ID: ENSP00000451824
MSDVAIVKEGWLHKRGEYIKTWRPRYFLLKNDGTFIGYKERPQDVDQREAPLNNFSVAQCQLMKTERPRPNTFIIRCLQWTTVIERTFHVE

SEQ ID NO: 96294 - protein, 480 aa, Homo sapiens [sequence omitted]

SEQ ID NO: 96295 - protein, 146 aa, Homo sapiens
  Payload ID: 19217
  Gene Name: v-akt murine thymoma viral oncogene homolog 1
  ENSP ID: ENSP00000481526
LENLMLDKDGHIKITDFGLCKEGIKDGATMKTFCGTPEYLAPEVLEDNDYGRAVDWWGLGVVMYEMMCGRLPFYNQDHEKLFELILMEEIRFPRTLGPEAKSLLSGLLKKDPKQRLGGGSEDAKEIMQHRFFAGIVWQHVYEKKGP

SEQ ID NO: 96296 - protein, 438 aa, Homo sapiens
  Payload ID: 19218
  Gene Name: v-akt murine thymoma viral oncogene homolog 2
  Uniprot ID: P31751
  ENSP ID: ENSP00000309428
MNEVSVIKEGWLHKRGEYIKTWRPRYFLLKSDGSFIGYKERPEAPDQTLPPLNNFSVAECQLMKTERPRPNTFVIRCLQWTTVIERTFHVDSPDEREEWMRAIQMVANSLKQRAPGEDPMDYKCGSPSDSSTTEEMEVAVSKARAKVTMNDFDYLKLLGKGTFGKVILVREKATGRYYAMKILRKEVIIAKDEVAHTVTESRVLQNTRHPFLTALKYAFQTHDRLCFVMEYANGGELFFHLSRERVFTEERARFYGAEIVSALEYLHSRDVVYRDIKVLEDNDYGRAVDWWGLGVVMYEMMCGRLPFYNQDHERLFELILMEEIRFPRTLSPEAKSLLAGLLKKDPKQRLGGGPSDAKEVMEHRFFLSINWQDVVQKKLLPPFKPQVTSEVDTRYFDDEFTAQSITITPPDRYDSLGLLELDQRTHFPQFSYSASIRE

SEQ ID NO: 96297 - protein, 125 aa, Homo sapiens
  Payload ID: 19218
  Gene Name: v-akt murine thymoma viral oncogene homolog 2
  ENSP ID: ENSP00000351095
MNEVSVIKEGWLHKRGEYIKTWRPRYFLLKSDGSFIGYKERPEAPDQTLPPLNNFSVAAPCCLFPLPAECQLMKTERPRPNTFVIRCLQWTTVIERTFHVDSPDEREEWMRAIQMVANSLKQRAP

SEQ ID NO: 96298 - protein, 69 aa, Homo sapiens
  Payload ID: 19218
  Gene Name: v-akt murine thymoma viral oncogene homolog 2
  ENSP ID: ENSP00000375719
MPADEDREAATQHLCHTLPAVDHSHREDLPRGFSRREGGVDAGHPDGRQQPQAAGPRRGPHGLQVWLPQ

SEQ ID NO: 96299 - protein, 133 aa, Homo sapiens
  Payload ID: 19218
  Gene Name: v-akt murine thymoma viral oncogene homolog 2
  ENSP ID: ENSP00000375891
MNEVSVIKEGWLHKRGEYIKTWRPRYFLLKSDGSFIGYKERPEAPDQTLPPLNNFSVAECQLMKTERPRPNTFVIRCLQWTTVIERTFHVDSPDEREEWMRAIQMVANSLKQRAPGEDPMDYKCGSPSDSSTT

SEQ ID NO: 96300 - protein, 481 aa, Homo sapiens
  Payload ID: 19218
  Gene Name: v-akt murine thymoma viral oncogene homolog 2
  Uniprot ID: P31751
  ENSP ID: ENSP00000375892
MNEVSVIKEGWLHKRGEYIKTWRPRYFLLKSDGSFIGYKERPEAPDQTLPPLNNFSVAECQLMKTERPRPNTFVIRCLQWTTVIERTFHVDSPDEREEWMRAIQMVANSLKQRAPGEDPMDYKCGSPSDSSTTEEMEVAVSKARAKVTMNDFDYLKLLGKGTFGKVILVREKATGRYYAMKILRKEVIIAKDEVAHTVTESRVLQNTRHPFLTALKYAFQTHDRLCFVMEYANGGELFFHLSRERVFTEERARFYGAEIVSALEYLHSRDVVYRDIKLENLMLDKDGHIKITDFGLCKEGISDGATMKTFCGTPEYLAPEVLEDNDYGRAVDWWGLGVVMYEMMCGRLPFYNQDHERLFELILMEEIRFPRTLSPEAKSLLAGLLKKDPKQRLGGGPSDAKEVMEHRFFLSINWQDVVQKKLLPPFKPQVTSEVDTRYFDDEFTAQSITITPPDRYDSLGLLELDQRTHFPQFSYSASIRE

SEQ ID NO: 96301 - protein, 95 aa, Homo sapiens
  Payload ID: 19218
  Gene Name: v-akt murine thymoma viral oncogene homolog 2
  ENSP ID: ENSP00000392458
MNEVSVIKEGWLHKRGEYIKTWRPRYFLLKSDGSFIGYKERPEAPDQTLPPLNNFSVAECQLMKTERPRPNTFVIRCLQWTTVIERTFHVDSPDE

SEQ ID NO: 96302 - protein, 107 aa, Homo sapiens
  Payload ID: 19218
  Gene Name: v-akt murine thymoma viral oncogene homolog 2
  ENSP ID: ENSP00000396532
MNEVSVIKEGWLHKRGEYIKTWRPRYFLLKSDGSFIGYKERPEAPDQTLPPLNNFSVAECQLMKTERPRPNTFVIRCLQWTTVIERTFHVDSPDEREEWMRAIQMVA

SEQ ID NO: 96303 - protein, 184 aa, Homo sapiens
  Payload ID: 19218
  Gene Name: v-akt murine thymoma viral oncogene homolog 2
  ENSP ID: ENSP00000396968
MNEVSVIKEGWLHKRGEYIKTWRPRYFLLKSDGSFIGYKERPEAPDQTLPPLNNFSVAECQLMKTERPRPNTFVIRCLQWTTVIERTFHVDSPDEREEWMRAIQMVANSLKQRAPGEDPMDYKCGSPSDSSTTEEMEVAVSKARAKVTMNDFDYLKLLGKGTFGKVILVREKATGRYYAMKILR

SEQ ID NO: 96304 - protein, 438 aa, Homo sapiens; identical to SEQ ID NO: 96296
  Payload ID: 19218
  Gene Name: v-akt murine thymoma viral oncogene homolog 2
  Uniprot ID: P31751
  ENSP ID: ENSP00000399532

SEQ ID NO: 96305 - protein, 119 aa, Homo sapiens
  Payload ID: 19218
  Gene Name: v-akt murine thymoma viral oncogene homolog 2
  ENSP ID: ENSP00000403842
MNEVSVIKEGWLHKRGEYIKTWRPRYFLLKSDGSFIGYKERPEAPDQTLPPLNNFSVAECQLMKTERPRPNTFVIRCLQWTTVIERTFHVDSPDEREEWMRAIQMVANSLKQRAPGEDP

SEQ ID NO: 96306 - protein, 67 aa, Homo sapiens
  Payload ID: 19218
  Gene Name: v-akt murine thymoma viral oncogene homolog 2
  ENSP ID: ENSP00000403890
MNEVSVIKEGWLHKRGEYIKTWRPRYFLLKSDGSFIGYKERPEAPDQTLPPLNNFSVAECQLMKTER

SEQ ID NO: 96307 - protein, 134 aa, Homo sapiens
  Payload ID: 19218
  Gene Name: v-akt murine thymoma viral oncogene homolog 2
  ENSP ID: ENSP00000404083
MNEVSVIKEGWLHKRGEYIKTWRPRYFLLKSDGSFIGYKERPEAPDQTLPPLNNFSVAECQLMKTERPRPNTFVIRCLQWTTVIERTFHVDSPDEREEWMRAIQMVANSLKQRAPGEDPMDYKCGSPSDSSTTE

SEQ ID NO: 96308 - protein, 132 aa, Homo sapiens
  Payload ID: 19218
  Gene Name: v-akt murine thymoma viral oncogene homolog 2
  ENSP ID: ENSP00000407999
MNEVSVIKEGWLHKRGEYIKTWRPRYFLLKSDGSFIGYKERPEAPDQTLPPLNNFSVAECQLMKTERPRPNTFVIRCLQWTTVIERTFHVDSPDEREEWMRAIQMVANSLKQRAPGEDPMDYKCGSPSDSST

SEQ ID NO: 96309 - protein, 130 aa, Homo sapiens
  Payload ID: 19218
  Gene Name: v-akt murine thymoma viral oncogene homolog 2
  ENSP ID: ENSP00000462022
MNEVSVIKEGWLHKRGEYIKTWRPRYFLLKSDGSFIGYKERPEAPDQTLPPLNNFSVAECQLMKTERPRPNTFVIRCLQWTTVIERTFHVDSPDEREEWMRAIQMVANSLKQRAPGEDPMDYKCGSPSDS

SEQ ID NO: 96310 - protein, 69 aa, Homo sapiens; identical to SEQ ID NO: 96298
  Payload ID: 19218
  Gene Name: v-akt murine thymoma viral oncogene homolog 2
  ENSP ID: ENSP00000462469

SEQ ID NO: 96311 - protein, 99 aa, Homo sapiens
  Payload ID: 19218
  Gene Name: v-akt murine thymoma viral oncogene homolog 2
  ENSP ID: ENSP00000462715
MNEVSVIKEGWLHKRGEYIKTWRPRYFLLKSDGSFIGYKERPEAPDQTLPPLNNFSVAECQLMKTERPRPNTFVIRCLQWTTVIERTFHVDSPDEREEW

SEQ ID NO: 96312 - protein, 69 aa, Homo sapiens; identical to SEQ ID NO: 96298
  Payload ID: 19218
  Gene Name: v-akt murine thymoma viral oncogene homolog 2
  ENSP ID: ENSP00000462776

SEQ ID NO: 96313 - protein, 53 aa, Homo sapiens
  Payload ID: 19218
  Gene Name: v-akt murine thymoma viral oncogene homolog 2
  ENSP ID: ENSP00000462919
  MOD_RES (1)..(1): Any amino acid
XLVREKATGRYYAMKILRKEVIIAKLENLMLDKDGHIKITDFGLCKEGISDGA

SEQ ID NO: 96314 - protein, 51 aa, Homo sapiens
  Payload ID: 19218
  Gene Name: v-akt murine thymoma viral oncogene homolog 2
  ENSP ID: ENSP00000463086
  MOD_RES (1)..(1): Any amino acid
XQTLPPLNNFSVAECQLMKTERPRPNTFVIRCLQWTTVIERTFHVDSPDES

SEQ ID NO: 96315 - protein, 292 aa, Homo sapiens
  Payload ID: 19218
  Gene Name: v-akt murine thymoma viral oncogene homolog 2
  ENSP ID: ENSP00000463262
KCGSPSDSSTTEEMEVAVSKARAKVTMNDFDYLKLLGKGTFGKVILVREKATGRYYAMKILRKEVIIAKALKYAFQTHDRLCFVMEYANGGELFFHLSRERVFTEERARFYGAEIVSALEYLHSRDVVYRDIKLENLMLDKDGHIKITDFGLCKEGISDGATMKTFCGTPEYLAPEVLEDNDYGRAVDWWGLGVVMYEMMCGRLPFYNQDHERLFELILMEEIRFPRTLSPEAKSLLAGLLKKDPKQRLGGGPSDAKEVMEHRFFLSINWQDVVQKKLLPPFKPQVTSEVDT

SEQ ID NO: 96316 - protein, 106 aa, Homo sapiens
  Payload ID: 19218
  Gene Name: v-akt murine thymoma viral oncogene homolog 2
  ENSP ID: ENSP00000463368
DWWGLGVVMYEMMCGRLPFYNQDHERLFELILMEEIRFPRTLSPEAKSLLAGLLKKDPKQRLGGGPSDAKEVMEHRFFLSINWQDVVQKKLLPPFKPQVTSEVDTR

SEQ ID NO: 96317 - protein, 157 aa, Homo sapiens
  Payload ID: 19218
  Gene Name: v-akt murine thymoma viral oncogene homolog 2
  ENSP ID: ENSP00000463686
MNEVSVIKEGWLHKRGEYIKTWRPRYFLLKSDGSFIGYKERPEAPDQTLPPLNNFSVAECQLMKTERPRPNTFVIRCLQWTTVIERTFHVDSPDEREEWMRAIQMVANSLKQRAPGEDPMDYKCGSPSDSSTTEEMEVAVSKARAKVTMNDFDYLKL

SEQ ID NO: 96318 - protein, 95 aa, Homo sapiens; identical to SEQ ID NO: 96301
  Payload ID: 19218
  Gene Name: v-akt murine thymoma viral oncogene homolog 2
  ENSP ID: ENSP00000463806

SEQ ID NO: 96319 - protein, 151 aa, Homo sapiens
  Payload ID: 19218
  Gene Name: v-akt murine thymoma viral oncogene homolog 2
  ENSP ID: ENSP00000470604
MNEVSVIKEGWLHKRGEYIKTWRPRYFLLKSDGSFIGYKERPEAPDQTLPPLNNFSVAECQLMKTERPRPNTFVIRCLQWTTVIERTFHVDSPDEREEWMRAIQMVANSLKQRAPGEDPMDYKCGSPSDSSTTEEMEVAVSKARAKVTMND

SEQ ID NO: 96320 - protein, 56 aa, Homo sapiens
  Payload ID: 19218
  Gene Name: v-akt murine thymoma viral oncogene homolog 2
  ENSP ID: ENSP00000470822
  MOD_RES (1)..(1): Any amino acid
XGRLPFYNQDHERLFELILMEEIRFPRTLSPEAKSLLAGLLKKDPKQSGLWSRQNH

SEQ ID NO: 96321 - protein, 450 aa, Homo sapiens
  Payload ID: 19218
  Gene Name: v-akt murine thymoma viral oncogene homolog 2
  ENSP ID: ENSP00000471369
MKTERPRPNTFVIRCLQWTTVIERTFHVDSPDEREEWMRAIQMVANSLKQRAPGEDPMDYKCGSPSDSSTTEEMEVAVSKARAKVTMNDFDYLKLLGKGTFGKVILVREKATGRYYAMKILRKEVIIAKDEVAHTVTESRVLQNTRHPFLTALKYAFQTHDRLCFVMEYANGGELFFHLSRERVFTEERARFYGAEIVSALEYLHSRDVVYRDIKLENLMLDKDGHIKITDFGLCKEGISDGATMKTFCGTPEYLAPEVLEDNDYGRAVDWWGLGVVMYEMMCGRLPFYNQDHERLFELILMEEIRFPRTLSPEAKSLLAGLLKKDPKQRLGGGPSDAKEVMEHRFFLSINWQDVVQKKLLPPFKPQVTSEVDTRYFDDEFTAQSITITPPDRCECLGPPRWCACPRGGGMGSALNSLLKEGPRRPPLHVWEISPSLLSGPFAVGPLWTW

SEQ ID NO: 96322 - protein, 129 aa, Homo sapiens
  Payload ID: 19218
  Gene Name: v-akt murine thymoma viral oncogene homolog 2
  ENSP ID: ENSP00000472371
VDSPDEREEWMRAIQMVANSLKQRAPGEDPMDYKCGSPSDSSTTEEMEVAVSKARAKVTMNDFDYLKLLGKGTFGKVILVREKATGRYYAMKILRKEVIIAKSVCRMKSLTQSPRAGSSRTPGTRSSLR

SEQ ID NO: 96323 - protein, 117 aa, Homo sapiens
  Payload ID: 19218
  Gene Name: v-akt murine thymoma viral oncogene homolog 2
  ENSP ID: ENSP00000472382
  MOD_RES (1)..(1): Any amino acid
XPRTLSPEAKSLLAGLLKKDPKQRLGGGPSDAKEVMEHRFFLSINWQDVVQKKLLPPFKPQVTSEVDTRYFDDEFTAQSITITPPDRFREGFLEEEANVSAGRRNDVWDASNGRSMA

SEQ ID NO: 96324 - protein, 479 aa, Homo sapiens
  Payload ID: 19219
  Gene Name: v-akt murine thymoma viral oncogene homolog 3
  Uniprot ID: Q9Y243
  ENSP ID: ENSP00000263826
MSDVTIVKEGWVQKRGEYIKNWRPRYFLLKTDGSFIGYKEKPQDVDLPYPLNNFSVAKCQLMKTERPKPNTFIIRCLQWTTVIERTFHVDTPEEREEWTEAIQAVADRLQRQEEERMNCSPTSQIDNIGEEEMDASTTHHKRKTMNDFDYLKLLGKGTFGKVILVREKASGKYYAMKILKKEVIIAKDEVAHTLTESRVLKNTRHPFLTSLKYSFQTKDRLCFVMEYVNGGELFFHLSRERVFSEDRTRFYGAEIVSALDYLHSGKIVYRDLKLENLMLDKDGHIKITDFGLCKEGITDAATMKTFCGTPEYLAPEVLEDNDYGRAVDWWGLGVVMYEMMCGRLPFYNQDHEKLFELILMEDIKFPRTLSSDAKSLLSGLLIKDPNKRLGGGPDDAKEIMRHSFFSGVNWQDVYDKKLVPPFKPQVTSETDTRYFDEEFTAQTITITPPEKYDEDGMDCMDNERRPHFPQFSYSASGRE

SEQ ID NO: 96325 - protein, 465 aa, Homo sapiens
  Payload ID: 19219
  Gene Name: v-akt murine thymoma viral oncogene homolog 3
  Uniprot ID: Q9Y243
  ENSP ID: ENSP00000336943
MSDVTIVKEGWVQKRGEYIKNWRPRYFLLKTDGSFIGYKEKPQDVDLPYPLNNFSVAKCQLMKTERPKPNTFIIRCLQWTTVIERTFHVDTPEEREEWTEAIQAVADRLQRQEEERMNCSPTSQIDNIGEEEMDASTTHHKRKTMNDFDYLKLLGKGTFGKVILVREKASGKYYAMKILKKEVIIAKDEVAHTLTESRVLKNTRHPFLTSLKYSFQTKDRLCFVMEYVNGGELFFHLSRERVFSEDRTRFYGAEIVSALDYLHSGKIVYRDLKLENLMLDKDGHIKITDFGLCKEGITDAATMKTFCGTPEYLAPEVLEDNDYGRAVDWWGLGVVMYEMMCGRLPFYNQDHEKLFELILMEDIKFPRTLSSDAKSLLSGLLIKDPNKRLGGGPDDAKEIMRHSFFSGVNWQDVYDKKLVPPFKPQVTSETDTRYFDEEFTAQTITITPPEKCQQSDCGMLGNWKK

SEQ ID NO: 96326 - protein, 479 aa, Homo sapiens; identical to SEQ ID NO: 96324
  Payload ID: 19219
  Gene Name: v-akt murine thymoma viral oncogene homolog 3
  Uniprot ID: Q9Y243
  ENSP ID: ENSP00000355497

SEQ ID NO: 96327 - protein, 465 aa, Homo sapiens; identical to SEQ ID NO: 96325
  Payload ID: 19219
  Gene Name: v-akt murine thymoma viral oncogene homolog 3
  Uniprot ID: Q9Y243
  ENSP ID: ENSP00000355498

SEQ ID NO: 96328 - protein, 139 aa, Homo sapiens
  Payload ID: 19219
  Gene Name: v-akt murine thymoma viral oncogene homolog 3
  ENSP ID: ENSP00000447820
MSDVTIVKEGWVQKRGEYIKNWRPRYFLLKTDGSFIGYKEKPQDVDLPYPLNNFSVAKCQLMKTERPKPNTFIIRCLQWTTVIERTFHVDTPEEREEWTEAIQAVADRLQRQEEERMNCSPTSQIDNIGEEEMDASTTH

SEQ ID NO: 96329 - protein, 479 aa, Homo sapiens; identical to SEQ ID NO: 96324
  Payload ID: 19219
  Gene Name: v-akt murine thymoma viral oncogene homolog 3
  Uniprot ID: Q9Y243
  ENSP ID: ENSP00000479081

SEQ ID NO: 96330 - protein, 465 aa, Homo sapiens; identical to SEQ ID NO: 96325
  Payload ID: 19219
  Gene Name: v-akt murine thymoma viral oncogene homolog 3
  Uniprot ID: Q9Y243
  ENSP ID: ENSP00000479922

SEQ ID NO: 96331 - protein, 465 aa, Homo sapiens; identical to SEQ ID NO: 96325
  Payload ID: 19219
  Gene Name: v-akt murine thymoma viral oncogene homolog 3
  Uniprot ID: Q9Y243
  ENSP ID: ENSP00000483054

SEQ ID NO: 96332 - protein, 139 aa, Homo sapiens; identical to SEQ ID NO: 96328
  Payload ID: 19219
  Gene Name: v-akt murine thymoma viral oncogene homolog 3
  ENSP ID: ENSP00000487523

SEQ ID NO: 96333 - protein, 806 aa, Homo sapiens
  Payload ID: 19220
  Gene Name: valosin containing protein
  Uniprot ID: P55072
  ENSP ID: ENSP00000351777
MASGADSKGDDLSTAILKQKNRPNRLIVDEAINEDNSVVSLSQPKMDELQLFRGDTVLLKGKKRREAVCIVLSDDTCSDEKIRMNRVVRNNLRVRLGDVISIQPCPDVKYGKRIHVLPIDDTVEGITGNLFEVYLKPYFLEAYRPIRKGDIFLVRGGMRAVEFKVVETDPSPYCIVAPDTVIHCEGEPIKREDEEESLNEVGYDDIGGCRKQLAQIKEMVELPLRHPALFKAIGVKPPRGILLYGPPGTGKTLIARAVANETGAFFFLINGPEIMSKLAGESESNLRKAFEEAEKNAPAIIFIDELDAIAPKREKTHGEVERRIVSQLLTLMDGLKQRAHVIVMAATNRPNSIDPALRRFGRFDREVDIGIPDATGRLEILQIHTKNMKLADDVDLEQVANETHGHVGADLAALCSEAALQAIRKKMDLIDLEDETIDAEVMNSLAVTMDDFRWALSQSNPSALRETVVEVPQVTWEDIGGLEDVKRELQELVQYPVEHPDKFLKFGMTPSKGVLFYGPPGCGKTLLAKAIANECQANFISIKGPELLTMWFGESEANVREIFDKARQAAPCVLFFDELDSIAKARGGNIGDGGGAADRVINQILTEMDGMSTKKNVFIIGATNRPDIIDPAILRPGRLDQLIYIPLPDEKSRVAILKANLRKSPVAKDVDLEFLAKMTNGFSGADLTEICQRACKLAIRESIESEIRRERERQTNPSAMEVEEDDPVPEIRRDHFEEAMRFARRSVSDNDIRKYEMFAQTLQQSRGFGSFRFPSGNQGGAGPSQGSGGGTGGSVYTEDNDDDLYG

SEQ ID NO: 96334 - protein, 160 aa, Homo sapiens
  Payload ID: 19220
  Gene Name: valosin containing protein
  ENSP ID: ENSP00000392088
MDELQLFRGDTVLLKGKKRREAVCIVLSDDTCSDEKIRMNRVVRNNLRVRLGDVISIQPCPDVKYGKRIHVLPIDDTVEGITGNLFEVYLKPYFLEAYRPIRKGDIFLVRGGMRAVEFKVVETDPSPYCIVAPDTVIHCEGEPIKREDEEESLNEVGYDD

SEQ ID NO: 96335 - protein, 115 aa, Homo sapiens
  Payload ID: 19220
  Gene Name: valosin containing protein
  ENSP ID: ENSP00000399456
MDELQLFRGDTVLLKGKKRREAVCIVLSDDTCSDEKIRMNRVVRNNLRVRLGDVISIQPCPDVKYGKRIHVLPIDDTVEGITGNLFEVYLKPYFLEAYRPIRKGDIFLVRGGMRA

SEQ ID NO: 96336 - protein, 1222 aa, Homo sapiens
  Payload ID: 19221
  Gene Name: valosin containing protein (p97)/p47 complex interacting protein 1
  Uniprot ID: Q96JH7
  ENSP ID: ENSP00000309031
MSQPPPPPPPLPPPPPPPEAPQTPSSLASAAASGGLLKRRDRRILSGSCPDPKCQARLFFPASGSVSIECTECGQRHEQQQLLGVEEVTDPDVVLHNLLRNALLGVTGAPKKNTELVKVMGLSNYHCKLLSPILARYGMDKQTGRAKLLRDMNQGELFDCALLGDRAFLIEPEHVNTVGYGKDRSGSLLYLHDTLEDIKRANKSQECLIPVHVDGDGHCLVHAVSRALVGRELFWHALRENLKQHFQQHLARYQALFHDFIDAAEWEDIINECDPLFVPPEGVPLGLRNIHIFGLANVLHRPIILLDSLSGMRSSGDYSATFLPGLIPAEKCTGKDGHLNKPICIAWSSSGRNHYIPLVGIKGAALPKLPMNLLPKAWGVPQDLIKKYIKLEEDGGCVIGGDRSLQDKYLLRLVAAMEEVFMDKHGIHPSLVADVHQYFYRRTGVIGVQPEEVTAAAKKAVMDNRLHKCLLCGALSELHVPPEWLAPGGKLYNLAKSTHGQLRTDKNYSFPLNNLVCSYDSVKDVLVPDYGMSNLTACNWCHGTSVRKVRGDGSIVYLDGDRTNSRSTGGKCGCGFKHFWDGKEYDNLPEAFPITLEWGGRVVRETVYWFQYESDSSLNSNVYDVAMKLVTKHFPGEFGSEILVQKVVHTILHQTAKKNPDDYTPVNIDGAHAQRVGDVQGQESESQLPTKIILTGQKTKTLHKEELNMSKTERTIQQNITEQASVMQKRKTEKLKQEQKGQPRTVSPSTIRDGPSSAPATPTKAPYSPTTSKEKKIRITTNDGRQSMVTLKSSTTFFELQESIAREFNIPPYLQCIRYGFPPKELMPPQAGMEKEPVPLQHGDRITIEILKSKAEGGQSAAAHSAHTVKQEDIAVTGKLSSKELQEQAEKEMYSLCLLATLMGEDVWSYAKGLPHMFQQGGVFYSIMKKTMGMADGKHCTFPHLPGKTFVYNASEDRLELCVDAAGHFPIGPDVEDLVKEAVSQVRAEATTRSRESSPSHGLLKLGSGGVVKKKSEQLHNVTAFQGKGHSLGTASGNPHLDPRARETSVVRKHNTGTDFSNSSTKTEPSVFTASSSNSELIRIAPGVVTMRDGRQLDPDLVEAQRKKLQEMVSSIQASMDRHLRDQSTEQSPSDLPQRKTEVVSSSAKSGSLQTGLPESFPLTGGTENLNTETTDGCVADALGAAFATRSKAQRGNSVEELEEMDSQDAEMTNTTEPMDHS

SEQ ID NO: 96337 - protein, 194 aa, Homo sapiens
  Payload ID: 19222
  Gene Name: valosin containing protein lysine (K) methyltransferase
  Uniprot ID: Q9H867
  ENSP ID: ENSP00000379200
MADTLESSLEDPLRSFVRVLEKRDGTVLRLQQYSSGGVGCVVWDAAIVLSKYLETPEFSGDGAHALSRRSVLELGSGTGAVGLMAATLGADVVVTDLEELQDLLKMNINMNKHLVTGSVQAKVLKWGEEIEGFPSPPDFILMADCIYYEESLEPLLKTLKDISGFETCIICCYEQRTMGKNPEIEKKYFEKFPS

SEQ ID NO: 96338 - protein, 229 aa, Homo sapiens
  Payload ID: 19222
  Gene Name: valosin containing protein lysine (K) methyltransferase
  Uniprot ID: Q9H867
  ENSP ID: ENSP00000379201
MADTLESSLEDPLRSFVRVLEKRDGTVLRLQQYSSGGVGCVVWDAAIVLSKYLETPEFSGDGAHALSRRSVLELGSGTGAVGLMAATLGADVVVTDLEELQDLLKMNINMNKHLVTGSVQAKVLKWGEEIEGFPSPPDFILMADCIYYEESLEPLLKTLKDISGFETCIICCYEQRTMGKNPEIEKKYFELLQLDFDFEKIPLEKHDEEYRSEDIHIIYIRKKKSKFPS

SEQ ID NO: 96339 - protein, 144 aa, Homo sapiens
  Payload ID: 19222
  Gene Name: valosin containing protein lysine (K) methyltransferase
  Uniprot ID: Q9H867
  ENSP ID: ENSP00000437113
MADTLESSLEDPLRSFVRVLEKRDGTVLRLQQYSSGGVGCVVWDAAIVLSKYLETPEFSGDGAHALSRRSVLELGSGTGAVGLMAATLGADVVVTDLEELQDLLKMNINMNKHLVTGSVQAKGGRNRRLSFSTRLHTDGRLHIL

SEQ ID NO: 96340 - protein, 1264 aa, Homo sapiens
  Payload ID: 19223
  Gene Name: valyl-tRNA synthetase
  Uniprot ID: P26640
  ENSP ID: ENSP00000211402
MSTLYVSPHPDAFPSLRALIAARYGEAGEGPGWGGAHPRICLQPPPTSRTPFPPPRLPALEQGPGGLWVWGATAVAQLLWPAGLGGPGGSRAAVLVQQWVSYADTELIPAACGATLPALGLRSSAQDPQAVLGALGRALSPLEEWLRLHTYLAGEAPTLADLAAVTALLLPFRYVLDPPARRIWNNVTRWFVTCVRQPEFRAVLGEVVLYSGARPLSHQPGPEAPALPKTAAQLKKEAKKREKLEKFQQKQKIQQQQPPPGEKKPKPEKREKRDPGVITYDLPTPPGEKKDVSGPMPDSYSPRYVEAAWYPWWEQQGFFKPEYGRPNVSAANPRGVFMMCIPPPNVTGSLHLGHALTNAIQDSLTRWHRMRGETTLWNPGCDHAGIATQVVVEKKLWREQGLSRHQLGREAFLQEVWKWKEEKGDRIYHQLKKLGSSLDWDRACFTMDPKLSAAVTEAFVRLHEEGIIYRSTRLVNWSCTLNSAISDIEVDKKELTGRTLLSVPGYKEKVEFGVLVSFAYKVQGSDSDEEVVVATTRIETMLGDVAVAVHPKDTRYQHLKGKNVIHPFLSRSLPIVFDEFVDMDFGTGAVKITPAHDQNDYEVGQRHGLEAISIMDSRGALINVPPPFLGLPRFEARKAVLVALKERGLFRGIEDNPMVVPLCNRSKDVVEPLLRPQWYVRCGEMAQAASAAVTRGDLRILPEAHQRTWHAWMDNIREWCISRQLWWGHRIPAYFVTVSDPAVPPGEDPDGRYWVSGRNEAEAREKAAKEFGVSPDKISLQQDEDVLDTWFSSGLFPLSILGWPNQSEDLSVFYPGTLLETGHDILFFWVARMVMLGLKLTGRLPFREVYLHAIVRDAHGRKMSKSLGNVIDPLDVIYGISLQGLHNQLLNSNLDPSEVEKAKEGQKADFPAGIPECGTDALRFGLCAYMSQGRDINLDVNRILGYRHFCNKLWNATKFALRGLGKGFVPSPTSQPGGHESLVDRWIRSRLTEAVRLSNQGFQAYDFPAVTTAQYSFWLYELCDVYLECLKPVLNGVDQVAAECARQTLYTCLDVGLRLLSPFMPFVTEELFQRLPRRMPQAPPSLCVTPYPEPSECSWKDPEAEAALELALSITRAVRSLRADYNLTRIRPDCFLEVADEATGALASAVSGYVQALASAGVVAVLALGAPAPQGCAVALASDRCSIHLQLQGLVDPARELGKLQAKRVEAQRQAQRLRERRAASGYPVKVPLEVQEADEAKLQQTEAELRKVDEAIALFQKML

SEQ ID NO: 96341 - protein, 1264 aa, Homo sapiens; identical to SEQ ID NO: 96340
  Payload ID: 19223
  Gene Name: valyl-tRNA synthetase
  Uniprot ID: P26640
  ENSP ID: ENSP00000364815

SEQ ID NO: 96342 - protein, 95 aa, Homo sapiens
  Payload ID: 19223
  Gene Name: valyl-tRNA synthetase
  ENSP ID: ENSP00000387684
  MOD_RES (1)..(1): Any amino acid
XPAGLGGPGGSRAAVLVQQWVSYADTELIPAACGATLPALGLRSSAQDPQAVLGALGRALSPLEEWLRLHTYLAGEAPTLADLAAVTALLLPFRY

SEQ ID NO: 96343 - protein, 288 aa, Homo sapiens
  Payload ID: 19223
  Gene Name: valyl-tRNA synthetase
  ENSP ID: ENSP00000389027
  MOD_RES (1)..(1): Any amino acid
XKERGLFRGIEDNPMVVPLCNRSKDVVEPLLRPQWEWCISRQLWWGHRIPAYFVTVSDPAVPPGEDPDGRYWVSGRNEAEAREKAAKEFGVSPDKISLQQDEDVLDTWFSSGLFPLSILGWPNQSEDLSVFYPGTLLETGHDILFFWVARMVMLGLKLTGRLPFREVYLHAIVRDAHGRKMSKSLGNVIDPLDVIYGISLQGLHNQLLNSNLDPSEVEKAKEGQKADFPAGIPECGTDALRFGLCAYMSQGRDINLDVNRILGYRHFCNKLWNATKFALRGLGKGFVP

SEQ ID NO: 96344 - protein, 1183 aa, Homo sapiens
  Payload ID: 19223
  Gene Name: valyl-tRNA synthetase
  ENSP ID: ENSP00000390673
  MOD_RES (1)..(1): Any amino acid
XGLGGPGGSRAAVLVQQWVSYADTELIPAACGATLPALGLRSSAQDPQAVLGALGRALSPLEEWLRLHTYLAGEAPTLADLAAVTALLLPFRYVLDPPARRIWNNVTRWFVTCVRQPEFRAVLGEVVLYSGARPLSHQPGPEAPALPKTAAQLKKEAKKREKLEKFQQKQKIQQQQPPPGEKKPKPEKREKRDPGVITYDLPTPPGEKKDVSGPMPDSYSPRYVEAAWYPWWEQQGFFKPEYGRPNVSAANPRGVFMMCIPPPNVTGSLHLGHALTNAIQDSLTRWHRMRGETTLWNPGCDHAGIATQVVVEKKLWREQGLSRHQLGREAFLQEVWKWKEEKGDRIYHQLKKLGSSLDWDRACFTMDPKLSAAVTEAFVRLHEEGIIYRSTRLVNWSCTLNSAISDIEVDKKELTGRTLLSVPGYKEKVEFGVLVSFAYKVQGSDSDEEVVVATTRIETMLGDVAVAVHPKDTRYQHLKGKNVIHPFLSRSLPIVFDEFVDMDFGTGAVKITPAHDQNDYEVGQRHGLEAISIMDSRGALINVPPPFLGLPRFEARKAVLVALKERGLFRGIEDNPMVVPLCNRSKDVVEPLLRPQWYVRCGEMAQAASAAVTRGDLRILPEAHQRTWHAWMDNIREWCISRQLWWGHRIPAYFVTVSDPAVPPGEDPDGRYWVSGRNEAEAREKAAKEFGVSPDKISLQQDEDVLDTWFSSGLFPLSILGWPNQSEDLSVFYPGTLLETGHDILFFWVARMVMLGLKLTGRLPFREVYLHAIVRDAHGRKMSKSLGNVIDPLDVIYGISLQGLHNQLLNSNLDPSEVEKAKEGQKADFPAGIPECGTDALRFGLCAYMSQGRDINLDVNRILGYRHFCNKLWNATKFALRGLGKGFVPSPTSQPGGHESLVDRWIRSRLTEAVRLSNQGFQAYDFPAVTTAQYSFWLYELCDVYLECLKPVLNGVDQVAAECARQTLYTCLDVGLRLLSPFMPFVTEELFQRLPRRMPQAPPSLCVTPYPEPSECSWKDPEAEAALELALSITRAVRSLRADYNLTRIRPDCFLEVADEATGALASAVSGYVQALASAGVVAVLALGAPAPQGCAVALASDRCSIHLQLQGLVDPARELGKLQAKRVEAQRQAQRLRERRAASGYPVKVPLEVQEADEAKLQQTEAELRKVDEAIALFQKML

SEQ ID NO: 96345 - protein, 366 aa, Homo sapiens
  Payload ID: 19223
  Gene Name: valyl-tRNA synthetase
  ENSP ID: ENSP00000392396
MSTLYVSPHPDAFPSLRALIAARYGEAGEGPGWGGAHPRICLQPPPTSRTPFPPPRLPALEQGPGGLWVWGATAVAQLLWPAGLGGPGGSRAAVLVQQWVSYADTELIPAACGATLPALGLRSSAQDPQAVLGALGRALSPLEEWLRLHTYLAGEAPTLADLAAVTALLLPFRYVLDPPARRIWNNVTRWFVTCVRQPEFRAVLGEVVLYSGARPLSHQPGPEAPALPKTAAQLKKEAKKREKLEKFQQKQKIQQQQPPPGEKKPKPEKREKRDPGVITYDLPTPPGEKKDVSGPMPDSYSPRYVEAAWYPWWEQQGFFKPEYGRPNVSAANPRGVFMMCIPPPNVTGSLHLGHALTNAIQDSLTR

SEQ ID NO: 96346 - protein, 288 aa, Homo sapiens; identical to SEQ ID NO: 96343
  Payload ID: 19223
  Gene Name: valyl-tRNA synthetase
  ENSP ID: ENSP00000394771
  MOD_RES (1)..(1): Any amino acid

SEQ ID NO: 96347 - protein, 1264 aa, Homo sapiens [sequence omitted]

SEQ ID NO: 96348 - protein, 1264 aa, Homo sapiens; identical to SEQ ID NO: 96340
  Payload ID: 19223
  Gene Name: valyl-tRNA synthetase
  Uniprot ID: P26640
  ENSP ID: ENSP00000403359

SEQ ID NO: 96349 - protein, 174 aa, Homo sapiens
  Payload ID: 19223
  Gene Name: valyl-tRNA synthetase
  ENSP ID: ENSP00000403464
MSTLYVSPHPDAFPSLRALIAARYGEAGEGPGWGGAHPRICLQPPPTSRTSFPPPRLPALEQGPGGLWVWGATAVAQLLWPAGLGGPGGSRAAVLVQQWVSYADTELIPAACGATLPALGLRSSAQDPQAVLGALGRALSPLEEWLRLHTYLAGEAPTLADLAAVTALLLPFRY

SEQ ID NO: 96350 - protein, 288 aa, Homo sapiens; identical to SEQ ID NO: 96343
  Payload ID: 19223
  Gene Name: valyl-tRNA synthetase
  ENSP ID: ENSP00000405822
  MOD_RES (1)..(1): Any amino acid

SEQ ID NO: 96351 - protein, 288 aa, Homo sapiens; identical to SEQ ID NO: 96343
  Payload ID: 19223
  Gene Name: valyl-tRNA synthetase
  ENSP ID: ENSP00000405843
  MOD_RES (1)..(1): Any amino acid

SEQ ID NO: 96352 - protein, 174 aa, Homo sapiens; identical to SEQ ID NO: 96349
  Payload ID: 19223
  Gene Name: valyl-tRNA synthetase
  ENSP ID: ENSP00000411088

SEQ ID NO: 96353 - protein, 174 aa, Homo sapiens
  Payload ID: 19223
  Gene Name: valyl-tRNA synthetase
  ENSP ID: ENSP00000413365
MSTLYVSPHPDAFPSLRALIAARYGEAGEGPGWGGAHPRICLQPPPTSRTPFPPPRLPALEQGPGGLWVWGATAVAQLLWPAGLGGPGGSRAAVLVQQWVSYADTELIPAACGATLPALGLRSSAQDPQAVLGALGRALSPLEEWLRLHTYLAGEAPTLADLAAVTALLLPFRY

SEQ ID NO: 96354 - protein, 174 aa, Homo sapiens; identical to SEQ ID NO: 96353
  Payload ID: 19223
  Gene Name: valyl-tRNA synthetase
  ENSP ID: ENSP00000413925

SEQ ID NO: 96355 - protein, 174 aa, Homo sapiens; identical to SEQ ID NO: 96353
  Payload ID: 19223
  Gene Name: valyl-tRNA synthetase
  ENSP ID: ENSP00000415275

SEQ ID NO: 96356 - protein, 1264 aa, Homo sapiens [sequence omitted]

SEQ ID NO: 96357 - protein, 288 aa, Homo sapiens; identical to SEQ ID NO: 96343
  Payload ID: 19223
  Gene Name: valyl-tRNA synthetase
  ENSP ID: ENSP00000415679
  MOD_RES (1)..(1): Any amino acid

SEQ ID NO: 96358 - protein, 174 aa, Homo sapiens; identical to SEQ ID NO: 96353
  Payload ID: 19223
  Gene Name: valyl-tRNA synthetase
  ENSP ID: ENSP00000415863

SEQ ID NO: 96359 - protein, 288 aa, Homo sapiens; identical to SEQ ID NO: 96343
  Payload ID: 19223
  Gene Name: valyl-tRNA synthetase
  ENSP ID: ENSP00000416833
  MOD_RES (1)..(1): Any amino acid

SEQ ID NO: 96360 - protein, 1063 aa, Homo sapiens
  Payload ID: 19224
  Gene Name: valyl-tRNA synthetase 2, mitochondrial
  Uniprot ID: Q5ST30
  ENSP ID: ENSP00000316092
MPHLPLASFRPPFWGLRHSRGLPRFHSVSTQSEPHGSPISRRNREAKQKRLREKQATLEAEIAGESKSPAESIKAWRPKELVLYEIPTKPGEKKDVSGPLPPAYSPRYVEAAWYPWWVREGFFKPEYQARLPQATGETFSMCIPPPNVTGSLHIGHALTVAIQDALVRWHRMRGDQVLWVPGSDHAGIATQAVVEKQLWKERGVRRHELSREAFLREVWQWKEAKGGEICEQLRALGASLDWDRECFTMDVGSSVAVTEAFVRLYKAGLLYRNHQLVNWSCALRSAISDIEVENRPLPGHTQLRLPGCPTPVSFGLLFSVAFPVDGEPDAEVVVGTTRPETLPGDVAVAVHPDDSRYTHLHGRQLRHPLMGQPLPLITDYAVQPHVGTGAVKVTPAHSPADAEMGARHGLSPLNVIAEDGTMTSLCGDWLQGLHRFVAREKIMSVLSEWGLFRGLQNHPMVLPICSRSGDVIEYLLKNQWFVRCQEMGARAAKAVESGALELSPSFHQKNWQHWFSHIGDWCVSRQLWWGHQIPAYLVVEDHAQGEEDCWVVGRSEAEAREVAAELTGRPGAELTLERDPDVLDTWFSSALFPFSALGWPQETPDLARFYPLSLLETGSDLLLFWVGRMVMLGTQLTGQLPFSKVLLHPMVRDRQGRKMSKSLGNVLDPRDIISGVEMQVLQEKLRSGNLDPAELAIVAAAQKKDFPHGIPECGTDALRFTLCSHGVQAGDLHLSVSEVQSCRHFCNKIWNALRFILNALGEKFVPQPAEELSPSSPMDAWILSRLALAAQECERGFLTRELSLVTHALHHFWLHNLCDVYLEAVKPVLWHSPRPLGPPQVLFSCADLGLRLLAPLMPFLAEELWQRLPPRPGCPPAPSISVAPYPSACSLEHWRQPELERRFSRVQEVVQVLRALRATYQLTKARPRVLLQSSEPGDQGLFEAFLEPLGTLGYCGAVGLLPPGAAAPSGWAQAPLSDTAQVYMELQGLVDPQIQLPLLAARRYKLQKQLDSLTARTPSEGEAGTQRQQKLSSLQLELSKLDKAASHLRQLMDEPPAPGSPEL

SEQ ID NO: 96361 - protein, 1063 aa, Homo sapiens
  Payload ID: 19224
  Gene Name: valyl-tRNA synthetase 2, mitochondrial
  ENSP ID: ENSP00000372860
MPHLPLASFRPPFWGLRHSRGLPRFHSVSTQSEPHGSPISRRNREAKQKRLREKQATLEAEIAGESKSPAESIKAWRPKELVLYEIPTKPGEKKDVSGPLPPAYSPRYVEAAWYPWWVREGFFKPEYQARLPQATGETFSMCIPPPNVTGSLHIGHALTVAIQDALVRWHRMRGDQVLWVPGSDHAGIATQAVVEKQLWKERGVRRHELSREAFLREVWQWKEAKGGEICEQLRALGASLDWDRECFTMDVGSSVAVTEAFVRLYKAGLLYRNHQLVNWSCALRSAISDIEVENRPLPGHTQLRLPGCPTPVSFGLLFSVAFPVDGEPDAEVVVGTTRPETLPGDVAVAVHPDDSRYTHLHGRQLRHPLMGQPLPLITDYAVQPHVGTGAVKVTPAHSPADAEMGARHGLSPLNVIAEDGTMTSLCGDWLQGLHRFVAREKIMSVLSEWGLFRGLQNHPMVLPICSRSGDVIEYLLKNQWFVRCQEMGARAAKAVESGALELSPSFHQKNWQHWFSHIGDWCVSRQLWWGHQIPAYLVVEDHAQGEEDCWVVGRSEAEAREVAAELTGRPGAELTLERDPDVLDTWFSSALFPFSALGWPQETPDLARFYPLSLLETGSDLLLFWVGRMVMLGTQLTGQLPFSKVLLHPMVRDRQGRKMSKSLGNVLDPRDIISGVEMQVLQEKLRSGNLDPAELAIVAAAQKKDFPHGIPECGTDALRFTLCSHGVQAGDLHLSVSEVQSCRHFCNKIWNALRFILNALGEKFVPQPAEELSPSSPMDAWILSRLALAAQECERGFLTRELSLVTHALHHFWLHNLCDVYLEAVKPVLWHSPRPLGPPQVLFSCADLGLRLLAPLMPFLAEELWQRLPPRPGCPPAPSISVAPYPSACSLEHWRQPELERRFSRVQEVVQVLRALRATYQLTKARPRVLLQSSEPGDQGLFEAFLEPLGTLGYCGAVGLLPPGAAAPSGWAQAPLSDTAQVYMELQGLVDPQIQLPLLAARRYKLQKQLDSLTARTPSEGEAGTQRQQKLSSLQLELSKLDKAASHLQQLMDEPPAPGSPEL

SEQ ID NO: 96362 - protein, 1063 aa, Homo sapiens
  Payload ID: 19224
  Gene Name: valyl-tRNA synthetase 2, mitochondrial
  ENSP ID: ENSP00000373032
MPHLPLASFRPPFWGLRHSRGLPRFHSVSTQSEPHGSPISRRNREAKQKRLREKQATLEAEIAGESKSPAESIKAWRPKELVLYEIPTKPGEKKDVSGPLPPAYSPRYVEAAWYPWWVREGFFKPEYQARLPQATGETFSMCIPPPNVTGSLHIGHALTVAIQDALVRWHRMRGDQVLWVPGSDHAGIATQAVVEKQLWKERGVRRHELSREAFLREVWQWKEAKGGEICEQLRALGASLDWDRECFTMDVGSSVAVTEAFVRLYKAGLLYRNHQLVNWSCALRSAISDIEVENRPLPGHTQLRLPGCPTPVSFGLLFSVAFPVDGEPDAEVVVGTTRPETLPGDVAVAVHPDDSRYTHLHGRQLRHPLMGQPLPLITDYAVQPHVGTGAVKVTPAHSPADAEMGARHGLSPLNVIAEDGTMTSLCGDWLQGLHRFVAREKIMSVLSERGLFRGLQNHPMVLPICSRSGDVIEYLLKNQWFVRCQEMGARAAKAVESGALELSPSFHQKNWQHWFSHIGDWCVSRQLWWGHQIPAYLVVEDHAQGEEDCWVVGRSEAEAREVAAELTGRPGAELTLERDPDVLDTWFSSALFPFSALGWPQETPDLARFYPLSLLETGSDLLLFWVGRMVMLGTQLTGQLPFSKVLLHPMVRDRQGRKMSKSLGNVLDPRDIISGVEMQLLQEKLRSGNLDPAELAIVAAAQKKDFPHGIPECGTDALRFTLCSHGVQAGDLHLSVSEVQSCRHFCNKIWNALRFILNALGEKFVPQPAEELSPSSPMDAWILSRLALAAQECERGFLTRELSLVTHALHHFWLHNLCDVYLEAVKPVLWHSPRPLGPPQVLFSCADLGLRLLAPLMPFLAEELWQRLPPRPGCPPAPSISVAPYPSACSLEHWRQPELERRFSRVQEVVQVLRALRATYQLTKARPRVLLQSSEPGDQGLFEAFLEPLGTLGYCGAVGLLPPGTAAPSGWAQAPLSDTAQVYMELQGLVDPQIQLPLLAARRYKLQKQLDSLTARTPSEGEAGTQRQQKLSSLQLELSKLDKAASHLRQLMDEPPAPGSPEL

SEQ ID NO: 96363 - protein, 326 aa, Homo sapiens
  Payload ID: 19224
  Gene Name: valyl-tRNA synthetase 2, mitochondrial
  ENSP ID: ENSP00000394190
MPHLPLASFRPPFWGLRHSRGLPRFHSVSTQSEPHGSPISRRNREAKQKRLREKQATLEAEIAGESKSPAESIKAWRPKELVLYEIPTKPGEKKDVSGPLPPAYSPRYVEAAWYPWWVREGFFKPEYQARLPQATGETFSMCIPPPNVTGSLHIGHALTVAIQDALVRWHRMRGDQVLWVPGSDHAGIATQAVVEKQLWKERGVRRHELSREAFLREVWQWKEAKGGEICEQLRALGASLDWDRECFTMDVGSSVAVTEAFVRLYKAGLLYRNHQLVNWSCALRSAISDIEVENRPLPGHTQLRLPGCPTPVSFGLLFSVAFPVDG

SEQ ID NO: 96364 - protein, 115 aa, Homo sapiens
  Payload ID: 19224
  Gene Name: valyl-tRNA synthetase 2, mitochondrial
  ENSP ID: ENSP00000395255
MPHLPLASFRPPFWGLRHSRGLPRFHSVSTQSEPHGSPISRRNREAKQKRLREKQATLEAEIAGESKSPAESIKAWRPKELVLYEIPTKPGEKKDVSGPLPPAYSPRYVEAAWYP

SEQ ID NO: 96365 - protein, 1063 aa, Homo sapiens
  Payload ID: 19224
  Gene Name: valyl-tRNA synthetase 2, mitochondrial
  ENSP ID: ENSP00000396754
MPHLPLASFRPPFWGLRHSRGLPRFHSVSTQSEPHGSPISRRNREAKQKRLREKQATLEAEIAGESKSPAESIKAWRPKELVLYEIPTKPGEKKDVSGPLPPAYSPRYVEAAWYPWWVREGFFKPEYQARLPQATGETFSMCIPPPNVTGSLHIGHALTVAIQDALVRWHRMRGDQVLWVPGSDHAGIATQAVVEKQLWKERGVRRHELSREAFLREVWQWKEAKGGEICEQLRALGASLDWDRECFTMDVGSSVAVTEAFVRLYKAGLLYRNHQLVNWSCALRSAISDIEVENRPLPGHTQLRLPGCPTPVSFGLLFSVAFPVDGEPDAEVVVGTTRPETLPGDVAVAVHPDDSRYTHLHGRQLRHPLMGQPLPLITDYAVQPHVGTGAVKVTPAHSPADAEMGARHGLSPLNVIAEDGTMTSLCGDWLQGLHRFVAREKIMSVLSERGLFRGLQNHPMVLPICSRSGDVIEYLLKNQWFVRCQEMGARAAKAVESGALELSPSFHQKNWQHWFSHIGDWCVSRQLWWGHQIPAYLVVEDHAQGEEDCWVVGRSEAEAREVAAELTGRPGAELTLERDPDVLDTWFSSALFPFSALGWPQETPDLARFYPLSLLETGSDLLLFWVGRMVMLGTQLTGQLPFSKVLLHPMVRDRQGRKMSKSLGNVLDPRDIISGVEMQVLQEKLRSGNLDPAELAIVAAAQKKDFPHGIPECGTDALRFTLCSHGVQAGDLHLSVSEVQSCRHFCNKIWNALRFILNALGEKFVPQPAEELSPSSPMDAWILSRLALAAQECERGFLTRELSLVTHALHHFWLHNLCDVYLEAVKPVLWHSPRPLGPPQVLFSCADLGLRLLAPLMPFLAEELWQRLPPRPGCPPAPSISVAPYPSACSLEHWRQPELERRFSRVQEVVQVLRALQATYQLTKARPRVLLQSSEPGDQGLFEAFLEPLGTLGYCGAVGLLPPGAAAPSGWAQAPLSDTAQVYMELQGLVDPQIQLPLLAARRYKLQKQLDSLTARTPSEGEAGTQRQQKLSSLQLELSKLDKAASHLRQLMDEPPAPGSPEL

SEQ ID NO: 96366 - protein, 1063 aa, Homo sapiens; identical to SEQ ID NO: 96360
  Payload ID: 19224
  Gene Name: valyl-tRNA synthetase 2, mitochondrial
  ENSP ID: ENSP00000400867

SEQ ID NO: 96367 - protein, 115 aa, Homo sapiens; identical to SEQ ID NO: 96364
  Payload ID: 19224
  Gene Name: valyl-tRNA synthetase 2, mitochondrial
  ENSP ID: ENSP00000401775

SEQ ID NO: 96368 - protein, 326 aa, Homo sapiens; identical to SEQ ID NO: 96363
  Payload ID: 19224
  Gene Name: valyl-tRNA synthetase 2, mitochondrial
  ENSP ID: ENSP00000403749

SEQ ID NO: 96369 - protein, 326 aa, Homo sapiens; identical to SEQ ID NO: 96363
  Payload ID: 19224
  Gene Name: valyl-tRNA synthetase 2, mitochondrial
  ENSP ID: ENSP00000406721

SEQ ID NO: 96370 - protein, 1063 aa, Homo sapiens; identical to SEQ ID NO: 96362
  Payload ID: 19224
  Gene Name: valyl-tRNA synthetase 2, mitochondrial
  ENSP ID: ENSP00000407805

SEQ ID NO: 96371 - protein, 115 aa, Homo sapiens; identical to SEQ ID NO: 96364
  Payload ID: 19224
  Gene Name: valyl-tRNA synthetase 2, mitochondrial
  ENSP ID: ENSP00000407946

SEQ ID NO: 96372 - protein, 115 aa, Homo sapiens; identical to SEQ ID NO: 96364
  Payload ID: 19224
  Gene Name: valyl-tRNA synthetase 2, mitochondrial
  ENSP ID: ENSP00000408591

SEQ ID NO: 96373 - protein, 115 aa, Homo sapiens; identical to SEQ ID NO: 96364
  Payload ID: 19224
  Gene Name: valyl-tRNA synthetase 2, mitochondrial
  ENSP ID: ENSP00000414807

SEQ ID NO: 96374 - protein, 326 aa, Homo sapiens; identical to SEQ ID NO: 96363
  Payload ID: 19224
  Gene Name: valyl-tRNA synthetase 2, mitochondrial
  ENSP ID: ENSP00000415560

SEQ ID NO: 96375 - protein, 326 aa, Homo sapiens; identical to SEQ ID NO: 96363
  Payload ID: 19224
  Gene Name: valyl-tRNA synthetase 2, mitochondrial
  ENSP ID: ENSP00000415729

SEQ ID NO: 96376 - protein, 326 aa, Homo sapiens; identical to SEQ ID NO: 96363
  Payload ID: 19224
  Gene Name: valyl-tRNA synthetase 2, mitochondrial
  ENSP ID: ENSP00000415752

SEQ ID NO: 96377 - protein, 115 aa, Homo sapiens; identical to SEQ ID NO: 96364
  Payload ID: 19224
  Gene Name: valyl-tRNA synthetase 2, mitochondrial
  ENSP ID: ENSP00000416390

SEQ ID NO: 96378 - protein, 1061 aa, Homo sapiens
  Payload ID: 19224
  Gene Name: valyl-tRNA synthetase 2, mitochondrial
  ENSP ID: ENSP00000438200
MPHLPLASFRPPFWGLRHSRGLPRFHSVSTQSEPHGSPISRRNREAKQKRLREKQATLEAEIAGESKSPAESIKAWRPKELVLYEIPTKPGEKKDVSGPLPPAYSPRYVEAAWYPWWVREGFFKPEYQARLPQATGETFSMCIPPPNVTGSLHIGHALTVAIQDALVRWHRMRGDQVLWVPGSDHAGIATQAVVEKQLWKERGVRRHELSREAFLREVWQWKEAKGGEICEQLRALGASLDWDRECFTMDVGSSVAVTEAFVRLYKAGLLYRNHQLVNWSCALRSAISDIEVENRPLPGHTQLRLPGCPTPVSFGLLFSVAFPVDGEPDAEVVVGTTRPETLPGDVAVAVHPDDSRYTHLHGRQLRHPLMGQPLPLITDYAVQPHVGTVKVTPAHSPADAEMGARHGLSPLNVIAEDGTMTSLCGDWLQGLHRFVAREKIMSVLSEWGLFRGLQNHPMVLPICSRSGDVIEYLLKNQWFVRCQEMGARAAKAVESGALELSPSFHQKNWQHWFSHIGDWCVSRQLWWGHQIPAYLVVEDHAQGEEDCWVVGRSEAEAREVAAELTGRPGAELTLERDPDVLDTWFSSALFPFSALGWPQETPDLARFYPLSLLETGSDLLLFWVGRMVMLGTQLTGQLPFSKVLLHPMVRDRQGRKMSKSLGNVLDPRDIISGVEMQVLQEKLRSGNLDPAELAIVAAAQKKDFPHGIPECGTDALRFTLCSHGVQAGDLHLSVSEVQSCRHFCNKIWNALRFILNALGEKFVPQPAEELSPSSPMDAWILSRLALAAQECERGFLTRELSLVTHALHHFWLHNLCDVYLEAVKPVLWHSPRPLGPPQVLFSCADLGLRLLAPLMPFLAEELWQRLPPRPGCPPAPSISVAPYPSACSLEHWRQPELERRFSRVQEVVQVLRALRATYQLTKARPRVLLQSSEPGDQGLFEAFLEPLGTLGYCGAVGLLPPGAAAPSGWAQAPLSDTAQVYMELQGLVDPQIQLPLLAARRYKLQKQLDSLTARTPSEGEAGTQRQQKLSSLQLELSKLDKAASHLRQLMDEPPAPGSPEL

SEQ ID NO: 96379 - protein, 1093 aa, Homo sapiens
  Payload ID: 19224
  Gene Name: valyl-tRNA synthetase 2, mitochondrial
  Uniprot ID: Q5ST30
  ENSP ID: ENSP00000441000
MGGKAWPRRAVGTAGGPCAEQISAPFQTLLMPHLPLASFRPPFWGLRHSRGLPRFHSVSTQSEPHGSPISRRNREAKQKRLREKQATLEAEIAGESKSPAESIKAWRPKELVLYEIPTKPGEKKDVSGPLPPAYSPRYVEAAWYPWWVREGFFKPEYQARLPQATGETFSMCIPPPNVTGSLHIGHALTVAIQDALVRWHRMRGDQVLWVPGSDHAGIATQAVVEKQLWKERGVRRHELSREAFLREVWQWKEAKGGEICEQLRALGASLDWDRECFTMDVGSSVAVTEAFVRLYKAGLLYRNHQLVNWSCALRSAISDIEVENRPLPGHTQLRLPGCPTPVSFGLLFSVAFPVDGEPDAEVVVGTTRPETLPGDVAVAVHPDDSRYTHLHGRQLRHPLMGQPLPLITDYAVQPHVGTGAVKVTPAHSPADAEMGARHGLSPLNVIAEDGTMTSLCGDWLQGLHRFVAREKIMSVLSEWGLFRGLQNHPMVLPICSRSGDVIEYLLKNQWFVRCQEMGARAAKAVESGALELSPSFHQKNWQHWFSHIGDWCVSRQLWWGHQIPAYLVVEDHAQGEEDCWVVGRSEAEAREVAAELTGRPGAELTLERDPDVLDTWFSSALFPFSALGWPQETPDLARFYPLSLLETGSDLLLFWVGRMVMLGTQLTGQLPFSKVLLHPMVRDRQGRKMSKSLGNVLDPRDIISGVEMQVLQEKLRSGNLDPAELAIVAAAQKKDFPHGIPECGTDALRFTLCSHGVQAGDLHLSVSEVQSCRHFCNKIWNALRFILNALGEKFVPQPAEELSPSSPMDAWILSRLALAAQECERGFLTRELSLVTHALHHFWLHNLCDVYLEAVKPVLWHSPRPLGPPQVLFSCADLGLRLLAPLMPFLAEELWQRLPPRPGCPPAPSISVAPYPSACSLEHWRQPELERRFSRVQEVVQVLRALRATYQLTKARPRVLLQSSEPGDQGLFEAFLEPLGTLGYCGAVGLLPPGAAAPSGWAQAPLSDTAQVYMELQGLVDPQIQLPLLAARRYKLQKQLDSLTARTPSEGEAGTQRQQKLSSLQLELSKLDKAASHLRQLMDEPPAPGSPEL

SEQ ID NO: 96380 - protein, 1061 aa, Homo sapiens
  Payload ID: 19224
  Gene Name: valyl-tRNA synthetase 2, mitochondrial
  ENSP ID: ENSP00000446608
MPHLPLASFRPPFWGLRHSRGLPRFHSVSTQSEPHGSPISRRNREAKQKRLREKQATLEAEIAGESKSPAESIKAWRPKELVLYEIPTKPGEKKDVSGPLPPAYSPRYVEAAWYPWWVREGFFKPEYQARLPQATGETFSMCIPPPNVTGSLHIGHALTVAIQDALVRWHRMRGDQVLWVPGSDHAGIATQAVVEKQLWKERGVRRHELSREAFLREVWQWKEAKGGEICEQLRALGASLDWDRECFTMDVGSSVAVTEAFVRLYKAGLLYRNHQLVNWSCALRSAISDIEVENRPLPGHTQLRLPGCPTPVSFGLLFSVAFPVDGEPDAEVVVGTTRPETLPGDVAVAVHPDDSRYTHLHGRQLRHPLMGQPLPLITDYAVQPHVGTVKVTPAHSPADAEMGARHGLSPLNVIAEDGTMTSLCGDWLQGLHRFVAREKIMSVLSERGLFRGLQNHPMVLPICSRSGDVIEYLLKNQWFVRCQEMGARAAKAVESGALELSPSFHQKNWQHWFSHIGDWCVSRQLWWGHQIPAYLVVEDHAQGEEDCWVVGRSEAEAREVAAELTGRPGAELTLERDPDVLDTWFSSALFPFSALGWPQETPDLARFYPLSLLETGSDLLLFWVGRMVMLGTQLTGQLPFSKVLLHPMVRDRQGRKMSKSLGNVLDPRDIISGVEMQLLQEKLRSGNLDPAELAIVAAAQKKDFPHGIPECGTDALRFTLCSHGVQAGDLHLSVSEVQSCRHFCNKIWNALRFILNALGEKFVPQPAEELSPSSPMDAWILSRLALAAQECERGFLTRELSLVTHALHHFWLHNLCDVYLEAVKPVLWHSPRPLGPPQVLFSCADLGLRLLAPLMPFLAEELWQRLPPRPGCPPAPSISVAPYPSACSLEHWRQPELERRFSRVQEVVQVLRALRATYQLTKARPRVLLQSSEPGDQGLFEAFLEPLGTLGYCGAVGLLPPGTAAPSGWAQAPLSDTAQVYMELQGLVDPQIQLPLLAARRYKLQKQLDSLTARTPSEGEAGTQRQQKLSSLQLELSKLDKAASHLRQLMDEPPAPGSPEL

SEQ ID NO: 96381 - protein, 1093 aa, Homo sapiens; identical to SEQ ID NO: 96379
  Payload ID: 19224
  Gene Name: valyl-tRNA synthetase 2, mitochondrial
  ENSP ID: ENSP00000446839

SEQ ID NO: 96382 - protein, 1093 aa, Homo sapiens
  Payload ID: 19224
  Gene Name: valyl-tRNA synthetase 2, mitochondrial
  ENSP ID: ENSP00000447141
MGGKAWPRRAVGTAGGPCAEQISAPFQTLLMPHLPLASFRPPFWGLRHSRGLPRFHSVSTQSEPHGSPISRRNREAKQKRLREKQATLEAEIAGESKSPAESIKAWRPKELVLYEIPTKPGEKKDVSGPLPPAYSPRYVEAAWYPWWVREGFFKPEYQARLPQATGETFSMCIPPPNVTGSLHIGHALTVAIQDALVRWHRMRGDQVLWVPGSDHAGIATQAVVEKQLWKERGVRRHELSREAFLREVWQWKEAKGGEICEQLRALGASLDWDRECFTMDVGSSVAVTEAFVRLYKAGLLYRNHQLVNWSCALRSAISDIEVENRPLPGHTQLRLPGCPTPVSFGLLFSVAFPVDGEPDAEVVVGTTRPETLPGDVAVAVHPDDSRYTHLHGRQLRHPLMGQPLPLITDYAVQPHVGTGAVKVTPAHSPADAEMGARHGLSPLNVIAEDGTMTSLCGDWLQGLHRFVAREKIMSVLSEWGLFRGLQNHPMVLPICSRSGDVIEYLLKNQWFVRCQEMGARAAKAVESGALELSPSFHQKNWQHWFSHIGDWCVSRQLWWGHQIPAYLVVEDHAQGEEDCWVVGRSEAEAREVAAELTGRPGAELTLERDPDVLDTWFSSALFPFSALGWPQETPDLARFYPLSLLETGSDLLLFWVGRMVMLGTQLTGQLPFSKVLLHPMVRDRQGRKMSKSLGNVLDPRDIISGVEMQVLQEKLRSGNLDPAELAIVAAAQKKDFPHGIPECGTDALRFTLCSHGVQAGDLHLSVSEVQSCRHFCNKIWNALRFILNALGEKFVPQPAEELSPSSPMDAWILSRLALAAQECERGFLTRELSLVTHALHHFWLHNLCDVYLEAVKPVLWHSPRPLGPPQVLFSCADLGLRLLAPLMPFLAEELWQRLPPRPGCPPAPSISVAPYPSACSLEHWRQPELERRFSRVQEVVQVLRALRATYQLTKARPRVLLQSSEPGDQGLFEAFLEPLGTLGYCGAVGLLPPGAAAPSGWAQAPLSDTAQVYMELQGLVDPQIQLPLLAARRYKLQKQLDSLTARTPSEGEAGTQRQQKLSSLQLELSKLDKAASHLQQLMDEPPAPGSPEL

SEQ ID NO: 96383 - protein, 1093 aa, Homo sapiens
  Payload ID: 19224
  Gene Name: valyl-tRNA synthetase 2, mitochondrial
  ENSP ID: ENSP00000447179
MGGKAWPRRAVGTAGGPCAEQISAPFQTLLMPHLPLASFRPPFWGLRHSRGLPRFHSVSTQSEPHGSPISRRNREAKQKRLREKQATLEAEIAGESKSPAESIKAWRPKELVLYEIPTKPGEKKDVSGPLPPAYSPRYVEAAWYPWWVREGFFKPEYQARLPQATGETFSMCIPPPNVTGSLHIGHALTVAIQDALVRWHRMRGDQVLWVPGSDHAGIATQAVVEKQLWKERGVRRHELSREAFLREVWQWKEAKGGEICEQLRALGASLDWDRECFTMDVGSSVAVTEAFVRLYKAGLLYRNHQLVNWSCALRSAISDIEVENRPLPGHTQLRLPGCPTPVSFGLLFSVAFPVDGEPDAEVVVGTTRPETLPGDVAVAVHPDDSRYTHLHGRQLRHPLMGQPLPLITDYAVQPHVGTGAVKVTPAHSPADAEMGARHGLSPLNVIAEDGTMTSLCGDWLQGLHRFVAREKIMSVLSERGLFRGLQNHPMVLPICSRSGDVIEYLLKNQWFVRCQEMGARAAKAVESGALELSPSFHQKNWQHWFSHIGDWCVSRQLWWGHQIPAYLVVEDHAQGEEDCWVVGRSEAEAREVAAELTGRPGAELTLERDPDVLDTWFSSALFPFSALGWPQETPDLARFYPLSLLETGSDLLLFWVGRMVMLGTQLTGQLPFSKVLLHPMVRDRQGRKMSKSLGNVLDPRDIISGVEMQVLQEKLRSGNLDPAELAIVAAAQKKDFPHGIPECGTDALRFTLCSHGVQAGDLHLSVSEVQSCRHFCNKIWNALRFILNALGEKFVPQPAEELSPSSPMDAWILSRLALAAQECERGFLTRELSLVTHALHHFWLHNLCDVYLEAVKPVLWHSPRPLGPPQVLFSCADLGLRLLAPLMPFLAEELWQRLPPRPGCPPAPSISVAPYPSACSLEHWRQPELERRFSRVQEVVQVLRALQATYQLTKARPRVLLQSSEPGDQGLFEAFLEPLGTLGYCGAVGLLPPGAAAPSGWAQAPLSDTAQVYMELQGLVDPQIQLPLLAARRYKLQKQLDSLTARTPSEGEAGTQRQQKLSSLQLELSKLDKAASHLRQLMDEPPAPGSPEL

SEQ ID NO: 96384 - protein, 1061 aa, Homo sapiens; identical to SEQ ID NO: 96380
  Payload ID: 19224
  Gene Name: valyl-tRNA synthetase 2, mitochondrial
  ENSP ID: ENSP00000447478

SEQ ID NO: 96385 - protein, 1061 aa, Homo sapiens
  Payload ID: 19224
  Gene Name: valyl-tRNA synthetase 2, mitochondrial
  ENSP ID: ENSP00000447763
MPHLPLASFRPPFWGLRHSRGLPRFHSVSTQSEPHGSPISRRNREAKQKRLREKQATLEAEIAGESKSPAESIKAWRPKELVLYEIPTKPGEKKDVSGPLPPAYSPRYVEAAWYPWWVREGFFKPEYQARLPQATGETFSMCIPPPNVTGSLHIGHALTVAIQDALVRWHRMRGDQVLWVPGSDHAGIATQAVVEKQLWKERGVRRHELSREAFLREVWQWKEAKGGEICEQLRALGASLDWDRECFTMDVGSSVAVTEAFVRLYKAGLLYRNHQLVNWSCALRSAISDIEVENRPLPGHTQLRLPGCPTPVSFGLLFSVAFPVDGEPDAEVVVGTTRPETLPGDVAVAVHPDDSRYTHLHGRQLRHPLMGQPLPLITDYAVQPHVGTVKVTPAHSPADAEMGARHGLSPLNVIAEDGTMTSLCGDWLQGLHRFVAREKIMSVLSEWGLFRGLQNHPMVLPICSRSGDVIEYLLKNQWFVRCQEMGARAAKAVESGALELSPSFHQKNWQHWFSHIGDWCVSRQLWWGHQIPAYLVVEDHAQGEEDCWVVGRSEAEAREVAAELTGRPGAELTLERDPDVLDTWFSSALFPFSALGWPQETPDLARFYPLSLLETGSDLLLFWVGRMVMLGTQLTGQLPFSKVLLHPMVRDRQGRKMSKSLGNVLDPRDIISGVEMQVLQEKLRSGNLDPAELAIVAAAQKKDFPHGIPECGTDALRFTLCSHGVQAGDLHLSVSEVQSCRHFCNKIWNALRFILNALGEKFVPQPAEELSPSSPMDAWILSRLALAAQECERGFLTRELSLVTHALHHFWLHNLCDVYLEAVKPVLWHSPRPLGPPQVLFSCADLGLRLLAPLMPFLAEELWQRLPPRPGCPPAPSISVAPYPSACSLEHWRQPELERRFSRVQEVVQVLRALRATYQLTKARPRVLLQSSEPGDQGLFEAFLEPLGTLGYCGAVGLLPPGAAAPSGWAQAPLSDTAQVYMELQGLVDPQIQLPLLAARRYKLQKQLDSLTARTPSEGEAGTQRQQKLSSLQLELSKLDKAASHLQQLMDEPPAPGSPEL

SEQ ID NO: 96386 - protein, 1061 aa, Homo sapiens; identical to SEQ ID NO: 96378
  Payload ID: 19224
  Gene Name: valyl-tRNA synthetase 2, mitochondrial
  ENSP ID: ENSP00000448002

SEQ ID NO: 96387 - protein, 1093 aa, Homo sapiens
  Payload ID: 19224
  Gene Name: valyl-tRNA synthetase 2, mitochondrial
  ENSP ID: ENSP00000449382
MGGKAWPRRAVGTAGGPCAEQISAPFQTLLMPHLPLASFRPPFWGLRHSRGLPRFHSVSTQSEPHGSPISRRNREAKQKRLREKQATLEAEIAGESKSPAESIKAWRPKELVLYEIPTKPGEKKDVSGPLPPAYSPRYVEAAWYPWWVREGFFKPEYQARLPQATGETFSMCIPPPNVTGSLHIGHALTVAIQDALVRWHRMRGDQVLWVPGSDHAGIATQAVVEKQLWKERGVRRHELSREAFLREVWQWKEAKGGEICEQLRALGASLDWDRECFTMDVGSSVAVTEAFVRLYKAGLLYRNHQLVNWSCALRSAISDIEVENRPLPGHTQLRLPGCPTPVSFGLLFSVAFPVDGEPDAEVVVGTTRPETLPGDVAVAVHPDDSRYTHLHGRQLRHPLMGQPLPLITDYAVQPHVGTGAVKVTPAHSPADAEMGARHGLSPLNVIAEDGTMTSLCGDWLQGLHRFVAREKIMSVLSERGLFRGLQNHPMVLPICSRSGDVIEYLLKNQWFVRCQEMGARAAKAVESGALELSPSFHQKNWQHWFSHIGDWCVSRQLWWGHQIPAYLVVEDHAQGEEDCWVVGRSEAEAREVAAELTGRPGAELTLERDPDVLDTWFSSALFPFSALGWPQETPDLARFYPLSLLETGSDLLLFWVGRMVMLGTQLTGQLPFSKVLLHPMVRDRQGRKMSKSLGNVLDPRDIISGVEMQLLQEKLRSGNLDPAELAIVAAAQKKDFPHGIPECGTDALRFTLCSHGVQAGDLHLSVSEVQSCRHFCNKIWNALRFILNALGEKFVPQPAEELSPSSPMDAWILSRLALAAQECERGFLTRELSLVTHALHHFWLHNLCDVYLEAVKPVLWHSPRPLGPPQVLFSCADLGLRLLAPLMPFLAEELWQRLPPRPGCPPAPSISVAPYPSACSLEHWRQPELERRFSRVQEVVQVLRALRATYQLTKARPRVLLQSSEPGDQGLFEAFLEPLGTLGYCGAVGLLPPGTAAPSGWAQAPLSDTAQVYMELQGLVDPQIQLPLLAARRYKLQKQLDSLTARTPSEGEAGTQRQQKLSSLQLELSKLDKAASHLRQLMDEPPAPGSPEL

SEQ ID NO: 96388 - protein, 1061 aa, Homo sapiens
  Payload ID: 19224
  Gene Name: valyl-tRNA synthetase 2, mitochondrial
  ENSP ID: ENSP00000449456
MPHLPLASFRPPFWGLRHSRGLPRFHSVSTQSEPHGSPISRRNREAKQKRLREKQATLEAEIAGESKSPAESIKAWRPKELVLYEIPTKPGEKKDVSGPLPPAYSPRYVEAAWYPWWVREGFFKPEYQARLPQATGETFSMCIPPPNVTGSLHIGHALTVAIQDALVRWHRMRGDQVLWVPGSDHAGIATQAVVEKQLWKERGVRRHELSREAFLREVWQWKEAKGGEICEQLRALGASLDWDRECFTMDVGSSVAVTEAFVRLYKAGLLYRNHQLVNWSCALRSAISDIEVENRPLPGHTQLRLPGCPTPVSFGLLFSVAFPVDGEPDAEVVVGTTRPETLPGDVAVAVHPDDSRYTHLHGRQLRHPLMGQPLPLITDYAVQPHVGTVKVTPAHSPADAEMGARHGLSPLNVIAEDGTMTSLCGDWLQGLHRFVAREKIMSVLSERGLFRGLQNHPMVLPICSRSGDVIEYLLKNQWFVRCQEMGARAAKAVESGALELSPSFHQKNWQHWFSHIGDWCVSRQLWWGHQIPAYLVVEDHAQGEEDCWVVGRSEAEAREVAAELTGRPGAELTLERDPDVLDTWFSSALFPFSALGWPQETPDLARFYPLSLLETGSDLLLFWVGRMVMLGTQLTGQLPFSKVLLHPMVRDRQGRKMSKSLGNVLDPRDIISGVEMQVLQEKLRSGNLDPAELAIVAAAQKKDFPHGIPECGTDALRFTLCSHGVQAGDLHLSVSEVQSCRHFCNKIWNALRFILNALGEKFVPQPAEELSPSSPMDAWILSRLALAAQECERGFLTRELSLVTHALHHFWLHNLCDVYLEAVKPVLWHSPRPLGPPQVLFSCADLGLRLLAPLMPFLAEELWQRLPPRPGCPPAPSISVAPYPSACSLEHWRQPELERRFSRVQEVVQVLRALQATYQLTKARPRVLLQSSEPGDQGLFEAFLEPLGTLGYCGAVGLLPPGAAAPSGWAQAPLSDTAQVYMELQGLVDPQIQLPLLAARRYKLQKQLDSLTARTPSEGEAGTQRQQKLSSLQLELSKLDKAASHLRQLMDEPPAPGSPEL

SEQ ID NO: 96389 - protein, 1093 aa, Homo sapiens; identical to SEQ ID NO: 96387
  Payload ID: 19224
  Gene Name: valyl-tRNA synthetase 2, mitochondrial
  ENSP ID: ENSP00000449862

SEQ ID NO: 96390 - protein, 923 aa, Homo sapiens
  Payload ID: 19224
  Gene Name: valyl-tRNA synthetase 2, mitochondrial
  Uniprot ID: Q5ST30
  ENSP ID: ENSP00000485818
MCIPPPNVTGSLHIGHALTVAIQDALVRWHRMRGDQVLWVPGSDHAGIATQAVVEKQLWKERGVRRHELSREAFLREVWQWKEAKGGEICEQLRALGASLDWDRECFTMDVGSSVAVTEAFVRLYKAGLLYRNHQLVNWSCALRSAISDIEVENRPLPGHTQLRLPGCPTPVSFGLLFSVAFPVDGEPDAEVVVGTTRPETLPGDVAVAVHPDDSRYTHLHGRQLRHPLMGQPLPLITDYAVQPHVGTGAVKVTPAHSPADAEMGARHGLSPLNVIAEDGTMTSLCGDWLQGLHRFVAREKIMSVLSEWGLFRGLQNHPMVLPICSRSGDVIEYLLKNQWFVRCQEMGARAAKAVESGALELSPSFHQKNWQHWFSHIGDWCVSRQLWWGHQIPAYLVVEDHAQGEEDCWVVGRSEAEAREVAAELTGRPGAELTLERDPDVLDTWFSSALFPFSALGWPQETPDLARFYPLSLLETGSDLLLFWVGRMVMLGTQLTGQLPFSKVLLHPMVRDRQGRKMSKSLGNVLDPRDIISGVEMQVLQEKLRSGNLDPAELAIVAAAQKKDFPHGIPECGTDALRFTLCSHGVQAGDLHLSVSEVQSCRHFCNKIWNALRFILNALGEKFVPQPAEELSPSSPMDAWILSRLALAAQECERGFLTRELSLVTHALHHFWLHNLCDVYLEAVKPVLWHSPRPLGPPQVLFSCADLGLRLLAPLMPFLAEELWQRLPPRPGCPPAPSISVAPYPSACSLEHWRQPELERRFSRVQEVVQVLRALRATYQLTKARPRVLLQSSEPGDQGLFEAFLEPLGTLGYCGAVGLLPPGAAAPSGWAQAPLSDTAQVYMELQGLVDPQIQLPLLAARRYKLQKQLDSLTARTPSEGEAGTQRQQKLSSLQLELSKLDKAASHLRQLMDEPPAPGSPEL

SEQ ID NO: 96391 - protein, 294 aa, Homo sapiens
  Payload ID: 19225
  Gene Name: VAMP (vesicle-associated membrane protein)-associated protein A, 33kDa
  Uniprot ID: Q9P0L0
  ENSP ID: ENSP00000345656
MASASGAMAKHEQILVLDPPTDLKFKGPFTDVVTTNLKLRNPSDRKVCFKVKTTAPRRYCVRPNSGIIDPGSTVTVSVMLQPFDYDPNEKSKHKFMVQTIFAPPNTSDMEAVWKEAKPDELMDSKLRCVFEMPNENDKLGITPPGNAPTVTSMSSINNTVATPASYHTKDDPRGLSVLKQEKQKNDMEPSKAVPLNASKQDGPMPKPHSVSLNDTETRKLMEECKRLQGEMMKLSEENRHLRDEGLRLRKVAHSDKPGSTSTASFRDNVTSPLPSLLVVIAAIFIGFFLGKFIL

SEQ ID NO: 96392 - protein, 249 aa, Homo sapiens
  Payload ID: 19225
  Gene Name: VAMP (vesicle-associated membrane protein)-associated protein A, 33kDa
  Uniprot ID: Q9P0L0
  ENSP ID: ENSP00000382880
MASASGAMAKHEQILVLDPPTDLKFKGPFTDVVTTNLKLRNPSDRKVCFKVKTTAPRRYCVRPNSGIIDPGSTVTVSVMLQPFDYDPNEKSKHKFMVQTIFAPPNTSDMEAVWKEAKPDELMDSKLRCVFEMPNENDKLNDMEPSKAVPLNASKQDGPMPKPHSVSLNDTETRKLMEECKRLQGEMMKLSEENRHLRDEGLRLRKVAHSDKPGSTSTASFRDNVTSPLPSLLVVIAAIFIGFFLGKFIL

SEQ ID NO: 96393 - protein, 29 aa, Homo sapiens
  Payload ID: 19225
  Gene Name: VAMP (vesicle-associated membrane protein)-associated protein A, 33kDa
  ENSP ID: ENSP00000463155
MASASGAMAKHEQILVLDPPTDLKFKVIV

SEQ ID NO: 96394 - protein, 99 aa, Homo sapiens
  Payload ID: 19226
  Gene Name: VAMP (vesicle-associated membrane protein)-associated protein B and C
  Uniprot ID: O95292
  ENSP ID: ENSP00000379147
MAKVEQVLSLEPQHELKFRGPFTDVVTTNLKLGNPTDRNVCFKVKTTAPRRYCVRPNSGIIDAGASINVSGRRWTADEEDSAEQQPHFSISPNWEGRRP

SEQ ID NO: 96395 - protein, 243 aa, Homo sapiens
  Payload ID: 19226
  Gene Name: VAMP (vesicle-associated membrane protein)-associated protein B and C
  Uniprot ID: O95292
  ENSP ID: ENSP00000417175
MAKVEQVLSLEPQHELKFRGPFTDVVTTNLKLGNPTDRNVCFKVKTTAPRRYCVRPNSGIIDAGASINVSVMLQPFDYDPNEKSKHKFMVQSMFAPTDTSDMEAVWKEAKPEDLMDSKLRCVFELPAENDKPHDVEINKIISTTASKTETPIVSKSLSSSLDDTEVKKVMEECKRLQGEVQRLREENKQFKEEDGLRMRKTVQSNSPISALAPTGKEEGLSTRLLALVVLFFIVGVIIGKIAL

SEQ ID NO: 96396 - protein, 71 aa, Homo sapiens
  Payload ID: 19226
  Gene Name: VAMP (vesicle-associated membrane protein)-associated protein B and C
  ENSP ID: ENSP00000430426
MAKVEQVLSLEPQHELKFRGPFTDVVTTNLKLGNPTDRNVCFKVKTTAPRRYCVRPNSGIIDAGASINVSA

SEQ ID NO: 96397 - protein, 524 aa, Homo sapiens
  Payload ID: 19227
  Gene Name: VANGL planar cell polarity protein 1
  Uniprot ID: Q8TAA9
  ENSP ID: ENSP00000310800
MDTESTYSGYSYYSSHSKKSHRQGERTRERHKSPRNKDGRGSEKSVTIQPPTGEPLLGNDSTRTEEVQDDNWGETTTAITGTSEHSISQEDIARISKDMEDSVGLDCKRYLGLTVASFLGLLVFLTPIAFILLPPILWRDELEPCGTICEGLFISMAFKLLILLIGTWALFFRKRRADMPRVFVFRALLLVLIFLFVVSYWLFYGVRILDSRDRNYQGIVQYAVSLVDALLFIHYLAIVLLELRQLQPMFTLQVVRSTDGESRFYSLGHLSIQRAALVVLENYYKDFTIYNPNLLTASKFRAAKHMAGLKVYNVDGPSNNATGQSRAMIAAAARRRDSSHNELYYEEAEHERRVKKRKARLVVAVEEAFIHIQRLQAEEQQKAPGEVMDPREAAQAIFPSMARALQKYLRITRQQNYHSMESILQHLAFCITNGMTPKAFLERYLSAGPTLQYDKDRWLSTQWRLVSDEAVTNGLRDGIVFVLKCLDFSLVVNVKKIPFIILSEEFIDPKSHKFVLRLQSETSV

SEQ ID NO: 96398 - protein, 524 aa, Homo sapiens; identical to SEQ ID NO: 96397
  Payload ID: 19227
  Gene Name: VANGL planar cell polarity protein 1
  Uniprot ID: Q8TAA9
  ENSP ID: ENSP00000347672

SEQ ID NO: 96399 - protein, 524 aa, Homo sapiens; identical to SEQ ID NO: 96397
  Payload ID: 19227
  Gene Name: VANGL planar cell polarity protein 1
  Uniprot ID: Q8TAA9
  ENSP ID: ENSP00000358522

SEQ ID NO: 96400 - protein, 522 aa, Homo sapiens
  Payload ID: 19227
  Gene Name: VANGL planar cell polarity protein 1
  Uniprot ID: Q8TAA9
  ENSP ID: ENSP00000358523
MDTESTYSGYSYYSSHSKKSHRQGERTRERHKSPRNKDGRGSEKSVTIQPPTGEPLLGNDSTRTEEDDNWGETTTAITGTSEHSISQEDIARISKDMEDSVGLDCKRYLGLTVASFLGLLVFLTPIAFILLPPILWRDELEPCGTICEGLFISMAFKLLILLIGTWALFFRKRRADMPRVFVFRALLLVLIFLFVVSYWLFYGVRILDSRDRNYQGIVQYAVSLVDALLFIHYLAIVLLELRQLQPMFTLQVVRSTDGESRFYSLGHLSIQRAALVVLENYYKDFTIYNPNLLTASKFRAAKHMAGLKVYNVDGPSNNATGQSRAMIAAAARRRDSSHNELYYEEAEHERRVKKRKARLVVAVEEAFIHIQRLQAEEQQKAPGEVMDPREAAQAIFPSMARALQKYLRITRQQNYHSMESILQHLAFCITNGMTPKAFLERYLSAGPTLQYDKDRWLSTQWRLVSDEAVTNGLRDGIVFVLKCLDFSLVVNVKKIPFIILSEEFIDPKSHKFVLRLQSETSV

SEQ ID NO: 96401 - protein, 521 aa, Homo sapiens
  Payload ID: 19228
  Gene Name: VANGL planar cell polarity protein 2
  Uniprot ID: Q9ULK5
  ENSP ID: ENSP00000357040
MDTESQYSGYSYKSGHSRSSRKHRDRRDRHRSKSRDGGRGDKSVTIQAPGEPLLDNESTRGDERDDNWGETTTVVTGTSEHSISHDDLTRIAKDMEDSVPLDCSRHLGVAAGATLALLSFLTPLAFLLLPPLLWREELEPCGTACEGLFISVAFKLLILLLGSWALFFRRPKASLPRVFVLRALLMVLVFLLVVSYWLFYGVRILDARERSYQGVVQFAVSLVDALLFVHYLAVVLLELRQLQPQFTLKVVRSTDGASRFYNVGHLSIQRVAVWILEKYYHDFPVYNPALLNLPKSVLAKKVSGFKVYSLGEENSTNNSTGQSRAVIAAAARRRDNSHNEYYYEEAEHERRVRKRRARLVVAVEEAFTHIKRLQEEEQKNPREVMDPREAAQAIFASMARAMQKYLRTTKQQPYHTMESILQHLEFCITHDMTPKAFLERYLAAGPTIQYHKERWLAKQWTLVSEEPVTNGLKDGIVFLLKRQDFSLVVSTKKVPFFKLSEEFVDPKSHKFVMRLQSETSV

SEQ ID NO: 96402 - protein, 513 aa, Homo sapiens
  Payload ID: 19229
  Gene Name: vanin 1
  Uniprot ID: O95497
  ENSP ID: ENSP00000356905
MTTQLPAYVAILLFYVSRASCQDTFTAAVYEHAAILPNATLTPVSREEALALMNRNLDILEGAITSAADQGAHIIVTPEDAIYGWNFNRDSLYPYLEDIPDPEVNWIPCNNRNRFGQTPVQERLSCLAKNNSIYVVANIGDKKPCDTSDPQCPPDGRYQYNTDVVFDSQGKLVARYHKQNLFMGENQFNVPKEPEIVTFNTTFGSFGIFTCFDILFHDPAVTLVKDFHVDTIVFPTAWMNVLPHLSAVEFHSAWAMGMRVNFLASNIHYPSKKMTGSGIYAPNSSRAFHYDMKTEEGKLLLSQLDSHPSHSAVVNWTSYASSIEALSSGNKEFKGTVFFDEFTFVKLTGVAGNYTVCQKDLCCHLSYKMSENIPNEVYALGAFDGLHTVEGRYYLQICTLLKCKTTNLNTCGDSAETASTRFEMFSLSGTFGTQYVFPEVLLSENQLAPGEFQVSTDGRLFSLKPTSGPVLTVTLFGRLYEKDWASNASSGLTAQARIIMLIVIAPIVCSLSW

SEQ ID NO: 96403 - protein, 520 aa, Homo sapiens
  Payload ID: 19230
  Gene Name: vanin 2
  Uniprot ID: O95498
  ENSP ID: ENSP00000322276
MVTSSFPISVAVFALITLQVGTQDSFIAAVYEHAVILPNKTETPVSQEDALNLMNENIDILETAIKQAAEQGARIIVTPEDALYGWKFTRETVFPYLEDIPDPQVNWIPCQDPHRFGHTPVQARLSCLAKDNSIYVLANLGDKKPCNSRDSTCPPNGYFQYNTNVVYNTEGKLVARYHKYHLYSEPQFNVPEKPELVTFNTAFGRFGIFTCFDIFFYDPGVTLVKDFHVDTILFPTAWMNVLPLLTAIEFHSAWAMGMGVNLLVANTHHVSLNMTGSGIYAPNGPKVYHYDMKTELGKLLLSEVDSHPLSSLAYPTAVNWNAYATTIKPFPVQKNTFRGFISRDGFNFTELFENAGNLTVCQKELCCHLSYRMLQKEENEVYVLGAFTGLHGRRRREYWQVCTLLKCKTTNLTTCGRPVETASTRFEMFSLSGTFGTEYVFPEVLLTEIHLSPGKFEVLKDGRLVNKNGSSGPILTVSLFGRWYTKDSLYSSCGTSNSAITYLLIFILLMIIALQNIVML

SEQ ID NO: 96404 - protein, 290 aa, Homo sapiens
  Payload ID: 19230
  Gene Name: vanin 2
  ENSP ID: ENSP00000376190
MVTSSFPISVAVFALITLQVGTQDSFIAAVYEHAVILPNKTETPVSQEDALNLMNENIDILETAIKQAAEQGARIIVTPEDALYGWKFTRETVFPYLEDIPDPQVNWIPCQDPHRFGHTPVQARLSCLAKDNSIYVLANLGDKKPCNSRDSTCPPNGYFQYNTNVVYNTEGKLVARYHKYHLYSEPQFNVPEKPELVTFNTAFGRFGIFTCFDIFFYDPGVTLVKDFHVDTILFPTAWMNVLPLLTAIEFHSAWAMGMGVNLLVANTHHVSLNMTVVFMHQMVPKCIIMT

SEQ ID NO: 96405 - protein, 219 aa, Homo sapiens
  Payload ID: 19230
  Gene Name: vanin 2
  ENSP ID: ENSP00000387572
MVTSSFPISVAVFALITLQVGTQDSFIAAVYEHAVILPNKTETPVSQEDALNLMNENIDILETAIKQAAEQGARIIVTPEDALYGWKFTRETVFPYLEDIPDPQVNWIPCQDPHRFGHTPVQARLSCLAKDNSIYVLANLGDKKPCNSRDSTCPPNGYFQYNTNVVYNTEGKLVARYHKYHLYSEPQFNVPEKPELVTFNTAFGRKWYLCTKWSQSVSL

SEQ ID NO: 96406 - protein, 216 aa, Homo sapiens
  Payload ID: 19230
  Gene Name: vanin 2
  ENSP ID: ENSP00000406536
MVTSSFPISVAVFALITLQVGTQDSFIAAVYEHAVILPNKTETPVSQEDALNLMNENIDILETAIKQAAEQGARIIVTPEDALYGWKFTRETVFPYLEDIPDPQVNWIPCQDPHRFGHTPVQARLSCLAKDNSIYVLANLGDKKPCNSRDSTCPPNGYFQYNTNVVYNTEGKLVARYHKYHLYSEPQFNVPEKPELVTFNTAFGSLDERFAPFDSY

SEQ ID NO: 96407 - protein, 166 aa, Homo sapiens
  Payload ID: 19230
  Gene Name: vanin 2
  ENSP ID: ENSP00000431451
MVTSSFPISVAVFALITLQVGTQDSFIAAVYEHAVILPNKTETPVSQEDALNLMNENIDILETAIKQAAEQGARIIVTPEDALYGWKFTRETVFPYLEDIPDPQVNWIPCQDPHRFGHTPVQARLSCLAKDNSIYVLANLGDKKPCNSRDSTCPPNGYFQYNTNVV

SEQ ID NO: 96408 - protein, 101 aa, Homo sapiens
  Payload ID: 19230
  Gene Name: vanin 2
  ENSP ID: ENSP00000431680
MVTSSFPISVAVFALITLQVGTQDSFIAAVYEHAVILPNKTETPVSQEDALNLMNENIDILETAIKQAAEQGARIIVTPEDALYGWKFTRETVFPYLEDIP

SEQ ID NO: 96409 - protein, 184 aa, Homo sapiens
  Payload ID: 19230
  Gene Name: vanin 2
  ENSP ID: ENSP00000432516
MVTSSFPISVAVFALITLQVGTQDSFIAAVYEHAVILPNKTETPVSQEDALNLMNENIDILETAIKQAAEQGARIIVTPEDALYGWKFTRETVFPYLEDIPDPQVNWIPCQDPHRFGHTPVQARLSCLAKDNSIYVLANLGDKKPCNSRDSTCPPNGYFQYNTNVVYNTEGKLVARYHKVGKSH

SEQ ID NO: 96410 - protein, 131 aa, Homo sapiens
  Payload ID: 19230
  Gene Name: vanin 2
  ENSP ID: ENSP00000432582
MNENIDILETAIKQAAEQGARIIVTPEDALYGWKFTRETVFPYLEDIPDPQVNWIPCQDPHRFGHTPVQARLSCLAKDNSIYVLANLGDKKPCNSRDSTCPPNGYFQYNTNVVYNTEGKLVARYHKVGKSH

SEQ ID NO: 96411 - protein, 119 aa, Homo sapiens
  Payload ID: 19230
  Gene Name: vanin 2
  ENSP ID: ENSP00000433285
MVTSSFPISVAVFALITLQVGTQDSFIAAVYEHAVILPNKTETPVSQEDALNLMNENIDILETAIKQAAEQGARIIVTPEDALYGWKFTRETVFPYLEDIPDPQVNWIPCQDPHRSAHC

SEQ ID NO: 96412 - protein, 192 aa, Homo sapiens
  Payload ID: 19230
  Gene Name: vanin 2
  Uniprot ID: O95498
  ENSP ID: ENSP00000434077
MVTSSFPISVAVFALITLQVGTQDSFIAAVYEHAVILPNKTETPVSQEDALNLMNENIDILETAIKQAAEQGARIIVTPEDALYGWKFTRETVFPYLEDIPDPQVNWIPCQDPHRFGHTPVQARLSCLAKDNSIYVLANLGDKKPCNSRDSTCPPNGYFQYNTNVVYNTEGKLVARYHKETLQSVKRSFAVI

SEQ ID NO: 96413 - protein, 102 aa, Homo sapiens
  Payload ID: 19230
  Gene Name: vanin 2
  ENSP ID: ENSP00000434210
MNENIDILETAIKQAAEQGARIIVTPEDALYGWKFTRETVFPYLEDIPDPQVNWIPCQDPHRFGHTPVQARLSCLAKDNSIYVLANLGDKKPCNSRDSTCPP

SEQ ID NO: 96414 - protein, 467 aa, Homo sapiens
  Payload ID: 19230
  Gene Name: vanin 2
  Uniprot ID: O95498
  ENSP ID: ENSP00000436822
MNENIDILETAIKQAAEQGARIIVTPEDALYGWKFTRETVFPYLEDIPDPQVNWIPCQDPHRFGHTPVQARLSCLAKDNSIYVLANLGDKKPCNSRDSTCPPNGYFQYNTNVVYNTEGKLVARYHKYHLYSEPQFNVPEKPELVTFNTAFGRFGIFTCFDIFFYDPGVTLVKDFHVDTILFPTAWMNVLPLLTAIEFHSAWAMGMGVNLLVANTHHVSLNMTGSGIYAPNGPKVYHYDMKTELGKLLLSEVDSHPLSSLAYPTAVNWNAYATTIKPFPVQKNTFRGFISRDGFNFTELFENAGNLTVCQKELCCHLSYRMLQKEENEVYVLGAFTGLHGRRRREYWQVCTLLKCKTTNLTTCGRPVETASTRFEMFSLSGTFGTEYVFPEVLLTEIHLSPGKFEVLKDGRLVNKNGSSGPILTVSLFGRWYTKDSLYSSCGTSNSAITYLLIFILLMIIALQNIVML

SEQ ID NO: 96415 - protein, 195 aa, Homo sapiens
  Payload ID: 19230
  Gene Name: vanin 2
  Uniprot ID: O95498
  ENSP ID: ENSP00000436863
MVTSSFPISVAVFALITLQVGTQDSFIAAVYEHAVILPNKTETPVSQEDALNLMNENIDILETAIKQAAEQGARIIVTPEDALYGWKFTRETVFPYLEDIPDPQVNWIPCQDPHRFGHTPVQARLSCLAKDNSIYVLANLGDKKPCNSRDSTCPPNGYFQYNTNVVYNTEGKLVARYHKEVVFMHQMVPKCIIMT

SEQ ID NO: 96416 - protein, 299 aa, Homo sapiens
  Payload ID: 19230
  Gene Name: vanin 2
  Uniprot ID: O95498
  ENSP ID: ENSP00000436935
MVTSSFPISVAVFALITLQVGTQDSFIAAVYEHAVILPNKTETPVSQEDALNLMNENIDILETAIKQAAEQGARIIVTPEDALYGWKFTRETVFPYLEDIPDPQVNWIPCQDPHRFGHTPVQARLSCLAKDNSIYVLANLGDKKPCNSRDSTCPPNGYFQYNTNVVYNTEGKLVARYHKVCTLLKCKTTNLTTCGRPVETASTRFEMFSLSGTFGTEYVFPEVLLTEIHLSPGKFEVLKDGRLVNKNGSSGPILTVSLFGRWYTKDSLYSSCGTSNSAITYLLIFILLMIIALQNIVML

SEQ ID NO: 96417 - protein, 274 aa, Homo sapiens
  Payload ID: 19231
  Gene Name: vanin 3
  Uniprot ID: Q9NY84
  ENSP ID: ENSP00000438024
MIISHFPKCVAVFALLALSVGALDTFIAAVYEHAVILPNRTETPVSKEEALLLMNKNIDVLEKAVKLAAKQGAHIIVTPEDGIYGWIFTRESIYPYLEDIPDPGVNWIPCRDPWRFGNTPVQQRLSCLAKDNSIYVVANIGDKKPCNASDSQCPPDGRYQYNTDVVFDSQGKLLARYHKYNLFAPEIQFDFPKDSELVTFDTPFGKFGIFTCFDIFSHDPAVVVVDEFQLTAFSTPQHGTTRCPSSRLFPSIQHGPRPWESIYLLQIPTTPACT

SEQ ID NO: 96418 - protein, 117 aa, Homo sapiens
  Payload ID: 19231
  Gene Name: vanin 3
  Uniprot ID: Q9NY84
  ENSP ID: ENSP00000438175
MIISHFPKCVAVFALLALSVGALDTFIAAVYEHAVILPNRTETPVSKEEALLLMNKNIDVLEKAVKLAAKQGAHIIVTPEDGIYGWIFTRESIYPYLEDIPDPGVNWIPCRDPWRNH

SEQ ID NO: 96419 - protein, 117 aa, Homo sapiens; identical to SEQ ID NO: 96418
  Payload ID: 19231
  Gene Name: vanin 3
  Uniprot ID: Q9NY84
  ENSP ID: ENSP00000439449

SEQ ID NO: 96420 - protein, 60 aa, Homo sapiens
  Payload ID: 19231
  Gene Name: vanin 3
  ENSP ID: ENSP00000439815
  MOD_RES (1)..(1): Any amino acid
XTRESIYPYLEDIPDPGVNWIPCRDPWRKSKKMNEPVSKELCYHCHSECNQYGQWKLYRT

SEQ ID NO: 96421 - protein, 169 aa, Homo sapiens
  Payload ID: 19231
  Gene Name: vanin 3
  ENSP ID: ENSP00000440245
MIISHFPKCVAVFALLALSVGALDTFIAAVYEHAVILPNRTETPVSKEEALLLMNKNIDVLEKAVKLAAKQQGAHIIVTPEDGIYGWIFTRESIYPYLEDIPDPGVNWIPCRDPWSMVQHAAPPLGCSLPFSMGQGHGSQSTCCKYPQHQHAHDREWNLRPRSSQGVPL

SEQ ID NO: 96422 - protein, 500 aa, Homo sapiens
  Payload ID: 19231
  Gene Name: vanin 3
  ENSP ID: ENSP00000440594
MIISHFPKCVAVFALLALSVGALDTFIAAVYEHAVILPNRTETPVSKEEALLLMNKNIDVLEKAVKLAAKQGAHIIVTPEDGIYGWIFTRESIYPYLEDIPDPGVNWIPCRDPWRFGNTPVQQRLSCLAKDNSIYVVANIGDKKPCNASDSQCPPDGRYQYNTDVVFDSQGKLLARYHKYNLFAPEIQFDFPKDSELVTFDTPFGKFGIFTCFDIFSHDPAVVVVDESIDSILYPTAWYNTLPLLSAVPFHSAWAKAMGVNLLAANTHNTSMHMTGSGIYAPEAVKVYHYDMETESGQLLLSELKSRPRREPTYPAAVDWHAYASSVKPFSSEQSDFLGMIYFDEFTFTKLKRNTGNYTACQKDLCCHLTYKMSEKRTDEIYALGAFDGLHTVEGQYYLQICALLKCQTTDLETCGEPVGSAFTKFEDFSLSGTFGTRYVFPQIILSGSQLAPERHYEISRDGRLRSRSGAPLPVLVMALYGRVFEKDPPRLGQGSGKFQ

SEQ ID NO: 96423 - protein, 147 aa, Homo sapiens
  Payload ID: 19231
  Gene Name: vanin 3
  Uniprot ID: Q9NY84
  ENSP ID: ENSP00000441182
MIISHFPKCVAVFALLALSVGALDTFIAAVYEHAVILPNRTETPVSKEEALLLMNKNIDVLEKAVKLAAKQGAHIIVTPEDGIYGWIFTRESIYPYLEDIPDPGVNWIPCRDPWRKSKKMNEPVSKELCYHCHSECNQYGQWKLYRT

SEQ ID NO: 96424 - protein, 117 aa, Homo sapiens; identical to SEQ ID NO: 96418
  Payload ID: 19231
  Gene Name: vanin 3
  Uniprot ID: Q9NY84
  ENSP ID: ENSP00000443073

SEQ ID NO: 96425 - protein, 129 aa, Homo sapiens
  Payload ID: 19231
  Gene Name: vanin 3
  Uniprot ID: Q9NY84
  ENSP ID: ENSP00000443901
MIISHFPKCVAVFALLALSVGALDTFIAAVYEHAVILPNRTETPVSKEEALLLMNKNIDVLEKAVKLAAKQGAHIIVTPEDGIYGWIFTRESIYPYLEDIPDPGVNWIPCRDPWREWNLRPRSSQGVPL

SEQ ID NO: 96426 - protein, 207 aa, Homo sapiens
  Payload ID: 19231
  Gene Name: vanin 3
  Uniprot ID: Q9NY84
  ENSP ID: ENSP00000444491
MIISHFPKCVAVFALLALSVGALDTFIAAVYEHAVILPNRTETPVSKEEALLLMNKNIDVLEKAVKLAAKQGAHIIVTPEDGIYGWIFTRESIYPYLEDIPDPGVNWIPCRDPWRFGNTPVQQRLSCLAKDNSIYVVANIGDKKPCNASDSQCPPDGRYQYNTDVVFDSQGKLLARYHKGVESTPQKQSRCTTMTWKQRVVSCCYQN

SEQ ID NO: 96427 - protein, 133 aa, Homo sapiens
  Payload ID: 19231
  Gene Name: vanin 3
  Uniprot ID: Q9NY84
  ENSP ID: ENSP00000444505
MIISHFPKCVAVFALLALSVGALDTFIAAVYEHAVILPNRTETPVSKEEALLLMNKNIDVLEKAVKLAAKQGAHIIVTPEDGIYGWIFTRESIYPYLEDIPDPGVNWIPCRDPWSTIFLHLKFSLISPRIQNL

SEQ ID NO: 96428 - protein, 161 aa, Homo sapiens
  Payload ID: 19231
  Gene Name: vanin 3
  Uniprot ID: Q9NY84
  ENSP ID: ENSP00000463583
MIISHFPKCVAVFALLALSVGALDTFIAAVYEHAVILPNRTETPVSKEEALLLMNKNIDVLEKAVKLAAKQVLPFYTCKGDLQFGQRVFGIHDKLFCPTCFEQGAHIIVTPEDGIYGWIFTRESIYPYLEDIPDPGVNWIPCRDPWREWNLRPRSSQGVPL

SEQ ID NO: 96429 - protein, 129 aa, Homo sapiens; identical to SEQ ID NO: 96425
  Payload ID: 19231
  Gene Name: vanin 3
  Uniprot ID: Q9NY84
  ENSP ID: ENSP00000464241

SEQ ID NO: 96430 - protein, 186 aa, Homo sapiens
  Payload ID: 19232
  Gene Name: variable charge, X-linked
  ENSP ID: ENSP00000344144
MSPKPRASGPPAKATEAGKRKSSSQPSPSDPKKKTTKVAKKGKAVRRGRRGKKGAATKMAAVTAPEAESAPAAPGPSDQPSQELPQHELPPEEPVSEGTQHDPLSQEAELEEPLSQESEVEEPLSQESQVEEPLSQESEVEEPLSQESQVEEPLSQESEMEEPLSQESQVEEPPSQESEMEELPSV

SEQ ID NO: 96431 - protein, 206 aa, Homo sapiens
  Payload ID: 19232
  Gene Name: variable charge, X-linked
  Uniprot ID: Q9H320
  ENSP ID: ENSP00000370447
MSPKPRASGPPAKATEAGKRKSSSQPSPSDPKKKTTKVAKKGKAVRRGRRGKKGAATKMAAVTAPEAESAPAAPGPSDQPSQELPQHELPPEEPVSEGTQHDPLSQEAELEEPLSQESEVEEPLSQESQVEEPLSQESEVEEPLSQESQVEEPLSQESEVEEPLSQESQVEEPLSQESEMEEPLSQESQVEEPPSQESEMEELPSV

SEQ ID NO: 96432 - protein, 138 aa, Homo sapiens
  Payload ID: 19232
  Gene Name: variable charge, X-linked
  ENSP ID: ENSP00000484419
MSPKPRASGPPAKATEAGKRKSSSQPSPSDPKKKTTKVAKKGKAVRRGRRGKKGAATKMAAVTAPEAESAPAAPGPSDQPSQELPQHELPPEEPVSEGTQHDPLSQEAELEEPLSQESEVEEPLSVTAKYSPISESSD

SEQ ID NO: 96433 - protein, 139 aa, Homo sapiens [sequence omitted]

SEQ ID NO: 96434 - protein, 186 aa, Homo sapiens
  Payload ID: 19234
  Gene Name: variable charge, X-linked 3A
  Uniprot ID: Q9NNX9
  ENSP ID: ENSP00000370479
MSPKPRASGPPAKATEAGKRKSSSQPSPSDPKKKTTKVAKKGKAVRRGRRGKKGAATKMAAVTAPEAESGPAAPGPSDQPSQELPQHELPPEEPVSEGTQHDPLSQESELEEPLSQESEVEEPLSQESQVEEPLSQESEVEEPLSQESQVEEPLSQESEVEEPLSQESQVEEPLSQESEMEELPSV

SEQ ID NO: 96435 - protein, 166 aa, Homo sapiens
  Payload ID: 19234
  Gene Name: variable charge, X-linked 3A
  ENSP ID: ENSP00000381713
MSPKPRASGPPAKATEAGKRKSSSQPSPSDPKKKTTKVAKKGKAVRRGRRGKKGAATKMAAVTAPEAESGPAAPGPSDQPSQELPQHELPPEEPVSEGTQHDPLSQESELEEPLSQESEVEEPLSQESQVEEPLSQESEVEEPLSQESQVEEPLSQESEMEELPSV

SEQ ID NO: 96436 - protein, 138 aa, Homo sapiens
  Payload ID: 19234
  Gene Name: variable charge, X-linked 3A
  ENSP ID: ENSP00000478811
MSPKPRASGPPAKATEAGKRKSSSQPSPSDPKKKTTKVAKKGKAVRRGRRGKKGAATKMAAVTAPEAESGPAAPGPSDQPSQELPQHELPPEEPVSEGTQHDPLSQESELEEPLSQESEVEEPLSVTASYSPISESSD

SEQ ID NO: 96437 - protein, 214 aa, Homo sapiens
  Payload ID: 19235
  Gene Name: variable charge, X-linked 3B
  ENSP ID: ENSP00000370417
MSPKPRASGPPAKAKEAGKRKSSSQPSPSDPKKKTTKVAKKGKAVRRGRRGKKGAATKMAAVTAPEAESGPAAPGPSDQPSQELPQHELPPEEPVSEVEEPLSQESQVEEPLSQESEVEEPLSQESQVEEPLSQESEVEEPLSQESQVEEPLSQESEVEEPLSQESQVEEPLSQESEMEEPLSQESQVEEPLSQESEMEEPLSQESEMEELPSV

SEQ ID NO: 96438 - protein, 246 aa, Homo sapiens
  Payload ID: 19235
  Gene Name: variable charge, X-linked 3B
  Uniprot ID: Q9H321
  ENSP ID: ENSP00000370420
MSPKPRASGPPAKAKEAGKRKSSSQPSPSDPKKKTTKVAKKGKAVRRGRRGKKGAATKMAAVTAPEAESGPAAPGPSDQPSQELPQHELPPEEPVSEGTQHDPLSQESELEEPLSQESEVEEPLSQESQVEEPLSQESEVEEPLSQESQVEEPLSQESEVEEPLSQESEVEEPLSQESQVEEPLSQESEVEEPLSQESQVEEPLSQESEMEEPLSQESQVEEPLSQESEMEEPLSQESEMEELPSV

SEQ ID NO: 96439 - protein, 186 aa, Homo sapiens
  Payload ID: 19235
  Gene Name: variable charge, X-linked 3B
  ENSP ID: ENSP00000411785
MSPKPRASGPPAKAKEAGKRKSSSQPSPSDPKKKTTKVAKKGKAVRRGRRGKKGAATKMAAVTAPEAESGPAAPGPSDQPSQELPQHELPPEEPVSEGTQHDPLSQESELEEPLSQESEVEEPLSQESQVEEPLSQESEVEEPLSQESQVEEPLSQESEVEEPLSQESEVEEPLSQESEMEELPSV

SEQ ID NO: 96440 - protein, 138 aa, Homo sapiens
  Payload ID: 19235
  Gene Name: variable charge, X-linked 3B
  ENSP ID: ENSP00000414780
MSPKPRASGPPAKAKEAGKRKSSSQPSPSDPKKKTTKVAKKGKAVRRGRRGKKGAATKMAAVTAPEAESGPAAPGPSDQPSQELPQHELPPEEPVSEGTQHDPLSQESELEEPLSQESEVEEPLSVTAKYSPISESSD

SEQ ID NO: 96441 - protein, 125 aa, Homo sapiens
  Payload ID: 19236
  Gene Name: variable charge, Y-linked
  Uniprot ID: O14598
  ENSP ID: ENSP00000250825
MSPKPRASGPPAKAKETGKRKSSSQPSPSGPKKKTTKVAEKGEAVRGGRRGKKGAATKMAAVTAPEAESGPAAPGPSDQPSQELPQHELPPEEPVSEGTQHDPLSQESELEEPLSKGRPSTPLSP

SEQ ID NO: 96442 - protein, 125 aa, Homo sapiens; identical to SEQ ID NO: 96441
  Payload ID: 19237
  Gene Name: variable charge, Y-linked 1B
  Uniprot ID: O14598
  ENSP ID: ENSP00000250823

SEQ ID NO: 96443 - protein, 739 aa, Homo sapiens
  Payload ID: 19238
  Gene Name: vascular cell adhesion molecule 1
  Uniprot ID: P19320
  ENSP ID: ENSP00000294728
MPGKMVVILGASNILWIMFAASQAFKIETTPESRYLAQIGDSVSLTCSTTGCESPFFSWRTQIDSPLNGKVTNEGTTSTLTMNPVSFGNEHSYLCTATCESRKLEKGIQVEIYSFPKDPEIHLSGPLEAGKPITVKCSVADVYPFDRLEIDLLKGDHLMKSQEFLEDADRKSLETKSLEVTFTPVIEDIGKVLVCRAKLHIDEMDSVPTVRQAVKELQVYISPKNTVISVNPSTKLQEGGSVTMTCSSEGLPAPEIFWSKKLDNGNLQHLSGNATLTLIAMRMEDSGIYVCEGVNLIGKNRKEVELIVQEKPFTVEISPGPRIAAQIGDSVMLTCSVMGCESPSFSWRTQIDSPLSGKVRSEGTNSTLTLSPVSFENEHSYLCTVTCGHKKLEKGIQVELYSFPRDPEIEMSGGLVNGSSVTVSCKVPSVYPLDRLEIELLKGETILENIEFLEDTDMKSLENKSLEMTFIPTIEDTGKALVCQAKLHIDDMEFEPKQRQSTQTLYVNVAPRDTTVLVSPSSILEEGSSVNMTCLSQGFPAPKILWSRQLPNGELQPLSENATLTLISTKMEDSGVYLCEGINQAGRSRKEVELIIQVTPKDIKLTAFPSESVKEGDTVIISCTCGNVPETWIILKKKAETGDTVLKSIDGAYTIRKAQLKDAGVYECESKNKVGSQLRSLTLDVQGRENNKDYFSPELLVLYFASSLIIPAIGMIIYFARKANMKGSYSLVEAQKSKV

SEQ ID NO: 96444 - protein, 647 aa, Homo sapiens
  Payload ID: 19238
  Gene Name: vascular cell adhesion molecule 1
  Uniprot ID: P19320
  ENSP ID: ENSP00000304611
MPGKMVVILGASNILWIMFAASQAFKIETTPESRYLAQIGDSVSLTCSTTGCESPFFSWRTQIDSPLNGKVTNEGTTSTLTMNPVSFGNEHSYLCTATCESRKLEKGIQVEIYSFPKDPEIHLSGPLEAGKPITVKCSVADVYPFDRLEIDLLKGDHLMKSQEFLEDADRKSLETKSLEVTFTPVIEDIGKVLVCRAKLHIDEMDSVPTVRQAVKELQVYISPKNTVISVNPSTKLQEGGSVTMTCSSEGLPAPEIFWSKKLDNGNLQHLSGNATLTLIAMRMEDSGIYVCEGVNLIGKNRKEVELIVQAFPRDPEIEMSGGLVNGSSVTVSCKVPSVYPLDRLEIELLKGETILENIEFLEDTDMKSLENKSLEMTFIPTIEDTGKALVCQAKLHIDDMEFEPKQRQSTQTLYVNVAPRDTTVLVSPSSILEEGSSVNMTCLSQGFPAPKILWSRQLPNGELQPLSENATLTLISTKMEDSGVYLCEGINQAGRSRKEVELIIQVTPKDIKLTAFPSESVKEGDTVIISCTCGNVPETWIILKKKAETGDTVLKSIDGAYTIRKAQLKDAGVYECESKNKVGSQLRSLTLDVQGRENNKDYFSPELLVLYFASSLIIPAIGMIIYFARKANMKGSYSLVEAQKSKV

SEQ ID NO: 96445 - protein, 540 aa, Homo sapiens
  Payload ID: 19238
  Gene Name: vascular cell adhesion molecule 1
  ENSP ID: ENSP00000359133
MPGKMVVILGASNILWIMFAASQAFKIETTPESRYLAQIGDSVSLTCSTTGCESPFFSWRTQIDSPLNGKVTNEGTTSTLTMNPVSFGNEHSYLCTATCESRKLEKGIQVEIYSFPKDPEIHLSGPLEAGKPITVKCSVADVYPFDRLEIDLLKGDHLMKSQEFLEDADRKSLETKSLEVTFTPVIEDIGKVLVCRAKLHIDEMDSVPTVRQAVKELQVYISPKNTVISVNPSTKLQEGGSVTMTCSSEGLPAPEIFWSKKLDNGNLQHLSGNATLTLIAMRMEDSGIYVCEGVNLIGKNRKEVELIVQVAPRDTTVLVSPSSILEEGSSVNMTCLSQGFPAPKILWSRQLPNGELQPLSENATLTLISTKMEDSGVYLCEGINQAGRSRKEVELIIQVTPKDIKLTAFPSESVKEGDTVIISCTCGNVPETWIILKKKAETGDTVLKSIDGAYTIRKAQLKDAGVYECESKNKVGSQLRSLTLDVQGRENNKDYFSPELLVLYFASSLIIPAIGMIIYFARKANMKGSYSLVEAQKSKV

SEQ ID NO: 96446 - protein, 677 aa, Homo sapiens
  Payload ID: 19238
  Gene Name: vascular cell adhesion molecule 1
  Uniprot ID: P19320
  ENSP ID: ENSP00000359137
MPGKMVVILGASNILWIMFAASQAFKIETTPESRYLAQIGDSVSLTCSTTGSFPKDPEIHLSGPLEAGKPITVKCSVADVYPFDRLEIDLLKGDHLMKSQEFLEDADRKSLETKSLEVTFTPVIEDIGKVLVCRAKLHIDEMDSVPTVRQAVKELQVYISPKNTVISVNPSTKLQEGGSVTMTCSSEGLPAPEIFWSKKLDNGNLQHLSGNATLTLIAMRMEDSGIYVCEGVNLIGKNRKEVELIVQEKPFTVEISPGPRIAAQIGDSVMLTCSVMGCESPSFSWRTQIDSPLSGKVRSEGTNSTLTLSPVSFENEHSYLCTVTCGHKKLEKGIQVELYSFPRDPEIEMSGGLVNGSSVTVSCKVPSVYPLDRLEIELLKGETILENIEFLEDTDMKSLENKSLEMTFIPTIEDTGKALVCQAKLHIDDMEFEPKQRQSTQTLYVNVAPRDTTVLVSPSSILEEGSSVNMTCLSQGFPAPKILWSRQLPNGELQPLSENATLTLISTKMEDSGVYLCEGINQAGRSRKEVELIIQVTPKDIKLTAFPSESVKEGDTVIISCTCGNVPETWIILKKKAETGDTVLKSIDGAYTIRKAQLKDAGVYECESKNKVGSQLRSLTLDVQGRENNKDYFSPELLVLYFASSLIIPAIGMIIYFARKANMKGSYSLVEAQKSKV

SEQ ID NO: 96447 - protein, 163 aa, Homo sapiens
  Payload ID: 19239
  Gene Name: vascular endothelial growth factor A
  ENSP ID: ENSP00000230480
MAEGGGQNHHEVVKFMDVYQRSYCHPIETLVDIFQEYPDEIEYIFKPSCVPLMRCGGCCNDEGLECVPTEESNITMQIMRIKPHQGQHIGEMSFLQHNKCECRPKKDRARQENPCGPCSERRKHLFVQDPQTCKCSCKNTDSRCKARQLELNERTCRCDKPRR

SEQ ID NO: 96448 - protein, 317 aa, Homo sapiens
  Payload ID: 19239
  Gene Name: vascular endothelial growth factor A
  ENSP ID: ENSP00000317598
LTDRQTDTAPSPSYHLLPGRRRTVDAAASRGQGPEPAPGGGVEGVGARGVALKLFVQLLGCSRFGGAVVRAGEAEPSGAARSASSGREEPQPEEGEEEEEKEEERGPQWRLGARKPGSWTGEAAVCADSAPAARAPQALARASGRGGRVARRGAEESGPPHSPSRRGSASRAGPGRASETMNFLLSWVHWSLALLLYLHHAKWSQAAPMAEGGGQNHHEVVKFMDVYQRSYCHPIETLVDIFQEYPDEIEYIFKPSCVPLMRCGGCCNDEGLECVPTEESNITMQIMRIKPHQGQHIGEMSFLQHNKCECRCDKPRR

SEQ ID NO: 96449 - protein, 412 aa, Homo sapiens
  Payload ID: 19239
  Gene Name: vascular endothelial growth factor A
  ENSP ID: ENSP00000361125
LTDRQTDTAPSPSYHLLPGRRRTVDAAASRGQGPEPAPGGGVEGVGARGVALKLFVQLLGCSRFGGAVVRAGEAEPSGAARSASSGREEPQPEEGEEEEEKEEERGPQWRLGARKPGSWTGEAAVCADSAPAARAPQALARASGRGGRVARRGAEESGPPHSPSRRGSASRAGPGRASETMNFLLSWVHWSLALLLYLHHAKWSQAAPMAEGGGQNHHEVVKFMDVYQRSYCHPIETLVDIFQEYPDEIEYIFKPSCVPLMRCGGCCNDEGLECVPTEESNITMQIMRIKPHQGQHIGEMSFLQHNKCECRPKKDRARQEKKSVRGKGKGQKRKRKKSRYKSWSVYVGARCCLMPWSLPGPHPCGPCSERRKHLFVQDPQTCKCSCKNTDSRCKARQLELNERTCRCDKPRR

SEQ ID NO: 96450 - protein, 327 aa, Homo sapiens
  Payload ID: 19239
  Gene Name: vascular endothelial growth factor A
  ENSP ID: ENSP00000361134
LTDRQTDTAPSPSYHLLPGRRRTVDAAASRGQGPEPAPGGGVEGVGARGVALKLFVQLLGCSRFGGAVVRAGEAEPSGAARSASSGREEPQPEEGEEEEEKEEERGPQWRLGARKPGSWTGEAAVCADSAPAARAPQALARASGRGGRVARRGAEESGPPHSPSRRGSASRAGPGRASETMNFLLSWVHWSLALLLYLHHAKWSQAAPMAEGGGQNHHEVVKFMDVYQRSYCHPIETLVDIFQEYPDEIEYIFKPSCVPLMRCGGCCNDEGLECVPTEESNITMQIMRIKPHQGQHIGEMSFLQHNKCECRPKKDRARQEKCDKPRR

SEQ ID NO: 96451 - protein, 371 aa, Homo sapiens
  Payload ID: 19239
  Gene Name: vascular endothelial growth factor A
  ENSP ID: ENSP00000361137
LTDRQTDTAPSPSYHLLPGRRRTVDAAASRGQGPEPAPGGGVEGVGARGVALKLFVQLLGCSRFGGAVVRAGEAEPSGAARSASSGREEPQPEEGEEEEEKEEERGPQWRLGARKPGSWTGEAAVCADSAPAARAPQALARASGRGGRVARRGAEESGPPHSPSRRGSASRAGPGRASETMNFLLSWVHWSLALLLYLHHAKWSQAAPMAEGGGQNHHEVVKFMDVYQRSYCHPIETLVDIFQEYPDEIEYIFKPSCVPLMRCGGCCNDEGLECVPTEESNITMQIMRIKPHQGQHIGEMSFLQHNKCECRPKKDRARQENPCGPCSERRKHLFVQDPQTCKCSCKNTDSRCKARQLELNERTCRCDKPRR

SEQ ID NO: 96452 - protein, 147 aa, Homo sapiens
  Payload ID: 19239
  Gene Name: vascular endothelial growth factor A
  Uniprot ID: P15692
  ENSP ID: ENSP00000361148
MNFLLSWVHWSLALLLYLHHAKWSQAAPMAEGGGQNHHEVVKFMDVYQRSYCHPIETLVDIFQEYPDEIEYIFKPSCVPLMRCGGCCNDEGLECVPTEESNITMQIMRIKPHQGQHIGEMSFLQHNKCECRPKKDRARQEKCDKPRR

SEQ ID NO: 96453 - protein, 395 aa, Homo sapiens
  Payload ID: 19239
  Gene Name: vascular endothelial growth factor A
  ENSP ID: ENSP00000388465
LTDRQTDTAPSPSYHLLPGRRRTVDAAASRGQGPEPAPGGGVEGVGARGVALKLFVQLLGCSRFGGAVVRAGEAEPSGAARSASSGREEPQPEEGEEEEEKEEERGPQWRLGARKPGSWTGEAAVCADSAPAARAPQALARASGRGGRVARRGAEESGPPHSPSRRGSASRAGPGRASETMNFLLSWVHWSLALLLYLHHAKWSQAAPMAEGGGQNHHEVVKFMDVYQRSYCHPIETLVDIFQEYPDEIEYIFKPSCVPLMRCGGCCNDEGLECVPTEESNITMQIMRIKPHQGQHIGEMSFLQHNKCECRPKKDRARQEKKSVRGKGKGQKRKRKKSRYKSWSVPCGPCSERRKHLFVQDPQTCKCSCKNTDSRCKARQLELNERTCRCDKPRR

SEQ ID NO: 96454 - protein, 354 aa, Homo sapiens
  Payload ID: 19239
  Gene Name: vascular endothelial growth factor A
  ENSP ID: ENSP00000388663
LTDRQTDTAPSPSYHLLPGRRRTVDAAASRGQGPEPAPGGGVEGVGARGVALKLFVQLLGCSRFGGAVVRAGEAEPSGAARSASSGREEPQPEEGEEEEEKEEERGPQWRLGARKPGSWTGEAAVCADSAPAARAPQALARASGRGGRVARRGAEESGPPHSPSRRGSASRAGPGRASETMNFLLSWVHWSLALLLYLHHAKWSQAAPMAEGGGQNHHEVVKFMDVYQRSYCHPIETLVDIFQEYPDEIEYIFKPSCVPLMRCGGCCNDEGLECVPTEESNITMQIMRIKPHQGQHIGEMSFLQHNKCECRPKKDRARQENPCGPCSERRKHLFVQDPQTCKCSCKNTDSRCKM

SEQ ID NO: 96455 - protein, 389 aa, Homo sapiens
  Payload ID: 19239
  Gene Name: vascular endothelial growth factor A
  ENSP ID: ENSP00000389864
LTDRQTDTAPSPSYHLLPGRRRTVDAAASRGQGPEPAPGGGVEGVGARGVALKLFVQLLGCSRFGGAVVRAGEAEPSGAARSASSGREEPQPEEGEEEEEKEEERGPQWRLGARKPGSWTGEAAVCADSAPAARAPQALARASGRGGRVARRGAEESGPPHSPSRRGSASRAGPGRASETMNFLLSWVHWSLALLLYLHHAKWSQAAPMAEGGGQNHHEVVKFMDVYQRSYCHPIETLVDIFQEYPDEIEYIFKPSCVPLMRCGGCCNDEGLECVPTEESNITMQIMRIKPHQGQHIGEMSFLQHNKCECRPKKDRARQEKKSVRGKGKGQKRKRKKSRPCGPCSERRKHLFVQDPQTCKCSCKNTDSRCKARQLELNERTCRCDKPRR

SEQ ID NO: 96456 - protein, 137 aa, Homo sapiens
  Payload ID: 19239
  Gene Name: vascular endothelial growth factor A
  Uniprot ID: P15692
  ENSP ID: ENSP00000409911
MNFLLSWVHWSLALLLYLHHAKWSQAAPMAEGGGQNHHEVVKFMDVYQRSYCHPIETLVDIFQEYPDEIEYIFKPSCVPLMRCGGCCNDEGLECVPTEESNITMQIMRIKPHQGQHIGEMSFLQHNKCECRCDKPRR

SEQ ID NO: 96457 - protein, 371 aa, Homo sapiens
  Payload ID: 19239
  Gene Name: vascular endothelial growth factor A
  ENSP ID: ENSP00000421561
LTDRQTDTAPSPSYHLLPGRRRTVDAAASRGQGPEPAPGGGVEGVGARGVALKLFVQLLGCSRFGGAVVRAGEAEPSGAARSASSGREEPQPEEGEEEEEKEEERGPQWRLGARKPGSWTGEAAVCADSAPAARAPQALARASGRGGRVARRGAEESGPPHSPSRRGSASRAGPGRASETMNFLLSWVHWSLALLLYLHHAKWSQAAPMAEGGGQNHHEVVKFMDVYQRSYCHPIETLVDIFQEYPDEIEYIFKPSCVPLMRCGGCCNDEGLECVPTEESNITMQIMRIKPHQGQHIGEMSFLQHNKCECRPKKDRARQENPCGPCSERRKHLFVQDPQTCKCSCKNTDSRCKARQLELNERTCRSLTRKD

SEQ ID NO: 96458 - protein, 215 aa, Homo sapiens
  Payload ID: 19239
  Gene Name: vascular endothelial growth factor A
  Uniprot ID: P15692
  ENSP ID: ENSP00000428321
MNFLLSWVHWSLALLLYLHHAKWSQAAPMAEGGGQNHHEVVKFMDVYQRSYCHPIETLVDIFQEYPDEIEYIFKPSCVPLMRCGGCCNDEGLECVPTEESNITMQIMRIKPHQGQHIGEMSFLQHNKCECRPKKDRARQEKKSVRGKGKGQKRKRKKSRYKSWSVPCGPCSERRKHLFVQDPQTCKCSCKNTDSRCKARQLELNERTCRCDKPRR

SEQ ID NO: 96459 - protein, 174 aa, Homo sapiens
  Payload ID: 19239
  Gene Name: vascular endothelial growth factor A
  Uniprot ID: P15692
  ENSP ID: ENSP00000429008
MNFLLSWVHWSLALLLYLHHAKWSQAAPMAEGGGQNHHEVVKFMDVYQRSYCHPIETLVDIFQEYPDEIEYIFKPSCVPLMRCGGCCNDEGLECVPTEESNITMQIMRIKPHQGQHIGEMSFLQHNKCECRPKKDRARQENPCGPCSERRKHLFVQDPQTCKCSCKNTDSRCKM

SEQ ID NO: 96460 - protein, 111 aa, Homo sapiens
  Payload ID: 19239
  Gene Name: vascular endothelial growth factor A
  ENSP ID: ENSP00000429592
APMAEGGGQNHHEVVKFMDVYQRSYCHPIETLVDIFQEYPDEIEYIFKPSCVPLMRCGGCCNDEGLECVPTEESNITMQTCKCSCKNTDSRCKARQLELNERTCRCDKPRR

SEQ ID NO: 96461 - protein, 191 aa, Homo sapiens
  Payload ID: 19239
  Gene Name: vascular endothelial growth factor A
  Uniprot ID: P15692
  ENSP ID: ENSP00000429643
MNFLLSWVHWSLALLLYLHHAKWSQAAPMAEGGGQNHHEVVKFMDVYQRSYCHPIETLVDIFQEYPDEIEYIFKPSCVPLMRCGGCCNDEGLECVPTEESNITMQIMRIKPHQGQHIGEMSFLQHNKCECRPKKDRARQENPCGPCSERRKHLFVQDPQTCKCSCKNTDSRCKARQLELNERTCRCDKPRR

SEQ ID NO: 96462 - protein, 191 aa, Homo sapiens
  Payload ID: 19239
  Gene Name: vascular endothelial growth factor A
  Uniprot ID: P15692
  ENSP ID: ENSP00000430002
MNFLLSWVHWSLALLLYLHHAKWSQAAPMAEGGGQNHHEVVKFMDVYQRSYCHPIETLVDIFQEYPDEIEYIFKPSCVPLMRCGGCCNDEGLECVPTEESNITMQIMRIKPHQGQHIGEMSFLQHNKCECRPKKDRARQENPCGPCSERRKHLFVQDPQTCKCSCKNTDSRCKARQLELNERTCRSLTRKD

SEQ ID NO: 96463 - protein, 232 aa, Homo sapiens
  Payload ID: 19239
  Gene Name: vascular endothelial growth factor A
  Uniprot ID: P15692
  ENSP ID: ENSP00000430479
MNFLLSWVHWSLALLLYLHHAKWSQAAPMAEGGGQNHHEVVKFMDVYQRSYCHPIETLVDIFQEYPDEIEYIFKPSCVPLMRCGGCCNDEGLECVPTEESNITMQIMRIKPHQGQHIGEMSFLQHNKCECRPKKDRARQEKKSVRGKGKGQKRKRKKSRYKSWSVYVGARCCLMPWSLPGPHPCGPCSERRKHLFVQDPQTCKCSCKNTDSRCKARQLELNERTCRCDKPRR

SEQ ID NO: 96464 - protein, 323 aa, Homo sapiens
  Payload ID: 19239
  Gene Name: vascular endothelial growth factor A
  ENSP ID: ENSP00000430594
  MOD_RES (1)..(1): Any amino acid
XRGQGPEPAPGGGVEGVGARGVALKLFVQLLGCSRFGGAVVRAGEAEPSGAARSASSGREEPQPEEGEEEEEKEEERGPQWRLGARKPGSWTGEAAVCADSAPAARAPQALARASGRGGRVARRGAEESGPPHSPSRRGSASRAGPGRASETMNFLLSWVHWSLALLLYLHHAKWSQAAPMAEGGGQNHHEVVKFMDVYQRSYCHPIETLVDIFQEYPDEIEYIFKPSCVPLMRCGGCCNDEGLECVPTEESNITMQIMRIKPHQGQHIGEMSFLQHNKCECRPKKDRARQEKKSVRGKGKGQKRKRKKSRYKSWSVCDKPRR

SEQ ID NO: 96465 - protein, 209 aa, Homo sapiens
  Payload ID: 19239
  Gene Name: vascular endothelial growth factor A
  Uniprot ID: P15692
  ENSP ID: ENSP00000430829
MNFLLSWVHWSLALLLYLHHAKWSQAAPMAEGGGQNHHEVVKFMDVYQRSYCHPIETLVDIFQEYPDEIEYIFKPSCVPLMRCGGCCNDEGLECVPTEESNITMQIMRIKPHQGQHIGEMSFLQHNKCECRPKKDRARQEKKSVRGKGKGQKRKRKKSRPCGPCSERRKHLFVQDPQTCKCSCKNTDSRCKARQLELNERTCRCDKPRR

SEQ ID NO: 96466 - protein, 327 aa, Homo sapiens; identical to SEQ ID NO: 96450
  Payload ID: 19239
  Gene Name: vascular endothelial growth factor A
  ENSP ID: ENSP00000478034

SEQ ID NO: 96467 - protein, 412 aa, Homo sapiens; identical to SEQ ID NO: 96449
  Payload ID: 19239
  Gene Name: vascular endothelial growth factor A
  ENSP ID: ENSP00000478570

SEQ ID NO: 96468 - protein, 371 aa, Homo sapiens; identical to SEQ ID NO: 96451
  Payload ID: 19239
  Gene Name: vascular endothelial growth factor A
  ENSP ID: ENSP00000483241

SEQ ID NO: 96469 - protein, 317 aa, Homo sapiens; identical to SEQ ID NO: 96448
  Payload ID: 19239
  Gene Name: vascular endothelial growth factor A
  ENSP ID: ENSP00000484284

SEQ ID NO: 96470 - protein, 207 aa, Homo sapiens
  Payload ID: 19240
  Gene Name: vascular endothelial growth factor B
  Uniprot ID: P49765
  ENSP ID: ENSP00000311127
MSPLLRRLLLAALLQLAPAQAPVSQPDAPGHQRKVVSWIDVYTRATCQPREVVVPLTVELMGTVAKQLVPSCVTVQRCGGCCPDDGLECVPTGQHQVRMQILMIRYPSSQLGEMSLEEHSQCECRPKKKDSAVKPDRAATPHHRPQPRSVPGWDSAPGAPSPADITHPTPAPGPSAHAAPSTTSALTPGPAAAAADAAASSVAKGGA

SEQ ID NO: 96471 - protein, 188 aa, Homo sapiens
  Payload ID: 19240
  Gene Name: vascular endothelial growth factor B
  Uniprot ID: P49765
  ENSP ID: ENSP00000401550
MSPLLRRLLLAALLQLAPAQAPVSQPDAPGHQRKVVSWIDVYTRATCQPREVVVPLTVELMGTVAKQLVPSCVTVQRCGGCCPDDGLECVPTGQHQVRMQILMIRYPSSQLGEMSLEEHSQCECRPKKKDSAVKPDSPRPLCPRCTQHHQRPDPRTCRCRCRRRSFLRCQGRGLELNPDTCRCRKLRR

SEQ ID NO: 96472 - protein, 32 aa, Homo sapiens
  Payload ID: 19240
  Gene Name: vascular endothelial growth factor B
  ENSP ID: ENSP00000442526
  MOD_RES (1)..(1): Any amino acid
XHAAPSTTSALTPGPAAAAADAAASSVAKGGA

SEQ ID NO: 96473 - protein, 419 aa, Homo sapiens
  Payload ID: 19241
  Gene Name: vascular endothelial growth factor C
  Uniprot ID: P49767
  ENSP ID: ENSP00000480043
MHLLGFFSVACSLLAAALLPGPREAPAAAAAFESGLDLSDAEPDAGEATAYASKDLEEQLRSVSSVDELMTVLYPEYWKMYKCQLRKGGWQHNREQANLNSRTEETIKFAAAHYNTEILKSIDNEWRKTQCMPREVCIDVGKEFGVATNTFFKPPCVSVYRCGGCCNSEGLQCMNTSTSYLSKTLFEITVPLSQGPKPVTISFANHTSCRCMSKLDVYRQVHSIIRRSLPATLPQCQAANKTCPTNYMWNNHICRCLAQEDFMFSSDAGDDSTDGFHDICGPNKELDEETCQCVCRAGLRPASCGPHKELDRNSCQCVCKNKLFPSQCGANREFDENTCQCVCKRTCPRNQPLNPGKCACECTESPQKCLLKGKKFHHQTCSCYRRPCTNRQKACEPGFSYSEEVCRCVPSYWKRPQMS

SEQ ID NO: 96474 - protein, 340 aa, Homo sapiens
  Payload ID: 19242
  Gene Name: vascular endothelial zinc finger 1
  ENSP ID: ENSP00000258963
  MOD_RES (1)..(1): Any amino acid
XLNRHKLSHSDEKPFECPICNQRFKRKDRMTYHVRSHEGGITKPYTCSVCGKGFSRPDHLSCHVKHVHSTERPFKCQFSSLMQTCTAAFATKDRLRTHMVRHEGKVSCNICGKLLSAAYITSHLKTHGQSQSINCNTCKQGISKTCMSEETSNQKQQQQQQQQQQQQQQQQQQHVTSWPGKQVETLRLWEEAVKARKKEAANLCQTSTAATTPVTLTTPFSITSSVSSGTMSNPVTVAAAMSMRSPVNVSSAVNITSPMNIGHPVTITSPLSMTSPLTLTTPVNLPTPVTAPVNIAHPVTITSPMNLPTPMTLAAPLNIAMRPVESMPFLPQALPTSPPW

SEQ ID NO: 96475 - protein, 521 aa, Homo sapiens
  Payload ID: 19242
  Gene Name: vascular endothelial zinc finger 1
  Uniprot ID: Q14119
  ENSP ID: ENSP00000462337
MEANWTAFLFQAHEASHHQQQAAQNSLLPLLSSAVEPPDQKPLLPIPITQKPQGAPETLKDAIGIKKEKPKTSFVCTYCSKAFRDSYHLRRHESCHTGIKLVSRPKKTPTTVVPLISTIAGDSSRTSLVSTIAGILSTVTTSSSGTNPSSSASTTAMPVTQSVKKPSKPVKKNHACEMCGKAFRDVYHLNRHKLSHSDEKPFECPICNQRFKRKDRMTYHVRSHEGGITKPYTCSVCGKGFSRPDHLSCHVKHVHSTERPFKCQTCTAAFATKDRLRTHMVRHEGKVSCNICGKLLSAAYITSHLKTHGQSQSINCNTCKQGISKTCMSEETSNQKQQQQQQQQQQQQQQQQQQHVTSWPGKQVETLRLWEEAVKARKKEAANLCQTSTAATTPVTLTTPFSITSSVSSGTMSNPVTVAAAMSMRSPVNVSSAVNITSPMNIGHPVTITSPLSMTSPLTLTTPVNLPTPVTAPVNIAHPVTITSPMNLPTPMTLAAPLNIAMRPVESMPFLPQALPTSPPW

SEQ ID NO: 96476 - protein, 16 aa, Homo sapiens
  Payload ID: 19242
  Gene Name: vascular endothelial zinc finger 1
  ENSP ID: ENSP00000463631
MPVTQSVKKPSKPVKK

SEQ ID NO: 96477 - protein, 512 aa, Homo sapiens
  Payload ID: 19242
  Gene Name: vascular endothelial zinc finger 1
  ENSP ID: ENSP00000464687
MAAHEASHHQQQAAQNSLLPLLSSAVEPPDQKPLLPIPITQKPQGAPETLKDAIGIKKEKPKTSFVCTYCSKAFRDSYHLRRHESCHTGIKLVSRPKKTPTTVVPLISTIAGDSSRTSLVSTIAGILSTVTTSSSGTNPSSSASTTAMPVTQSVKKPSKPVKKNHACEMCGKAFRDVYHLNRHKLSHSDEKPFECPICNQRFKRKDRMTYHVRSHEGGITKPYTCSVCGKGFSRPDHLSCHVKHVHSTERPFKCQTCTAAFATKDRLRTHMVRHEGKVSCNICGKLLSAAYITSHLKTHGQSQSINCNTCKQGISKTCMSEETSNQKQQQQQQQQQQQQQQQQQQHVTSWPGKQVETLRLWEEAVKARKKEAANLCQTSTAATTPVTLTTPFSITSSVSSGTMSNPVTVAAAMSMRSPVNVSSAVNITSPMNIGHPVTITSPLSMTSPLTLTTPVNLPTPVTAPVNIAHPVTITSPMNLPTPMTLAAPLNIAMRPVESMPFLPQALPTSPPW

SEQ ID NO: 96478 - protein, 169 aa, Homo sapiens
  Payload ID: 19243
  Gene Name: vasoactive intestinal peptide
  Uniprot ID: P01282
  ENSP ID: ENSP00000356212
MDTRNKAQLLVLLTLLSVLFSQTSAWPLYRAPSALRLGDRIPFEGANEPDQVSLKEDIDMLQNALAENDTPYYDVSRNARHADGVFTSDFSKLLGQLSAKKYLESLMGKRVSNISEDPVPVKRHSDAVFTDNYTRLRKQMAVKKYLNSILNGKRSSEGESPDFPEELEK

SEQ ID NO: 96479 - protein, 170 aa, Homo sapiens
  Payload ID: 19243
  Gene Name: vasoactive intestinal peptide
  Uniprot ID: P01282
  ENSP ID: ENSP00000356213
MDTRNKAQLLVLLTLLSVLFSQTSAWPLYRAPSALRLGDRIPFEGANEPDQVSLKEDIDMLQNALAENDTPYYDVSRNARHADGVFTSDFSKLLGQLSAKKYLESLMGKRVSSNISEDPVPVKRHSDAVFTDNYTRLRKQMAVKKYLNSILNGKRSSEGESPDFPEELEK

SEQ ID NO: 96480 - protein, 119 aa, Homo sapiens
  Payload ID: 19243
  Gene Name: vasoactive intestinal peptide
  ENSP ID: ENSP00000410356
  MOD_RES (1)..(1): Any amino acid
XVSLKEDIDMLQNALAENDTPYYDVSRNARHADGVFTSDFSKLLGQLSAKKYLESLMGKRVSSNISEDPVPVKRHSDAVFTDNYTRLRKQMAVKKYLNSILNGKRSEGESPDFPEELEK

SEQ ID NO: 96481 - protein, 457 aa, Homo sapiens
  Payload ID: 19244
  Gene Name: vasoactive intestinal peptide receptor 1
  Uniprot ID: P32241
  ENSP ID: ENSP00000327246
MRPPSPLPARWLCVLAGALAWALGPAGGQAARLQEECDYVQMIEVQHKQCLEEAQLENETIGCSKMWDNLTCWPATPRGQVVVLACPLIFKLFSSIQGRNVSRSCTDEGWTHLEPGPYPIACGLDDKAASLDEQQTMFYGSVKTGYTIGYGLSLATLLVATAILSLFRKLHCTRNYIHMHLFISFILRAAAVFIKDLALFDSGESDQCSEGSVGCKAAMVFFQYCVMANFFWLLVEGLYLYTLLAVSFFSERKYFWGYILIGWGVPSTFTMVWTIARIHFEDYGCWDTINSSLWWIIKGPILTSILVNFILFICIIRILLQKLRPPDIRKSDSSPYSRLARSTLLLIPLFGVHYIMFAFFPDNFKPEVKMVFELVVGSFQGFVVAILYCFLNGEVQAELRRKWRRWHLQGVLGWNPKYRHPSGGSNGATCSTQVSMLTRVSPGARRSSSFQAEVSLV

SEQ ID NO: 96482 - protein, 45 aa, Homo sapiens
  Payload ID: 19244
  Gene Name: vasoactive intestinal peptide receptor 1
  ENSP ID: ENSP00000388479
MRPPSPLPARWLCVLAGALAWALGPAAAARCGTTSPAGQPPLGAR

SEQ ID NO: 96483 - protein, 45 aa, Homo sapiens; identical to SEQ ID NO: 96482
  Payload ID: 19244
  Gene Name: vasoactive intestinal peptide receptor 1
  ENSP ID: ENSP00000393215

SEQ ID NO: 96484 - protein, 416 aa, Homo sapiens
  Payload ID: 19244
  Gene Name: vasoactive intestinal peptide receptor 1
  Uniprot ID: P32241
  ENSP ID: ENSP00000394950
MIEVQHKQCLEEAQLENETIGCSKMWDNLTCWPATPRGQVVVLACPLIFKLFSSIQGRNVSRSCTDEGWTHLEPGPYPIACGLDDKAASLDEQQTMFYGSVKTGYTIGYGLSLATLLVATAILSLFRKLHCTRNYIHMHLFISFILRAAAVFIKDLALFDSGESDQCSEGSVGCKAAMVFFQYCVMANFFWLLVEGLYLYTLLAVSFFSERKYFWGYILIGWGVPSTFTMVWTIARIHFEDYGCWDTINSSLWWIIKGPILTSILVNFILFICIIRILLQKLRPPDIRKSDSSPYSRLARSTLLLIPLFGVHYIMFAFFPDNFKPEVKMVFELVVGSFQGFVVAILYCFLNGEVQAELRRKWRRWHLQGVLGWNPKYRHPSGGSNGATCSTQVSMLTRVSPGARRSSSFQAEVSLV

SEQ ID NO: 96485 - protein, 45 aa, Homo sapiens; identical to SEQ ID NO: 96482
  Payload ID: 19244
  Gene Name: vasoactive intestinal peptide receptor 1
  ENSP ID: ENSP00000396204

SEQ ID NO: 96486 - protein, 219 aa, Homo sapiens
  Payload ID: 19244
  Gene Name: vasoactive intestinal peptide receptor 1
  ENSP ID: ENSP00000403478
MRPPSPLPARWLCVLAGALAWALGPAGGQAARLQEECDYVQMIEVQHKQCLEEAQLENETIGCSKMWDNLTCWPATPRGQVVVLACPLIFKLFSSIQGRNVSRSCTDEGWTHLEPGPYPIACGLDDKAASLDEQQTMFYGSVKTGYTIGYGLSLATLLVATAILSLFRWAVRQPWSFSNIVSWLTSSGCWWRASTCTPCLPSPSSLSGSTSGGTYSSAG

SEQ ID NO: 96487 - protein, 45 aa, Homo sapiens; identical to SEQ ID NO: 96482
  Payload ID: 19244
  Gene Name: vasoactive intestinal peptide receptor 1
  ENSP ID: ENSP00000403680

SEQ ID NO: 96488 - protein, 126 aa, Homo sapiens
  Payload ID: 19244
  Gene Name: vasoactive intestinal peptide receptor 1
  ENSP ID: ENSP00000415013
MIEVQHKQCLEEAQLENETIGCSKMWDNLTCWPATPRGQVVVLACPLIFKLFSSIQGRNVSRSCTDEGWTHLEPGPYPIACGLDDKAASLDEQQTMFYGSVKTGYTIGYGLSLATLLVATAILSLF

SEQ ID NO: 96489 - protein, 247 aa, Homo sapiens
  Payload ID: 19244
  Gene Name: vasoactive intestinal peptide receptor 1
  Uniprot ID: P32241
  ENSP ID: ENSP00000415371
MTRQRVWMRWAVRQPWSFSNIVSWLTSSGCWWRASTCTPCLPSPSSLSGSTSGGVPSTFTMVWTIARIHFEDYGCWDTINSSLWWIIKGPILTSILVNFILFICIIRILLQKLRPPDIRKSDSSPYSRLARSTLLLIPLFGVHYIMFAFFPDNFKPEVKMVFELVVGSFQGFVVAILYCFLNGEVQAELRRKWRRWHLQGVLGWNPKYRHPSGGSNGATCSTQVSMLTRVSPGARRSSSFQAEVSLV

SEQ ID NO: 96490 - protein, 409 aa, Homo sapiens
  Payload ID: 19244
  Gene Name: vasoactive intestinal peptide receptor 1
  Uniprot ID: P32241
  ENSP ID: ENSP00000445701
MRAGRRPRLGPWAGGCSKMWDNLTCWPATPRGQVVVLACPLIFKLFSSIQGRNVSRSCTDEGWTHLEPGPYPIACGLDDKAASLDEQTMFYGSVKTGYTIGYGLSLATLLVATAILSLFRKLHCTRNYIHMHLFISFILRAAAVFIKDLALFDSGESDQCSEGSVGCKAAMVFFQYCVMANFFWLLVEGLYLYTLLAVSFFSERKYFWGYILIGWGVPSTFTMVWTIARIHFEDYGCWDTINSSLWWIIKGPILTSILVNFILFICIIRILLQKLRPPDIRKSDSSPYSRLARSTLLLIPLFGVHYIMFAFFPDNFKPEVKMVFELVVGSFQGFVVAILYCFLNGEVQAELRRKWRRWHLQGVLGWNPKYRHPSGGSNGATCSTQVSMLTRVSPGARRSSSFQAEVSLV

SEQ ID NO: 96491 - protein, 438 aa, Homo sapiens
  Payload ID: 19245
  Gene Name: vasoactive intestinal peptide receptor 2
  Uniprot ID: P41587
  ENSP ID: ENSP00000262178
MRTLLPPALLTCWLLAPVNSIHPECRFHLEIQEEETKCAELLRSQTEKHKACSGVWDNITCWRPANVGETVTVPCPKVFSNFYSKAGNISKNCTSDGWSETFPDFVDACGYSDPEDESKITFYILVKAIYTLGYSVSLMSLATGSIILCLFRKLHCTRNYIHLNLFLSFILRAISVLVKDDVLYSSSGTLHCPDQPSSWVGCKLSLVFLQYCIMANFFWLLVEGLYLHTLLVAMLPPRRCFLAYLLIGWGLPTVCIGAWTAARLYLEDTGCWDTNDHSVPWWVIRIPILISIIVNFVLFISIIRILLQKLTSPDVGGNDQSQYKRLAKSTLLLIPLFGVHYMVFAVFPISISSKYQILFELCLGSFQGLVVAVLYCFLNSEVQCELKRKWRSRCPTPSASRDYRVCGSSFSRNGSEGALQFHRGSRAQSFLQTETSVI

SEQ ID NO: 96492 - protein, 422 aa, Homo sapiens
  Payload ID: 19245
  Gene Name: vasoactive intestinal peptide receptor 2
  Uniprot ID: P41587
  ENSP ID: ENSP00000366860
MPLWEAPSDHPANPPATLQGHTSLPGCQEEPARDPQSGLPQITSESSSFSEGSLPSWSSGPAGAKLNASHEGIGSSSDGNGDSKAATERVVSAMDTVRRKHPEITFYILVKAIYTLGYSVSLMSLATGSIILCLFRKLHCTRNYIHLNLFLSFILRAISVLVKDDVLYSSSGTLHCPDQPSSWVGCKLSLVFLQYCIMANFFWLLVEGLYLHTLLVAMLPPRRCFLAYLLIGWGLPTVCIGAWTAARLYLEDTGCWDTNDHSVPWWVIRIPILISIIVNFVLFISIIRILLQKLTSPDVGGNDQSQYKRLAKSTLLLIPLFGVHYMVFAVFPISISSKYQILFELCLGSFQGLVVAVLYCFLNSEVQCELKRKWRSRCPTPSASRDYRVCGSSFSRNGSEGALQFHRGSRAQSFLQTETSVI

SEQ ID NO: 96493 - protein, 579 aa, Homo sapiens
  Payload ID: 19245
  Gene Name: vasoactive intestinal peptide receptor 2
  ENSP ID: ENSP00000384497
MRTLLPPALLTCWLLAPVSAPATPAPRRLGPGSPLPRRALLPPVFAFLPGAGARAGSGRGSGVARGPELPPGEREALSSGPAGLRDSGWEAACALPRAPPSGVCWKRDRFFLDASTMSSFGAVPGAGSCGRLRGLRVSRGDRGWRWPQMPLGPSLYLLVNSIHPECRFHLEIQEEETKCAELLRSQTEKHKACSGVWDNITCWRPANVGETVTVPCPKVFSNFYSKAGNISKNCTSDGWSETFPDFVDACGYSDPEDESKITFYILVKAIYTLGYSVSLMSLATGSIILCLFRKLHCTRNYIHLNLFLSFILRAISVLVKDDVLYSSSGTLHCPDQPSSWVGCKLSLVFLQYCIMANFFWLLVEGLYLHTLLVAMLPPRRCFLAYLLIGWGLPTVCIGAWTAARLYLEDTGCWDTNDHSVPWWVIRIPILISIIVNFVLFISIIRILLQKLTSPDVGGNDQSQYKRLAKSTLLLIPLFGVHYMVFAVFPISISSKYQILFELCLGSFQGLVVAVLYCFLNSEVQCELKRKWRSRCPTPSASRDYRVCGSSFSRNGSEGALQFHRGSRAQSFLQTETSVI

SEQ ID NO: 96494 - protein, 77 aa, Homo sapiens
  Payload ID: 19245
  Gene Name: vasoactive intestinal peptide receptor 2
  ENSP ID: ENSP00000402690
MRTLLPPALLTCWLLAPVNSIHPECRFHLEIQEEETKCAELLRSQTEKHKGHTKGFILIHAGGLKRILDPHTYPLAP

SEQ ID NO: 96495 - protein, 380 aa, Homo sapiens
  Payload ID: 19246
  Gene Name: vasodilator-stimulated phosphoprotein
  Uniprot ID: P50552
  ENSP ID: ENSP00000245932
MSETVICSSRATVMLYDDGNKRWLPAGTGPQAFSRVQIYHNPTANSFRVVGRKMQPDQQVVINCAIVRGVKYNQATPNFHQWRDARQVWGLNFGSKEDAAQFAAGMASALEALEGGGPPPPPALPTWSVPNGPSPEEVEQQKRQQPGPSEHIERRVSNAGGPPAPPAGGPPPPPGPPPPPGPPPPPGLPPSGVPAAAHGAGGGPPPAPPLPAAQGPGGGGAGAPGLAAAIAGAKLRKVSKQEEASGGPTAPKAESGRSGGGGLMEEMNAMLARRRKATQVGEKTPKDESANQEEPEARVPAQSESVRRPWEKNSTTLPRMKSSSSVTTSETQPCTPSSSDYSDLQRVKQELLEEVKKELQKVKEEIIEAFVQELRKRGSP

SEQ ID NO: 96496 - protein, 46 aa, Homo sapiens
  Payload ID: 19246
  Gene Name: vasodilator-stimulated phosphoprotein
  ENSP ID: ENSP00000464742
MSETVICSSRATVMLYDDGNKRWLPAGTGPQAWPQLLLEPNSGKSA

SEQ ID NO: 96497 - protein, 183 aa, Homo sapiens
  Payload ID: 19246
  Gene Name: vasodilator-stimulated phosphoprotein
  ENSP ID: ENSP00000466319
  MOD_RES (1)..(1): Any amino acid
XAKLRKVSKQEEASGGPTAPKAESGRSGGGGLMEEMNAMLARRRKATQVGEKTPKDESANQEEPEARVPAQSESVRRPWEKNSTTLPRMKSSSSVTTSETQPCTPSSSDYSDLQRVKQMSALNSFRTLTQLSITNWSWQEAGMRLPTLVLDVLQYFSGSKDPEFSPRILQSLCDLDSDVMVSM

SEQ ID NO: 96498 - protein, 103 aa, Homo sapiens
  Payload ID: 19246
  Gene Name: vasodilator-stimulated phosphoprotein
  ENSP ID: ENSP00000467005
MSETVICSSRATVMLYDDGNKRWLPAGTGPQAFSRVQIYHNPTANSFRVVGRKMQPDQQVVINCAIVRGVNWGPRPGRSYCWSQTQESQQAGGGLRGAHSPQS

SEQ ID NO: 96499 - protein, 59 aa, Homo sapiens
  Payload ID: 19246
  Gene Name: vasodilator-stimulated phosphoprotein
  ENSP ID: ENSP00000467061
MSETVICSSRATVMLYDDGNKRWLPAGTGPQAFSRVQIYHNPTANSFRVVGRKMQPDQQ

SEQ ID NO: 96500 - protein, 35 aa, Homo sapiens
  Payload ID: 19246
  Gene Name: vasodilator-stimulated phosphoprotein
  ENSP ID: ENSP00000467773
MRQQPGPSEHIERRVSNAGGPPAPPAGGPPPPPGP

SEQ ID NO: 96501 - protein, 365 aa, Homo sapiens
  Payload ID: 19247
  Gene Name: vasohibin 1
  Uniprot ID: Q7L8A9
  ENSP ID: ENSP00000167106
MPGGKKVAGGGSSGATPTSAAATAPSGVRRLETSEGTSAQRDEEPEEEGEEDLRDGGVPFFVNRGGLPVDEATWERMWKHVAKIHPDGEKVAQRIRGATDLPKIPIPSVPTFQPSTPVPERLEAVQRYIRELQYNHTGTQFFEIKKSRPLTGLMDLAKEMTKEALPIKCLEAVILGIYLTNSMPTLERFPISFKTYFSGNYFRHIVLGVNFAGRYGALGMSRREDLMYKPPAFRTLSELVLDFEAAYGRCWHVLKKVKLGQSVSHDPHSVEQIEWKHSVLDVERLGRDDFRKELERHARDMRLKIGKGTGPPSPTKDRKKDVSSPQRAQSSPHRRNSRSERRPSGDKKTSEPKAMPDLNGYQIRV

SEQ ID NO: 96502 - protein, 204 aa, Homo sapiens
  Payload ID: 19247
  Gene Name: vasohibin 1
  Uniprot ID: Q7L8A9
  ENSP ID: ENSP00000451613
MPGGKKVAGGGSSGATPTSAAATAPSGVRRLETSEGTSAQRDEEPEEEGEEDLRDGGVPFFVNRGGLPVDEATWERMWKHVAKIHPDGEKVAQRIRGATDLPKIPIPSVPTFQPSTPVPERLEAVQRYIRELQYNHTGTQFFEIKKSRPLTGLMDLAKEMTKEALPIKCLEAVILGMYPSSPEGEGSGLLWASASCSESEGGVG

SEQ ID NO: 96503 - protein, 91 aa, Homo sapiens
  Payload ID: 19247
  Gene Name: vasohibin 1
  ENSP ID: ENSP00000451908
MGPGEGNCWFCWCLCPWLLSGSWVHLISGKSPSLTRPVMGGGGGVEMFLQFCLPWQNLDPGKGKQGRSPSEKGLCSPLTRSLAQATSAPRA

SEQ ID NO: 96504 - protein, 169 aa, Homo sapiens
  Payload ID: 19248
  Gene Name: vasohibin 2
  Uniprot ID: Q86V25
  ENSP ID: ENSP00000355931
MTGSAADTHRCPHPKGAKGTRSRSSHARPVSLATSGGSEEEDKDGGVLFHVNKSGFPIDSHTWERMWMHVAKVHPKGGEMVGAIRNAAFLAKPSIPQVPNYRLSMTIPDWLQAIQNYMKTLQYNHTGTQFFEIRKMRPLSGLMETAKEMTRESLPIKCLEAVILGITHS

SEQ ID NO: 96505 - protein, 311 aa, Homo sapiens
  Payload ID: 19248
  Gene Name: vasohibin 2
  Uniprot ID: Q86V25
  ENSP ID: ENSP00000355932
MTGSAADTHRCPHPKGAKGTRSRSSHARPVSLATSGGSEEEDKDGGVLFHVNKSGFPIDSHTWERMWMHVAKVHPKGGEMVGAIRNAAFLAKPSIPQVPNYRLSMTIPDWLQAIQNYMKTLHYLTNGQPSIERFPISFKTYFSGNYFHHVVLGIYCNGRYGSLGMSRRAELMDKPLTFRTLSDLIFDFEDSYKKYLHTVKKVKIGLYVPHEPHSFQPIEWKQLVLNVSKMLRADIRKELEKYARDMRMKILKPASAHSPTQVRSRGKSLSPRRRQASPPRRLGRREKSPALPEKKVADLSTLNEVGYQIRI

SEQ ID NO: 96506 - protein, 290 aa, Homo sapiens
  Payload ID: 19248
  Gene Name: vasohibin 2
  Uniprot ID: Q86V25
  ENSP ID: ENSP00000355935
MWMHVAKVHPKGGEMVGAIRNAAFLAKPSIPQVPNYRLSMTIPDWLQAIQNYMKTLQYNHTGTQFFEIRKMRPLSGLMETAKEMTRESLPIKCLEAVILGIYLTNGQPSIERFPISFKTYFSGNYFHHVVLGIYCNGRYGSLGMSRRAELMDKPLTFRTLSDLIFDFEDSYKKYLHTVKKVKIGLYVPHEPHSFQPIEWKQLVLNVSKMLRADIRKELEKYARDMRMKILKPASAHSPTQVRSRGKSLSPRRRQASPPRRLGRREKSPALPEKKVADLSTLNEVGYQIRI

SEQ ID NO: 96507 - protein, 25 aa, Homo sapiens
  Payload ID: 19248
  Gene Name: vasohibin 2
  ENSP ID: ENSP00000419918
MWMHVAKVHPKGGEMVGAIRNAAFL

SEQ ID NO: 96508 - protein, 355 aa, Homo sapiens
  Payload ID: 19248
  Gene Name: vasohibin 2
  Uniprot ID: Q86V25
  ENSP ID: ENSP00000428324
MTGSAADTHRCPHPKGAKGTRSRSSHARPVSLATSGGSEEEDKDGGVLFHVNKSGFPIDSHTWERMWMHVAKVHPKGGEMVGAIRNAAFLAKPSIPQVPNYRLSMTIPDWLQAIQNYMKTLQYNHTGTQFFEIRKMRPLSGLMETAKEMTRESLPIKCLEAVILGIYLTNGQPSIERFPISFKTYFSGNYFHHVVLGIYCNGRYGSLGMSRRAELMDKPLTFRTLSDLIFDFEDSYKKYLHTVKKVKIGLYVPHEPHSFQPIEWKQLVLNVSKMLRADIRKELEKYARDMRMKILKPASAHSPTQVRSRGKSLSPRRRQASPPRRLGRREKSPALPEKKVADLSTLNEVGYQIRI

SEQ ID NO: 96509 - protein, 251 aa, Homo sapiens
  Payload ID: 19248
  Gene Name: vasohibin 2
  Uniprot ID: Q86V25
  ENSP ID: ENSP00000429040
MTIPDWLQAIQNYMKTLQYNHTGTQFFEIRKMRPLSGLMETAKEMTRESLPIKCLEAVILGIYLTNGQPSIERFPISFKTYFSGNYFHHVVLGIYCNGRYGSLGMSRRAELMDKPLTFRTLSDLIFDFEDSYKKYLHTVKKVKIGLYVPHEPHSFQPIEWKQLVLNVSKMLRADIRKELEKYARDMRMKILKPASAHSPTQVRSRGKSLSPRRRQASPPRRLGRREKSPALPEKKVADLSTLNEVGYQIRI

SEQ ID NO: 96510 - protein, 290 aa, Homo sapiens; identical to SEQ ID NO: 96506
  Payload ID: 19248
  Gene Name: vasohibin 2
  Uniprot ID: Q86V25
  ENSP ID: ENSP00000430319

SEQ ID NO: 96511 - protein, 673 aa, Homo sapiens
  Payload ID: 19249
  Gene Name: vasorin
  Uniprot ID: Q6EMK4
  ENSP ID: ENSP00000306864
MCSRVPLLLPLLLLLALGPGVQGCPSGCQCSQPQTVFCTARQGTTVPRDVPPDTVGLYVFENGITMLDAGSFAGLPGLQLLDLSQNQIASLPSGVFQPLANLSNLDLTANRLHEITNETFRGLRRLERLYLGKNRIRHIQPGAFDTLDRLLELKLQDNELRALPPLRLPRLLLLDLSHNSLLALEPGILDTANVEALRLAGLGLQQLDEGLFSRLRNLHDLDVSDNQLERVPPVIRGLRGLTRLRLAGNTRIAQLRPEDLAGLAALQELDVSNLSLQALPGDLSGLFPRLRLLAAARNPFNCVCPLSWFGPWVRESHVTLASPEETRCHFPPKNAGRLLLELDYADFGCPATTTTATVPTTRPVVREPTALSSSLAPTWLSPTEPATEAPSPPSTAPPTVGPVPQPQDCPPSTCLNGGTCHLGTRHHLACLCPEGFTGLYCESQMGQGTRPSPTPVTPRPPRSLTLGIEPVSPTSLRVGLQRYLQGSSVQLRSLRLTYRNLSGPDKRLVTLRLPASLAEYTVTQLRPNATYSVCVMPLGPGRVPEGEEACGEAHTPPAVHSNHAPVTQAREGNLPLLIAPALAAVLLAALAAVGAAYCVRRGRAMAAAAQDKGQVGPGAGPLELEGVKVPLEPGPKATEGGGEALPSGSECEVPLMGFPGPGLQSPLHAKPYI

SEQ ID NO: 96512 - protein, 673 aa, Homo sapiens; identical to SEQ ID NO: 96511
  Payload ID: 19249
  Gene Name: vasorin
  Uniprot ID: Q6EMK4
  ENSP ID: ENSP00000481884

SEQ ID NO: 96513 - protein, 823 aa, Homo sapiens
  Payload ID: 19250
  Gene Name: vav 1 guanine nucleotide exchange factor
  ENSP ID: ENSP00000302269
MELWRQCTHWLIQCRVLPPSHRVTWDGAQVCELAQALRDGVLLCQLLNNLLPHAINLREVNLRPQMSQFLCLKNIRTFLSTCCEKFGLKRSELFEAFDLFDVQDFGKVIYTLSALSWTPIAQNRGIMPFPTEEESVGDEDIYSGLSDQIDDTVEEDEDLYDCVENEEAEGDEIYEDLMRSEPVSMPPKMTEYDKRCCCLREIQQTEEKYTDTLGSIQQHFLKPLQRFLKPQDIEIIFINIEDLLRVHTHFLKEMKEALGTPGAANLYQVFIKYKERFLVYGRYCSQVESASKHLDRVAAAREDVQMKLEECSQRANNGRFTLRDLLMVPMQRVLKYHLLLQELVKHTQEAMEKENLRLALDAMRDLAQCVNEVKRDNETLRQITNFQLSIENLDQSLAHYGRPKIDGELKITSVERRSKMDRYAFLLDKALLICKRRGDSYDLKDFVNLHSFQVRDDSSGDRDNKKWSHMFLLIEDQGAQGYELFFKTRELKKKWMEQFEMAISNIYPENATANGHDFQMFSFEETTSCKACQMLLRGTFYQGYRCHRCRASAHKECLGRVPPCGRHGQDFPGTMKKDKLHRRAQDKKRNELGLPKMEVFQEYYGLPPPPGAIGPFLRLNPGDIVELTKAEAEQNWWEGPPQDLSVHLWYAGPMERAGAESILANRSDGTFLVRQRVKDAAEFAISIKYNVEVKHIKIMTAEGLYRITEKKAFRGLTELVEFYQQNSLKDCFKSLDTTLQFPFKEPEKRTISRPAVGSTKYFGTAKARYDFCARDRSELSLKEGDIIKILNKKGQQGWWRGEIYGRVGWFPANYVEEDYSEYC

SEQ ID NO: 96514 - protein, 789 aa, Homo sapiens
  Payload ID: 19250
  Gene Name: vav 1 guanine nucleotide exchange factor
  ENSP ID: ENSP00000443242
MIASLHSSLDNRFLCLKNIRTFLSTCCEKFGLKRSELFEAFDLFDVQDFGKVIYTLSALSWTPIAQNRGIMPFPTEEESVGDEDIYSGLSDQIDDTVEEDEDLYDCVENEEAEGDEIYEDLMRSEPVSMPPKMTEYDKRCCCLREIQQTEEKYTDTLGSIQQHFLKPLQRFLKPQDIEIIFINIEDLLRVHTHFLKEMKEALGTPGAANLYQVFIKYKERFLVYGRYCSQVESASKHLDRVAAAREDVQMKLEECSQRANNGRFTLRDLLMVPMQRVLKYHLLLQELVKHTQEAMEKENLRLALDAMRDLAQCVNEVKRDNETLRQITNFQLSIENLDQSLAHYGRPKIDGELKITSVERRSKMDRYAFLLDKALLICKRRGDSYDLKDFVNLHSFQVRDDSSGDRDNKKWSHMFLLIEDQGAQGYELFFKTRELKKKWMEQFEMAISNIYPENATANGHDFQMFSFEETTSCKACQMLLRGTFYQGYRCHRCRASAHKECLGRVPPCGRHGQDFPGTMKKDKLHRRAQDKKRNELGLPKMEVFQEYYGLPPPPGAIGPFLRLNPGDIVELTKAEAEQNWWEGRNTSTNEIGWFPCNRVKPYVHGPPQDLSVHLWYAGPMERAGAESILANRSDGTFLVRQRVKDAAEFAISIKYNVEVKHIKIMTAEGLYRITEKKAFRGLTELVEFYQQNSLKDCFKSLDTTLQFPFKEPEKRTISRPAVGSTKYFGTAKARYDFCARDRSELSLKEGDIIKILNKKGQQGWWRGEIYGRVGWFPANYVEEDYSEYC

SEQ ID NO: 96515 - protein, 813 aa, Homo sapiens
  Payload ID: 19250
  Gene Name: vav 1 guanine nucleotide exchange factor
  Uniprot ID: P15498
  ENSP ID: ENSP00000469450
MELWRQCTHWLIQCRVLPPSHRVTWDGAQVCELAQALRDGVLLCQLLNNLLPHAINLREVNLRPQMSQFLCLKNIRTFLSTCCEKFGLKRSELFEAFDLFDVQDFGKVIYTLSALSWTPIAQNRGIMPFPTEEESVGDEDIYSGLSDQIDDTVEEDEDLYDCVENEEAEGDEIYEDLMRSEPVSMPHFLKPLQRFLKPQDIEIIFINIEDLLRVHTHFLKEMKEALGTPGAANLYQVFIKYKERFLVYGRYCSQVESASKHLDRVAAAREDVQMKLEECSQRANNGRFTLRDLLMVPMQRVLKYHLLLQELVKHTQEAMEKENLRLALDAMRDLAQCVNEVKRDNETLRQITNFQLSIENLDQSLAHYGRPKIDGELKITSVERRSKMDRYAFLLDKALLICKRRGDSYDLKDFVNLHSFQVRDDSSGDRDNKKWSHMFLLIEDQGAQGYELFFKTRELKKKWMEQFEMAISNIYPENATANGHDFQMFSFEETTSCKACQMLLRGTFYQGYRCHRCRASAHKECLGRVPPCGRHGQDFPGTMKKDKLHRRAQDKKRNELGLPKMEVFQEYYGLPPPPGAIGPFLRLNPGDIVELTKAEAEQNWWEGRNTSTNEIGWFPCNRVKPYVHGPPQDLSVHLWYAGPMERAGAESILANRSDGTFLVRQRVKDAAEFAISIKYNVEVKHIKIMTAEGLYRITEKKAFRGLTELVEFYQQNSLKDCFKSLDTTLQFPFKEPEKRTISRPAVGSTKYFGTAKARYDFCARDRSELSLKEGDIIKILNKKGQQGWWRGEIYGRVGWFPANYVEEDYSEYC

SEQ ID NO: 96516 - protein, 790 aa, Homo sapiens
  Payload ID: 19250
  Gene Name: vav 1 guanine nucleotide exchange factor
  ENSP ID: ENSP00000472803
MIVLPLYSRLDKRFLCLKNIRTFLSTCCEKFGLKRSELFEAFDLFDVQDFGKVIYTLSALSWTPIAQNRGIMPFPTEEESVGDEDIYSGLSDQIDDTVEEDEDLYDCVENEEAEGDEIYEDLMRSEPVSMPPKMTEYDKRCCCLREIQQTEEKYTDTLGSIQQHFLKPLQRFLKPQDIEIIFINIEDLLRVHTHFLKEMKEALGTPGAANLYQVFIKYKERFLVYGRYCSQVESASKHLDRVAAAREDVQMKLEECSQRANNGRFTLRDLLMVPMQRVLKYHLLLQELVKHTQEAMEKENLRLALDAMRDLAQCVNEVKRDNETLRQITNFQLSIENLDQSLAHYGRPKIDGELKITSVERRSKMDRYAFLLDKALLICKRRGDSYDLKDFVNLHSFQVRDDSSGDRDNKKWSHMFLLIEDQGAQGYELFFKTRELKKKWMEQFEMAISNIYPENATANGHDFQMFSFEETTSCKACQMLLRGTFYQGYRCHRCRASAHKECLGRVPPCGRHGQDFPGTMKKDKLHRRAQDKKRNELGLPKMEVFQEYYGLPPPPGAIGPFLRLNPGDIVELTKAEAEQNWWEGRNTSTNEIGWFPCNRVKPYVHGPPQDLSVHLWYAGPMERAGAESILANRSDGTFLVRQRVKDAAEFAISIKYNVEVKHIKIMTAEGLYRITEKKAFRGLTELVEFYQQNSLKDCFKSLDTTLQFPFKEPEKRTISRPAVGSTKYFGTAKARYDFCARDRSELSLKEGDIIKILNKKGQQGWWRGEIYGRVGWFPANYVEEDYSEYC

SEQ ID NO: 96517 - protein, 845 aa, Homo sapiens
  Payload ID: 19250
  Gene Name: vav 1 guanine nucleotide exchange factor
  Uniprot ID: P15498
  ENSP ID: ENSP00000472929
MELWRQCTHWLIQCRVLPPSHRVTWDGAQVCELAQALRDGVLLCQLLNNLLPHAINLREVNLRPQMSQFLCLKNIRTFLSTCCEKFGLKRSELFEAFDLFDVQDFGKVIYTLSALSWTPIAQNRGIMPFPTEEESVGDEDIYSGLSDQIDDTVEEDEDLYDCVENEEAEGDEIYEDLMRSEPVSMPPKMTEYDKRCCCLREIQQTEEKYTDTLGSIQQHFLKPLQRFLKPQDIEIIFINIEDLLRVHTHFLKEMKEALGTPGAANLYQVFIKYKERFLVYGRYCSQVESASKHLDRVAAAREDVQMKLEECSQRANNGRFTLRDLLMVPMQRVLKYHLLLQELVKHTQEAMEKENLRLALDAMRDLAQCVNEVKRDNETLRQITNFQLSIENLDQSLAHYGRPKIDGELKITSVERRSKMDRYAFLLDKALLICKRRGDSYDLKDFVNLHSFQVRDDSSGDRDNKKWSHMFLLIEDQGAQGYELFFKTRELKKKWMEQFEMAISNIYPENATANGHDFQMFSFEETTSCKACQMLLRGTFYQGYRCHRCRASAHKECLGRVPPCGRHGQDFPGTMKKDKLHRRAQDKKRNELGLPKMEVFQEYYGLPPPPGAIGPFLRLNPGDIVELTKAEAEQNWWEGRNTSTNEIGWFPCNRVKPYVHGPPQDLSVHLWYAGPMERAGAESILANRSDGTFLVRQRVKDAAEFAISIKYNVEVKHIKIMTAEGLYRITEKKAFRGLTELVEFYQQNSLKDCFKSLDTTLQFPFKEPEKRTISRPAVGSTKYFGTAKARYDFCARDRSELSLKEGDIIKILNKKGQQGWWRGEIYGRVGWFPANYVEEDYSEYC

SEQ ID NO: 96518 - protein, 878 aa, Homo sapiens
  Payload ID: 19251
  Gene Name: vav 2 guanine nucleotide exchange factor
  Uniprot ID: P52735
  ENSP ID: ENSP00000360916
MEQWRQCGRWLIDCKVLPPNHRVVWPSAVVFDLAQALRDGVLLCQLLHNLSPGSIDLKDINFRPQMSQFLCLKNIRTFLKVCHDKFGLRNSELFDPFDLFDVRDFGKVISAVSRLSLHSIAQNKGIRPFPSEETTENDDDVYRSLEELADEHDLGEDIYDCVPCEDGGDDIYEDIIKVEVQQPMIRYMQKMGMTEDDKRNCCLLEIQETEAKYYRTLEDIEKNYMSPLRLVLSPADMAAVFINLEDLIKVHHSFLRAIDVSVMVGGSTLAKVFLDFKERLLIYGEYCSHMEHAQNTLNQLLASREDFRQKVEECTLKVQDGKFKLQDLLVVPMQRVLKYHLLLKELLSHSAERPERQQLKEALEAMQDLAMYINEVKRDKETLRKISEFQSSIENLQVKLEEFGRPKIDGELKVRSIVNHTKQDRYLFLFDKVVIVCKRKGYSYELKEIIELLFHKMTDDPMNNKDVKKSHGKMWSYGFYLIHLQGKQGFQFFCKTEDMKRKWMEQFEMAMSNIKPDKANANHHSFQMYTFDKTTNCKACKMFLRGTFYQGYMCTKCGVGAHKECLEVIPPCKFTSPADLDASGAGPGPKMVAMQNYHGNPAPPGKPVLTFQTGDVLELLRGDPESPWWEGRLVQTRKSGYFPSSSVKPCPVDGRPPISRPPSREIDYTAYPWFAGNMERQQTDNLLKSHASGTYLIRERPAEAERFAISIKFNDEVKHIKVVEKDNWIHITEAKKFDSLLELVEYYQCHSLKESFKQLDTTLKYPYKSRERSASRASSRSPASCASYNFSFLSPQGLSFASQGPSAPFWSVFTPRVIGTAVARYNFAARDMRELSLREGDVVRIYSRIGGDQGWWKGETNGRIGWFPSTYVEEEGIQ

SEQ ID NO: 96519 - protein, 868 aa, Homo sapiens
  Payload ID: 19251
  Gene Name: vav 2 guanine nucleotide exchange factor
  Uniprot ID: P52735
  ENSP ID: ENSP00000360917
MEQWRQCGRWLIDCKVLPPNHRVVWPSAVVFDLAQALRDGVLLCQLLHNLSPGSIDLKDINFRPQMSQFLCLKNIRTFLKVCHDKFGLRNSELFDPFDLFDVRDFGKVISAVSRLSLHSIAQNKGIRPFPSEETTENDDDVYRSLEELADEHDLGEDIYDCVPCEDGGDDIYEDIIKVEVQQPMKMGMTEDDKRNCCLLEIQETEAKYYRTLEDIEKNYMSPLRLVLSPADMAAVFINLEDLIKVHHSFLRAIDVSVMVGGSTLAKVFLDFKERLLIYGEYCSHMEHAQNTLNQLLASREDFRQKVEECTLKVQDGKFKLQDLLVVPMQRVLKYHLLLKELLSHSAERPERQQLKEALEAMQDLAMYINEVKRDKETLRKISEFQSSIENLQVKLEEFGRPKIDGELKVRSIVNHTKQDRYLFLFDKVVIVCKRKGYSYELKEIIELLFHKMTDDPMNNKDVKKWSYGFYLIHLQGKQGFQFFCKTEDMKRKWMEQFEMAMSNIKPDKANANHHSFQMYTFDKTTNCKACKMFLRGTFYQGYMCTKCGVGAHKECLEVIPPCKFTSPADLDASGAGPGPKMVAMQNYHGNPAPPGKPVLTFQTGDVLELLRGDPESPWWEGRLVQTRKSGYFPSSSVKPCPVDGRPPISRPPSREIDYTAYPWFAGNMERQQTDNLLKSHASGTYLIRERPAEAERFAISIKFNDEVKHIKVVEKDNWIHITEAKKFDSLLELVEYYQCHSLKESFKQLDTTLKYPYKSRERSASRASSRSPASCASYNFSFLSPQGLSFASQGPSAPFWSVFTPRVIGTAVARYNFAARDMRELSLREGDVVRIYSRIGGDQGWWKGETNGRIGWFPSTYVEEEGIQ

SEQ ID NO: 96520 - protein, 839 aa, Homo sapiens
  Payload ID: 19251
  Gene Name: vav 2 guanine nucleotide exchange factor
  Uniprot ID: P52735
  ENSP ID: ENSP00000385362
MEQWRQCGRWLIDCKVLPPNHRVVWPSAVVFDLAQALRDGVLLCQLLHNLSPGSIDLKDINFRPQMSQFLCLKNIRTFLKVCHDKFGLRNSELFDPFDLFDVRDFGKVISAVSRLSLHSIAQNKGIRPFPSEETTENDDDVYRSLEELADEHDLGEDIYDCVPCEDGGDDIYEDIIKVEVQQPMKMGMTEDDKRNCCLLEIQETEAKYYRTLEDIEKNYMSPLRLVLSPADMAAVFINLEDLIKVHHSFLRAIDVSVMVGGSTLAKVFLDFKERLLIYGEYCSHMEHAQNTLNQLLASREDFRQKVEECTLKVQDGKFKLQDLLVVPMQRVLKYHLLLKELLSHSAERPERQQLKEALEAMQDLAMYINEVKRDKETLRKISEFQSSIENLQVKLEEFGRPKIDGELKVRSIVNHTKQDRYLFLFDKVVIVCKRKGYSYELKEIIELLFHKMTDDPMNNKDVKKWSYGFYLIHLQGKQGFQFFCKTEDMKRKWMEQFEMAMSNIKPDKANANHHSFQMYTFDKTTNCKACKMFLRGTFYQGYMCTKCGVGAHKECLEVIPPCKFTSPADLDASGAGPGPKMVAMQNYHGNPAPPGKPVLTFQTGDVLELLRGDPESPWWEGRLVQTRKSGYFPSSSVKPCPVDGRPPISRPPSREIDYTAYPWFAGNMERQQTDNLLKSHASGTYLIRERPAEAERFAISIKFNDEVKHIKVVEKDNWIHITEAKKFDSLLELVEYYQCHSLKESFKQLDTTLKYPYKSRERSASRASSRSPVFTPRVIGTAVARYNFAARDMRELSLREGDVVRIYSRIGGDQGWWKGETNGRIGWFPSTYVEEEGIQ

SEQ ID NO: 96521 - protein, 847 aa, Homo sapiens
  Payload ID: 19252
  Gene Name: vav 3 guanine nucleotide exchange factor
  Uniprot ID: Q9UKW4
  ENSP ID: ENSP00000359073
MEPWKQCAQWLIHCKVLPTNHRVTWDSAQVFDLAQTLRDGVLLCQLLNNLRAHSINLKEINLRPQMSQFLCLKNIRTFLTACCETFGMRKSELFEAFDLFDVRDFGKVIETLSRLSRTPIALATGIRPFPTEESINDEDIYKGLPDLIDETLVEDEEDLYDCVYGEDEGGEVYEDLMKAEEAHQPKCPENDIRSCCLAEIKQTEEKYTETLESIEKYFMAPLKRFLTAAEFDSVFINIPELVKLHRNLMQEIHDSIVNKNDQNLYQVFINYKERLVIYGQYCSGVESAISSLDYISKTKEDVKLKLEECSKRANNGKFTLRDLLVVPMQRVLKYHLLLQELVKHTTDPTEKANLKLALDAMKDLAQYVNEVKRDNETLREIKQFQLSIENLNQPVLLFGRPQGDGEIRITTLDKHTKQERHIFLFDLAVIVCKRKGDNYEMKEIIDLQQYKIANNPTTDKENKKWSYGFYLIHTQGQNGLEFYCKTKDLKKKWLEQFEMALSNIRPDYADSNFHDFKMHTFTRVTSCKVCQMLLRGTFYQGYLCFKCGARAHKECLGRVDNCGRVNSGEQGTLKLPEKRTNGLRRTPKQVDPGLPKMQVIRNYSGTPPPALHEGPPLQLQAGDTVELLKGDAHSLFWQGRNLASGEVGFFPSDAVKPCPCVPKPVDYSCQPWYAGAMERLQAETELINRVNSTYLVRHRTKESGEYAISIKYNNEAKHIKILTRDGFFHIAENRKFKSLMELVEYYKHHSLKEGFRTLDTTLQFPYKEPEHSAGQRGNRAGNSLLSPKVLGIAIARYDFCARDMRELSLLKGDVVKIYTKMSANGWWRGEVNGRVGWFPSTYVEEDE

SEQ ID NO: 96522 - protein, 287 aa, Homo sapiens
  Payload ID: 19252
  Gene Name: vav 3 guanine nucleotide exchange factor
  Uniprot ID: Q9UKW4
  ENSP ID: ENSP00000394897
MPIFTFLSEQGTLKLPEKRTNGLRRTPKQVDPGLPKMQVIRNYSGTPPPALHEGPPLQLQAGDTVELLKGDAHSLFWQGRNLASGEVGFFPSDAVKPCPCVPKPVDYSCQPWYAGAMERLQAETELINRVNSTYLVRHRTKESGEYAISIKYNNEAKHIKILTRDGFFHIAENRKFKSLMELVEYYKHHSLKEGFRTLDTTLQFPYKEPEHSAGQRGNRAGNSLLSPKVLGIAIARYDFCARDMRELSLLKGDVVKIYTKMSANGWWRGEVNGRVGWFPSTYVEEDE

SEQ ID NO: 96523 - protein, 182 aa, Homo sapiens
  Payload ID: 19252
  Gene Name: vav 3 guanine nucleotide exchange factor
  ENSP ID: ENSP00000431544
  MOD_RES (1)..(1): Any amino acid
XYKIANNPTTDKENKKWSYGFYLIHTQGQNGLEFYCKTKDLKKKWLEQFEMALSNIRPDYADSNFHDFKMHTFTRVTSCKVCQMLLRGTFYQGYLCFKCGARAHKECLGRVDNCGRVNSGGLPKMQVIRNYSGTPPPALHEGPPLQLQAGDTVELLKGDAHSLFWQGRNLASGEVGFFPSDA

SEQ ID NO: 96524 - protein, 875 aa, Homo sapiens
  Payload ID: 19252
  Gene Name: vav 3 guanine nucleotide exchange factor
  Uniprot ID: Q9UKW4
  ENSP ID: ENSP00000432540
MEPWKQCAQWLIHCKVLPTNHRVTWDSAQVFDLAQTLRDGVLLCQLLNNLRAHSINLKEINLRPQMSQFLCLKNIRTFLTACCETFGMRKSELFEAFDLFDVRDFGKVIETLSRLSRTPIALATGIRPFPTEESINDEDIYKGLPDLIDETLVEDEEDLYDCVYGEDEGGEVYEDLMKAEEAHQPKCPENDIRSCCLAEIKQTEEKYTETLESIEKYFMAPLKRFLTAAEFDSVFINIPELVKLHRNLMQEIHDSIVNKNDQNLYQVFINYKERLVIYGQYCSGVESAISSLDYISKTKEDVKLKLEECSKRANNGKFTLRDLLVVPMQRVLKYHLLLQELVKHTTDPTEKANLKLALDAMKDLAQYVNEVKRDNETLREIKQFQLSIENLNQPVLLFGRPQGDGEIRITTLDKHTKQERHIFLFDLAVIVCKRKGDNYEMKEIIDLQQYKIANNPTTDKENKKWSYGFYLIHTQGQNGLEFYCKTKDLKKKWLEQFEMALSNIRPDYADSNFHDFKMHTFTRVTSCKVCQMLLRGTFYQGYLCFKCGARAHKECLGRVDNCGRVNSGEQGTLKLPEKRTNGLRRTPKQVDPGLPKMQVIRNYSGTPPPALHEGPPLQLQAGDTVELLKGDAHSLFWQGRNLASGEVGFFPSDAVKPCPCVPKPVDYSCQPWYAGAMERLQAETELINRVNSTYLVRHRTKESGEYAISIKYNNEAKHIKILTRDGFFHIAENRKFKSLMELVEYYKHHSLKEGFRTLDTTLQFPYKEPEHSAGQRGNRAGNSSPSLFCGFSFVTPPDYSFVPPSSTPFWSVLSPKVLGIAIARYDFCARDMRELSLLKGDVVKIYTKMSANGWWRGEVNGRVGWFPSTYVEEDE

SEQ ID NO: 96525 - protein, 52 aa, Homo sapiens
  Payload ID: 19252
  Gene Name: vav 3 guanine nucleotide exchange factor
  ENSP ID: ENSP00000432865
MPIFTFLSEQGTLKLPEVYQRCRSLGTILEHHPQLCMKDPLYSSRPGIPLNF

SEQ ID NO: 96526 - protein, 616 aa, Homo sapiens
  Payload ID: 19252
  Gene Name: vav 3 guanine nucleotide exchange factor
  ENSP ID: ENSP00000433559
  MOD_RES (1)..(1): Any amino acid
XCAQWLIHCKVLPTNHRVTWDSAQVFDLAQTLRDGVLLCQLLNNLRAHSINLKEINLRPQMSQFLCLKNIRTFLTACCETFGMRKSELFEAFDLFDVRDFGKVIETLSRLSRTPIALATGIRPFPTEESINDEDIYKGLPDLIDETLVEDEEDLYDCVYGEDEGGEVYEDLMKAEEAHQPKCPENDIRSCCLAEIKQTEEKYTETLESIEKYFMAPLKRFLTAAEFDSVFINIPELVKLHRNLMQEIHDSIVNKNDQNLYQVFINYKERLVIYGQYCSGVESAISSLDYISKTKEDVKLKLEECSKRANNGKFTLRDLLVVPMQRVLKYHLLLQELVKHTTDPTEKANLKLALDAMKDLAQYVNEVKRDNETLREIKQFQLSIENLNQPVLLFGRPQGDGEIRITTLDKHTKQERHIFLFDLAVIVCKRKGDNYEMKEIIDLQQYKIANNPTTDKENKKWSYGFYLIHTQGQNGLEFYCKTKDLKKKWLEQFEMALSNIRPDYADSNFHDFKMHTFTRVTSCKVCQMLLRGTFYQGYLCFKCGARAHKECLGRVDNCGRVNSGEQGTLKLPEKRTNGLRRTPKQVDPDVPCLLHFFISMAPATRSIVKSQKKNKKF

SEQ ID NO: 96527 - protein, 52 aa, Homo sapiens; identical to SEQ ID NO: 96525
  Payload ID: 19252
  Gene Name: vav 3 guanine nucleotide exchange factor
  ENSP ID: ENSP00000434944

SEQ ID NO: 96528 - protein, 189 aa, Homo sapiens
  Payload ID: 19253
  Gene Name: VCP-interacting membrane selenoprotein
  Uniprot ID: Q9BQE4
  ENSP ID: ENSP00000381282
  MOD_RES (188)..(188): Any amino acid
MERQEESLSARPALETEGLRFLHTTVGSLLATYGWYIVFSCILLYVVFQKLSARLRALRQRQLDRAAAAVEPDVVVKRQEALAAARLKMQEELNAQVEKHKEKLKQLEEEKRRQKIEMWDSMQEGKSYKGNAKKPQEEDSPGPSTSSVLKRKSDRKPLRGGGYNPLSGEGGGACSWRPGRRGPSSGGXG

SEQ ID NO: 96529 - protein, 189 aa, Homo sapiens; identical to SEQ ID NO: 96528
  Payload ID: 19253
  Gene Name: VCP-interacting membrane selenoprotein
  Uniprot ID: Q9BQE4
  ENSP ID: ENSP00000433541
  MOD_RES (188)..(188): Selenocysteine

SEQ ID NO: 96530 - protein, 166 aa, Homo sapiens
  Payload ID: 19253
  Gene Name: VCP-interacting membrane selenoprotein
  ENSP ID: ENSP00000433803
  MOD_RES (165)..(165): Selenocysteine
MMVGSLLATYGWYIVFSCILLYVVFQKLSARLRALRQRQLDRAAAAVEPDVVVKRQEALAAARLKMQEELNAQVEKHKEKLKQLEEEKRRQKIEMWDSMQEGKSYKGNAKKPQEEDSPGPSTSSVLKRKSDRKPLRGGGYNPLSGEGGGACSWRPGRRGPSSGGXG

SEQ ID NO: 96531 - protein, 218 aa, Homo sapiens
  Payload ID: 19253
  Gene Name: VCP-interacting membrane selenoprotein
  ENSP ID: ENSP00000434842
MMGGSSAAAPGAGAWEAWERSGVGAYADLGQQARTLRGGFSGAALPWAARLSLVCASLFCEPSPSLGSLLATYGWYIVFSCILLYVVFQKLSARLRALRQRQLDRAAAAVEPDVVVKRQEALAAARLKMQEELNAQVEKHKEKLKQLEEEKRRQKIEMWDSMQEGKSYKGNAKKPQEEDSPGPSTSSVLKRKSDRKPLRGGGYNPLSGEGGGACSWRP

SEQ ID NO: 96532 - protein, 304 aa, Homo sapiens
  Payload ID: 19254
  Gene Name: v-crk avian sarcoma virus CT10 oncogene homolog
  Uniprot ID: P46108
  ENSP ID: ENSP00000300574
MAGNFDSEERSSWYWGRLSRQEAVALLQGQRHGVFLVRDSSTSPGDYVLSVSENSRVSHYIINSSGPRPPVPPSPAQPPPGVSPSRLRIGDQEFDSLPALLEFYKIHYLDTTTLIEPVSRSRQGSGVILRQEEAEYVRALFDFNGNDEEDLPFKKGDILRIRDKPEEQWWNAEDSEGKRGMIPVPYVEKYRPASASVSALIGGNQEGSHPQPLGGPEPGPYAQPSVNTPLPNLQNGPIYARVIQKRVPNAYDKTALALEVGELVKVTKINVSGQWEGECNGKRGHFPFTHVRLLDQQNPDEDFS

SEQ ID NO: 96533 - protein, 204 aa, Homo sapiens
  Payload ID: 19254
  Gene Name: v-crk avian sarcoma virus CT10 oncogene homolog
  Uniprot ID: P46108
  ENSP ID: ENSP00000381942
MAGNFDSEERSSWYWGRLSRQEAVALLQGQRHGVFLVRDSSTSPGDYVLSVSENSRVSHYIINSSGPRPPVPPSPAQPPPGVSPSRLRIGDQEFDSLPALLEFYKIHYLDTTTLIEPVSRSRQGSGVILRQEEAEYVRALFDFNGNDEEDLPFKKGDILRIRDKPEEQWWNAEDSEGKRGMIPVPYVEKYRPASASVSALIGGR

SEQ ID NO: 96534 - protein, 223 aa, Homo sapiens
  Payload ID: 19254
  Gene Name: v-crk avian sarcoma virus CT10 oncogene homolog
  ENSP ID: ENSP00000459505
MAGNFDSEERSSWYWGRLSRQEAVALLQGQRHGVFLVRDSSTSPGDYVLSVSENSRVSHYIINSSGPRPPVPPSPAQPPPGVSPSRLRIGDQEFDSLPALLEFYKIHYLDTTTLIEPVSRSRQGSGVILRQEEECYTLLTLIYSVVLFSFWNHTIKWRQTVPFHPREVIMHRVNSIKQDCFHCMEHDQRVTHSDISDPKNSKNTTRSICSLLVNASYFFLGFF

SEQ ID NO: 96535 - protein, 303 aa, Homo sapiens
  Payload ID: 19255
  Gene Name: v-crk avian sarcoma virus CT10 oncogene homolog-like
  Uniprot ID: P46109
  ENSP ID: ENSP00000346300
MSSARFDSSDRSAWYMGPVSRQEAQTRLQGQRHGMFLVRDSSTCPGDYVLSVSENSRVSHYIINSLPNRRFKIGDQEFDHLPALLEFYKIHYLDTTTLIEPAPRYPSPPMGSVSAPNLPTAEDNLEYVRTLYDFPGNDAEDLPFKKGEILVIIEKPEEQWWSARNKDGRVGMIPVPYVEKLVRSSPHGKHGNRNSNSYGIPEPAHAYAQPQTTTPLPAVSGSPGAAITPLPSTQNGPVFAKAIQKRVPCAYDKTALALEVGDIVKVTRMNINGQWEGEVNGRKGLFPFTHVKIFDPQNPDENE

SEQ ID NO: 96536 - protein, 303 aa, Homo sapiens; identical to SEQ ID NO: 96535
  Payload ID: 19255
  Gene Name: v-crk avian sarcoma virus CT10 oncogene homolog-like
  Uniprot ID: P46109
  ENSP ID: ENSP00000396646

SEQ ID NO: 96537 - protein, 258 aa, Homo sapiens
  Payload ID: 19256
  Gene Name: VENT homeobox
  Uniprot ID: O95231
  ENSP ID: ENSP00000357556
MRLSSSPPRGPQQLSSFGSVDWLSQSSCSGPTHTPRPADFSLGSLPGPGQTSGAREPPQAVSIKEAAGSSNLPAPERTMAGLSKEPNTLRAPRVRTAFTMEQVRTLEGVFQHHQYLSPLERKRLAREMQLSEVQIKTWFQNRRMKHKRQMQDPQLHSPFSGSLHAPPAFYSTSSGLANGLQLLCPWAPLSGPQALMLPPGSFWGLCQVAQEALASAGASCCGQPLASHPPTPGRPSLGPALSTGPRGLCAMPQTGDAF

SEQ ID NO: 96538 - protein, 186 aa, Homo sapiens
  Payload ID: 19257
  Gene Name: ventral anterior homeobox 1
  Uniprot ID: Q5SQQ9
  ENSP ID: ENSP00000277905
MFGKPDKMDVRCHSDAEAARVSKNAHKESRESKGAEGNLPAAFLKEPQGAFSASGAAEDCNKSKSNSAADPDYCRRILVRDAKGSIREIILPKGLDLDRPKRTRTSFTAEQLYRLEMEFQRCQYVVGRERTELARQLNLSETQANSEENNERFKRGIKKQKKKRKKEPANDESRRGDSGGRGWQPL

SEQ ID NO: 96539 - protein, 334 aa, Homo sapiens
  Payload ID: 19257
  Gene Name: ventral anterior homeobox 1
  Uniprot ID: Q5SQQ9
  ENSP ID: ENSP00000358207
MFGKPDKMDVRCHSDAEAARVSKNAHKESRESKGAEGNLPAAFLKEPQGAFSASGAAEDCNKSKSNSAADPDYCRRILVRDAKGSIREIILPKGLDLDRPKRTRTSFTAEQLYRLEMEFQRCQYVVGRERTELARQLNLSETQVKVWFQNRRTKQKKDQGKDSELRSVVSETAATCSVLRLLEQGRLLSPPGLPALLPPCATGALGSALRGPSLPALGAGAAAGSAAAAAAAAPGPAGAASPHPPAVGGAPGPGPAGPGGLHAGAPAAGHSLFSLPVPSLLGSVASRLSSAPLTMAGSLAGNLQELSARYLSSSAFEPYSRTNNKEGAEKKALD

SEQ ID NO: 96540 - protein, 290 aa, Homo sapiens
  Payload ID: 19258
  Gene Name: ventral anterior homeobox 2
  Uniprot ID: Q9UIW0
  ENSP ID: ENSP00000234392
MGDGGAERDRGPARRAESGGGGGRCGDRSGAGDLRADGGGHSPTEVAGTSASSPAGSRESGADSDGQPGPGEADHCRRILVRDAKGTIREIVLPKGLDLDRPKRTRTSFTAEQLYRLEMEFQRCQYVVGRERTELARQLNLSETQVKVWFQNRRTKQKKDQSRDLEKRASSSASEAFATSNILRLLEQGRLLSVPRAPSLLALTPSLPGLPASHRGTSLGDPRNSSPRLNPLSSASASPPLPPPLPAVCFSSAPLLDLPAGYELGSSAFEPYSWLERKVGSASSCKKANT

SEQ ID NO: 96541 - protein, 833 aa, Homo sapiens
  Payload ID: 19259
  Gene Name: ventricular zone expressed PH domain-containing 1
  Uniprot ID: Q14D04
  ENSP ID: ENSP00000354919
MHQLFRLVLGQKDLSRAGDLFSLDDSEIEDSLTEALEQIKIISSSSDYQTNNNDQAVVEICITRITTAIRETESIEKHAKALVGLWDSCLEHNLRPFGKDEDTPHAKIASDIMSCILQNYNRPPVMALAIPIAVKFLHRGNKELCRNMSNYLSLAAITKADLLADHTEVIVKSILQGNTMLLRVLPAVYEKQPQPINRHLTELLALMSQLEQPEQYHLLRLLHVAAKKKQLEVVQKCIPFLIGHLKDSTHNDIILNILIEIAVYEPVALNSFLPMLKEIGERFPYLTGQMARIYGAVGHVDEERARSCLTYLVSQLANMEHSFHHILLLEIKSITDTFSSILGPQSRDIFRMSNSFTAIAKLLTRQLENTKAGSGRRKISTEIEFPEKLEETKLIVTENEDHEKLQVKIQAFEDKINAGSNTPGSIRRYSLGQVSKEERKNIRFNRSKSLAFHTMLTKGVGSDDGEDENRGDIPASISLSEIDPLGQGNDKLPFKTDTERSQLGESSVSYPNIIHIDSENLSETVKENSQEETPETTASPIEYQDKLYLHLKKNLSKVKAYAMEIGKKIPVPDQCTIEDTVRSCVAKLFFTCSLKGHYCLYSKSSFILISQEPQPWIQIMFLFQQSLFPEPLSIQSHSVQFLRALWEKTQAGGAHSFETAMMESTFPQQKDLDQVQLHLEEVRFFDVFGFSETAGAWQCFMCNNPEKATVVNQDGQPLIEGKLKEKQVRWKFIKRWKTRYFTLAGNQLLFQKGKSKDDPDDCPIELSKVQSVKAVAKKRRDRSLPRAFEIFTDNKTYVFKAKDEKNAEEWLQCINVAVAQAKERESREVTTYL

SEQ ID NO: 96542 - protein, 833 aa, Homo sapiens; identical to SEQ ID NO: 96541
  Payload ID: 19259
  Gene Name: ventricular zone expressed PH domain-containing 1
  Uniprot ID: Q14D04
  ENSP ID: ENSP00000376577

SEQ ID NO: 96543 - protein, 788 aa, Homo sapiens
  Payload ID: 19259
  Gene Name: ventricular zone expressed PH domain-containing 1
  Uniprot ID: Q14D04
  ENSP ID: ENSP00000376578
MHQLFRLVLGQKDLSRAGDLFSLDDSEIEDSLTEALEQIKIISSSSDYQTNNNDQAVVEICITRITTAIRETESIEKHAKALVGLWDSCLEHNLRPFGKDEDTPHAKIASDIMSCILQNYNRPPVMALAIPIAVKFLHRGNKELCRNMSNYLSLAAITKADLLADHTEVIVKSILQGNTMLLRVLPAVYEKQPQPINRHLTELLALMSQLEQPEQYHLLRLLHVAAKKKQLEVVQKCIPFLIGHLKDSTHNDIILNILIEIAVYEPVALNSFLPMLKEIGERFPYLTGQMARIYGAVGHVDEERARSCLTYLVSQLANMEHSFHHILLLEIKSITDTFSSILGPQSRDIFRMSNSFTAIAKLLTRQLENTKAGSGRRKISTEIEFPEKLEETKLIVTENEDHEKLQVKIQAFEDKINAGSNTPGSIRRYSLGQVSKEERKNIRFNRSKSLAFHTMLTKGVGSDDGEDENRGDIPASISLSEIDPLGQGNDKLPFKTDTERSQLGESSVSYPNIIHIDSENLSETVKENSQEETPETTASPIEYQDKLYLHLKKNLSKVKAYAMEIGKKIPVPDQCTIEDTVRSCVAKLFFTCSLKGHYCLYSKSSFILISQEPQPWIQIMFLFQQDLDQVQLHLEEVRFFDVFGFSETAGAWQCFMCNNPEKATVVNQDGQPLIEGKLKEKQVRWKFIKRWKTRYFTLAGNQLLFQKGKSKDDPDDCPIELSKVQSVKAVAKKRRDRSLPRAFEIFTDNKTYVFKAKDEKNAEEWLQCINVAVAQAKERESREVTTYL

SEQ ID NO: 96544 - protein, 62 aa, Homo sapiens
  Payload ID: 19259
  Gene Name: ventricular zone expressed PH domain-containing 1
  ENSP ID: ENSP00000417157
MHQLFRLVLGQKDLSRAGDLFSLDDSEIEDSLTEALEQIKIISSSSDYQTNNNDQAVVEICI

SEQ ID NO: 96545 - protein, 213 aa, Homo sapiens
  Payload ID: 19259
  Gene Name: ventricular zone expressed PH domain-containing 1
  Uniprot ID: Q14D04
  ENSP ID: ENSP00000417268
MHQLFRLVLGQKDLSRAGDLFSLDDSEIEDSLTEALEQIKIISSSSDYQTNNNDQAVVEICITRITTAIRETESIEKHAKALVGLWDSCLEHNLRPFGKDEDTPHAKIASDIMSCILQNYNRPPVMALAIPIAVKFLHRGNKELCRNMSNYLSLAAITKADLLADHTEVIVKSILQGMVRKLSLGTCFGRYLKVFSSSIYGLWEARPRVLEAN

SEQ ID NO: 96546 - protein, 55 aa, Homo sapiens
  Payload ID: 19259
  Gene Name: ventricular zone expressed PH domain-containing 1
  ENSP ID: ENSP00000417298
MHQLFRLVLGQKDLSRAGDLFSLDDSEIEDSLTEALEQIKIISSSSDYQTNNNDQ

SEQ ID NO: 96547 - protein, 52 aa, Homo sapiens
  Payload ID: 19259
  Gene Name: ventricular zone expressed PH domain-containing 1
  ENSP ID: ENSP00000417700
MHQLFRLVLGQKDLSRAGDLFSLDDSEIEDSLTEALEQIKIISSSSSVERQE

SEQ ID NO: 96548 - protein, 69 aa, Homo sapiens
  Payload ID: 19259
  Gene Name: ventricular zone expressed PH domain-containing 1
  ENSP ID: ENSP00000418175
MHQLFRLVLGQKDLSRAGDLFSLDDSEIEDSLTEALEQIKIISSSSKRRTGRDRLNCPFQLPAQKIAEK

SEQ ID NO: 96549 - protein, 120 aa, Homo sapiens
  Payload ID: 19259
  Gene Name: ventricular zone expressed PH domain-containing 1
  ENSP ID: ENSP00000418963
MSCILQNYNRPPVMALAIPIAVKFLHRGNKELCRNMSNYLSLAAITKADLLADHTEVIVKSILQGNTMLLRVLPAVYEKQPQPINRHLTELLALMSQLEQPEQYHLLRLLHVAAKKKQLE

SEQ ID NO: 96550 - protein, 213 aa, Homo sapiens; identical to SEQ ID NO: 96545
  Payload ID: 19259
  Gene Name: ventricular zone expressed PH domain-containing 1
  Uniprot ID: Q14D04
  ENSP ID: ENSP00000419193

SEQ ID NO: 96551 - protein, 165 aa, Homo sapiens
  Payload ID: 19259
  Gene Name: ventricular zone expressed PH domain-containing 1
  ENSP ID: ENSP00000420097
MHQLFRLVLGQKDLSRAGDLFSLDDSEIEDSLTEALEQIKIISSSSDYQTNNNDQAVVEICITRITTAIRETESIEKHAKALVGLWDSCLEHNLRPFGKDEDTPHAKIASDIMSCILQNYNRPPVMALAIPIAVKFLHRGNKELCRNMSNYLSLAAITKADLLAD

SEQ ID NO: 96552 - protein, 177 aa, Homo sapiens
  Payload ID: 19259
  Gene Name: ventricular zone expressed PH domain-containing 1
  Uniprot ID: Q14D04
  ENSP ID: ENSP00000443868
MHQLFRLVLGQKDLSRAGDLFSLDDSEIEDSLTEALEQIKIISSSSDYQTNNNDQAVVEICITRITTAIRETESIEKHAKALVGLWDSCLEHNLRPFGKDEDTPHAKIASDIMSCILQNYNRPPVMALAIPIAVKFLHRGNKELCRNMSNYLSLAAITKADLLADHTEVIVKSILQV

SEQ ID NO: 96553 - protein, 3396 aa, Homo sapiens
  Payload ID: 19260
  Gene Name: versican
  Uniprot ID: P13611
  ENSP ID: ENSP00000265077
MFINIKSILWMCSTLIVTHALHKVKVGKSPPVRGSLSGKVSLPCHFSTMPTLPPSYNTSEFLRIKWSKIEVDKNGKDLKETTVLVAQNGNIKIGQDYKGRVSVPTHPEAVGDASLTVVKLLASDAGLYRCDVMYGIEDTQDTVSLTVDGVVFHYRAATSRYTLNFEAAQKACLDVGAVIATPEQLFAAYEDGFEQCDAGWLADQTVRYPIRAPRVGCYGDKMGKAGVRTYGFRSPQETYDVYCYVDHLDGDVFHLTVPSKFTFEEAAKECENQDARLATVGELQAAWRNGFDQCDYGWLSDASVRHPVTVARAQCGGGLLGVRTLYRFENQTGFPPPDSRFDAYCFKPKEATTIDLSILAETASPSLSKEPQMVSDRTTPIIPLVDELPVIPTEFPPVGNIVSFEQKATVQPQAITDSLATKLPTPTGSTKKPWDMDDYSPSASGPLGKLDISEIKEEVLQSTTGVSHYATDSWDGVVEDKQTQESVTQIEQIEVGPLVTSMEILKHIPSKEFPVTETPLVTARMILESKTEKKMVSTVSELVTTGHYGFTLGEEDDEDRTLTVGSDESTLIFDQIPEVITVSKTSEDTIHTHLEDLESVSASTTVSPLIMPDNNGSSMDDWEERQTSGRITEEFLGKYLSTTPFPSQHRTEIELFPYSGDKILVEGISTVIYPSLQTEMTHRRERTETLIPEMRTDTYTDEIQEEITKSPFMGKTEEEVFSGMKLSTSLSEPIHVTESSVEMTKSFDFPTLITKLSAEPTEVRDMEEDFTATPGTTKYDENITTVLLAHGTLSVEAATVSKWSWDEDNTTSKPLESTEPSASSKLPPALLTTVGMNGKDKDIPSFTEDGADEFTLIPDSTQKQLEEVTDEDIAAHGKFTIRFQPTTSTGIAEKSTLRDSTTEEKVPPITSTEGQVYATMEGSALGEVEDVDLSKPVSTVPQFAHTSEVEGLAFVSYSSTQEPTTYVDSSHTIPLSVIPKTDWGVLVPSVPSEDEVLGEPSQDILVIDQTRLEATISPETMRTTKITEGTTQEEFPWKEQTAEKPVPALSSTAWTPKEAVTPLDEQEGDGSAYTVSEDELLTGSERVPVLETTPVGKIDHSVSYPPGAVTEHKVKTDEVVTLTPRIGPKVSLSPGPEQKYETEGSSTTGFTSSLSPFSTHITQLMEETTTEKTSLEDIDLGSGLFEKPKATELIEFSTIKVTVPSDITTAFSSVDRLHTTSAFKPSSAITKKPPLIDREPGEETTSDMVIIGESTSHVPPTTLEDIVAKETETDIDREYFTTSSPPATQPTRPPTVEDKEAFGPQALSTPQPPASTKFHPDINVYIIEVRENKTGRMSDLSVIGHPIDSESKEDEPCSEETDPVHDLMAEILPEFPDIIEIDLYHSEENEEEEEECANATDVTTTPSVQYINGKHLVTTVPKDPEAAEARRGQFESVAPSQNFSDSSESDTHPFVIAKTELSTAVQPNESTETTESLEVTWKPETYPETSEHFSGGEPDVFPTVPFHEEFESGTAKKGAESVTERDTEVGHQAHEHTEPVSLFPEESSGEIAIDQESQKIAFARATEVTFGEEVEKSTSVTYTPTIVPSSASAYVSEEEAVTLIGNPWPDDLLSTKESWVEATPRQVVELSGSSSIPITEGSGEAEEDEDTMFTMVTDLSQRNTTDTLITLDTSRIITESFFEVPATTIYPVSEQPSAKVVPTKFVSETDTSEWISSTTVEEKKRKEEEGTTGTASTFEVYSSTQRSDQLILPFELESPNVATSSDSGTRKSFMSLTTPTQSEREMTDSTPVFTETNTLENLGAQTTEHSSIHQPGVQEGLTTLPRSPASVFMEQGSGEAAADPETTTVSSFSLNVEYAIQAEKEVAGTLSPHVETTFSTEPTGLVLSTVMDRVVAENITQTSREIVISERLGEPNYGAEIRGFSTGFPLEEDFSGDFREYSTVSHPIAKEETVMMEGSGDAAFRDTQTSPSTVPTSVHISHISDSEGPSSTMVSTSAFPWEEFTSSAEGSGEQLVTVSSSVVPVLPSAVQKFSGTASSIIDEGLGEVGTVNEIDRRSTILPTAEVEGTKAPVEKEEVKVSGTVSTNFPQTIEPAKLWSRQEVNPVRQEIESETTSEEQIQEEKSFESPQNSPATEQTIFDSQTFTETELKTTDYSVLTTKKTYSDDKEMKEEDTSLVNMSTPDPDANGLESYTTLPEATEKSHFFLATALVTESIPAEHVVTDSPIKKEESTKHFPKGMRPTIQESDTELLFSGLGSGEEVLPTLPTESVNFTEVEQINNTLYPHTSQVESTSSDKIEDFNRMENVAKEVGPLVSQTDIFEGSGSVTSTTLIEILSDTGAEGPTVAPLPFSTDIGHPQNQTVRWAEEIQTSRPQTITEQDSNKNSSTAEINETTTSSTDFLARAYGFEMAKEFVTSAPKPSDLYYEPSGEGSGEVDIVDSFHTSATTQATRQESSTTFVSDGSLEKHPEVPSAKAVTADGFPTVSVMLPLHSEQNKSSPDPTSTLSNTVSYERSTDGSFQDRFREFEDSTLKPNRKKPTENIIIDLDKEDKDLILTITESTILEILPELTSDKNTIIDIDHTKPVYEDILGMQTDIDTEVPSEPHDSNDESNDDSTQVQEIYEAAVNLSLTEETFEGSADVLASYTQATHDESMTYEDRSQLDHMGFHFTTGIPAPSTETELDVLLPTATSLPIPRKSATVIPEIEGIKAEAKALDDMFESSTLSDGQAIADQSEIIPTLGQFERTQEEYEDKKHAGPSFQPEFSSGAEEALVDHTPYLSIATTHLMDQSVTEVPDVMEGSNPPYYTDTTLAVSTFAKLSSQTPSSPLTIYSGSEASGHTEIPQPSALPGIDVGSSVMSPQDSFKEIHVNIEATFKPSSEEYLHITEPPSLSPDTKLEPSEDDGKPELLEEMEASPTELIAVEGTEILQDFQNKTDGQVSGEAIKMFPTIKTPEAGTVITTADEIELEGATQWPHSTSASATYGVEAGVVPWLSPQTSERPTLSSSPEINPETQAALIRGQDSTIAASEQQVAARILDSNDQATVNPVEFNTEVATPPFSLLETSNETDFLIGINEESVEGTAIYLPGPDRCKMNPCLNGGTCYPTETSYVCTCVPGYSGDQCELDFDECHSNPCRNGATCVDGFNTFRCLCLPSYVGALCEQDTETCDYGWHKFQGQCYKYFAHRRTWDAAERECRLQGAHLTSILSHEEQMFVNRVGHDYQWIGLNDKMFEHDFRWTDGSTLQYENWRPNQPDSFFSAGEDCVVIIWHENGQWNDVPCNYHLTYTCKKGTVACGQPPVVENAKTFGKMKPRYEINSLIRYHCKDGFIQRHLPTIRCLGNGRWAIPKITCMNPSAYQRTYSMKYFKNSSSAKDNSINTSKHDHRWSRRWQESRR

SEQ ID NO: 96554 - protein, 2409 aa, Homo sapiens
  Payload ID: 19260
  Gene Name: versican
  Uniprot ID: P13611
  ENSP ID: ENSP00000340062
MFINIKSILWMCSTLIVTHALHKVKVGKSPPVRGSLSGKVSLPCHFSTMPTLPPSYNTSEFLRIKWSKIEVDKNGKDLKETTVLVAQNGNIKIGQDYKGRVSVPTHPEAVGDASLTVVKLLASDAGLYRCDVMYGIEDTQDTVSLTVDGVVFHYRAATSRYTLNFEAAQKACLDVGAVIATPEQLFAAYEDGFEQCDAGWLADQTVRYPIRAPRVGCYGDKMGKAGVRTYGFRSPQETYDVYCYVDHLDGDVFHLTVPSKFTFEEAAKECENQDARLATVGELQAAWRNGFDQCDYGWLSDASVRHPVTVARAQCGGGLLGVRTLYRFENQTGFPPPDSRFDAYCFKRRMSDLSVIGHPIDSESKEDEPCSEETDPVHDLMAEILPEFPDIIEIDLYHSEENEEEEEECANATDVTTTPSVQYINGKHLVTTVPKDPEAAEARRGQFESVAPSQNFSDSSESDTHPFVIAKTELSTAVQPNESTETTESLEVTWKPETYPETSEHFSGGEPDVFPTVPFHEEFESGTAKKGAESVTERDTEVGHQAHEHTEPVSLFPEESSGEIAIDQESQKIAFARATEVTFGEEVEKSTSVTYTPTIVPSSASAYVSEEEAVTLIGNPWPDDLLSTKESWVEATPRQVVELSGSSSIPITEGSGEAEEDEDTMFTMVTDLSQRNTTDTLITLDTSRIITESFFEVPATTIYPVSEQPSAKVVPTKFVSETDTSEWISSTTVEEKKRKEEEGTTGTASTFEVYSSTQRSDQLILPFELESPNVATSSDSGTRKSFMSLTTPTQSEREMTDSTPVFTETNTLENLGAQTTEHSSIHQPGVQEGLTTLPRSPASVFMEQGSGEAAADPETTTVSSFSLNVEYAIQAEKEVAGTLSPHVETTFSTEPTGLVLSTVMDRVVAENITQTSREIVISERLGEPNYGAEIRGFSTGFPLEEDFSGDFREYSTVSHPIAKEETVMMEGSGDAAFRDTQTSPSTVPTSVHISHISDSEGPSSTMVSTSAFPWEEFTSSAEGSGEQLVTVSSSVVPVLPSAVQKFSGTASSIIDEGLGEVGTVNEIDRRSTILPTAEVEGTKAPVEKEEVKVSGTVSTNFPQTIEPAKLWSRQEVNPVRQEIESETTSEEQIQEEKSFESPQNSPATEQTIFDSQTFTETELKTTDYSVLTTKKTYSDDKEMKEEDTSLVNMSTPDPDANGLESYTTLPEATEKSHFFLATALVTESIPAEHVVTDSPIKKEESTKHFPKGMRPTIQESDTELLFSGLGSGEEVLPTLPTESVNFTEVEQINNTLYPHTSQVESTSSDKIEDFNRMENVAKEVGPLVSQTDIFEGSGSVTSTTLIEILSDTGAEGPTVAPLPFSTDIGHPQNQTVRWAEEIQTSRPQTITEQDSNKNSSTAEINETTTSSTDFLARAYGFEMAKEFVTSAPKPSDLYYEPSGEGSGEVDIVDSFHTSATTQATRQESSTTFVSDGSLEKHPEVPSAKAVTADGFPTVSVMLPLHSEQNKSSPDPTSTLSNTVSYERSTDGSFQDRFREFEDSTLKPNRKKPTENIIIDLDKEDKDLILTITESTILEILPELTSDKNTIIDIDHTKPVYEDILGMQTDIDTEVPSEPHDSNDESNDDSTQVQEIYEAAVNLSLTEETFEGSADVLASYTQATHDESMTYEDRSQLDHMGFHFTTGIPAPSTETELDVLLPTATSLPIPRKSATVIPEIEGIKAEAKALDDMFESSTLSDGQAIADQSEIIPTLGQFERTQEEYEDKKHAGPSFQPEFSSGAEEALVDHTPYLSIATTHLMDQSVTEVPDVMEGSNPPYYTDTTLAVSTFAKLSSQTPSSPLTIYSGSEASGHTEIPQPSALPGIDVGSSVMSPQDSFKEIHVNIEATFKPSSEEYLHITEPPSLSPDTKLEPSEDDGKPELLEEMEASPTELIAVEGTEILQDFQNKTDGQVSGEAIKMFPTIKTPEAGTVITTADEIELEGATQWPHSTSASATYGVEAGVVPWLSPQTSERPTLSSSPEINPETQAALIRGQDSTIAASEQQVAARILDSNDQATVNPVEFNTEVATPPFSLLETSNETDFLIGINEESVEGTAIYLPGPDRCKMNPCLNGGTCYPTETSYVCTCVPGYSGDQCELDFDECHSNPCRNGATCVDGFNTFRCLCLPSYVGALCEQDTETCDYGWHKFQGQCYKYFAHRRTWDAAERECRLQGAHLTSILSHEEQMFVNRVGHDYQWIGLNDKMFEHDFRWTDGSTLQYENWRPNQPDSFFSAGEDCVVIIWHENGQWNDVPCNYHLTYTCKKGTVACGQPPVVENAKTFGKMKPRYEINSLIRYHCKDGFIQRHLPTIRCLGNGRWAIPKITCMNPSAYQRTYSMKYFKNSSSAKDNSINTSKHDHRWSRRWQESRR

SEQ ID NO: 96555 - protein, 1642 aa, Homo sapiens
  Payload ID: 19260
  Gene Name: versican
  Uniprot ID: P13611
  ENSP ID: ENSP00000342768
MFINIKSILWMCSTLIVTHALHKVKVGKSPPVRGSLSGKVSLPCHFSTMPTLPPSYNTSEFLRIKWSKIEVDKNGKDLKETTVLVAQNGNIKIGQDYKGRVSVPTHPEAVGDASLTVVKLLASDAGLYRCDVMYGIEDTQDTVSLTVDGVVFHYRAATSRYTLNFEAAQKACLDVGAVIATPEQLFAAYEDGFEQCDAGWLADQTVRYPIRAPRVGCYGDKMGKAGVRTYGFRSPQETYDVYCYVDHLDGDVFHLTVPSKFTFEEAAKECENQDARLATVGELQAAWRNGFDQCDYGWLSDASVRHPVTVARAQCGGGLLGVRTLYRFENQTGFPPPDSRFDAYCFKPKEATTIDLSILAETASPSLSKEPQMVSDRTTPIIPLVDELPVIPTEFPPVGNIVSFEQKATVQPQAITDSLATKLPTPTGSTKKPWDMDDYSPSASGPLGKLDISEIKEEVLQSTTGVSHYATDSWDGVVEDKQTQESVTQIEQIEVGPLVTSMEILKHIPSKEFPVTETPLVTARMILESKTEKKMVSTVSELVTTGHYGFTLGEEDDEDRTLTVGSDESTLIFDQIPEVITVSKTSEDTIHTHLEDLESVSASTTVSPLIMPDNNGSSMDDWEERQTSGRITEEFLGKYLSTTPFPSQHRTEIELFPYSGDKILVEGISTVIYPSLQTEMTHRRERTETLIPEMRTDTYTDEIQEEITKSPFMGKTEEEVFSGMKLSTSLSEPIHVTESSVEMTKSFDFPTLITKLSAEPTEVRDMEEDFTATPGTTKYDENITTVLLAHGTLSVEAATVSKWSWDEDNTTSKPLESTEPSASSKLPPALLTTVGMNGKDKDIPSFTEDGADEFTLIPDSTQKQLEEVTDEDIAAHGKFTIRFQPTTSTGIAEKSTLRDSTTEEKVPPITSTEGQVYATMEGSALGEVEDVDLSKPVSTVPQFAHTSEVEGLAFVSYSSTQEPTTYVDSSHTIPLSVIPKTDWGVLVPSVPSEDEVLGEPSQDILVIDQTRLEATISPETMRTTKITEGTTQEEFPWKEQTAEKPVPALSSTAWTPKEAVTPLDEQEGDGSAYTVSEDELLTGSERVPVLETTPVGKIDHSVSYPPGAVTEHKVKTDEVVTLTPRIGPKVSLSPGPEQKYETEGSSTTGFTSSLSPFSTHITQLMEETTTEKTSLEDIDLGSGLFEKPKATELIEFSTIKVTVPSDITTAFSSVDRLHTTSAFKPSSAITKKPPLIDREPGEETTSDMVIIGESTSHVPPTTLEDIVAKETETDIDREYFTTSSPPATQPTRPPTVEDKEAFGPQALSTPQPPASTKFHPDINVYIIEVRENKTGPDRCKMNPCLNGGTCYPTETSYVCTCVPGYSGDQCELDFDECHSNPCRNGATCVDGFNTFRCLCLPSYVGALCEQDTETCDYGWHKFQGQCYKYFAHRRTWDAAERECRLQGAHLTSILSHEEQMFVNRVGHDYQWIGLNDKMFEHDFRWTDGSTLQYENWRPNQPDSFFSAGEDCVVIIWHENGQWNDVPCNYHLTYTCKKGTVACGQPPVVENAKTFGKMKPRYEINSLIRYHCKDGFIQRHLPTIRCLGNGRWAIPKITCMNPSAYQRTYSMKYFKNSSSAKDNSINTSKHDHRWSRRWQESRR

SEQ ID NO: 96556 - protein, 655 aa, Homo sapiens
  Payload ID: 19260
  Gene Name: versican
  Uniprot ID: P13611
  ENSP ID: ENSP00000421362
MFINIKSILWMCSTLIVTHALHKVKVGKSPPVRGSLSGKVSLPCHFSTMPTLPPSYNTSEFLRIKWSKIEVDKNGKDLKETTVLVAQNGNIKIGQDYKGRVSVPTHPEAVGDASLTVVKLLASDAGLYRCDVMYGIEDTQDTVSLTVDGVVFHYRAATSRYTLNFEAAQKACLDVGAVIATPEQLFAAYEDGFEQCDAGWLADQTVRYPIRAPRVGCYGDKMGKAGVRTYGFRSPQETYDVYCYVDHLDGDVFHLTVPSKFTFEEAAKECENQDARLATVGELQAAWRNGFDQCDYGWLSDASVRHPVTVARAQCGGGLLGVRTLYRFENQTGFPPPDSRFDAYCFKRPDRCKMNPCLNGGTCYPTETSYVCTCVPGYSGDQCELDFDECHSNPCRNGATCVDGFNTFRCLCLPSYVGALCEQDTETCDYGWHKFQGQCYKYFAHRRTWDAAERECRLQGAHLTSILSHEEQMFVNRVGHDYQWIGLNDKMFEHDFRWTDGSTLQYENWRPNQPDSFFSAGEDCVVIIWHENGQWNDVPCNYHLTYTCKKGTVACGQPPVVENAKTFGKMKPRYEINSLIRYHCKDGFIQRHLPTIRCLGNGRWAIPKITCMNPSAYQRTYSMKYFKNSSSAKDNSINTSKHDHRWSRRWQESRR

SEQ ID NO: 96557 - protein, 1594 aa, Homo sapiens
  Payload ID: 19260
  Gene Name: versican
  ENSP ID: ENSP00000425959
MPTLPPSYNTSEFLRIKWSKIEVDKNGKDLKETTVLVAQNGNIKIGQDYKGRVSVPTHPEAVGDASLTVVKLLASDAGLYRCDVMYGIEDTQDTVSLTVDGVVFHYRAATSRYTLNFEAAQKACLDVGAVIATPEQLFAAYEDGFEQCDAGWLADQTVRYPIRAPRVGCYGDKMGKAGVRTYGFRSPQETYDVYCYVDHLDGDVFHLTVPSKFTFEEAAKECENQDARLATVGELQAAWRNGFDQCDYGWLSDASVRHPVTVARAQCGGGLLGVRTLYRFENQTGFPPPDSRFDAYCFKPKEATTIDLSILAETASPSLSKEPQMVSDRTTPIIPLVDELPVIPTEFPPVGNIVSFEQKATVQPQAITDSLATKLPTPTGSTKKPWDMDDYSPSASGPLGKLDISEIKEEVLQSTTGVSHYATDSWDGVVEDKQTQESVTQIEQIEVGPLVTSMEILKHIPSKEFPVTETPLVTARMILESKTEKKMVSTVSELVTTGHYGFTLGEEDDEDRTLTVGSDESTLIFDQIPEVITVSKTSEDTIHTHLEDLESVSASTTVSPLIMPDNNGSSMDDWEERQTSGRITEEFLGKYLSTTPFPSQHRTEIELFPYSGDKILVEGISTVIYPSLQTEMTHRRERTETLIPEMRTDTYTDEIQEEITKSPFMGKTEEEVFSGMKLSTSLSEPIHVTESSVEMTKSFDFPTLITKLSAEPTEVRDMEEDFTATPGTTKYDENITTVLLAHGTLSVEAATVSKWSWDEDNTTSKPLESTEPSASSKLPPALLTTVGMNGKDKDIPSFTEDGADEFTLIPDSTQKQLEEVTDEDIAAHGKFTIRFQPTTSTGIAEKSTLRDSTTEEKVPPITSTEGQVYATMEGSALGEVEDVDLSKPVSTVPQFAHTSEVEGLAFVSYSSTQEPTTYVDSSHTIPLSVIPKTDWGVLVPSVPSEDEVLGEPSQDILVIDQTRLEATISPETMRTTKITEGTTQEEFPWKEQTAEKPVPALSSTAWTPKEAVTPLDEQEGDGSAYTVSEDELLTGSERVPVLETTPVGKIDHSVSYPPGAVTEHKVKTDEVVTLTPRIGPKVSLSPGPEQKYETEGSSTTGFTSSLSPFSTHITQLMEETTTEKTSLEDIDLGSGLFEKPKATELIEFSTIKVTVPSDITTAFSSVDRLHTTSAFKPSSAITKKPPLIDREPGEETTSDMVIIGESTSHVPPTTLEDIVAKETETDIDREYFTTSSPPATQPTRPPTVEDKEAFGPQALSTPQPPASTKFHPDINVYIIEVRENKTGPDRCKMNPCLNGGTCYPTETSYVCTCVPGYSGDQCELDFDECHSNPCRNGATCVDGFNTFRCLCLPSYVGALCEQDTETCDYGWHKFQGQCYKYFAHRRTWDAAERECRLQGAHLTSILSHEEQMFVNRVGHDYQWIGLNDKMFEHDFRWTDGSTLQYENWRPNQPDSFFSAGEDCVVIIWHENGQWNDVPCNYHLTYTCKKGTVACGQPPVVENAKTFGKMKPRYEINSLIRYHCKDGFIQRHLPTIRCLGNGRWAIPKITCMNPSAYQRTYSMKYFKNSSSAKDNSINTSKHDHRWSRRWQESRR

SEQ ID NO: 96558 - protein, 1240 aa, Homo sapiens
  Payload ID: 19260
  Gene Name: versican
  ENSP ID: ENSP00000426251
MFINIKSILWMCSTLIVTHALHKVKVGKSPPVRGSLSGKVSLPCHFSTMPTLPPSYNTSEFLRIKWSKIEVDKNGKDLKETTVLVAQNGNIKIGQDYKGRVSVPTHPEAVGDASLTVVKLLASDAGLYRCDVMYGIEDTQDTVSLTVDGVVFHYRAATSRYTLNFEAAQKACLDVGAVIATPEQLFAAYEDGFEQCDAGWLADQTVRYPIRAPRVGCYGDKMGKAGVRTYGFRSPQETYDVYCYVDHLDGDVFHLTVPSKFTFEEAAKECENQDARLATVGELQAAWRNGFDQCDYGWLSDASVRHPVTVARAQCGGGLLGVRTLYRFENQTGFPPPDSRFDAYCFKRRMSDLSVIGHPIDSESKEDEPCSEETDPVHDLMAEILPEFPDIIEIDLYHSEENEEEEEECANATDVTTTPSVQYINGKHLVTTVPKDPEAAEARRGQFESVAPSQNFSDSSESDTHPFVIAKTELSTAVQPNESTETTESLEVTWKPETYPETSEHFSGGEPDVFPTVPFHEEFESGTAKKGAESVTERDTEVGHQAHEHTEPVSLFPEESSGEIAIDQESQKIAFARATEVTFGEEVEKSTSVTYTPTIVPSSASAYVSEEEAVTLIGNPWPDDLLSTKESWVEATPRQVVELSGSSSIPITEGSGEAEEDEDTMFTMVTDLSQRNTTDTLITLDTSRIITESFFEVPATTIYPVSEQPSAKVVPTKFVSETDTSEWISSTTVEEKKRKEEEGTTGTASTFEVYSSTQRSDQLILPFELESPNVATSSDSGTRKSFMSLTTPTQSEREMTDSTPVFTETNTLENLGAQTTEHSSIHQPGVQEGLTTLPRSPASVFMEQGSGEAAADPETTTVSSFSLNVEYAIQAEKEVAGTLSPHVETTFSTEPTGLVLSTVMDRVVAENITQTSREIVISERLGEPNYGAEIRGFSTGFPLEEDFSGDFREYSTVSHPIAKEETVMMEGSGDAAFRDTQTSPSTVPTSVHISHISDSEGPSSTMVSTSAFPWEEFTSSAEGSGEQLVTVSSSVVPVLPSAVQKFSGTASSIIDEGLGEVGTVNEIDRRSTILPTAEVEGTKAPVEKEEVKVSGTVSTNFPQTIEPAKLWSRQEVNPVRQEIESETTSEEQIQEEKSFESPQNSPATEQTIFDSQTFTETELKTTDYSVLTTKKTYSDDKEMKEEDTSLVNMSTPDPDANGLESYTTLPEATEKSHFFLATALVTESIPAEHVVTDSPI

SEQ ID NO: 96559 - protein, 354 aa, Homo sapiens
  Payload ID: 19260
  Gene Name: versican
  ENSP ID: ENSP00000426715
MFINIKSILWMCSTLIVTHALHKVKVGKSPPVRGSLSGKVSLPCHFSTMPTLPPSYNTSEFLRIKWSKIEVDKNGKDLKETTVLVAQNGNIKIGQDYKGRVSVPTHPEAVGDASLTVVKLLASDAGLYRCDVMYGIEDTQDTVSLTVDGVVFHYRAATSRYTLNFEAAQKACLDVGAVIATPEQLFAAYEDGFEQCDAGWLADQTVRYPIRAPRVGCYGDKMGKAGVRTYGFRSPQETYDVYCYVDHLDGDVFHLTVPSKFTFEEAAKECENQDARLATVGELQAAWRNGFDQCDYGWLSDASVRHPVTVARAQCGGGLLGVRTLYRFENQTGFPPPDSRFDAYCFKRKCLIPF

SEQ ID NO: 96560 - protein, 702 aa, Homo sapiens
  Payload ID: 19261
  Gene Name: vertebrae development associated
  Uniprot ID: Q9H8Y1
  ENSP ID: ENSP00000256362
MTSRNQLVQKVLQELQEAVECEGLEGLIGASLEAKQVLSSFTLPTCREGGPGLQVLEVDSVALSLYPEDAPRNMLPLVCKGEGSLLFEAASMLLWGDAGLSLELRARTVVEMLLHRHYYLQGMIDSKVMLQAVRYSLCSEESPEMTSLPPATLEAIFDADVKASCFPSSFSNVWHLYALASVLQRNIYSIYPMRNLKIRPYFNRVIRPRRCDHVPSTLHIMWAGQPLTSHFFRHQYFAPVVGLEEVEAEGAPGVAPALPALAPLSSPAKTLELLNREPGLSYSHLCERYSVTKSTFYRWRRQSQEHRQKVAARFSAKHFLQDSFHRGGVVPLQQFLQRFPEISRSTYYAWKHELLGSGTCPALPPREVLGMEELEKLPEEQVAEEELECSALAVSSPGMVLMQRAKLYLEHCISLNTLVPYRCFKRRFPGISRSTYYNWRRKALRRNPSFKPAPALSAAGTPQLASVGEGAVIPWKSEAEEGAGNATGEDPPAPGELLPLRMPLSRWQRRLRRAARRQVLSGHLPFCRFRLRYPSLSPSAFWVWKSLARGWPRGLSKLQVPVPTLGKGGQEAEEKQEKEAGRDVTAVMAPPVGASSEDVEGGPSREGALQEGATAQGQPHSGPLLSQPVVAAAGGRDGRMLVMDMIATTKFKAQAKLFLQKRFQSKSFPSYKEFSALFPLTARSTYYMWKRALYDGLTLVDG

SEQ ID NO: 96561 - protein, 83 aa, Homo sapiens
  Payload ID: 19261
  Gene Name: vertebrae development associated
  ENSP ID: ENSP00000452158
MTSRNQLVQKVLQELQEAVECEGLEGLIGASLEAKQVLSSFTLPTCREGGPGLQVLEVDSVALSLYPEDAPRNMLPLVCKGEG

SEQ ID NO: 96562 - protein, 173 aa, Homo sapiens
  Payload ID: 19262
  Gene Name: very low density lipoprotein receptor
  ENSP ID: ENSP00000371528
MGTSALWALWLLLALCWAPRESGATGTGRKAKCEPSQFQCTNGRCITLLWKCDGDEDCVDGSDEKNCVKKTCAESDFVCNNGQCVPSRWKCDGDPDCEDGSDESPEQCRNITCSPDEFTCSSGRCISRNFVCNGQDDCSDGSDELDCAPPTCGAHEFQCSTSSCIPISWVCDD

SEQ ID NO: 96563 - protein, 845 aa, Homo sapiens
  Payload ID: 19262
  Gene Name: very low density lipoprotein receptor
  Uniprot ID: P98155
  ENSP ID: ENSP00000371531
MGTSALWALWLLLALCWAPRESGATGTGRKAKCEPSQFQCTNGRCITLLWKCDGDEDCVDGSDEKNCVKKTCAESDFVCNNGQCVPSRWKCDGDPDCEDGSDESPEQCHMRTCRIHEISCGAHSTQCIPVSWRCDGENDCDSGEDEENCGNITCSPDEFTCSSGRCISRNFVCNGQDDCSDGSDELDCAPPTCGAHEFQCSTSSCIPISWVCDDDADCSDQSDESLEQCGRQPVIHTKCPASEIQCGSGECIHKKWRCDGDPDCKDGSDEVNCPSRTCRPDQFECEDGSCIHGSRQCNGIRDCVDGSDEVNCKNVNQCLGPGKFKCRSGECIDISKVCNQEQDCRDWSDEPLKECHINECLVNNGGCSHICKDLVIGYECDCAAGFELIDRKTCGDIDECQNPGICSQICINLKGGYKCECSRGYQMDLATGVCKAVGKEPSLIFTNRRDIRKIGLERKEYIQLVEQLRNTVALDADIAAQKLFWADLSQKAIFSASIDDKVGRHVKMIDNVYNPAAIAVDWVYKTIYWTDAASKTISVATLDGTKRKFLFNSDLREPASIAVDPLSGFVYWSDWGEPAKIEKAGMNGFDRRPLVTADIQWPNGITLDLIKSRLYWLDSKLHMLSSVDLNGQDRRIVLKSLEFLAHPLALTIFEDRVYWIDGENEAVYGANKFTGSELATLVNNLNDAQDIIVYHELVQPSGKNWCEEDMENGGCEYLCLPAPQINDHSPKYTCSCPSGYNVEENGRDCQRINVTTAVSEVSVPPKGTSAAWAILPLLLLVMAAVGGYLMWRNWQHKNMKSMNFDNPVYLKTTEEDLSIDIGRHSASVGHTYPAISVVSTDDDLA

SEQ ID NO: 96564 - protein, 873 aa, Homo sapiens
  Payload ID: 19262
  Gene Name: very low density lipoprotein receptor
  Uniprot ID: P98155
  ENSP ID: ENSP00000371532
MGTSALWALWLLLALCWAPRESGATGTGRKAKCEPSQFQCTNGRCITLLWKCDGDEDCVDGSDEKNCVKKTCAESDFVCNNGQCVPSRWKCDGDPDCEDGSDESPEQCHMRTCRIHEISCGAHSTQCIPVSWRCDGENDCDSGEDEENCGNITCSPDEFTCSSGRCISRNFVCNGQDDCSDGSDELDCAPPTCGAHEFQCSTSSCIPISWVCDDDADCSDQSDESLEQCGRQPVIHTKCPASEIQCGSGECIHKKWRCDGDPDCKDGSDEVNCPSRTCRPDQFECEDGSCIHGSRQCNGIRDCVDGSDEVNCKNVNQCLGPGKFKCRSGECIDISKVCNQEQDCRDWSDEPLKECHINECLVNNGGCSHICKDLVIGYECDCAAGFELIDRKTCGDIDECQNPGICSQICINLKGGYKCECSRGYQMDLATGVCKAVGKEPSLIFTNRRDIRKIGLERKEYIQLVEQLRNTVALDADIAAQKLFWADLSQKAIFSASIDDKVGRHVKMIDNVYNPAAIAVDWVYKTIYWTDAASKTISVATLDGTKRKFLFNSDLREPASIAVDPLSGFVYWSDWGEPAKIEKAGMNGFDRRPLVTADIQWPNGITLDLIKSRLYWLDSKLHMLSSVDLNGQDRRIVLKSLEFLAHPLALTIFEDRVYWIDGENEAVYGANKFTGSELATLVNNLNDAQDIIVYHELVQPSGKNWCEEDMENGGCEYLCLPAPQINDHSPKYTCSCPSGYNVEENGRDCQSTATTVTYSETKDTNTTEISATSGLVPGGINVTTAVSEVSVPPKGTSAAWAILPLLLLVMAAVGGYLMWRNWQHKNMKSMNFDNPVYLKTTEEDLSIDIGRHSASVGHTYPAISVVSTDDDLA

SEQ ID NO: 96565 - protein, 249 aa, Homo sapiens
  Payload ID: 19263
  Gene Name: vesicle (multivesicular body) trafficking 1
  ENSP ID: ENSP00000356593
MTSETLWWLITLKKQLGDNEAITQEIVGCAHLENYALKMFLYADNEDRAGRFHKNMIKSFYTASLLIDVITVFGELTDENVKHRKYARWKATYIHNCLKNGETPQAGPVGIEEDNDIEENEDAGAASLPTQPTQPSSSSTYDPSNMPSGNYTGIQIPPGAHAPANTPAEVPHSTGVASNTIQPTPQTIPAIDPALFNTISQGDVRLTPEDFARAQKYCKYAGSALQYEDVSTAVQNLQKALKLLTTGRE

SEQ ID NO: 96566 - protein, 307 aa, Homo sapiens
  Payload ID: 19263
  Gene Name: vesicle (multivesicular body) trafficking 1
  Uniprot ID: Q9NP79
  ENSP ID: ENSP00000356602
MAALAPLPPLPAQFKSIQHHLRTAQEHDKRDPVVAYYCRLYAMQTGMKIDSKTPECRKFLSKLMDQLEALKKQLGDNEAITQEIVGCAHLENYALKMFLYADNEDRAGRFHKNMIKSFYTASLLIDVITVFGELTDENVKHRKYARWKATYIHNCLKNGETPQAGPVGIEEDNDIEENEDAGAASLPTQPTQPSSSSTYDPSNMPSGNYTGIQIPPGAHAPANTPAEVPHSTGVASNTIQPTPQTIPAIDPALFNTISQGDVRLTPEDFARAQKYCKYAGSALQYEDVSTAVQNLQKALKLLTTGRE

SEQ ID NO: 96567 - protein, 222 aa, Homo sapiens
  Payload ID: 19263
  Gene Name: vesicle (multivesicular body) trafficking 1
  Uniprot ID: Q9NP79
  ENSP ID: ENSP00000395767
MTSETLWWLITLKKQLGDNEAITQEIVGCAHLENYALKMFLYADNEDRAGRFHKNMIKSFYTASLLIDVITVFGELTDENVKHRKYARWKATYIHNCLKNGETPQAGPVGIEEDNDIEENEDAGAASLPTQPTQPSSSSTYDPSNMPSGNYTGIQIPPGAHAPANTPAEVPHSTGDVRLTPEDFARAQKYCKYAGSALQYEDVSTAVQNLQKALKLLTTGRE

SEQ ID NO: 96568 - protein, 280 aa, Homo sapiens
  Payload ID: 19263
  Gene Name: vesicle (multivesicular body) trafficking 1
  ENSP ID: ENSP00000481525
MAALAPLPPLPAQFKSIQHHLRTAQEHDKRDPVVAYYCRLYAMQTGMKIDSKTPECRKFLSKLMDQLEALKKQLGDNEAITQEIVGCAHLENYALKMFLYADNEDRAGRFHKNMIKSFYTASLLIDVITVFGELTDENVKHRKYARWKATYIHNCLKNGETPQAGPVGIEEDNDIEENEDAGAASLPTQPTQPSSSSTYDPSNMPSGNYTGIQIPPGAHAPANTPAEVPHSTGDVRLTPEDFARAQKYCKYAGSALQYEDVSTAVQNLQKALKLLTTGRE

SEQ ID NO: 96569 - protein, 393 aa, Homo sapiens
  Payload ID: 19264
  Gene Name: vesicle amine transport 1
  Uniprot ID: Q99536
  ENSP ID: ENSP00000347872
MSDEREVAEAATGEDASSPPPKTEAASDPQHPAASEGAAAAAASPPLLRCLVLTGFGGYDKVKLQSRPAAPPAPGPGQLTLRLRACGLNFADLMARQGLYDRLPPLPVTPGMEGAGVVIAVGEGVSDRKAGDRVMVLNRSGMWQEEVTVPSVQTFLIPEAMTFEEAAALLVNYITAYMVLFDFGNLQPGHSVLVHMAAGGVGMAAVQLCRTVENVTVFGTASASKHEALKENGVTHPIDYHTTDYVDEIKKISPKGVDIVMDPLGGSDTAKGYNLLKPMGKVVTYGMANLLTGPKRNLMALARTWWNQFSVTALQLLQANRAVCGFHLGYLDGEVELVSGVVARLLALYNQGHIKPHIDSVWPFEKVADAMKQMQEKKNVGKVLLVPGPEKEN

SEQ ID NO: 96570 - protein, 259 aa, Homo sapiens
  Payload ID: 19264
  Gene Name: vesicle amine transport 1
  Uniprot ID: Q99536
  ENSP ID: ENSP00000408553
MVLNRSGMWQEEVTVPSVQTFLIPEAMTFEEAAALLVNYITAYMVLFDFGNLQPGHSVLVHMAAGGVGMAAVQLCRTVENVTVFGTASASKHEALKENGVTHPIDYHTTDYVDEIKKISPKGVDIVMDPLGGSDTAKGYNLLKPMGKVVTYGMANLLTGPKRNLMALARTWWNQFSVTALQLLQANRAVCGFHLGYLDGEVELVSGVVARLLALYNQGHIKPHIDSVWPFEKVADAMKQMQEKKNVGKVLLVPGPEKEN

SEQ ID NO: 96571 - protein, 30 aa, Homo sapiens
  Payload ID: 19264
  Gene Name: vesicle amine transport 1
  ENSP ID: ENSP00000465239
  MOD_RES (1)..(1): Any amino acid
XEKVADAMKQMQEKKNVGKVLLVPGPEKEN

SEQ ID NO: 96572 - protein, 325 aa, Homo sapiens
  Payload ID: 19264
  Gene Name: vesicle amine transport 1
  Uniprot ID: Q99536
  ENSP ID: ENSP00000465946
MSDEREVAEAATGEDASSPPPKTEAASDPQHPAASEGAAAAAASPPLLRCLVLTGFGGYDKAGDRVMVLNRSGMWQEEVTVPSVQTFLIPEAMTFEEAAALLVNYITAYMVLFDFGNLQPGHSVLVHMAAGGVGMAAVQLCRTVENVTVFGTASASKHEALKENGVTHPIDYHTTDYVDEIKKISPKGVDIVMDPLGGSDTAKGYNLLKPMGKVVTYGMANLLTGPKRNLMALARTWWNQFSVTALQLLQANRAVCGFHLGYLDGEVELVSGVVARLLALYNQGHIKPHIDSVWPFEKVADAMKQMQEKKNVGKVLLVPGPEKEN

SEQ ID NO: 96573 - protein, 154 aa, Homo sapiens
  Payload ID: 19264
  Gene Name: vesicle amine transport 1
  ENSP ID: ENSP00000466322
MVLNRSGMWQEEVTVPSVQTFLIPEAMTFEEAAALLVNYITAYMVLFDFGNLQPGHSVLVHMAAGGVGMAAVQLCRTVENVTVFGTASASKHEALKENGVTHPIDYHTTDYVDEIKKISPKGVDIVMDPLGGSDTAKGYNLLKPMGKVVTYGEL

SEQ ID NO: 96574 - protein, 151 aa, Homo sapiens
  Payload ID: 19264
  Gene Name: vesicle amine transport 1
  ENSP ID: ENSP00000467131
MVLNRSGMWQEEVTVPSVQTFLIPEAMTFEEAAALLVNYITAYMVLFDFGNLQPGHSVLVHMAAGGVGMAAVQLCRTVENVTVFGTASASKHEALKENGVTHPIDYHTTDYVDEIKKISPKGVDIVMDPLGGSDTAKGYNLLKPMGKVVTY

SEQ ID NO: 96575 - protein, 92 aa, Homo sapiens
  Payload ID: 19264
  Gene Name: vesicle amine transport 1
  ENSP ID: ENSP00000468146
MVLNRSGMWQEEVTVPSVQTFLIPEAMTFEEAAALLVNYITAYMVLFDFGNLQPGHSVLVHMAAGGVGMAAVQLCRTVENVTVFGTASASKH

SEQ ID NO: 96576 - protein, 146 aa, Homo sapiens
  Payload ID: 19264
  Gene Name: vesicle amine transport 1
  ENSP ID: ENSP00000468401
MSDEREVAEAATGEDASSPPPKTEAASDPQHPAASEGAAAAAASPPLLRCLVLTGFGGYDKVKLQSRPAAPPAPGPGQLTLRLRACGLNFADLMARQGLYDRLPPLPVTPGMEGAGVVIAVGEGVSDRKAGDRVMVLNRSGMWQEE

SEQ ID NO: 96577 - protein, 125 aa, Homo sapiens
  Payload ID: 19264
  Gene Name: vesicle amine transport 1
  ENSP ID: ENSP00000468621
SPKGVDIVMDPLGGSDTAKGYNLLKPMGKVVTYGMANLLTGPKRNLMALARTWWNQFSVTALQLLQANRAVCGFHLGYLDGEVELVSGVVARLLALYNQGHIKPHIDSVWPFEKVNVRTLQGGLG

SEQ ID NO: 96578 - protein, 419 aa, Homo sapiens
  Payload ID: 19265
  Gene Name: vesicle amine transport 1-like
  Uniprot ID: Q9HCJ6
  ENSP ID: ENSP00000303129
MAKEGVEKAEETEQMIEKEAGKEPAEGGGGDGSHRLGDAQEMRAVVLAGFGGLNKLRLFRKAMPEPQDGELKIRVKACGLNFIDLMVRQGNIDNPPKTPLVPGFECSGIVEALGDSVKGYEIGDRVMAFVNYNAWAEVVCTPVEFVYKIPDDMSFSEAAAFPMNFVTAYVMLFEVANLREGMSVLVHSAGGGVGQAVAQLCSTVPNVTVFGTASTFKHEAIKDSVTHLFDRNADYVQEVKRISAEGVDIVLDCLCGDNTGKGLSLLKPLGTYILYGSSNMVTGETKSFFSFAKSWWQVEKVNPIKLYEENKVIAGFSLLNLLFKQGRAGLIRGVVEKLIGLYNQKKIKPVVDSLWALEEVKEAMQRIHDRGNIGKLILDVEKTPTPLMANDSTETSEAGEEEEDHEGDSENKERMPFIQ

SEQ ID NO: 96579 - protein, 217 aa, Homo sapiens
  Payload ID: 19266
  Gene Name: vesicle transport through interaction with t-SNAREs 1A
  Uniprot ID: Q96AJ9
  ENSP ID: ENSP00000376792
MSSDFEGYEQDFAVLTAEITSKIARVPRLPPDEKKQMVANVEKQLEEAKELLEQMDLEVREIPPQSRGMYSNRMRSYKQEMGKLETDFKRSRIAYSDEVRNELLGDDGNSSENQRAHLLDNTERLERSSRRLEAGYQIAVETEQIGQEMLENLSHDREKIQRARERLRETDANLGKSSRILTGMLRRIIQNRILLVILGIIVVITILMAITFSVRRH

SEQ ID NO: 96580 - protein, 203 aa, Homo sapiens
  Payload ID: 19266
  Gene Name: vesicle transport through interaction with t-SNAREs 1A
  Uniprot ID: Q96AJ9
  ENSP ID: ENSP00000395017
MSSDFEGYEQDFAVLTAEITSKIARVPRLPPDEKKQMVANVEKQLEEAKELLEQMDLEVREIPPQSRGMYSNRMRSYKQEMGKLETDFKRSRIAYSDEVRNELLGDDGNSSENQRAHLLDNTERLERSSRRLEAGYQIAVETEQIGQEMLENLSHDREKIQRARERLRETDANLGKSSRILTGMLRRGCSVKKQCNLSLAPKA

SEQ ID NO: 96581 - protein, 44 aa, Homo sapiens
  Payload ID: 19267
  Gene Name: vesicle transport through interaction with t-SNAREs 1B
  ENSP ID: ENSP00000216456
MASSAASSEHFEKLHEIFRGLHEDLQGVPERLLGTAGTGEISNF

SEQ ID NO: 96582 - protein, 232 aa, Homo sapiens
  Payload ID: 19267
  Gene Name: vesicle transport through interaction with t-SNAREs 1B
  Uniprot ID: Q9UEU0
  ENSP ID: ENSP00000450731
MASSAASSEHFEKLHEIFRGLHEDLQGVPERLLGTAGTEEKKKLIRDFDEKQQEANETLAEMEEELRYAPLSFRNPMMSKLRNYRKDLAKLHREVRSTPLTATPGGRGDMKYGIYAVENEHMNRLQSQRAMLLQGTESLNRATQSIERSHRIATETDQIGSEIIEELGEQRDQLERTKSRLVNTSENLSKSRKILRSMSRKVTTNKLLLSIIILLELAILGGLVYYKFFRSH

SEQ ID NO: 96583 - protein, 128 aa, Homo sapiens
  Payload ID: 19267
  Gene Name: vesicle transport through interaction with t-SNAREs 1B
  ENSP ID: ENSP00000451661
  MOD_RES (1)..(1): Any amino acid
XTPGGRGDMKYGIYAVENEHMNRLQSQRAMLLQGTESLNRATQSIERSHRIATETDQIGSEIIEELGEQRDQLERTKSRSDNQQAAAFHYHLTGARHPGRPGLLQILSQPLNFYREGFVDQNFDLVNA

SEQ ID NO: 96584 - protein, 103 aa, Homo sapiens
  Payload ID: 19267
  Gene Name: vesicle transport through interaction with t-SNAREs 1B
  ENSP ID: ENSP00000451759
  MOD_RES (1)..(1): Any amino acid
XRKDLAKLHREVRSTPLTATPGGRGDMKYGIYAVENEHMNRLQSQRAMLLQGTESLNRATQSIERSHRIATETDQIGSEIIEELGEQRDQLERTKSRVTGKHK

SEQ ID NO: 96585 - protein, 59 aa, Homo sapiens
  Payload ID: 19267
  Gene Name: vesicle transport through interaction with t-SNAREs 1B
  ENSP ID: ENSP00000452366
MASSAASSEHFEKLHEIFRGLHEDLQGVPERLLGTAGTAGRDGGGATLCTPVFPKPHDV

SEQ ID NO: 96586 - protein, 117 aa, Homo sapiens
  Payload ID: 19268
  Gene Name: vesicle-associated membrane protein 1 (synaptobrevin 1)
  Uniprot ID: P23763
  ENSP ID: ENSP00000355122
MSAPAQPPAEGTEGTAPGGGPPGPPPNMTSNRRLQQTQAQVEEVVDIIRVNVDKVLERDQKLSELDDRADALQAGASQFESSAAKLKRKYWWKNCKMMIMLGAICAIIVVVIVSKYR

SEQ ID NO: 96587 - protein, 118 aa, Homo sapiens
  Payload ID: 19268
  Gene Name: vesicle-associated membrane protein 1 (synaptobrevin 1)
  Uniprot ID: P23763
  ENSP ID: ENSP00000379602
MSAPAQPPAEGTEGTAPGGGPPGPPPNMTSNRRLQQTQAQVEEVVDIIRVNVDKVLERDQKLSELDDRADALQAGASQFESSAAKLKRKYWWKNCKMMIMLGAICAIIVVVIVIYFFT

SEQ ID NO: 96588 - protein, 116 aa, Homo sapiens
  Payload ID: 19268
  Gene Name: vesicle-associated membrane protein 1 (synaptobrevin 1)
  Uniprot ID: P23763
  ENSP ID: ENSP00000383702
MSAPAQPPAEGTEGTAPGGGPPGPPPNMTSNRRLQQTQAQVEEVVDIIRVNVDKVLERDQKLSELDDRADALQAGASQFESSAAKLKRKYWWKNCKMMIMLGAICAIIVVVIVRRD

SEQ ID NO: 96589 - protein, 116 aa, Homo sapiens
  Payload ID: 19268
  Gene Name: vesicle-associated membrane protein 1 (synaptobrevin 1)
  ENSP ID: ENSP00000444181
MSAPAQPPAEGTEGTAPGGGPPGPPPNMTSNRRLQQTQAQVEEVVDIIRVNVDKVLERDQKLSELDDRADALQAGASQFESSAAKLKRKYWWKNCKMMIMLGAICAIIVVVIVRRG

SEQ ID NO: 96590 - protein, 116 aa, Homo sapiens
  Payload ID: 19269
  Gene Name: vesicle-associated membrane protein 2 (synaptobrevin 2)
  Uniprot ID: P63027
  ENSP ID: ENSP00000314214
MSATAATAPPAAPAGEGGPPAPPPNLTSNRRLQQTQAQVDEVVDIMRVNVDKVLERDQKLSELDDRADALQAGASQFETSAAKLKRKYWWKNLKMMIILGVICAIILIIIIVYFST

SEQ ID NO: 96591 - protein, 118 aa, Homo sapiens
  Payload ID: 19269
  Gene Name: vesicle-associated membrane protein 2 (synaptobrevin 2)
  ENSP ID: ENSP00000418572
MDRSATAATAPPAAPAGEGGPPAPPPNLTSNRRLQQTQAQVDEVVDIMRVNVDKVLERDQKLSELDDRADALQAGASQFETSAAKLKRKYWWKNLKMMIILGVICAIILIIIIVYFST

SEQ ID NO: 96592 - protein, 68 aa, Homo sapiens
  Payload ID: 19269
  Gene Name: vesicle-associated membrane protein 2 (synaptobrevin 2)
  ENSP ID: ENSP00000466995
MRVNVDKVLERDQKLSELDDRADALQAGASQFETSAAKLKRKYWWKNLKMMIILGVICAIILIIIIGE

SEQ ID NO: 96593 - protein, 113 aa, Homo sapiens
  Payload ID: 19269
  Gene Name: vesicle-associated membrane protein 2 (synaptobrevin 2)
  ENSP ID: ENSP00000467399
MSATAATAPPAAPAGEGGPPAPPPNLTSNRRLQQTQAQVDEVVDIMRVNVDKVLERDQKLSELDDRADALQAGASQFETSAAKLKRKYWWKNLKMMIILGVICAIILIIIIGE

SEQ ID NO: 96594 - protein, 100 aa, Homo sapiens
  Payload ID: 19270
  Gene Name: vesicle-associated membrane protein 3
  Uniprot ID: Q15836
  ENSP ID: ENSP00000054666
MSTGPTAATGSNRRLQQTQNQVDEVVDIMRVNVDKVLERDQKLSELDDRADALQAGASQFETSAAKLKRKYWWKNCKMWAIGITVLVIFIIIIIVWVVSS

SEQ ID NO: 96595 - protein, 72 aa, Homo sapiens
  Payload ID: 19270
  Gene Name: vesicle-associated membrane protein 3
  ENSP ID: ENSP00000465820
MRVNVDKVLERDQKLSELDDRADALQAGASQFETSAAKLKRKYWWKNCKMWAIGITVLVIFIIIIIVWVVSS

SEQ ID NO: 96596 - protein, 141 aa, Homo sapiens
  Payload ID: 19271
  Gene Name: vesicle-associated membrane protein 4
  Uniprot ID: O75379
  ENSP ID: ENSP00000236192
MPPKFKRHLNDDDVTGSVKSERRNLLEDDSDEEEDFFLRGPSGPRFGPRNDKIKHVQNQVDEVIDVMQENITKVIERGERLDELQDKSESLSDNATAFSNRSKQLRRQMWWRGCKIKAIMALVAAILLLVIIILIVMKYRT

SEQ ID NO: 96597 - protein, 140 aa, Homo sapiens
  Payload ID: 19271
  Gene Name: vesicle-associated membrane protein 4
  Uniprot ID: O75379
  ENSP ID: ENSP00000356714
MPPKFKRHLNDDDVTGSVKSERRNLLEDDSDEEEDFFLGPSGPRFGPRNDKIKHVQNQVDEVIDVMQENITKVIERGERLDELQDKSESLSDNATAFSNRSKQLRRQMWWRGCKIKAIMALVAAILLLVIIILIVMKYRT

SEQ ID NO: 96598 - protein, 141 aa, Homo sapiens; identical to SEQ ID NO: 96596
  Payload ID: 19271
  Gene Name: vesicle-associated membrane protein 4
  Uniprot ID: O75379
  ENSP ID: ENSP00000435933

SEQ ID NO: 96599 - protein, 116 aa, Homo sapiens
  Payload ID: 19272
  Gene Name: vesicle-associated membrane protein 5
  Uniprot ID: O95183
  ENSP ID: ENSP00000305647
MAGIELERCQQQANEVTEIMRNNFGKVLERGVKLAELQQRSDQLLDMSSTFNKTTQNLAQKKCWENIRYRICVGLVVVGVLLIILIVLLVVFLPQSSDSSSAPRTQDAGIASGPGN

SEQ ID NO: 96600 - protein, 260 aa, Homo sapiens
  Payload ID: 19273
  Gene Name: vesicle-associated membrane protein 7
  Uniprot ID: P51809
  ENSP ID: ENSP00000262640
MAILFAVVARGTTILAKHAWCGGNFLEVTEQILAKIPSENNKLTYSHGNYLFHYICQDRIVYLCITDDDFERSRAFNFLNEIKKRFQTTYGSRAQTALPYAMNSEFSSVLAAQLKHHSENKGLDKVMETQAQVDELKGIMVRNIVCHLQNYQQKSCSSHVYEEPQAHYYHHHRINCVHLYHCFTSLWWIYMAKLCEEIGKKKLPLTKDMREQGVKSNPCDSSLSHTDRWYLPVSSTLFSLFKILFHASRFIFVLSTSLFL

SEQ ID NO: 96601 - protein, 220 aa, Homo sapiens
  Payload ID: 19273
  Gene Name: vesicle-associated membrane protein 7
  Uniprot ID: P51809
  ENSP ID: ENSP00000286448
MAILFAVVARGTTILAKHAWCGGNFLEVTEQILAKIPSENNKLTYSHGNYLFHYICQDRIVYLCITDDDFERSRAFNFLNEIKKRFQTTYGSRAQTALPYAMNSEFSSVLAAQLKHHSENKGLDKVMETQAQVDELKGIMVRNIDLVAQRGERLELLIDKTENLVDSSVTFKTTSRNLARAMCMKNLKLTIIIIIVSIVFIYIIVSPLCGGFTWPSCVKK

SEQ ID NO: 96602 - protein, 179 aa, Homo sapiens
  Payload ID: 19273
  Gene Name: vesicle-associated membrane protein 7
  Uniprot ID: P51809
  ENSP ID: ENSP00000427822
MAILFAVVARGTTILAKHAWCGGNFLEDFERSRAFNFLNEIKKRFQTTYGSRAQTALPYAMNSEFSSVLAAQLKHHSENKGLDKVMETQAQVDELKGIMVRNIDLVAQRGERLELLIDKTENLVDSSVTFKTTSRNLARAMCMKNLKLTIIIIIVSIVFIYIIVSPLCGGFTWPSCVKK

SEQ ID NO: 96603 - protein, 59 aa, Homo sapiens
  Payload ID: 19273
  Gene Name: vesicle-associated membrane protein 7
  ENSP ID: ENSP00000430039
MAILFAVVARGTTILAKHAWCGGNFLEVTEQILAKIPSENNKLTYSHGKILNVPEPLIF

SEQ ID NO: 96604 - protein, 100 aa, Homo sapiens
  Payload ID: 19274
  Gene Name: vesicle-associated membrane protein 8
  Uniprot ID: Q9BV40
  ENSP ID: ENSP00000263864
MEEASEGGGNDRVRNLQSEVEGVKNIMTQNVERILARGENLEHLRNKTEDLEATSEHFKTTSQKVARKFWWKNVKMIVLICVIVFIIILFIVLFATGAFS

SEQ ID NO: 96605 - protein, 99 aa, Homo sapiens
  Payload ID: 19274
  Gene Name: vesicle-associated membrane protein 8
  ENSP ID: ENSP00000387094
MEEASEGGGNDRVRNLQSEVEGVKNIMTQNVERILARGENLEHLRNKTEDLEATPGAEASCFREEVTPKLSKVWSLKFCVQRGGWLWLSESCVNSWLLV

SEQ ID NO: 96606 - protein, 74 aa, Homo sapiens
  Payload ID: 19274
  Gene Name: vesicle-associated membrane protein 8
  ENSP ID: ENSP00000407984
MTQNVERILARGENLEHLRNKTEDLEATSEHFKTTSQKVARKFWWKNVKMIVLICVIVFIIILFIVLFATGAFS

SEQ ID NO: 96607 - protein, 172 aa, Homo sapiens
  Payload ID: 19275
  Gene Name: vesicular, overexpressed in cancer, prosurvival protein 1
  Uniprot ID: Q96AW1
  ENSP ID: ENSP00000285279
MRRQPAKVAALLLGLLLECTEAKKHCWYFEGLYPTYYICRSYEDCCGSRCCVRALSIQRLWYFWFLLMMGVLFCCGAGFFIRRRMYPPPLIEEPAFNVSYTRQPPNPGPGAQQPGPPYYTDPGGPGMNPVGNSMAMAFQVPPNSPQGSVACPPPPAYCNTPPPPYEQVVKAK

SEQ ID NO: 96608 - protein, 105 aa, Homo sapiens
  Payload ID: 19275
  Gene Name: vesicular, overexpressed in cancer, prosurvival protein 1
  ENSP ID: ENSP00000389601
MMGVLFCCGAGFFIRRRMYPPPLIEEPAFNVSYTRQPPNPGPGAQQPGPPYYTDPGGPGMNPVGNSMAMAFQVPPNSPQGSVACPPPPAYCNTPPPPYEQVVKAK

SEQ ID NO: 96609 - protein, 155 aa, Homo sapiens
  Payload ID: 19275
  Gene Name: vesicular, overexpressed in cancer, prosurvival protein 1
  Uniprot ID: Q96AW1
  ENSP ID: ENSP00000393210
MCTEAKKHCWYFEGLYPTYYICRSYEDCCGSRCCVRALSIQRLWYFWFLLMMGVLFCCGAGFFIRRRMYPPPLIEEPAFNVSYTRQPPNPGPGAQQPGPPYYTDPGGPGMNPVGNSMAMAFQVPPNSPQGSVACPPPPAYCNTPPPPYEQVVKAK

SEQ ID NO: 96610 - protein, 105 aa, Homo sapiens; identical to SEQ ID NO: 96608
  Payload ID: 19275
  Gene Name: vesicular, overexpressed in cancer, prosurvival protein 1
  ENSP ID: ENSP00000395533

SEQ ID NO: 96611 - protein, 170 aa, Homo sapiens
  Payload ID: 19275
  Gene Name: vesicular, overexpressed in cancer, prosurvival protein 1
  ENSP ID: ENSP00000407356
MRIRSLHPVQQTEPTTCTEAKKHCWYFEGLYPTYYICRSYEDCCGSRCCVRALSIQRLWYFWFLLMMGVLFCCGAGFFIRRRMYPPPLIEEPAFNVSYTRQPPNPGPGAQQPGPPYYTDPGGPGMNPVGNSMAMAFQVPPNSPQGSVACPPPPAYCNTPPPPYEQVVKAK

SEQ ID NO: 96612 - protein, 96 aa, Homo sapiens
  Payload ID: 19275
  Gene Name: vesicular, overexpressed in cancer, prosurvival protein 1
  ENSP ID: ENSP00000407579
MMGVLFCCGAGFFIRRRMYPPPLIEEPAFNVSYTRQPPNPGPGAQQPGPPYYTDPGGPGMNPVGNSMAMAFQVPPNSPQGSVACPPPPAYCNTPPP

SEQ ID NO: 96613 - protein, 21 aa, Homo sapiens
  Payload ID: 19275
  Gene Name: vesicular, overexpressed in cancer, prosurvival protein 1
  ENSP ID: ENSP00000408161
MMGVLFCCGAGFFIRRRMYPP

SEQ ID NO: 96614 - protein, 109 aa, Homo sapiens
  Payload ID: 19275
  Gene Name: vesicular, overexpressed in cancer, prosurvival protein 1
  ENSP ID: ENSP00000411447
MFLLMMGVLFCCGAGFFIRRRMYPPPLIEEPAFNVSYTRQPPNPGPGAQQPGPPYYTDPGGPGMNPVGNSMAMAFQVPPNSPQGSVACPPPPAYCNTPPPPYEQVVKAK

SEQ ID NO: 96615 - protein, 52 aa, Homo sapiens
  Payload ID: 19275
  Gene Name: vesicular, overexpressed in cancer, prosurvival protein 1
  ENSP ID: ENSP00000411737
MMGVLFCCGAGFFIRRRMYPPPLIEEPAFNVSYTRQPPNPGPGAQQPGPPYY

SEQ ID NO: 96616 - protein, 105 aa, Homo sapiens; identical to SEQ ID NO: 96608
  Payload ID: 19275
  Gene Name: vesicular, overexpressed in cancer, prosurvival protein 1
  ENSP ID: ENSP00000413948

SEQ ID NO: 96617 - protein, 163 aa, Homo sapiens
  Payload ID: 19275
  Gene Name: vesicular, overexpressed in cancer, prosurvival protein 1
  Uniprot ID: Q96AW1
  ENSP ID: ENSP00000415230
MRRTGSHAQCTEAKKHCWYFEGLYPTYYICRSYEDCCGSRCCVRALSIQRLWYFWFLLMMGVLFCCGAGFFIRRRMYPPPLIEEPAFNVSYTRQPPNPGPGAQQPGPPYYTDPGGPGMNPVGNSMAMAFQVPPNSPQGSVACPPPPAYCNTPPPPYEQVVKAK

SEQ ID NO: 96618 - protein, 85 aa, Homo sapiens
  Payload ID: 19275
  Gene Name: vesicular, overexpressed in cancer, prosurvival protein 1
  ENSP ID: ENSP00000416530
MMGVLFCCGAGFFIRRRMYPPPLIEEPAFNVSYTRQPPNPGPGAQQPGPPYYTDPGGPGMNPVGNSMAMAFQVPPNSPQGSVACP

SEQ ID NO: 96619 - protein, 169 aa, Homo sapiens
  Payload ID: 19275
  Gene Name: vesicular, overexpressed in cancer, prosurvival protein 1
  Uniprot ID: Q96AW1
  ENSP ID: ENSP00000486983
MLSETLGYLSSVLLQCTEAKKHCWYFEGLYPTYYICRSYEDCCGSRCCVRALSIQRLWYFWFLLMMGVLFCCGAGFFIRRRMYPPPLIEEPAFNVSYTRQPPNPGPGAQQPGPPYYTDPGGPGMNPVGNSMAMAFQVPPNSPQGSVACPPPPAYCNTPPPPYEQVVKAK

SEQ ID NO: 96620 - protein, 258 aa, Homo sapiens
  Payload ID: 19276
  Gene Name: vestigial-like family member 1
  Uniprot ID: Q99990
  ENSP ID: ENSP00000359668
MEEMKKTAIRLPKGKQKPIKTEWNSRCVLFTYFQGDISSVVDEHFSRALSNIKSPQELTPSSQSEGVMLKNDDSMSPNQWRYSSPWTKPQPEVPVTNRAANCNLHVPGPMAVNQFSPSLARRASVRPGELWHFSSLAGTSSLEPGYSHPFPARHLVPEPQPDGKREPLLSLLQQDRCLARPQESAARENGNPGQIAGSTGLLFNLPPGSVHYKKLYVSRGSASTSLPNETLSELETPGKYSLTPPNHWGHPHRYLQHL

SEQ ID NO: 96621 - protein, 60 aa, Homo sapiens
  Payload ID: 19276
  Gene Name: vestigial-like family member 1
  ENSP ID: ENSP00000388868
TPSSQSEGVMLKNDKKLYVSRGSASTSLPNETLSELETPGKYSLTPPNHWGHPHRYLQHL

SEQ ID NO: 96622 - protein, 162 aa, Homo sapiens
  Payload ID: 19276
  Gene Name: vestigial-like family member 1
  ENSP ID: ENSP00000398360
  MOD_RES (1)..(1): Any amino acid
XISSVVDEHFSRALSNIKSPQELTPSSQSEGVMLKNDDSMSPNQWRYSSPWTKPQPEVPVTNRAANCNLHVPGPMAVNQFSPSLARRASVRPGELWHFSSLAGTSSLEPGYSHPFPARHLVPEPQPDGKHKKLYVSRGSASTSLPNETLSELETPGKYSLTP

SEQ ID NO: 96623 - protein, 143 aa, Homo sapiens
  Payload ID: 19277
  Gene Name: vestigial-like family member 2
  Uniprot ID: Q8N8G2
  ENSP ID: ENSP00000305405
MSCLDVMYQVYGPPQPYFAAAYTPYHQKLAYYSKMQEAQECNASPSSSGSGSSSFSSQTPASIKEEEGSPEKERPPEAEYINSRCVLFTYFQGDISSVVDEHFSRALSQPSSYSPSCTSSKAPRSSGPWRARRYSLCGASLLS

SEQ ID NO: 96624 - protein, 317 aa, Homo sapiens
  Payload ID: 19277
  Gene Name: vestigial-like family member 2
  Uniprot ID: Q8N8G2
  ENSP ID: ENSP00000320957
MSCLDVMYQVYGPPQPYFAAAYTPYHQKLAYYSKMQEAQECNASPSSSGSGSSSFSSQTPASIKEEEGSPEKERPPEAEYINSRCVLFTYFQGDISSVVDEHFSRALSQPSSYSPSCTSSKAPRSSGPWRDCSFPMSQRSFPASFWNSAYQAPVPPPLGSPLATAHSELPFAAADPYSPAALHGHLHQGATEPWHHAHPHHAHPHHPYALGGALGAQAAPYPRPAAVHEVYAPHFDPRYGPLLMPAASGRPARLATAPAPAPGSPPCELSGKGEPAGAAWAGPGGPFASPSGDVAQGLGLSVDSARRYSLCGASLLS

SEQ ID NO: 96625 - protein, 320 aa, Homo sapiens
  Payload ID: 19278
  Gene Name: vestigial-like family member 3
  Uniprot ID: A8MV65
  ENSP ID: ENSP00000373199
MSCAEVMYHPQPYGASQYLPNPMAATTCPTAYYQPAPQPGQQKKLAVFSKMQDSLEVTLPSKQEEEDEEEEEEEKDQPAEMEYLNSRCVLFTYFQGDIGSVVDEHFSRALGQAITLHPESAISKSKMGLTPLWRDSSALSSQRNSFPTSFWTSSYQPPPAPCLGGVHPDFQVTGPPGTFSAADPSPWPGHNLHQTGPAPPPAVSESWPYPLTSQVSPSYSHMHDVYMRHHHPHAHMHHRHRHHHHHHHPPAGSALDPSYGPLLMPSVHAARIPAPQCDITKTEPTTVTSATSAWAGAFHGTVDIVPSVGFDTGWSAMARS

SEQ ID NO: 96626 - protein, 326 aa, Homo sapiens
  Payload ID: 19278
  Gene Name: vestigial-like family member 3
  Uniprot ID: A8MV65
  ENSP ID: ENSP00000381436
MSCAEVMYHPQPYGASQYLPNPMAATTCPTAYYQPAPQPGQQKKLAVFSKMQDSLEVTLPSKQEEEDEEEEEEEKDQPAEMEYLNSRCVLFTYFQGDIGSVVDEHFSRALGQAITLHPESAISKSKMGLTPLWRDSSALSSQRNSFPTSFWTSSYQPPPAPCLGGVHPDFQVTGPPGTFSAADPSPWPGHNLHQTGPAPPPAVSESWPYPLTSQVSPSYSHMHDVYMRHHHPHAHMHHRHRHHHHHHHPPAGSALDPSYGPLLMPSVHAARIPAPQCDITKTEPTTVTSATSAWAGAFHGTVDIVPSVGFDTGLQHQDKSKESPWY

SEQ ID NO: 96627 - protein, 208 aa, Homo sapiens
  Payload ID: 19278
  Gene Name: vestigial-like family member 3
  ENSP ID: ENSP00000419115
  MOD_RES (1)..(1): Any amino acid
XASQYLPNPMAATTCPTAYYQPAPQPGQQGDIGSVVDEHFSRALGQAITLHPESAISKSKMGLTPLWRDSSALSSQRNSFPTSFWTSSYQPPPAPCLGGVHPDFQVTGPPGTFSAADPSPWPGHNLHQTGPAPPPAVSESWPYPLTSQVSPSYSHMHDVYMRHHHPHAHMHHRHRHHHHHHHPPAGSALDPSYGPLLMPSVHAARIPA

SEQ ID NO: 96628 - protein, 290 aa, Homo sapiens
  Payload ID: 19279
  Gene Name: vestigial-like family member 4
  ENSP ID: ENSP00000273038
METPLDVLSRAASLVHADDEKREAALRGEPRIQTLPVASALSSHRTGPPPISPSKRKFSMEPGDEDLDCDNDHVSKMSRIFNPHLNKTANGDCRRDPRERSRSPIERAVAPTMSLHGSHLYTSLPSLGLEQPLALTKNSLDASRPAGLSPTLTPGERQQNRPSVITCASAGARNCNLSHCPIAHSGCAAPGPASYRRPPSAATTCDPVVEEHFRRSLGKNYKEPEPAPNSVSITGSVDDHFAKALGDTWLQIKAAKDGASSSPESASRRGQPASPSAHMVSHSHSPSVVS

SEQ ID NO: 96629 - protein, 81 aa, Homo sapiens
  Payload ID: 19279
  Gene Name: vestigial-like family member 4
  ENSP ID: ENSP00000391554
MEPGDEDLDCDNDHVSKMSRIFNPHLNKTANGDCRRDPRERSRSPIERAVAPTMSLHGSHLYTSLPSLGLEQPLALTKNSL

SEQ ID NO: 96630 - protein, 169 aa, Homo sapiens
  Payload ID: 19279
  Gene Name: vestigial-like family member 4
  ENSP ID: ENSP00000391932
METPLDVLSRAASLVHADDEKREAALRGEPRIQTLPVASALSSHRTGPPPISPSKRKFSMEPGDEDLDCDNDHVSKMSRIFNPHLNKTANGDCRRDPRERSRSPIERAVAPTMSLHGSHLYTSLPSLGLEQPLALTKNSLDASRPAGLSPTLTPGERQQVGLCLGGWRG

SEQ ID NO: 96631 - protein, 60 aa, Homo sapiens
  Payload ID: 19279
  Gene Name: vestigial-like family member 4
  ENSP ID: ENSP00000393100
MEPGDEDLDCDNDHVSKMSRIFNPHLNKTANGDCRRDPRERSRSPIERAVAPTMSLHGSH

SEQ ID NO: 96632 - protein, 190 aa, Homo sapiens
  Payload ID: 19279
  Gene Name: vestigial-like family member 4
  ENSP ID: ENSP00000394123
MKDLKKRVALGYISTHTGEAALRGEPRIQTLPVASALSSHRTGPPPISPSKRKFSMEPGDEDLDCDNDHVSKMSRIFNPHLNKTANGDCRRDPRERSRSPIERAVAPTMSLHGSHLYTSLPSLGLEQPLALTKNSLDASRPAGLSPTLTPGERQQNRPSVITCASAGARNCNLSHCPIAHSGCAAPGPAS

SEQ ID NO: 96633 - protein, 200 aa, Homo sapiens
  Payload ID: 19279
  Gene Name: vestigial-like family member 4
  ENSP ID: ENSP00000394439
METPLDVLSRAASLVHADDEKREAALRGEPRIQTLPVASALSSHRTGPPPISPSKRKFSMEPGDEDLDCDNDHVSKMSRIFNPHLNKTANGDCRRDPRERSRSPIERAVAPTMSLHGSHLYTSLPSLGLEQPLALTKNSLDASRPAGLSPTLTPGERQQNRPSVITCASAGARNCNLSHCPIAHSGCAAPGPASYRRPPS

SEQ ID NO: 96634 - protein, 127 aa, Homo sapiens
  Payload ID: 19279
  Gene Name: vestigial-like family member 4
  ENSP ID: ENSP00000395557
METPLDVLSRAASLVHADDEKREAALRGEPRIQTLPVASALSSHRTGPPPISPSKRKFSMEPGDEDLDCDNDHVSKMSRIFNPHLNKTANGDCRRDPRERSRSPIERAVAPTMSLHGSHLYTSLPSL

SEQ ID NO: 96635 - protein, 206 aa, Homo sapiens
  Payload ID: 19279
  Gene Name: vestigial-like family member 4
  Uniprot ID: Q14135
  ENSP ID: ENSP00000402878
MNKTANGDCRRDPRERSRSPIERAVAPTMSLHGSHLYTSLPSLGLEQPLALTKNSLDASRPAGLSPTLTPGERQQNRPSVITCASAGARNCNLSHCPIAHSGCAAPGPASYRRPPSAATTCDPVVEEHFRRSLGKNYKEPEPAPNSVSITGSVDDHFAKALGDTWLQIKAAKDGASSSPESASRRGQPASPSAHMVSHSHSPSVVS

SEQ ID NO: 96636 - protein, 296 aa, Homo sapiens
  Payload ID: 19279
  Gene Name: vestigial-like family member 4
  ENSP ID: ENSP00000404251
MLFMKMDLLNYQYLDKMNNNIGILCYEGEAALRGEPRIQTLPVASALSSHRTGPPPISPSKRKFSMEPGDEDLDCDNDHVSKMSRIFNPHLNKTANGDCRRDPRERSRSPIERAVAPTMSLHGSHLYTSLPSLGLEQPLALTKNSLDASRPAGLSPTLTPGERQQNRPSVITCASAGARNCNLSHCPIAHSGCAAPGPASYRRPPSAATTCDPVVEEHFRRSLGKNYKEPEPAPNSVSITGSVDDHFAKALGDTWLQIKAAKDGASSSPESASRRGQPASPSAHMVSHSHSPSVVS

SEQ ID NO: 96637 - protein, 231 aa, Homo sapiens
  Payload ID: 19279
  Gene Name: vestigial-like family member 4
  ENSP ID: ENSP00000404624
MEPGDEDLDCDNDHVSKMSRIFNPHLNKTANGDCRRDPRERSRSPIERAVAPTMSLHGSHLYTSLPSLGLEQPLALTKNSLDASRPAGLSPTLTPGERQQNRPSVITCASAGARNCNLSHCPIAHSGCAAPGPASYRRPPSAATTCDPVVEEHFRRSLGKNYKEPEPAPNSVSITGSVDDHFAKALGDTWLQIKAAKDGASSSPESASRRGQPASPSAHMVSHSHSPSVVS

SEQ ID NO: 96638 - protein, 147 aa, Homo sapiens
  Payload ID: 19279
  Gene Name: vestigial-like family member 4
  ENSP ID: ENSP00000411670
MTENTHFDKIPESCALKSWRHPGLHHGEAALRGEPRIQTLPVASALSSHRTGPPPISPSKRKFSMEPGDEDLDCDNDHVSKMSRIFNPHLNKTANGDCRRDPRERSRSPIERAVAPTMSLHGSHLYTSLPSLGLEQPLALTKNSLDA

SEQ ID NO: 96639 - protein, 223 aa, Homo sapiens
  Payload ID: 19279
  Gene Name: vestigial-like family member 4
  ENSP ID: ENSP00000412923
METPLDVLSRAASLVHADDEKREAALRGEPRIQTLPVASALSSHRTGPPPISPSKRKFSMEPGDEDLDCDNDHVSKMSRIFNPHLNKTANGDCRRDPRERSRSPIERAVAPTMSLHGSHLYTSLPSLGLEQPLALTKNSLDASRPAGLSPTLTPGERQQNRPSVITCASAGARNCNLSHCPIAHSGCAAPGPASYRRPPSAATTCDPVVEEHFRRSLGKNYKE

SEQ ID NO: 96640 - protein, 295 aa, Homo sapiens
  Payload ID: 19279
  Gene Name: vestigial-like family member 4
  ENSP ID: ENSP00000413030
MTENTHFDKIPESCALKSWRHPGLHHGEAALRGEPRIQTLPVASALSSHRTGPPPISPSKRKFSMEPGDEDLDCDNDHVSKMSRIFNPHLNKTANGDCRRDPRERSRSPIERAVAPTMSLHGSHLYTSLPSLGLEQPLALTKNSLDASRPAGLSPTLTPGERQQNRPSVITCASAGARNCNLSHCPIAHSGCAAPGPASYRRPPSAATTCDPVVEEHFRRSLGKNYKEPEPAPNSVSITGSVDDHFAKALGDTWLQIKAAKDGASSSPESASRRGQPASPSAHMVSHSHSPSVVS

SEQ ID NO: 96641 - protein, 210 aa, Homo sapiens
  Payload ID: 19279
  Gene Name: vestigial-like family member 4
  Uniprot ID: Q14135
  ENSP ID: ENSP00000416615
MIKVRNKTANGDCRRDPRERSRSPIERAVAPTMSLHGSHLYTSLPSLGLEQPLALTKNSLDASRPAGLSPTLTPGERQQNRPSVITCASAGARNCNLSHCPIAHSGCAAPGPASYRRPPSAATTCDPVVEEHFRRSLGKNYKEPEPAPNSVSITGSVDDHFAKALGDTWLQIKAAKDGASSSPESASRRGQPASPSAHMVSHSHSPSVVS

SEQ ID NO: 96642 - protein, 59 aa, Homo sapiens
  Payload ID: 19279
  Gene Name: vestigial-like family member 4
  ENSP ID: ENSP00000485472
METPLDVLSRAASLVHADDEKREAALRGEPRIQTLPVASALSSHRTGPPPISPSKRKFS

SEQ ID NO: 96643 - protein, 479 aa, Homo sapiens
  Payload ID: 19280
  Gene Name: v-ets avian erythroblastosis virus E26 oncogene homolog
  Uniprot ID: P11308
  ENSP ID: ENSP00000288319
MASTIKEALSVVSEDQSLFECAYGTPHLAKTEMTASSSSDYGQTSKMSPRVPQQDWLSQPPARVTIKMECNPSQVNGSRNSPDECSVAKGGKMVGSPDTVGMNYGSYMEEKHMPPPNMTTNERRVIVPADPTLWSTDHVRQWLEWAVKEYGLPDVNILLFQNIDGKELCKMTKDDFQRLTPSYNADILLSHLHYLRETPLPHLTSDDVDKALQNSPRLMHARNTGGAAFIFPNTSVYPEATQRITTRPDLPYEPPRRSAWTGHGHPTPQSKAAQPSPSTVPKTEDQRPQLDPYQILGPTSSRLANPGSGQIQLWQFLLELLSDSSNSSCITWEGTNGEFKMTDPDEVARRWGERKSKPNMNYDKLSRALRYYYDKNIMTKVHGKRYAYKFDFHGIAQALQPHPPESSLYKYPSDLPYMGSYHAHPQKMNFVAPHPPALPVTSSSFFAAPNPYWNSPTGGIYPNTRLPTSHMPSHLGTYY

SEQ ID NO: 96644 - protein, 363 aa, Homo sapiens
  Payload ID: 19280
  Gene Name: v-ets avian erythroblastosis virus E26 oncogene homolog
  Uniprot ID: P11308
  ENSP ID: ENSP00000381871
MVGSPDTVGMNYGSYMEEKHMPPPNMTTNERRVIVPADPTLWSTDHVRQWLEWAVKEYGLPDVNILLFQNIDGKELCKMTKDDFQRLTPSYNADILLSHLHYLRETPLPHLTSDDVDKALQNSPRLMHARNTDLPYEPPRRSAWTGHGHPTPQSKAAQPSPSTVPKTEDQRPQLDPYQILGPTSSRLANPGSGQIQLWQFLLELLSDSSNSSCITWEGTNGEFKMTDPDEVARRWGERKSKPNMNYDKLSRALRYYYDKNIMTKVHGKRYAYKFDFHGIAQALQPHPPESSLYKYPSDLPYMGSYHAHPQKMNFVAPHPPALPVTSSSFFAAPNPYWNSPTGGIYPNTRLPTSHMPSHLGTYY

SEQ ID NO: 96645 - protein, 455 aa, Homo sapiens
  Payload ID: 19280
  Gene Name: v-ets avian erythroblastosis virus E26 oncogene homolog
  ENSP ID: ENSP00000381877
MASTIKEALSVVSEDQSLFECAYGTPHLAKTEMTASSSSDYGQTSKMSPRVPQQDWLSQPPARVTIKMECNPSQVNGSRNSPDECSVAKGGKMVGSPDTVGMNYGSYMEEKHMPPPNMTTNERRVIVPADPTLWSTDHVRQWLEWAVKEYGLPDVNILLFQNIDGKELCKMTKDDFQRLTPSYNADILLSHLHYLRETPLPHLTSDDVDKALQNSPRLMHARNTDLPYEPPRRSAWTGHGHPTPQSKAAQPSPSTVPKTEDQRPQLDPYQILGPTSSRLANPGSGQIQLWQFLLELLSDSSNSSCITWEGTNGEFKMTDPDEVARRWGERKSKPNMNYDKLSRALRYYYDKNIMTKVHGKRYAYKFDFHGIAQALQPHPPESSLYKYPSDLPYMGSYHAHPQKMNFVAPHPPALPVTSSSFFAAPNPYWNSPTGGIYPNTRLPTSHMPSHLGTYY

SEQ ID NO: 96646 - protein, 456 aa, Homo sapiens
  Payload ID: 19280
  Gene Name: v-ets avian erythroblastosis virus E26 oncogene homolog
  ENSP ID: ENSP00000381879
MASTIKEALSVVSEDQSLFECAYGTPHLAKTEMTASSSSDYGQTSKMSPRVPQQDWLSQPPARVTIKMECNPSQVNGSRNSPDECSVAKGGKMVGSPDTVGMNYGSYMEEKHMPPPNMTTNERRVIVPADPTLWSTDHVRQWLEWAVKEYGLPDVNILLFQNIDGKELCKMTKDDFQRLTPSYNADILLSHLHYLRETPLPHLTSDDVDKALQNSPRLMHARNTGGAAFIFPNTSVYPEATQRITTRPAAQPSPSTVPKTEDQRPQLDPYQILGPTSSRLANPGSGQIQLWQFLLELLSDSSNSSCITWEGTNGEFKMTDPDEVARRWGERKSKPNMNYDKLSRALRYYYDKNIMTKVHGKRYAYKFDFHGIAQALQPHPPESSLYKYPSDLPYMGSYHAHPQKMNFVAPHPPALPVTSSSFFAAPNPYWNSPTGGIYPNTRLPTSHMPSHLGTYY

SEQ ID NO: 96647 - protein, 463 aa, Homo sapiens
  Payload ID: 19280
  Gene Name: v-ets avian erythroblastosis virus E26 oncogene homolog
  ENSP ID: ENSP00000381881
MIQTVPDPAAHIKEALSVVSEDQSLFECAYGTPHLAKTEMTASSSSDYGQTSKMSPRVPQQDWLSQPPARVTIKMECNPSQVNGSRNSPDECSVAKGGKMVGSPDTVGMNYGSYMEEKHMPPPNMTTNERRVIVPADPTLWSTDHVRQWLEWAVKEYGLPDVNILLFQNIDGKELCKMTKDDFQRLTPSYNADILLSHLHYLRETPLPHLTSDDVDKALQNSPRLMHARNTGGAAFIFPNTSVYPEATQRITTRPAAQPSPSTVPKTEDQRPQLDPYQILGPTSSRLANPGSGQIQLWQFLLELLSDSSNSSCITWEGTNGEFKMTDPDEVARRWGERKSKPNMNYDKLSRALRYYYDKNIMTKVHGKRYAYKFDFHGIAQALQPHPPESSLYKYPSDLPYMGSYHAHPQKMNFVAPHPPALPVTSSSFFAAPNPYWNSPTGGIYPNTRLPTSHMPSHLGTYY

SEQ ID NO: 96648 - protein, 462 aa, Homo sapiens
  Payload ID: 19280
  Gene Name: v-ets avian erythroblastosis virus E26 oncogene homolog
  Uniprot ID: P11308
  ENSP ID: ENSP00000381882
MIQTVPDPAAHIKEALSVVSEDQSLFECAYGTPHLAKTEMTASSSSDYGQTSKMSPRVPQQDWLSQPPARVTIKMECNPSQVNGSRNSPDECSVAKGGKMVGSPDTVGMNYGSYMEEKHMPPPNMTTNERRVIVPADPTLWSTDHVRQWLEWAVKEYGLPDVNILLFQNIDGKELCKMTKDDFQRLTPSYNADILLSHLHYLRETPLPHLTSDDVDKALQNSPRLMHARNTDLPYEPPRRSAWTGHGHPTPQSKAAQPSPSTVPKTEDQRPQLDPYQILGPTSSRLANPGSGQIQLWQFLLELLSDSSNSSCITWEGTNGEFKMTDPDEVARRWGERKSKPNMNYDKLSRALRYYYDKNIMTKVHGKRYAYKFDFHGIAQALQPHPPESSLYKYPSDLPYMGSYHAHPQKMNFVAPHPPALPVTSSSFFAAPNPYWNSPTGGIYPNTRLPTSHMPSHLGTYY

SEQ ID NO: 96649 - protein, 486 aa, Homo sapiens
  Payload ID: 19280
  Gene Name: v-ets avian erythroblastosis virus E26 oncogene homolog
  Uniprot ID: P11308
  ENSP ID: ENSP00000381891
MIQTVPDPAAHIKEALSVVSEDQSLFECAYGTPHLAKTEMTASSSSDYGQTSKMSPRVPQQDWLSQPPARVTIKMECNPSQVNGSRNSPDECSVAKGGKMVGSPDTVGMNYGSYMEEKHMPPPNMTTNERRVIVPADPTLWSTDHVRQWLEWAVKEYGLPDVNILLFQNIDGKELCKMTKDDFQRLTPSYNADILLSHLHYLRETPLPHLTSDDVDKALQNSPRLMHARNTGGAAFIFPNTSVYPEATQRITTRPDLPYEPPRRSAWTGHGHPTPQSKAAQPSPSTVPKTEDQRPQLDPYQILGPTSSRLANPGSGQIQLWQFLLELLSDSSNSSCITWEGTNGEFKMTDPDEVARRWGERKSKPNMNYDKLSRALRYYYDKNIMTKVHGKRYAYKFDFHGIAQALQPHPPESSLYKYPSDLPYMGSYHAHPQKMNFVAPHPPALPVTSSSFFAAPNPYWNSPTGGIYPNTRLPTSHMPSHLGTYY

SEQ ID NO: 96650 - protein, 462 aa, Homo sapiens; identical to SEQ ID NO: 96648
  Payload ID: 19280
  Gene Name: v-ets avian erythroblastosis virus E26 oncogene homolog
  Uniprot ID: P11308
  ENSP ID: ENSP00000394694

SEQ ID NO: 96651 - protein, 387 aa, Homo sapiens
  Payload ID: 19280
  Gene Name: v-ets avian erythroblastosis virus E26 oncogene homolog
  ENSP ID: ENSP00000396268
MVGSPDTVGMNYGSYMEEKHMPPPNMTTNERRVIVPADPTLWSTDHVRQWLEWAVKEYGLPDVNILLFQNIDGKELCKMTKDDFQRLTPSYNADILLSHLHYLRETPLPHLTSDDVDKALQNSPRLMHARNTGGAAFIFPNTSVYPEATQRITTRPDLPYEPPRRSAWTGHGHPTPQSKAAQPSPSTVPKTEDQRPQLDPYQILGPTSSRLANPGSGQIQLWQFLLELLSDSSNSSCITWEGTNGEFKMTDPDEVARRWGERKSKPNMNYDKLSRALRYYYDKNIMTKVHGKRYAYKFDFHGIAQALQPHPPESSLYKYPSDLPYMGSYHAHPQKMNFVAPHPPALPVTSSSFFAAPNPYWNSPTGGIYPNTRLPTSHMPSHLGTYY

SEQ ID NO: 96652 - protein, 486 aa, Homo sapiens; identical to SEQ ID NO: 96649
  Payload ID: 19280
  Gene Name: v-ets avian erythroblastosis virus E26 oncogene homolog
  Uniprot ID: P11308
  ENSP ID: ENSP00000414150

SEQ ID NO: 96653 - protein, 220 aa, Homo sapiens [sequence omitted]

SEQ ID NO: 96654 - protein, 441 aa, Homo sapiens
  Payload ID: 19281
  Gene Name: v-ets avian erythroblastosis virus E26 oncogene homolog 1
  Uniprot ID: P14921
  ENSP ID: ENSP00000324578
MKAAVDLKPTLTIIKTEKVDLELFPSPDMECADVPLLTPSSKEMMSQALKATFSGFTKEQQRLGIPKDPRQWTETHVRDWVMWAVNEFSLKGVDFQKFCMNGAALCALGKDCFLELAPDFVGDILWEHLEILQKEDVKPYQVNGVNPAYPESRYTSDYFISYGIEHAQCVPPSEFSEPSFITESYQTLHPISSEELLSLKYENDYPSVILRDPLQTDTLQNDYFAIKQEVVTPDNMCMGRTSRGKLGGQDSFESIESYDSCDRLTQSWSSQSSFNSLQRVPSYDSFDSEDYPAALPNHKPKGTFKDYVRDRADLNKDKPVIPAAALAGYTGSGPIQLWQFLLELLTDKSCQSFISWTGDGWEFKLSDPDEVARRWGKRKNKPKMNYEKLSRGLRYYYDKNIIHKTAGKRYVYRFVCDLQSLLGYTPEELHAMLDVKPDADE

SEQ ID NO: 96655 - protein, 485 aa, Homo sapiens
  Payload ID: 19281
  Gene Name: v-ets avian erythroblastosis virus E26 oncogene homolog 1
  Uniprot ID: P14921
  ENSP ID: ENSP00000376436
MSYFVDSAGSSPVPYSAPRPAVVRQGPSNTYEDPRMNCGFQSNYHQQRPCYPFWDEMATQEVPTGLEHCVSDMECADVPLLTPSSKEMMSQALKATFSGFTKEQQRLGIPKDPRQWTETHVRDWVMWAVNEFSLKGVDFQKFCMNGAALCALGKDCFLELAPDFVGDILWEHLEILQKEDVKPYQVNGVNPAYPESRYTSDYFISYGIEHAQCVPPSEFSEPSFITESYQTLHPISSEELLSLKYENDYPSVILRDPLQTDTLQNDYFAIKQEVVTPDNMCMGRTSRGKLGGQDSFESIESYDSCDRLTQSWSSQSSFNSLQRVPSYDSFDSEDYPAALPNHKPKGTFKDYVRDRADLNKDKPVIPAAALAGYTGSGPIQLWQFLLELLTDKSCQSFISWTGDGWEFKLSDPDEVARRWGKRKNKPKMNYEKLSRGLRYYYDKNIIHKTAGKRYVYRFVCDLQSLLGYTPEELHAMLDVKPDADE

SEQ ID NO: 96656 - protein, 354 aa, Homo sapiens
  Payload ID: 19281
  Gene Name: v-ets avian erythroblastosis virus E26 oncogene homolog 1
  Uniprot ID: P14921
  ENSP ID: ENSP00000433500
MKAAVDLKPTLTIIKTEKVDLELFPSPDMECADVPLLTPSSKEMMSQALKATFSGFTKEQQRLGIPKDPRQWTETHVRDWVMWAVNEFSLKGVDFQKFCMNGAALCALGKDCFLELAPDFVGDILWEHLEILQKEDVKPYQVNGVNPAYPESRYTSDYFISYGIEHAQCVPPSEFSEPSFITESYQTLHPISSEELLSLKYENDYPSVILRDPLQTDTLQNDYFAIKQEVVTPDNMCMGRTSRGSGPIQLWQFLLELLTDKSCQSFISWTGDGWEFKLSDPDEVARRWGKRKNKPKMNYEKLSRGLRYYYDKNIIHKTAGKRYVYRFVCDLQSLLGYTPEELHAMLDVKPDADE

SEQ ID NO: 96657 - protein, 272 aa, Homo sapiens
  Payload ID: 19281
  Gene Name: v-ets avian erythroblastosis virus E26 oncogene homolog 1
  Uniprot ID: P14921
  ENSP ID: ENSP00000435666
MKAAVDLKPTLTIIKTEKVDLELFPSPDMECADVPLLTPSSKEMMSQALKATFSGFTKEQQRLGIPKDPRQWTETHVRDWVMWAVNEFSLKGVDFQKFCMNGAALCALGKDCFLELAPDFVGDILWEHLEILQKEDVKPYQVNGVNPAYPESRYTSDYFISYGIEHAQCVPPSEFSEPSFITESYQTLHPISSEELLSLKYENDYPSVILRDPLQTDTLQNDYFAIKQEVVTPDNMCMGRTSRGKLGGQDSFESIESYDSCGQEMGKEEKQT

SEQ ID NO: 96658 - protein, 225 aa, Homo sapiens
  Payload ID: 19281
  Gene Name: v-ets avian erythroblastosis virus E26 oncogene homolog 1
  Uniprot ID: P14921
  ENSP ID: ENSP00000441430
MKAAVDLKPTLTIIKTEKVDLELFPSPGKLGGQDSFESIESYDSCDRLTQSWSSQSSFNSLQRVPSYDSFDSEDYPAALPNHKPKGTFKDYVRDRADLNKDKPVIPAAALAGYTGSGPIQLWQFLLELLTDKSCQSFISWTGDGWEFKLSDPDEVARRWGKRKNKPKMNYEKLSRGLRYYYDKNIIHKTAGKRYVYRFVCDLQSLLGYTPEELHAMLDVKPDADE

SEQ ID NO: 96659 - protein, 46 aa, Homo sapiens
  Payload ID: 19281
  Gene Name: v-ets avian erythroblastosis virus E26 oncogene homolog 1
  ENSP ID: ENSP00000476649
MECADVPLLTPSSKEMMSQALKATFSGFTKEQQRLGIPKDPRQWTE

SEQ ID NO: 96660 - protein, 469 aa, Homo sapiens
  Payload ID: 19282
  Gene Name: v-ets avian erythroblastosis virus E26 oncogene homolog 2
  Uniprot ID: P15036
  ENSP ID: ENSP00000353344
MNDFGIKNMDQVAPVANSYRGTLKRQPAFDTFDGSLFAVFPSLNEEQTLQEVPTGLDSISHDSANCELPLLTPCSKAVMSQALKATFSGFKKEQRRLGIPKNPWLWSEQQVCQWLLWATNEFSLVNVNLQRFGMNGQMLCNLGKERFLELAPDFVGDILWEHLEQMIKENQEKTEDQYEENSHLTSVPHWINSNTLGFGTEQAPYGMQTQNYPKGGLLDSMCPASTPSVLSSEQEFQMFPKSRLSSVSVTYCSVSQDFPGSNLNLLTNNSGTPKDHDSPENGADSFESSDSLLQSWNSQSSLLDVQRVPSFESFEDDCSQSLCLNKPTMSFKDYIQERSDPVEQGKPVIPAAVLAGFTGSGPIQLWQFLLELLSDKSCQSFISWTGDGWEFKLADPDEVARRWGKRKNKPKMNYEKLSRGLRYYYDKNIIHKTSGKRYVYRFVCDLQNLLGFTPEELHAILGVQPDTED

SEQ ID NO: 96661 - protein, 469 aa, Homo sapiens; identical to SEQ ID NO: 96660
  Payload ID: 19282
  Gene Name: v-ets avian erythroblastosis virus E26 oncogene homolog 2
  Uniprot ID: P15036
  ENSP ID: ENSP00000354194

SEQ ID NO: 96662 - protein, 168 aa, Homo sapiens
  Payload ID: 19282
  Gene Name: v-ets avian erythroblastosis virus E26 oncogene homolog 2
  ENSP ID: ENSP00000401273
MNDFGIKNMDQVAPVANSYRGTLKRQPAFDTFDGSLFAVFPSLNEEQTLQEVPTGLDSISHDSANCELPLLTPCSKAVMSQALKATFSGFKKEQRRLGIPKNPWLWSEQQVCQWLLWATNEFSLVNVNLQRFGMNGQMLCNLGKERFLELAPDFVGDILWEHLEQMIK

SEQ ID NO: 96663 - protein, 270 aa, Homo sapiens
  Payload ID: 19282
  Gene Name: v-ets avian erythroblastosis virus E26 oncogene homolog 2
  ENSP ID: ENSP00000411086
MNDFGIKNMDQVAPVANSYRGTLKRQPAFDTFDGSLFAVFPSLNEEQTLQEVPTGLDSISHDSANCELPLLTPCSKAVMSQALKATFSGFKKEQRRLGIPKNPWLWSEQQVCQWLLWATNEFSLVNVNLQRFGMNGQMLCNLGKERFLELAPDFVGDILWEHLEQMIKENQEKTEDQYEENSHLTSVPHWINSNTLGFGTEQAPYGMQTQNYPKGGLLDSMCPASTPSVLSSEQEFQMFPKSRLSSVSVTYCSVSQDFPGSNLNLLTNNS

SEQ ID NO: 96664 - protein, 460 aa, Homo sapiens [sequence omitted]

SEQ ID NO: 96665 - protein, 723 aa, Homo sapiens
  Payload ID: 19283
  Gene Name: vezatin, adherens junctions transmembrane protein
  ENSP ID: ENSP00000380894
MLKEWAIKQGILLKVAETIKSWIFFSQCNKKDDLLHKLDIGFRLDSLHTILQQEVLLQEDVELIELLDPSILSAGQSQQQENGHLPTLCSLATPNIWDLSMLFAFISLLVMLPTWWIVSSWLVWGVILFVYLVIRALRLWRTAKLQVTLKKYSVHLEDMATNSRAFTNLVRKALRLIQETEVISRGFTLLLDRVSAACPFNKAGQHPSQHLIGLRKAVYRTLRANFQAARLATLYMLKNYPLNSESDNVTNYICVVPFKELGLGLSEEQISEEEAHNFTDGFSLPALKVLFQLWVAQSSEFFRRLALLLSTANSPPGPLLTPALLPHRILSDVTQGLPHAHSACLEELKRSYEFYRYFETQHQSVPQCLSKTQQKSRELNNVHTAVRSLQLHLKALLNEVIILEDELEKLVCTKETQELVSEAYPILEQKLKLIQPHVQASNNCWEEAISQVDKLLRRNTDKKGKPEIACENPHCTVVPLKQPTLHIADKDPIPEEQELEAYVDDIDIDSDFRKDDFYYLSQEDKERQKREHEESKRVLQELKSVLGFKASEAERQKWKQLLFSDHAVLKSLSPVDPVEPISNSEPSMNSDMGKVSKNDTEEESNKSATTDNEISRTEYLCENSLEGKNKDNSSNEVFPQGAEERMCYQCESEDEPQADGSGLTTAPPTPRDSLQPSIKQRLARLQLSPDFTFTAGLAAEVAARSLSFTTMQEQTFGGEEEEQ

SEQ ID NO: 96666 - protein, 779 aa, Homo sapiens
  Payload ID: 19283
  Gene Name: vezatin, adherens junctions transmembrane protein
  Uniprot ID: Q9HBM0
  ENSP ID: ENSP00000410083
MTPEFDEEVVFENSPLYQYLQDLGHTDFEICSSLSPKTEKCTTEGQQKPPTRVLPKQGILLKVAETIKSWIFFSQCNKKDDLLHKLDIGFRLDSLHTILQQEVLLQEDVELIELLDPSILSAGQSQQQENGHLPTLCSLATPNIWDLSMLFAFISLLVMLPTWWIVSSWLVWGVILFVYLVIRALRLWRTAKLQVTLKKYSVHLEDMATNSRAFTNLVRKALRLIQETEVISRGFTLVSAACPFNKAGQHPSQHLIGLRKAVYRTLRANFQAARLATLYMLKNYPLNSESDNVTNYICVVPFKELGLGLSEEQISEEEAHNFTDGFSLPALKVLFQLWVAQSSEFFRRLALLLSTANSPPGPLLTPALLPHRILSDVTQGLPHAHSACLEELKRSYEFYRYFETQHQSVPQCLSKTQQKSRELNNVHTAVRSLQLHLKALLNEVIILEDELEKLVCTKETQELVSEAYPILEQKLKLIQPHVQASNNCWEEAISQVDKLLRRNTDKKGKPEIACENPHCTVVPLKQPTLHIADKDPIPEEQELEAYVDDIDIDSDFRKDDFYYLSQEDKERQKREHEESKRVLQELKSVLGFKASEAERQKWKQLLFSDHAVLKSLSPVDPVEPISNSEPSMNSDMGKVSKNDTEEESNKSATTDNEISRTEYLCENSLEGKNKDNSSNEVFPQGAEERMCYQCESEDEPQADGSGLTTAPPTPRDSLQPSIKQRLARLQLSPDFTFTAGLAAEVAARSLSFTTMQEQTFGGEEEEQIIEENKNEIEEK

SEQ ID NO: 96667 - protein, 99 aa, Homo sapiens
  Payload ID: 19283
  Gene Name: vezatin, adherens junctions transmembrane protein
  ENSP ID: ENSP00000446666
MTPEFDEEVVFENSPLYQYLQDLGHTDFEICSSLSPKTEKCTTEGQQKPPTRVLPKQGILLKVAETIKSWIFFSQCNKKDDLLHKLVEPSHSSVILGLW

SEQ ID NO: 96668 - protein, 79 aa, Homo sapiens
  Payload ID: 19283
  Gene Name: vezatin, adherens junctions transmembrane protein
  Uniprot ID: Q9HBM0
  ENSP ID: ENSP00000447010
MTPEFDEEVVFENSPLYQYLQDLGHTDFEICSSLSPKTEKCTTEGQQKPPTRVLPKYLGYSNHSMNINCTYWHAQGMGY

SEQ ID NO: 96669 - protein, 79 aa, Homo sapiens; identical to SEQ ID NO: 96668
  Payload ID: 19283
  Gene Name: vezatin, adherens junctions transmembrane protein
  Uniprot ID: Q9HBM0
  ENSP ID: ENSP00000447044

SEQ ID NO: 96670 - protein, 79 aa, Homo sapiens; identical to SEQ ID NO: 96668
  Payload ID: 19283
  Gene Name: vezatin, adherens junctions transmembrane protein
  Uniprot ID: Q9HBM0
  ENSP ID: ENSP00000447080

SEQ ID NO: 96671 - protein, 98 aa, Homo sapiens
  Payload ID: 19283
  Gene Name: vezatin, adherens junctions transmembrane protein
  ENSP ID: ENSP00000447151
MLKEWAIKDIGFRLDSLHTILQQEVLLQEDVELIELLDPSILSAGQSQQQENGHLPTLCSLATPNIWDLSMLFAFISLLVMLPTWWIVSSWLVWGVIL

SEQ ID NO: 96672 - protein, 65 aa, Homo sapiens
  Payload ID: 19283
  Gene Name: vezatin, adherens junctions transmembrane protein
  ENSP ID: ENSP00000447468
MTPEFDEEVVFENSPLYQYLQDLGHTDFEICSSLSPKTEKCTTEGQQKPPTRVLPKGSLNAICLH

SEQ ID NO: 96673 - protein, 152 aa, Homo sapiens
  Payload ID: 19283
  Gene Name: vezatin, adherens junctions transmembrane protein
  ENSP ID: ENSP00000447633
MTPEFDEEVVFEDLGHTDFEICSSLSPKTEKCTTEGQQKPPTRVLPKQGILLKVAETIKSWIFFSQCNKKDDLLHKLDIGFRLDSLHTILQQEVLLQEDVELIELLDPSILSAGQSQQQENGHLPTLCSLATPNIWDLSMLFAFISLLVMLP

SEQ ID NO: 96674 - protein, 79 aa, Homo sapiens; identical to SEQ ID NO: 96668
  Payload ID: 19283
  Gene Name: vezatin, adherens junctions transmembrane protein
  Uniprot ID: Q9HBM0
  ENSP ID: ENSP00000447786

SEQ ID NO: 96675 - protein, 65 aa, Homo sapiens; identical to SEQ ID NO: 96672
  Payload ID: 19283
  Gene Name: vezatin, adherens junctions transmembrane protein
  ENSP ID: ENSP00000447891

SEQ ID NO: 96676 - protein, 98 aa, Homo sapiens
  Payload ID: 19283
  Gene Name: vezatin, adherens junctions transmembrane protein
  ENSP ID: ENSP00000448019
MTPEFDEEVVFEVRPVGRTCRSEDGGKSARENSPLYQYLQDLGHTDFEICSSLSPKTEKCTTEGQQKPPTRVLPKYLGYSNHSMNINCTYWHAQGMGY

SEQ ID NO: 96677 - protein, 79 aa, Homo sapiens; identical to SEQ ID NO: 96668
  Payload ID: 19283
  Gene Name: vezatin, adherens junctions transmembrane protein
  Uniprot ID: Q9HBM0
  ENSP ID: ENSP00000448555

SEQ ID NO: 96678 - protein, 59 aa, Homo sapiens
  Payload ID: 19283
  Gene Name: vezatin, adherens junctions transmembrane protein
  ENSP ID: ENSP00000448724
MTPEFDEEVVFENSPLYQYLQDLGHTDFEICSSLSPKTEKCTTEGQQKPPTRVLPKVSC

SEQ ID NO: 96679 - protein, 34 aa, Homo sapiens
  Payload ID: 19283
  Gene Name: vezatin, adherens junctions transmembrane protein
  ENSP ID: ENSP00000448738
MTPEFDEEVVFEAAEPLLEASGMLLNFPACRTMS

SEQ ID NO: 96680 - protein, 65 aa, Homo sapiens; identical to SEQ ID NO: 96672
  Payload ID: 19283
  Gene Name: vezatin, adherens junctions transmembrane protein
  ENSP ID: ENSP00000448866

SEQ ID NO: 96681 - protein, 79 aa, Homo sapiens; identical to SEQ ID NO: 96668
  Payload ID: 19283
  Gene Name: vezatin, adherens junctions transmembrane protein
  Uniprot ID: Q9HBM0
  ENSP ID: ENSP00000449056

SEQ ID NO: 96682 - protein, 79 aa, Homo sapiens; identical to SEQ ID NO: 96668
  Payload ID: 19283
  Gene Name: vezatin, adherens junctions transmembrane protein
  Uniprot ID: Q9HBM0
  ENSP ID: ENSP00000449346

SEQ ID NO: 96683 - protein, 159 aa, Homo sapiens
  Payload ID: 19283
  Gene Name: vezatin, adherens junctions transmembrane protein
  ENSP ID: ENSP00000449591
MTPEFDEEVVFENSPLYQYLQDLGHTDFEICSSLSPKTEKCTTEGQQKPPTRVLPKDIGFRLDSLHTILQQEVLLQEDVELIELLDPSILSAGQSQQQENGHLPTLCSLATPNIWDLSMLFAFISLLVMLPTWWIVSSWLVWGVILFVYLVIRALRLWR

SEQ ID NO: 96684 - protein, 189 aa, Homo sapiens
  Payload ID: 19283
  Gene Name: vezatin, adherens junctions transmembrane protein
  ENSP ID: ENSP00000449701
MTPEFDEEVVFEVRPVGRTCRSEDGGKSARENSPLYQYLQDLGHTDFEICSSLSPKTEKCTTEGQQKPPTRVLPKQGILLKVAETIKSWIFFSQCNKKDDLLHKLDIGFRLDSLHTILQQEVLLQEDVELIELLDPSILSAGQSQQQENGHLPTLCSLATPNIWDLSMLFAFISLLVMLPTWWIVSSWL

SEQ ID NO: 96685 - protein, 89 aa, Homo sapiens
  Payload ID: 19283
  Gene Name: vezatin, adherens junctions transmembrane protein
  ENSP ID: ENSP00000450009
MLKEWAIKQGILLKVAETIKSWIFFSQCNKKDDLLHKLDIGFRLDSLHTILQQEVLLQEDVELIELLDPSILSAGQSQQQENGHLPTLC

SEQ ID NO: 96686 - protein, 615 aa, Homo sapiens
  Payload ID: 19284
  Gene Name: VGF nerve growth factor inducible
  Uniprot ID: O15240
  ENSP ID: ENSP00000249330
MKALRLSASALFCLLLINGLGAAPPGRPEAQPPPLSSEHKEPVAGDAVPGPKDGSAPEVRGARNSEPQDEGELFQGVDPRALAAVLLQALDRPASPPAPSGSQQGPEEEAAEALLTETVRSQTHSLPAPESPEPAAPPRPQTPENGPEASDPSEELEALASLLQELRDFSPSSAKRQQETAAAETETRTHTLTRVNLESPGPERVWRASWGEFQARVPERAPLPPPAPSQFQARMPDSGPLPETHKFGEGVSSPKTHLGEALAPLSKAYQGVAAPFPKARRPESALLGGSEAGERLLQQGLAQVEAGRRQAEATRQAAAQEERLADLASDLLLQYLLQGGARQRGLGGRGLQEAAEERESAREEEEAEQERRGGEERVGEEDEEAAEAEAEAEEAERARQNALLFAEEEDGEAGAEDKRSQEETPGHRRKEAEGTEEGGEEEDDEEMDPQTIDSLIELSTKLHLPADDVVSIIEEVEEKRKRKKNAPPEPVPPPRAAPAPTHVRSPQPPPPAPAPARDELPDWNEVLPPWDREEDEVYPPGPYHPFPNYIRPRTLQPPSALRRRHYHHALPPSRHYPGREAQARRAQEEAEAEERRLQEQEELENYIEHVLLRRP

SEQ ID NO: 96687 - protein, 615 aa, Homo sapiens; identical to SEQ ID NO: 96686
  Payload ID: 19284
  Gene Name: VGF nerve growth factor inducible
  Uniprot ID: O15240
  ENSP ID: ENSP00000400884

SEQ ID NO: 96688 - protein, 377 aa, Homo sapiens
  Payload ID: 19284
  Gene Name: VGF nerve growth factor inducible
  ENSP ID: ENSP00000480817
MKALRLSASALFCLLLINGLGAAPPGRPEAQPPPLSSEHKEPVAGDAVPGPKDGSAPEVRGARNSEPQDEGELFQGVDPRALAAVLLQALDRPASPPAPSGSQQGPEEEAAEALLTETVRSQTHSLPAPESPEPAAPPRPQTPENGPEASDPSEELEALASLLQELRDFSPSSAKRQQETAAAETETRTHTLTRVNLESPGPERVWRASWGEFQARVPERAPLPPPAPSQFQARMPDSGPLPETHKFGEGVSSPKTHLGEALAPLSKAYQGVAAPFPKARRPESALLGGSEAGERLLQQGLAQVEAGRRQAEATRQAAAQEERLADLASDLLLQFAAGRGPAARPCPLALPLSPGCVGTCQTPLPGPEPELPELTRG

SEQ ID NO: 96689 - protein, 827 aa, Homo sapiens
  Payload ID: 19285
  Gene Name: villin 1
  Uniprot ID: P09327
  ENSP ID: ENSP00000248444
MTKLSAQVKGSLNITTPGLQIWRIEAMQMVPVPSSTFGSFFDGDCYIILAIHKTASSLSYDIHYWIGQDSSLDEQGAAAIYTTQMDDFLKGRAVQHREVQGNESEAFRGYFKQGLVIRKGGVASGMKHVETNSYDVQRLLHVKGKRNVVAGEVEMSWKSFNRGDVFLLDLGKLIIQWNGPESTRMERLRGMTLAKEIRDQERGGRTYVGVVDGENELASPKLMEVMNHVLGKRRELKAAVPDTVVEPALKAALKLYHVSDSEGNLVVREVATRPLTQDLLSHEDCYILDQGGLKIYVWKGKKANEQEKKGAMSHALNFIKAKQYPPSTQVEVQNDGAESAVFQQLFQKWTASNRTSGLGKTHTVGSVAKVEQVKFDATSMHVKPQVAAQQKMVDDGSGEVQVWRIENLELVPVDSKWLGHFYGGDCYLLLYTYLIGEKQHYLLYVWQGSQASQDEITASAYQAVILDQKYNGEPVQIRVPMGKEPPHLMSIFKGRMVVYQGGTSRTNNLETGPSTRLFQVQGTGANNTKAFEVPARANFLNSNDVFVLKTQSCCYLWCGKGCSGDEREMAKMVADTISRTEKQVVVEGQEPANFWMALGGKAPYANTKRLQEENLVITPRLFECSNKTGRFLATEIPDFNQDDLEEDDVFLLDVWDQVFFWIGKHANEEEKKAAATTAQEYLKTHPSGRDPETPIIVVKQGHEPPTFTGWFLAWDPFKWSNTKSYEDLKAELGNSRDWSQITAEVTSPKVDVFNANSNLSSGPLPIFPLEQLVNKPVEELPEGVDPSRKEEHLSIEDFTQAFGMTPAAFSALPRWKQQNLKKEKGLF

SEQ ID NO: 96690 - protein, 516 aa, Homo sapiens
  Payload ID: 19285
  Gene Name: villin 1
  ENSP ID: ENSP00000375962
MSHALNFIKAKQYPPSTQVEVQNDGAESAVFQQLFQKWTASNRTSGLGKTHTVGSVAKVEQVKFDATSMHVKPQVAAQQKMVDDGSGEVQVWRIENLELVPVDSKWLGHFYGGDCYLLLYTYLIGEKQHYLLYVWQGSQASQDEITASAYQAVILDQKYNGEPVQIRVPMGKEPPHLMSIFKGRMVVYQGGTSRTNNLETGPSTRLFQVQGTGANNTKAFEVPARANFLNSNDVFVLKTQSCCYLWCGKGCSGDEREMAKMVADTISRTEKQVVVEGQEPANFWMALGGKAPYANTKRLQEENLVITPRLFECSNKTGRFLATEIPDFNQDDLEEDDVFLLDVWDQVFFWIGKHANEEEKKAAATTAQEYLKTHPSGRDPETPIIVVKQGHEPPTFTGWFLAWDPFKWSNTKSYEDLKAELGNSRDWSQITAEVTSPKVDVFNANSNLSSGPLPIFPLEQLVNKPVEELPEGVDPSRKEEHLSIEDFTQAFGMTPAAFSALPRWKQQNLKKEKGLF

SEQ ID NO: 96691 - protein, 213 aa, Homo sapiens
  Payload ID: 19285
  Gene Name: villin 1
  ENSP ID: ENSP00000394030
GAERKGGGLGLRLGLQGSQASQDEITASAYQAVILDQKYNGEPVQIRVPMGKEPPHLMSIFKGRMVVYQGGTSRTNNLETGPSTRLFQVQGTGANNTKAFEVPARANFLNSNDVFVLKTQSCCYLWCGKGCSGDEREMAKMVADTISRTEKQVVVEGQEPANFWMALGGKAPYANTKRLQEENLVITPRLFECSNKTGRFLATEIPDFNQDDL

SEQ ID NO: 96692 - protein, 421 aa, Homo sapiens
  Payload ID: 19285
  Gene Name: villin 1
  Uniprot ID: P09327
  ENSP ID: ENSP00000409270
MTKLSAQVKGSLNITTPGLQIWRIEAMQMVPVPSSTFGSFFDGDCYIILAIHKTASSLSYDIHYWIGQDSSLDEQGAAAIYTTQMDDFLKGRAVQHREVQGNESEAFRGYFKQGLVIRKGGVASGMKHVETNSYDVQRLLHVKGKRNVVAGEVEMSWKSFNRGDVFLLDLGKLIIQWNGPESTRMERLRGMTLAKEIRDQERGGRTYVGVVDGENELASPKLMEVMNHVLGKRRELKAAVPDTVVEPALKAALKLYHVSDSEGNLVVREVATRPLTQDLLSHEDCYILDQGGLKIYVWKGKKANEQEKKGAMSHALNFIKAKQYPPSTQVEVQNDGAESAVFQQLFQKWTASNRTSGLGKTHTVGSVGEGQAGAVREPGSRSWARRATWSTTHPPSLTCIFNEDFYAGSGLVLADGDVDKL

SEQ ID NO: 96693 - protein, 157 aa, Homo sapiens
  Payload ID: 19285
  Gene Name: villin 1
  ENSP ID: ENSP00000412657
MTKLSAQVKGSLNITTPGLQIWRIEAMQMVPVPSSTFGSFFDGDCYIILAIHKTASSLSYDIHYWIGQDSSLDEQGAAAIYTTQMDDFLKGRAVQHREVQGNESEAFRGYFKIRKGGVASGMKHVETNSYDVQRLLHVKGKRNVVAGEVEMSWKSFN

SEQ ID NO: 96694 - protein, 856 aa, Homo sapiens
  Payload ID: 19286
  Gene Name: villin-like
  Uniprot ID: O15195
  ENSP ID: ENSP00000283713
MDISKGLPGMQGGLHIWISENRKMVPVPEGAYGNFFEEHCYVILHVPQSPKATQGASSDLHYWVGKQAGAEAQGAAEAFQQRLQDELGGQTVLHREAQGHESDCFCSYFRPGIIYRKGGLASDLKHVETNLFNIQRLLHIKGRKHVSATEVELSWNSFNKGDIFLLDLGKMMIQWNGPKTSISEKARGLALTYSLRDRERGGGRAQIGVVDDEAKAPDLMQIMEAVLGRRVGSLRAATPSKDINQLQKANVRLYHVYEKGKDLVVLELATPPLTQDLLQEEDFYILDQGGFKIYVWQGRMSSLQERKAAFSRAVGFIQAKGYPTYTNVEVVNDGAESAAFKQLFRTWSEKRRRNQKLGGRDKSIHVKLDVGKLHTQPKLAAQLRMVDDGSGKVEVWCIQDLHRQPVDPKRHGQLCAGNCYLVLYTYQRLGRVQYILYLWQGHQATADEIEALNSNAEELDVMYGGVLVQEHVTMGSEPPHFLAIFQGQLVIFQERAGHHGKGQSASTTRLFQVQGTDSHNTRTMEVPARASSLNSSDIFLLVTASVCYLWFGKGCNGDQREMARVVVTVISRKNEETVLEGQEPPHFWEALGGRAPYPSNKRLPEEVPSFQPRLFECSSHMGCLVLAEVGFFSQEDLDKYDIMLLDTWQEIFLWLGEAASEWKEAVAWGQEYLKTHPAGRSPATPIVLVKQGHEPPTFIGWFFTWDPYKWTSHPSHKEVVDGSPAAASTISEITAEVNNLRLSRWPGNGRAGAVALQALKGSQDSSENDLVRSPKSAGSRTSSSVSSTSATINGGLRREQLMHQAVEDLPEGVDPARREFYLSDSDFQDIFGKSKEEFYSMATWRQRQEKKQLGFF

SEQ ID NO: 96695 - protein, 856 aa, Homo sapiens; identical to SEQ ID NO: 96694
  Payload ID: 19286
  Gene Name: villin-like
  Uniprot ID: O15195
  ENSP ID: ENSP00000373266

SEQ ID NO: 96696 - protein, 101 aa, Homo sapiens
  Payload ID: 19286
  Gene Name: villin-like
  ENSP ID: ENSP00000387659
  MOD_RES (1)..(1): Any amino acid
XMSSLQERKAAFSRAVGFIQAKGYPTYTNVEVVNDGAESAAFKQLFRTWSEKRRRNQKLGGRDKSIHVKLDVGKLHTQPKLAAQLRMVDDGSGKVEGLPGI

SEQ ID NO: 96697 - protein, 130 aa, Homo sapiens
  Payload ID: 19286
  Gene Name: villin-like
  ENSP ID: ENSP00000393661
MDISKGLPGMQGGLHIWISENRKMVPVPEGAYGNFFEEHCYVILHVPQSPKATQGASSDLHYWVGKQAGAEAQGAAEAFQQRLQDELGGQTVLHREAQGHESDCFCSYFRPGIIYRKGGLASDLKHVETN

SEQ ID NO: 96698 - protein, 574 aa, Homo sapiens
  Payload ID: 19286
  Gene Name: villin-like
  ENSP ID: ENSP00000422096
MALGTSSPSPPAPPSSPQHIYTNTRTLGPPEPEGHAGGGYPTYTNVEVVNDGAESAAFKQLFRTWSEKRRRNQKLGGRDKSIHVKLDVGKLHTQPKLAAQLRMVDDGSGKVEVWCIQDLHRQPVDPKRHGQLCAGNCYLVLYTYQRLGRVQYILYLWQGHQATADEIEALNSNAEELDVMYGGVLVQEHVTMGSEPPHFLAIFQGQLVIFQERAGHHGKGQSASTTRLFQVQGTDSHNTRTMEVPARASSLNSSDIFLLVTASVCYLWFGKGCNGDQREMARVVVTVISRKNEETVLEGQEPPHFWEALGGRAPYPSNKRLPEEVPSFQPRLFECSSHMGCLVLAEVGFFSQEDLDKYDIMLLDTWQEIFLWLGEAASEWKEAVAWGQEYLKTHPAGRSPATPIVLVKQGHEPPTFIGWFFTWDPYKWTSHPSHKEVVDGSPAAASTISEITAEVNNLRLSRWPGNGRAGAVALQALKGSQDSSENDLVRSPKSAGSRTSSSVSSTSATINGGLRREQLMHQAVEDLPEGVDPARREFYLSDSDFQDIFGKSKEEFYSMATWRQRQEKKQLGFF

SEQ ID NO: 96699 - protein, 187 aa, Homo sapiens
  Payload ID: 19286
  Gene Name: villin-like
  ENSP ID: ENSP00000427355
MDISKGLPGMQGGLHIWISENRKMVPVPEGAYGNFFEEHCYVILHVPQSPKATQGASSDLHYWVGKQAGAEAQGAAEAFQQRLQDELGGQTVLHREAQGHESDCFCSYFRPGIIYRKGGLASDLKHVETNLFNIQRLLHIKGRKHVSATEVELSWNSFNKGDIFLLDLGKMMIQWNGPKTSISEKAR

SEQ ID NO: 96700 - protein, 466 aa, Homo sapiens
  Payload ID: 19287
  Gene Name: vimentin
  Uniprot ID: P08670
  ENSP ID: ENSP00000224237
MSTRSVSSSSYRRMFGGPGTASRPSSSRSYVTTSTRTYSLGSALRPSTSRSLYASSPGGVYATRSSAVRLRSSVPGVRLLQDSVDFSLADAINTEFKNTRTNEKVELQELNDRFANYIDKVRFLEQQNKILLAELEQLKGQGKSRLGDLYEEEMRELRRQVDQLTNDKARVEVERDNLAEDIMRLREKLQEEMLQREEAENTLQSFRQDVDNASLARLDLERKVESLQEEIAFLKKLHEEEIQELQAQIQEQHVQIDVDVSKPDLTAALRDVRQQYESVAAKNLQEAEEWYKSKFADLSEAANRNNDALRQAKQESTEYRRQVQSLTCEVDALKGTNESLERQMREMEENFAVEAANYQDTIGRLQDEIQNMKEEMARHLREYQDLLNVKMALDIEIATYRKLLEGEESRISLPLPNFSSLNLRETNLDSLPLVDTHSKRTLLIKTVETRDGQVINETSQHHDDLE

SEQ ID NO: 96701 - protein, 173 aa, Homo sapiens
  Payload ID: 19287
  Gene Name: vimentin
  ENSP ID: ENSP00000391842
GFLVPLWLMRNCFRLQEEMLQREEAENTLQSFRQDVDNASLARLDLERKVESLQEEIAFLKKLHEEEIQELQAQIQEQHVQIDVDVSKPDLTAALRDVRQQYESVAAKNLQEAEEWYKSKFADLSEAANRNNDALRQAKQESTEYRRQVQSLTCEVDALKGTVSTNPAVKEGK

SEQ ID NO: 96702 - protein, 228 aa, Homo sapiens
  Payload ID: 19287
  Gene Name: vimentin
  ENSP ID: ENSP00000431702
MRNCFRLQEEMLQREEAENTLQSFRQDVDNASLARLDLERKVESLQEEIAFLKKLHEEEIQELQAQIQEQHVQIDVDVSKPDLTAALRDVRQQYESVAAKNLQEAEEWYKSKFADLSEAANRNNDALRQAKQESTEYRRQVQSLTCEVDALKGTNESLERQMREMEENFAVEAANYQDTIGRLQDEIQNMKEEMARHLREYQDLLNVKMALDIEIATYRKLLEGEESR

SEQ ID NO: 96703 - protein, 431 aa, Homo sapiens
  Payload ID: 19287
  Gene Name: vimentin
  ENSP ID: ENSP00000435613
MSTRSVSSSSYRRMFGGPGTASRPSSSRSYVTTSTRTYSLGSALRPSTSRSLYASSPGGVYATRSSAVRLRSSVPGVRLLQDSVDFSLADAINTEFKNTRTNEKVELQELNDRFANYIDKVRFLEQQNKILLAELEQLKGQGKSRLGDLYEEEMRELRRQVDQLTNDKARVEVERDNLAEDIMRLREKLQEEMLQREEAENTLQSFRQDVDNASLARLDLERKVESLQEEIAFLKKLHEEEIQELQAQIQEQHVQIDVDVSKPDLTAALRDVRQQYESVAAKNLQEAEEWYKSKFADLSEAANRNNDALRQAKQESTEYRRQVQSLTCEVDALKGTNESLERQMREMEENFAVEAANYQDTIGRLQDEIQNMKEEMARHLREYQDLLNVKMALDIEIATYRKLLEGEESRISLPLPNFSSLNLRGKHFISL

SEQ ID NO: 96704 - protein, 466 aa, Homo sapiens; identical to SEQ ID NO: 96700
  Payload ID: 19287
  Gene Name: vimentin
  Uniprot ID: P08670
  ENSP ID: ENSP00000446007

SEQ ID NO: 96705 - protein, 169 aa, Homo sapiens
  Payload ID: 19288
  Gene Name: vimentin-type intermediate filament associated coiled-coil protein
  Uniprot ID: Q2NL98
  ENSP ID: ENSP00000343348
MSAPPALQIREANAHLAAVHRRAAELEARLDAAERTVHAQAERLALHDQQLRAALDELGRAKDREIATLQEQLMTSEATVHSLQATVHQRDELIRQLQPRAELLQDICRRRPPLAGLLDALAEAERLGPLPASDPGHPPPGGPGPPLDNSTGEEADRDHLQPAVFGTTV

SEQ ID NO: 96706 - protein, 1134 aa, Homo sapiens
  Payload ID: 19289
  Gene Name: vinculin
  Uniprot ID: P18206
  ENSP ID: ENSP00000211998
MPVFHTRTIESILEPVAQQISHLVIMHEEGEVDGKAIPDLTAPVAAVQAAVSNLVRVGKETVQTTEDQILKRDMPPAFIKVENACTKLVQAAQMLQSDPYSVPARDYLIDGSRGILSGTSDLLLTFDEAEVRKIIRVCKGILEYLTVAEVVETMEDLVTYTKNLGPGMTKMAKMIDERQQELTHQEHRVMLVNSMNTVKELLPVLISAMKIFVTTKNSKNQGIEEALKNRNFTVEKMSAEINEIIRVLQLTSWDEDAWASKDTEAMKRALASIDSKLNQAKGWLRDPSASPGDAGEQAIRQILDEAGKVGELCAGKERREILGTCKMLGQMTDQVADLRARGQGSSPVAMQKAQQVSQGLDVLTAKVENAARKLEAMTNSKQSIAKKIDAAQNWLADPNGGPEGEEQIRGALAEARKIAELCDDPKERDDILRSLGEISALTSKLADLRRQGKGDSPEARALAKQVATALQNLQTKTNRAVANSRPAKAAVHLEGKIEQAQRWIDNPTVDDRGVGQAAIRGLVAEGHRLANVMMGPYRQDLLAKCDRVDQLTAQLADLAARGEGESPQARALASQLQDSLKDLKARMQEAMTQEVSDVFSDTTTPIKLLAVAATAPPDAPNREEVFDERAANFENHSGKLGATAEKAAAVGTANKSTVEGIQASVKTARELTPQVVSAARILLRNPGNQAAYEHFETMKNQWIDNVEKMTGLVDEAIDTKSLLDASEEAIKKDLDKCKVAMANIQPQMLVAGATSIARRANRILLVAKREVENSEDPKFREAVKAASDELSKTISPMVMDAKAVAGNISDPGLQKSFLDSGYRILGAVAKVREAFQPQEPDFPPPPPDLEQLRLTDELAPPKPPLPEGEVPPPRPPPPEEKDEEFPEQKAGEVINQPMMMAARQLHDEARKWSSKPGIPAAEVGIGVVAEADAADAAGFPVPPDMEDDYEPELLLMPSNQPVNQPILAAAQSLHREATKWSSKGNDIIAAAKRMALLMAEMSRLVRGGSGTKRALIQCAKDIAKASDEVTRLAKEVAKQCTDKRIRTNLLQVCERIPTISTQLKILSTVKATMLGRTNISDEESEQATEMLVHNAQNLMQSVKETVREAEAASIKIRTDAGFTLRWVRKTPWYQ

SEQ ID NO: 96707 - protein, 1066 aa, Homo sapiens
  Payload ID: 19289
  Gene Name: vinculin
  Uniprot ID: P18206
  ENSP ID: ENSP00000361841
MPVFHTRTIESILEPVAQQISHLVIMHEEGEVDGKAIPDLTAPVAAVQAAVSNLVRVGKETVQTTEDQILKRDMPPAFIKVENACTKLVQAAQMLQSDPYSVPARDYLIDGSRGILSGTSDLLLTFDEAEVRKIIRVCKGILEYLTVAEVVETMEDLVTYTKNLGPGMTKMAKMIDERQQELTHQEHRVMLVNSMNTVKELLPVLISAMKIFVTTKNSKNQGIEEALKNRNFTVEKMSAEINEIIRVLQLTSWDEDAWASKDTEAMKRALASIDSKLNQAKGWLRDPSASPGDAGEQAIRQILDEAGKVGELCAGKERREILGTCKMLGQMTDQVADLRARGQGSSPVAMQKAQQVSQGLDVLTAKVENAARKLEAMTNSKQSIAKKIDAAQNWLADPNGGPEGEEQIRGALAEARKIAELCDDPKERDDILRSLGEISALTSKLADLRRQGKGDSPEARALAKQVATALQNLQTKTNRAVANSRPAKAAVHLEGKIEQAQRWIDNPTVDDRGVGQAAIRGLVAEGHRLANVMMGPYRQDLLAKCDRVDQLTAQLADLAARGEGESPQARALASQLQDSLKDLKARMQEAMTQEVSDVFSDTTTPIKLLAVAATAPPDAPNREEVFDERAANFENHSGKLGATAEKAAAVGTANKSTVEGIQASVKTARELTPQVVSAARILLRNPGNQAAYEHFETMKNQWIDNVEKMTGLVDEAIDTKSLLDASEEAIKKDLDKCKVAMANIQPQMLVAGATSIARRANRILLVAKREVENSEDPKFREAVKAASDELSKTISPMVMDAKAVAGNISDPGLQKSFLDSGYRILGAVAKVREAFQPQEPDFPPPPPDLEQLRLTDELAPPKPPLPEGEVPPPRPPPPEEKDEEFPEQKAGEVINQPMMMAARQLHDEARKWSSKGNDIIAAAKRMALLMAEMSRLVRGGSGTKRALIQCAKDIAKASDEVTRLAKEVAKQCTDKRIRTNLLQVCERIPTISTQLKILSTVKATMLGRTNISDEESEQATEMLVHNAQNLMQSVKETVREAEAASIKIRTDAGFTLRWVRKTPWYQ

SEQ ID NO: 96708 - protein, 806 aa, Homo sapiens
  Payload ID: 19289
  Gene Name: vinculin
  ENSP ID: ENSP00000415489
GQMTDQVADLRARGQGSSPVAMQKAQQVSQGLDVLTAKVENAARKLEAMTNSKQSIAKKIDAAQNWLADPNGGPEGEEQIRGALAEARKIAELCDDPKERDDILRSLGEISALTSKLADLRRQGKGDSPEARALAKQVATALQNLQTKTNRAVANSRPAKAAVHLEGKIEQAQRWIDNPTVDDRGVGQAAIRGLVAEGHRLANVMMGPYRQDLLAKCDRVDQLTAQLADLAARGEGESPQARALASQLQDSLKDLKARMQEAMTQEVSDVFSDTTTPIKLLAVAATAPPDAPNREEVFDERAANFENHSGKLGATAEKAAAVGTANKSTVEGIQASVKTARELTPQVVSAARILLRNPGNQAAYEHFETMKNQWIDNVEKMTGLVDEAIDTKSLLDASEEAIKKDLDKCKVAMANIQPQMLVAGATSIARRANRILLVAKREVENSEDPKFREAVKAASDELSKTISPMVMDAKAVAGNISDPGLQKSFLDSGYRILGAVAKVREAFQPQEPDFPPPPPDLEQLRLTDELAPPKPPLPEGEVPPPRPPPPEEKDEEFPEQKAGEVINQPMMMAARQLHDEARKWSSKPGIPAAEVGIGVVAEADAADAAGFPVPPDMEDDYEPELLLMPSNQPVNQPILAAAQSLHREATKWSSKGNDIIAAAKRMALLMAEMSRLVRGGSGTKRALIQCAKDIAKASDEVTRLAKEVAKQCTDKRIRTNLLQVCERIPTISTQLKILSTVKATMLGRTNISDEESEQATEMLVHNAQNLMQSVKETVREAEAASIKIRTDAGFTLRWVRKTPWYQ

SEQ ID NO: 96709 - protein, 57 aa, Homo sapiens
  Payload ID: 19289
  Gene Name: vinculin
  ENSP ID: ENSP00000485551
MPVFHTRTIESILEPVAQQISHLVIMHEEGEVDGKAIPDLTAPVAAVQAAVSNLVRG

SEQ ID NO: 96710 - protein, 191 aa, Homo sapiens
  Payload ID: 19290
  Gene Name: visinin-like 1
  Uniprot ID: P62760
  ENSP ID: ENSP00000295156
MGKQNSKLAPEVMEDLVKSTEFNEHELKQWYKGFLKDCPSGRLNLEEFQQLYVKFFPYGDASKFAQHAFRTFDKNGDGTIDFREFICALSITSRGSFEQKLNWAFNMYDLDGDGKITRVEMLEIIEAIYKMVGTVIMMKMNEDGLTPEQRVDKIFSKMDKNKDDQITLDEFKEAAKSDPSIVLLLQCDIQK

SEQ ID NO: 96711 - protein, 191 aa, Homo sapiens; identical to SEQ ID NO: 96710
  Payload ID: 19290
  Gene Name: visinin-like 1
  Uniprot ID: P62760
  ENSP ID: ENSP00000384014

SEQ ID NO: 96712 - protein, 191 aa, Homo sapiens; identical to SEQ ID NO: 96710
  Payload ID: 19290
  Gene Name: visinin-like 1
  Uniprot ID: P62760
  ENSP ID: ENSP00000384719

SEQ ID NO: 96713 - protein, 104 aa, Homo sapiens
  Payload ID: 19290
  Gene Name: visinin-like 1
  ENSP ID: ENSP00000390124
MGKQNSKLAPEVMEDLVKSTEFNEHELKQWYKGFLKDCPSGRLNLEEFQQLYVKFFPYGDASKFAQHAFRTFDKNGDGTIDFREFICALSITSRGSFEQKLNWA

SEQ ID NO: 96714 - protein, 118 aa, Homo sapiens
  Payload ID: 19290
  Gene Name: visinin-like 1
  ENSP ID: ENSP00000405511
MGKQNSKLAPEVMEDLVKSTEFNEHELKQWYKGFLKDCPSGRLNLEEFQQLYVKFFPYGDASKFAQHAFRTFDKNGDGTIDFREFICALSITSRGSFEQKLNWAFNMYDLDGDGKITR

SEQ ID NO: 96715 - protein, 239 aa, Homo sapiens
  Payload ID: 19291
  Gene Name: visual system homeobox 1
  Uniprot ID: Q9NZR4
  ENSP ID: ENSP00000365897
MTGRDSLSDGRTSSRALVPGGSPRGSRPRGFAITDLLGLEAELPAPAGPGQGSGCEGPAVAPCPGPGLDGSSLARGALPLGLGLLCGFGTQPPAAARAPCLLLADVPFLPPRGPEPAAPLAPSRPPPALGRQKRSDSVSTSDEDSQSEDRNDLKASPTLGKRKKRRHRTVFTAHQLEELEKAFSEAHYPDVYAREMLAVKTELPEDRIQVSGVPFLRSKDTTENVSFPHSVSQSAVPSL

SEQ ID NO: 96716 - protein, 365 aa, Homo sapiens
  Payload ID: 19291
  Gene Name: visual system homeobox 1
  Uniprot ID: Q9NZR4
  ENSP ID: ENSP00000365899
MTGRDSLSDGRTSSRALVPGGSPRGSRPRGFAITDLLGLEAELPAPAGPGQGSGCEGPAVAPCPGPGLDGSSLARGALPLGLGLLCGFGTQPPAAARAPCLLLADVPFLPPRGPEPAAPLAPSRPPPALGRQKRSDSVSTSDEDSQSEDRNDLKASPTLGKRKKRRHRTVFTAHQLEELEKAFSEAHYPDVYAREMLAVKTELPEDRIQVWFQNRRAKWRKREKRWGGSSVMAEYGLYGAMVRHCIPLPDSVLNSAEGGLLGSCAPWLLGMHKKSMGMIRKPGSEDKLAGLWGSDHFKEGSSQSESGSQRGSDKVSPENGLEDVAIDLSSSARQETKKVHPGAGAQGGSNSTALEGPQPGKVGAT

SEQ ID NO: 96717 - protein, 280 aa, Homo sapiens
  Payload ID: 19291
  Gene Name: visual system homeobox 1
  Uniprot ID: Q9NZR4
  ENSP ID: ENSP00000386612
MTGRDSLSDGRTSSRALVPGGSPRGSRPRGFAITDLLGLEAELPAPAGPGQGSGCEGPAVAPCPGPGLDGSSLARGALPLGLGLLCGFGTQPPAAARAPCLLLADVPFLPPRGPEPAAPLAPSRPPPALGRQKRSDSVSTSDEDSQSEDRNDLKASPTLGKRKKRRHRTVFTAHQLEELEKAFSEAHYPDVYAREMLAVKTELPEDRIQVWFQNRRAKWRKREKRWGGSSVMAEYGLYGAMVRHCIPLPDSVLNSAEGGLLGSCAPWLLEGETLGCREMK

SEQ ID NO: 96718 - protein, 218 aa, Homo sapiens
  Payload ID: 19291
  Gene Name: visual system homeobox 1
  Uniprot ID: Q9NZR4
  ENSP ID: ENSP00000387069
MTGRDSLSDGRTSSRALVPGGSPRGSRPRGFAITDLLGLEAELPAPAGPGQGSGCEGPAVAPCPGPGLDGSSLARGALPLGLGLLCGFGTQPPAAARAPCLLLADVPFLPPRGPEPAAPLAPSRPPPALGRQKRSDSVSTSDEDSQSEDRNDLKASPTLGKRKKRRHRTVFTAHQLEELEKAFSEAHYPDVYAREMLAVKTELPEDRIQRVRHWAAEK

SEQ ID NO: 96719 - protein, 236 aa, Homo sapiens
  Payload ID: 19291
  Gene Name: visual system homeobox 1
  Uniprot ID: Q9NZR4
  ENSP ID: ENSP00000387720
MTGRDSLSDGRTSSRALVPGGSPRGSRPRGFAITDLLGLEAELPAPAGPGQGSGCEGPAVAPCPGPGLDGSSLARGALPLGLGLLCGFGTQPPAAARAPCLLLADVPFLPPRGPEPAAPLAPSRPPPALGRQKRSDSVSTSDEDSQSEDRNDLKASPTLGKRKKRRHRTVFTAHQLEELEKAFSEAHYPDVYAREMLAVKTELPEDRIQCKLLLLEAPVHWTLQETHRLPRPRGGA

SEQ ID NO: 96720 - protein, 301 aa, Homo sapiens
  Payload ID: 19291
  Gene Name: visual system homeobox 1
  Uniprot ID: Q9NZR4
  ENSP ID: ENSP00000401690
MTGRDSLSDGRTSSRALVPGGSPRGSRPRGFAITDLLGLEAELPAPAGPGQGSGCEGPAVAPCPGPGLDGSSLARGALPLGLGLLCGFGTQPPAAARAPCLLLADVPFLPPRGPEPAAPLAPSRPPPALGRQKRSDSVSTSDEDSQSEDRNDLKASPTLGKRKKRRHRTVFTAHQLEELEKAFSEAHYPDVYAREMLAVKTELPEDRIQVWFQNRRAKWRKREKRWGGSSVMAEYGLYGAMVRHCIPLPDSVLNSAEGGLLGSCAPWLLVQTSAPGGSRSLDFAGDTQAPQTPWWCLMTFS

SEQ ID NO: 96721 - protein, 361 aa, Homo sapiens
  Payload ID: 19292
  Gene Name: visual system homeobox 2
  Uniprot ID: P58304
  ENSP ID: ENSP00000261980
MTGKAGEALSKPKSETVAKSTSGGAPARCTGFGIQEILGLNKEPPSSHPRAALDGLAPGHLLAARSVLSPAGVGGMGLLGPGGLPGFYTQPTFLEVLSDPQSVHLQPLGRASGPLDTSQTASSDSEDVSSSDRKMSKSALNQTKKRKKRRHRTIFTSYQLEELEKAFNEAHYPDVYAREMLAMKTELPEDRIQVWFQNRRAKWRKREKCWGRSSVMAEYGLYGAMVRHSIPLPESILKSAKDGIMDSCAPWLLGMHKKSLEAAAESGRKPEGERQALPKLDKMEQDERGPDAQAAISQEELRENSIAVLRAKAQEHSTKVLGTVSGPDSLARSTEKPEEEEAMDEDRPAERLSPPQLEDMA

SEQ ID NO: 96722 - protein, 427 aa, Homo sapiens
  Payload ID: 19293
  Gene Name: vitamin D (1,25- dihydroxyvitamin D3) receptor
  Uniprot ID: P11473
  ENSP ID: ENSP00000229022
MEAMAASTSLPDPGDFDRNVPRICGVCGDRATGFHFNAMTCEGCKGFFRRSMKRKALFTCPFNGDCRITKDNRRHCQACRLKRCVDIGMMKEFILTDEEVQRKREMILKRKEEEALKDSLRPKLSEEQQRIIAILLDAHHKTYDPTYSDFCQFRPPVRVNDGGGSHPSRPNSRHTPSFSGDSSSSCSDHCITSSDMMDSSSFSNLDLSEEDSDDPSVTLELSQLSMLPHLADLVSYSIQKVIGFAKMIPGFRDLTSEDQIVLLKSSAIEVIMLRSNESFTMDDMSWTCGNQDYKYRVSDVTKAGHSLELIEPLIKFQVGLKKLNLHEEEHVLLMAICIVSPDRPGVQDAALIEAIQDRLSNTLQTYIRCRHPPPGSHLLYAKMIQKLADLRSLNEEHSKQYRCLSFQPECSMKLTPLVLEVFGNEIS

SEQ ID NO: 96723 - protein, 427 aa, Homo sapiens; identical to SEQ ID NO: 96722
  Payload ID: 19293
  Gene Name: vitamin D (1,25- dihydroxyvitamin D3) receptor
  Uniprot ID: P11473
  ENSP ID: ENSP00000378734

SEQ ID NO: 96724 - protein, 477 aa, Homo sapiens
  Payload ID: 19293
  Gene Name: vitamin D (1,25- dihydroxyvitamin D3) receptor
  Uniprot ID: P11473
  ENSP ID: ENSP00000447173
MEWRNKKRSDWLSMVLRTAGVEEAFGSEVSVRPHRRAPLGSTYLPPAPSGMEAMAASTSLPDPGDFDRNVPRICGVCGDRATGFHFNAMTCEGCKGFFRRSMKRKALFTCPFNGDCRITKDNRRHCQACRLKRCVDIGMMKEFILTDEEVQRKREMILKRKEEEALKDSLRPKLSEEQQRIIAILLDAHHKTYDPTYSDFCQFRPPVRVNDGGGSHPSRPNSRHTPSFSGDSSSSCSDHCITSSDMMDSSSFSNLDLSEEDSDDPSVTLELSQLSMLPHLADLVSYSIQKVIGFAKMIPGFRDLTSEDQIVLLKSSAIEVIMLRSNESFTMDDMSWTCGNQDYKYRVSDVTKAGHSLELIEPLIKFQVGLKKLNLHEEEHVLLMAICIVSPDRPGVQDAALIEAIQDRLSNTLQTYIRCRHPPPGSHLLYAKMIQKLADLRSLNEEHSKQYRCLSFQPECSMKLTPLVLEVFGNEIS

SEQ ID NO: 96725 - protein, 250 aa, Homo sapiens
  Payload ID: 19293
  Gene Name: vitamin D (1,25- dihydroxyvitamin D3) receptor
  ENSP ID: ENSP00000448659
MEAMAASTSLPDPGDFDRNVPRICGVCGDRATGFHFNAMTCEGCKGFFRRSMKRKALFTCPFNGDCRITKDNRRHCQACRLKRCVDIGMMKEFILTDEEVQRKREMILKRKEEEALKDSLRPKLSEEQQRIIAILLDAHHKTYDPTYSDFCQFRPPVRVNDGGGSHPSRPNSRHTPSFSGDSSSSCSDHCITSSDMMDSSSFSNLDLSEEDSDDPSVTLELSQLSMLPHLADLVSYSIQKVIGFAKMIPG

SEQ ID NO: 96726 - protein, 49 aa, Homo sapiens
  Payload ID: 19293
  Gene Name: vitamin D (1,25- dihydroxyvitamin D3) receptor
  ENSP ID: ENSP00000449074
MEAMAASTSLPDPGDFDRNVPRICGVCGDRATGFHFNAMTCEGCKGFFR

SEQ ID NO: 96727 - protein, 106 aa, Homo sapiens
  Payload ID: 19293
  Gene Name: vitamin D (1,25- dihydroxyvitamin D3) receptor
  ENSP ID: ENSP00000449561
MEAMAASTSLPDPGDFDRNVPRICGVCGDRATGFHFNAMTCEGCKGFFRRSMKRKALFTCPFNGDCRITKDNRRHCQACRLKRCVDIGMMKEFILTDEEVQRKREM

SEQ ID NO: 96728 - protein, 427 aa, Homo sapiens; identical to SEQ ID NO: 96722
  Payload ID: 19293
  Gene Name: vitamin D (1,25- dihydroxyvitamin D3) receptor
  Uniprot ID: P11473
  ENSP ID: ENSP00000449573

SEQ ID NO: 96729 - protein, 101 aa, Homo sapiens
  Payload ID: 19293
  Gene Name: vitamin D (1,25- dihydroxyvitamin D3) receptor
  ENSP ID: ENSP00000450105
MEAMAASTSLPDPGDFDRNVPRICGVCGDRATGFHFNAMTCEGCKGFFRRSMKRKALFTCPFNGDCRITKDNRRHCQACRLKRCVDIGMMKEFILTDEEVQ

SEQ ID NO: 96730 - protein, 149 aa, Homo sapiens
  Payload ID: 19294
  Gene Name: vitamin K epoxide reductase complex, subunit 1
  ENSP ID: ENSP00000300851
MGSTWGSPGWVRLALCLTGLVLSLYALHVKAARARDRDYRALCDVGTAISCSRVFSSRVQGTGLTVLTWFHPTPPLCQVGQGFRAGGACAGTGQHPQSIQQHIRLHLLHTTAIVRLPADTLGLCPDAAELPGVSRWFCLPGLDPVLRAL

SEQ ID NO: 96731 - protein, 156 aa, Homo sapiens
  Payload ID: 19294
  Gene Name: vitamin K epoxide reductase complex, subunit 1
  Uniprot ID: Q9BQB6
  ENSP ID: ENSP00000326135
MGSTWGSPGWVRLALCLTGLVLSLYALHVKAARARDRDYRALCDVGTAISCSRVFSSRWGRGFGLVEHVLGQDSILNQSNSIFGCIFYTLQLLLDGVSPCCPGWSQAICLPQPPKVLGGLQALPADTLGLCPDAAELPGVSRWFCLPGLDPVLRAL

SEQ ID NO: 96732 - protein, 92 aa, Homo sapiens
  Payload ID: 19294
  Gene Name: vitamin K epoxide reductase complex, subunit 1
  Uniprot ID: Q9BQB6
  ENSP ID: ENSP00000346969
MGSTWGSPGWVRLALCLTGLVLSLYALHVKAARARDRDYRALCDVGTAISCSRVFSSRLPADTLGLCPDAAELPGVSRWFCLPGLDPVLRAL

SEQ ID NO: 96733 - protein, 160 aa, Homo sapiens
  Payload ID: 19294
  Gene Name: vitamin K epoxide reductase complex, subunit 1
  ENSP ID: ENSP00000378422
MIILESGIGVPGERTRGWTARGVVAQGLSYPAILVFEIRVRGKGPDSAGDWDYSGDSHVNWMPRNNGDQERRGGRMAVEIDDGLKDGAQVGQGFRAGGACAGTGQHPQSIQQHIRLHLLHTTAIVRLPADTLGLCPDAAELPGVSRWFCLPGLDPVLRAL

SEQ ID NO: 96734 - protein, 163 aa, Homo sapiens
  Payload ID: 19294
  Gene Name: vitamin K epoxide reductase complex, subunit 1
  Uniprot ID: Q9BQB6
  ENSP ID: ENSP00000378426
MGSTWGSPGWVRLALCLTGLVLSLYALHVKAARARDRDYRALCDVGTAISCSRVFSSRWGRGFGLVEHVLGQDSILNQSNSIFGCIFYTLQLLLGCLRTRWASVLMLLSSLVSLAGSVYLAWILFFVLYDFCIVCITTYAINVSLMWLSFRKVQEPQGKAKRH

SEQ ID NO: 96735 - protein, 161 aa, Homo sapiens
  Payload ID: 19294
  Gene Name: vitamin K epoxide reductase complex, subunit 1
  ENSP ID: ENSP00000417662
MIVERLGYCQGCVWPKEWFCECMGERETDHQEALVRQDPGGWEAAARMVPEIVSGEMLGSRIGSPYSLDPLIRWSLGPGCCNSYNRTWHRVGQGFRAGGACAGTGQHPQSIQQHIRLHLLHTTAIVRLPADTLGLCPDAAELPGVSRWFCLPGLDPVLRAL

SEQ ID NO: 96736 - protein, 92 aa, Homo sapiens
  Payload ID: 19294
  Gene Name: vitamin K epoxide reductase complex, subunit 1
  ENSP ID: ENSP00000437064
  MOD_RES (1)..(1): Any amino acid
XQGCVWPKEWFCECMGERETDHQEALVRQDPGGWEAAARMVPEIVSGEMLGSRIGSPYSLDPLIRWSLGPGCCNSYNRTWHRVACGHAGPLS

SEQ ID NO: 96737 - protein, 43 aa, Homo sapiens
  Payload ID: 19294
  Gene Name: vitamin K epoxide reductase complex, subunit 1
  ENSP ID: ENSP00000458994
MLLSSLVSLAGSVYLAWILFFVLYDFCIVCITTYAINVSLMWL

SEQ ID NO: 96738 - protein, 176 aa, Homo sapiens
  Payload ID: 19295
  Gene Name: vitamin K epoxide reductase complex, subunit 1-like 1
  Uniprot ID: Q8N0U8
  ENSP ID: ENSP00000353998
MAAPVLLRVSVPRWERVARYAVCAAGILLSIYAYHVEREKERDPEHRALCDLGPWVKCSAALASRWGRGFGLLGSIFGKDGVLNQPNSVFGLIFYILQLLLGMTASAVAALILMTSSIMSVVGSLYLAYILYFVLKEFCIICIVTYVLNFLLLIINYKRLVYLNEAWKRQLQPKQD

SEQ ID NO: 96739 - protein, 177 aa, Homo sapiens
  Payload ID: 19295
  Gene Name: vitamin K epoxide reductase complex, subunit 1-like 1
  Uniprot ID: Q8N0U8
  ENSP ID: ENSP00000403077
MAAPVLLRVSVPRWERVARYAVCAAGILLSIYAYHVEREKERDPEHRALCDLGPWVKCSAALASRHDSKRCGGFDPHDVLHHVGRGVPVPGLHSVLCAEGVLHHLHRHVRAELPSSHYQLQTTSLLERGLEAAAATQAGLTPDRLHPNSLKPLSIQFILQQVFIIIIIIIIHNRHFP

SEQ ID NO: 96740 - protein, 202 aa, Homo sapiens
  Payload ID: 19296
  Gene Name: vitelline membrane outer layer 1 homolog (chicken)
  Uniprot ID: Q7Z5L0
  ENSP ID: ENSP00000328397
MERGAGAKLLPLLLLLRATGFTCAQTDGRNGYTAVIEVTSGGPWGDWAWPEMCPDGFFASGFSLKVEPPQGIPGDDTALNGIRLHCARGNVLGNTHVVESQSGSWGEWSEPLWCRGGAYLVAFSLRVEAPTTLGDNTAANNVRFRCSDGEELQGPGLSWGDFGDWSDHCPKGACGLQTKIQGPRGLGDDTALNDARLFCCRS

SEQ ID NO: 96741 - protein, 70 aa, Homo sapiens
  Payload ID: 19296
  Gene Name: vitelline membrane outer layer 1 homolog (chicken)
  Uniprot ID: Q7Z5L0
  ENSP ID: ENSP00000346133
MERGAGAKLLPLLLLLRATGFTCAQTDGRNGYTAVIEVTSGGPWGDWAWPEMCPDGFFASGFSLKLGRME

SEQ ID NO: 96742 - protein, 102 aa, Homo sapiens
  Payload ID: 19296
  Gene Name: vitelline membrane outer layer 1 homolog (chicken)
  Uniprot ID: Q7Z5L0
  ENSP ID: ENSP00000390450
MERGAGAKLLPLLLLLRATGFTCAQTDGRNGYTAVIEVTSGGPWGDWAWPEMCPDGFFASGFSLKVEPPQGIPGDDTALNGIRLHCARGNVLGNTHVLGRME

SEQ ID NO: 96743 - protein, 114 aa, Homo sapiens
  Payload ID: 19296
  Gene Name: vitelline membrane outer layer 1 homolog (chicken)
  Uniprot ID: Q7Z5L0
  ENSP ID: ENSP00000408166
MERGAGAKLLPLLLLLRATGFTCAQTDGRNGYTAVIEVTSGGPWGDWAWPEMCPDGFFASGFSLKVEPPQGIPGDDTALNGIRLHCARGNVLGNTHVVESQSGRWGAGVEDPLG

SEQ ID NO: 96744 - protein, 656 aa, Homo sapiens
  Payload ID: 19297
  Gene Name: vitrin
  Uniprot ID: Q6UXI7
  ENSP ID: ENSP00000368543
MRTVVLTMKASVIEMFLVLLVTGVHSNKETAKKIKRPKFTVPQINCDVKAGKIIDPEFIVKCPAGCQDPKYHVYGTDVYASYSSVCGAAVHSGVLDNSGGKILVRKVAGQSGYKGSYSNGVQSLSLPRWRESFIVLESKPKKGVTYPSALTYSSSKSPAAQAGETTKAYQRPPIPGTTAQPVTLMQLLAVTVAVATPTTLPRPSPSAASTTSIPRPQSVGHRSQEMDLWSTATYTSSQNRPRADPGLVPKEELSTQSLEPVSLGDPNCKIDLSFLIDGSTSIGKRRFRIQKQLLADVAQALDIGPAGPLMGVVQYGDNPATHFNLKTHTNSRDLKTAIEKITQRGGLSNVGRAISFVTKNFFSKANGNRSGAPNVVVVMVDGWPTDKVEEASRLARESGINIFFITIEGAAENEKQYVVEPNFANKAVCRTNGFYSLHVQSWFGLHKTLQPLVKRVCDTDRLACSKTCLNSADIGFVIDGSSSVGTGNFRTVLQFVTNLTKEFEISDTDTRIGAVQYTYEQRLEFGFDKYSSKPDILNAIKRVGYWSGGTSTGAAINFALEQLFKKSKPNKRKLMILITDGRSYDDVRIPAMAAHLKGVITYAIGVAWAAQEELEVIATHPARDHSFFVDEFDNLHQYVPRIIQNICTEFNSQPRN

SEQ ID NO: 96745 - protein, 693 aa, Homo sapiens
  Payload ID: 19297
  Gene Name: vitrin
  Uniprot ID: Q6UXI7
  ENSP ID: ENSP00000368544
MRTVVLTMKASVIEMFLVLLVTGVHSNKETAKKIKRPKFTVPQINCDVKAGKIIDPEFIVKCPAGCQDPKYHVYGTDVYASYSSVCGAAVHSGVLDNSGGKILVRKVAGQSGYKGSYSNGVQSLSLPRWRESFIVLESKPKKGVTYPSALTYSSSKSPAAQAGETTKAYQRPPIPGTTAQPVTLMQLLAVTVAVATPTTLPRPSPSAASTTSIPRPQSVGHRSQEMDLWSTATYTSSQNRPRADPGIQRQDPSGAAFQKPVGADVSLGEMDSWKPGSVLLDEGLVPKEELSTQSLEPVSLGDPNCKIDLSFLIDGSTSIGKRRFRIQKQLLADVAQALDIGPAGPLMGVVQYGDNPATHFNLKTHTNSRDLKTAIEKITQRGGLSNVGRAISFVTKNFFSKANGNRSGAPNVVVVMVDGWPTDKVEEASRLARESGINIFFITIEGAAENEKQYVVEPNFANKAVCRTNGFYSLHVQSWFGLHKTLQPLVKRVCDTDRLACSKTCLNSADIGFVIDGSSSVGTGNFRTVLQFVTNLTKEFEISDTDTRIGAVQYTYEQRLEFGFDKYSSKPDILNAIKRVGYWSGGTSTGAAINFALEQLFKKSKPNKRKLMILITDGRSYDDVRIPAMAAHLKGVITYAIGVAWAAQEELEVIATHPARDHSFFVDEFDNLHQYVPRIIQNICTEFNSQPRN

SEQ ID NO: 96746 - protein, 678 aa, Homo sapiens
  Payload ID: 19297
  Gene Name: vitrin
  Uniprot ID: Q6UXI7
  ENSP ID: ENSP00000374625
MRTVVLTMKASVIEMFLVLLVTGVHSNKETAKKIKRPKFTVPQINCDVKAGKIIDPEFIVKCPAGCQDPKYHVYGTDVYASYSSVCGAAVHSGVLDNSGGKILVRKVAGQSGYKGSYSNGVQSLSLPRWRESFIVLESKPKKGVTYPSALTYSSSKSPAAQAGETTKAYQRPPIPGTTAQPVTLMQLLAVTVAVATPTTLPRPSPSAASTTSIPRPQSVGHRSQEMDLWSTATYTSSQNRPRADPGIQRQDPSGAAFQKPVGADVSLGLVPKEELSTQSLEPVSLGDPNCKIDLSFLIDGSTSIGKRRFRIQKQLLADVAQALDIGPAGPLMGVVQYGDNPATHFNLKTHTNSRDLKTAIEKITQRGGLSNVGRAISFVTKNFFSKANGNRSGAPNVVVVMVDGWPTDKVEEASRLARESGINIFFITIEGAAENEKQYVVEPNFANKAVCRTNGFYSLHVQSWFGLHKTLQPLVKRVCDTDRLACSKTCLNSADIGFVIDGSSSVGTGNFRTVLQFVTNLTKEFEISDTDTRIGAVQYTYEQRLEFGFDKYSSKPDILNAIKRVGYWSGGTSTGAAINFALEQLFKKSKPNKRKLMILITDGRSYDDVRIPAMAAHLKGVITYAIGVAWAAQEELEVIATHPARDHSFFVDEFDNLHQYVPRIIQNICTEFNSQPRN

SEQ ID NO: 96747 - protein, 630 aa, Homo sapiens
  Payload ID: 19297
  Gene Name: vitrin
  ENSP ID: ENSP00000384154
MRTVVLTMKASVIEMFLAVPQINCDVKAGKIIDPEFIVKCPAGCQDPKYHVYGTDVYASYSSVCGAAVHSGVLDNSGGKILVRKVAGQSGYKGSYSNGVQSLSLPRWRESFIVLESKPKKGVTYPSALTYSSSKSPAAQAGETTKAYQRPPIPGTTAQPVTLMQLLAVTVAVATPTTLPRPSPSAASTTSIPRPQSVGHRSQEMGEMDSWKPGSVLLDEGLVPKEELSTQSLEPVSLGDPNCKIDLSFLIDGSTSIGKRRFRIQKQLLADVAQALDIGPAGPLMGVVQYGDNPATHFNLKTHTNSRDLKTAIEKITQRGGLSNVGRAISFVTKNFFSKANGNRSGAPNVVVVMVDGWPTDKVEEASRLARESGINIFFITIEGAAENEKQYVVEPNFANKAVCRTNGFYSLHVQSWFGLHKTLQPLVKRVCDTDRLACSKTCLNSADIGFVIDGSSSVGTGNFRTVLQFVTNLTKEFEISDTDTRIGAVQYTYEQRLEFGFDKYSSKPDILNAIKRVGYWSGGTSTGAAINFALEQLFKKSKPNKRKLMILITDGRSYDDVRIPAMAAHLKGVITYAIGVAWAAQEELEVIATHPARDHSFFVDEFDNLHQYVPRIIQNICTEFNSQPRN

SEQ ID NO: 96748 - protein, 657 aa, Homo sapiens
  Payload ID: 19297
  Gene Name: vitrin
  Uniprot ID: Q6UXI7
  ENSP ID: ENSP00000385658
MRTVVLTMKASVIEMFLVLLVTGVHSNKETAKKIKRPKFTVPQINCDVKAGKIIDPEFIVKCPAGCQDPKYHVYGTDVYASYSSVCGAAVHSGVLDNSGGKILVRKVAGQSGYKGSYSNGVQSLSLPRWRESFIVLESKPKKGVTYPSALTYSSSKSPAAQAGETTKAYQRPPIPGTTAQPVTLMQLLAVTVAVATPTTLPRPSPSAASTTSIPRPQSVGHRSQEMDLWSTATYTSSQNRPRADPGIQRQDPSGAAFQKPVGADVSLDCKIDLSFLIDGSTSIGKRRFRIQKQLLADVAQALDIGPAGPLMGVVQYGDNPATHFNLKTHTNSRDLKTAIEKITQRGGLSNVGRAISFVTKNFFSKANGNRSGAPNVVVVMVDGWPTDKVEEASRLARESGINIFFITIEGAAENEKQYVVEPNFANKAVCRTNGFYSLHVQSWFGLHKTLQPLVKRVCDTDRLACSKTCLNSADIGFVIDGSSSVGTGNFRTVLQFVTNLTKEFEISDTDTRIGAVQYTYEQRLEFGFDKYSSKPDILNAIKRVGYWSGGTSTGAAINFALEQLFKKSKPNKRKLMILITDGRSYDDVRIPAMAAHLKGVITYAIGVAWAAQEELEVIATHPARDHSFFVDEFDNLHQYVPRIIQNICTEFNSQPRN

SEQ ID NO: 96749 - protein, 203 aa, Homo sapiens
  Payload ID: 19297
  Gene Name: vitrin
  Uniprot ID: Q6UXI7
  ENSP ID: ENSP00000393561
MRTVVLTMKASVIEMFLVLLVTGVHSNKETAKKIKRPKFTVPQINCDVKAGKIIDPEFIVKCPAGCQDPKYHVYGTDVYASYSSVCGAAVHSGVLDNSGGKILVRKVAGQSGYKGSYSNGVQSLSLPRWRESFIVLESKPKKGVTYPSALTYSSSKSPAAQAGKCSRVIESKPSESMNTRRVLGDSGEINILTGQAPLALAIF

SEQ ID NO: 96750 - protein, 347 aa, Homo sapiens
  Payload ID: 19297
  Gene Name: vitrin
  ENSP ID: ENSP00000417874
MGVVQYGDNPATHFNLKTHTNSRDLKTAIEKITQRGGLSNVGRAISFVTKNFFSKANGNRSGAPNVVVVMVDGWPTDKVEEASRLARESGINIFFITIEGAAENEKQYVVEPNFANKAVCRTNGFYSLHVQSWFGLHKTLQPLVKRVCDTDRLACSKTCLNSADIGFVIDGSSSVGTGNFRTVLQFVTNLTKEFEISDTDTRIGAVQYTYEQRLEFGFDKYSSKPDILNAIKRVGYWSGGTSTGAAINFALEQLFKKSKPNKRKLMILITDGRSYDDVRIPAMAAHLKGVITYAIGVAWAAQEELEVIATHPARDHSFFVDEFDNLHQYVPRIIQNICTEFNSQPRN

SEQ ID NO: 96751 - protein, 134 aa, Homo sapiens
  Payload ID: 19297
  Gene Name: vitrin
  ENSP ID: ENSP00000419251
  MOD_RES (1)..(1): Any amino acid
XTSSQNRPRADPGIQRQDPSGAAFQKPVGADVSLGLVPKEELSTQSLEPVSLGDPNCKIDLSFLIDGSTSIGKRRFRIQKQLLADVAQALDIGPAGPLMGVVQYGPLHWYWKNSPGNGEEWVGRETAPISQLST

SEQ ID NO: 96752 - protein, 478 aa, Homo sapiens
  Payload ID: 19298
  Gene Name: vitronectin
  Uniprot ID: P04004
  ENSP ID: ENSP00000226218
MAPLRPLLILALLAWVALADQESCKGRCTEGFNVDKKCQCDELCSYYQSCCTDYTAECKPQVTRGDVFTMPEDEYTVYDDGEEKNNATVHEQVGGPSLTSDLQAQSKGNPEQTPVLKPEEEAPAPEVGASKPEGIDSRPETLHPGRPQPPAEEELCSGKPFDAFTDLKNGSLFAFRGQYCYELDEKAVRPGYPKLIRDVWGIEGPIDAAFTRINCQGKTYLFKGSQYWRFEDGVLDPDYPRNISDGFDGIPDNVDAALALPAHSYSGRERVYFFKGKQYWEYQFQHQPSQEECEGSSLSAVFEHFAMMQRDSWEDIFELLFWGRTSAGTRQPQFISRDWHGVPGQVDAAMAGRIYISGMAPRPSLAKKQRFRHRNRKGYRSQRGHSRGRNQNSRRPSRATWLSLFSSEESNLGANNYDDYRMDWLVPATCEPIQSVFFFSGDKYYRVNLRTRRVDTVDPPYPRSIAQYWLGCPAPGHL

SEQ ID NO: 96753 - protein, 118 aa, Homo sapiens
  Payload ID: 19298
  Gene Name: vitronectin
  ENSP ID: ENSP00000440439
MAPLRPLLILALLAWVALADQESCKGRCTEGFNVDKKCQCDELCSYYQSCCTDYTAECKPQVTRGDVFTMPEDEYTVYDDGEEKNNATVHEQVGGPSLTSDLQAQSKGNPEQTPVLKP

SEQ ID NO: 96754 - protein, 976 aa, Homo sapiens [sequence omitted]

SEQ ID NO: 96755 - protein, 972 aa, Homo sapiens
  Payload ID: 19299
  Gene Name: v-kit Hardy-Zuckerman 4 feline sarcoma viral oncogene homolog
  Uniprot ID: P10721
  ENSP ID: ENSP00000390987
MRGARGAWDFLCVLLLLLRVQTGSSQPSVSPGEPSPPSIHPGKSDLIVRVGDEIRLLCTDPGFVKWTFEILDETNENKQNEWITEKAEATNTGKYTCTNKHGLSNSIYVFVRDPAKLFLVDRSLYGKEDNDTLVRCPLTDPEVTNYSLKGCQGKPLPKDLRFIPDPKAGIMIKSVKRAYHRLCLHCSVDQEGKSVLSEKFILKVRPAFKAVPVVSVSKASYLLREGEEFTVTCTIKDVSSSVYSTWKRENSQTKLQEKYNSWHHGDFNYERQATLTISSARVNDSGVFMCYANNTFGSANVTTTLEVVDKGFINIFPMINTTVFVNDGENVDLIVEYEAFPKPEHQQWIYMNRTFTDKWEDYPKSENESNIRYVSELHLTRLKGTEGGTYTFLVSNSDVNAAIAFNVYVNTKPEILTYDRLVNGMLQCVAAGFPEPTIDWYFCPGTEQRCSASVLPVDVQTLNSSGPPFGKLVVQSSIDSSAFKHNGTVECKAYNDVGKTSAYFNFAFKEQIHPHTLFTPLLIGFVIVAGMMCIIVMILTYKYLQKPMYEVQWKVVEEINGNNYVYIDPTQLPYDHKWEFPRNRLSFGKTLGAGAFGKVVEATAYGLIKSDAAMTVAVKMLKPSAHLTEREALMSELKVLSYLGNHMNIVNLLGACTIGGPTLVITEYCCYGDLLNFLRRKRDSFICSKQEDHAEAALYKNLLHSKESSCSDSTNEYMDMKPGVSYVVPTKADKRRSVRIGSYIERDVTPAIMEDDELALDLEDLLSFSYQVAKGMAFLASKNCIHRDLAARNILLTHGRITKICDFGLARDIKNDSNYVVKGNARLPVKWMAPESIFNCVYTFESDVWSYGIFLWELFSLGSSPYPGMPVDSKFYKMIKEGFRMLSPEHAPAEMYDIMKTCWDADPLKRPTFKQIVQLIEKQISESTNHIYSNLANCSPNRQKPVVDHSVRINSVGSTASSSQPLLVHDDV

SEQ ID NO: 96756 - protein, 101 aa, Homo sapiens
  Payload ID: 19300
  Gene Name: VMA21 vacuolar H+-ATPase homolog (S. cerevisiae)
  Uniprot ID: Q3ZAQ7
  ENSP ID: ENSP00000333255
MERPDKAALNALQPPEFRNESSLASTLKTLLFFTALMITVPIGLYFTTKSYIFEGALGMSNRDSYFYAAIVAVVAVHVVLALFVYVAWNEGSRQWREGKQD

SEQ ID NO: 96757 - protein, 156 aa, Homo sapiens
  Payload ID: 19300
  Gene Name: VMA21 vacuolar H+-ATPase homolog (S. cerevisiae)
  Uniprot ID: Q3ZAQ7
  ENSP ID: ENSP00000359386
MLGSPCGPQLSDRDADEDQCSREFRGRRSRRPPRRTMLRGKSRLNVEWLGYSPGLLLEHRPLLAGRTPRSHRRNESSLASTLKTLLFFTALMITVPIGLYFTTKSYIFEGALGMSNRDSYFYAAIVAVVAVHVVLALFVYVAWNEGSRQWREGKQD

SEQ ID NO: 96758 - protein, 403 aa, Homo sapiens
  Payload ID: 19301
  Gene Name: v-maf avian musculoaponeurotic fibrosarcoma oncogene homolog
  Uniprot ID: O75444
  ENSP ID: ENSP00000327048
MASELAMSNSDLPTSPLAMEYVNDFDLMKFEVKKEPVETDRIISQCGRLIAGGSLSSTPMSTPCSSVPPSPSFSAPSPGSGSEQKAHLEDYYWMTGYPQQLNPEALGFSPEDAVEALISNSHQLQGGFDGYARGAQQLAAAAGAGAGASLGGSGEEMGPAAAVVSAVIAAAAAQSGAGPHYHHHHHHAAGHHHHPTAGAPGAAGSAAASAGGAGGAGGGGPASAGGGGGGGGGGGGGGAAGAGGALHPHHAAGGLHFDDRFSDEQLVTMSVRELNRQLRGVSKEEVIRLKQKRRTLKNRGYAQSCRFKRVQQRHVLESEKNQLLQQVDHLKQEISRLVRERDAYKEKYEKLVSSGFRENGSSSDNPSSPEFFITEPTRKLEPSVGYATFWKPQHRVLTSVFTK

SEQ ID NO: 96759 - protein, 373 aa, Homo sapiens
  Payload ID: 19301
  Gene Name: v-maf avian musculoaponeurotic fibrosarcoma oncogene homolog
  Uniprot ID: O75444
  ENSP ID: ENSP00000377019
MASELAMSNSDLPTSPLAMEYVNDFDLMKFEVKKEPVETDRIISQCGRLIAGGSLSSTPMSTPCSSVPPSPSFSAPSPGSGSEQKAHLEDYYWMTGYPQQLNPEALGFSPEDAVEALISNSHQLQGGFDGYARGAQQLAAAAGAGAGASLGGSGEEMGPAAAVVSAVIAAAAAQSGAGPHYHHHHHHAAGHHHHPTAGAPGAAGSAAASAGGAGGAGGGGPASAGGGGGGGGGGGGGGAAGAGGALHPHHAAGGLHFDDRFSDEQLVTMSVRELNRQLRGVSKEEVIRLKQKRRTLKNRGYAQSCRFKRVQQRHVLESEKNQLLQQVDHLKQEISRLVRERDAYKEKYEKLVSSGFRENGSSSDNPSSPEFFM

SEQ ID NO: 96760 - protein, 383 aa, Homo sapiens
  Payload ID: 19301
  Gene Name: v-maf avian musculoaponeurotic fibrosarcoma oncogene homolog
  ENSP ID: ENSP00000455097
MASELAMSNSDLPTSPLAMEYVNDFDLMKFEVKKEPVETDRIISQCGRLIAGGSLSSTPMSTPCSSVPPSPSFSAPSPGSGSEQKAHLEDYYWMTGYPQQLNPEALGFSPEDAVEALISNSHQLQGGFDGYARGAQQLAAAAGAGAGASLGGSGEEMGPAAAVVSAVIAAAAAQSGAGPHYHHHHHHAAGHHHHPTAGAPGAAGSAAASAGGAGGAGGGGPASAGGGGGGGGGGGGGGAAGAGGALHPHHAAGGLHFDDRFSDEQLVTMSVRELNRQLRGVSKEEVIRLKQKRRTLKNRGYAQSCRFKRVQQRHVLESEKNQLLQQVDHLKQEISRLVRERDAYKEKYEKLVSSGFRENGSSSDNPSSPEFFMYPRESSTSVM

SEQ ID NO: 96761 - protein, 353 aa, Homo sapiens
  Payload ID: 19302
  Gene Name: v-maf avian musculoaponeurotic fibrosarcoma oncogene homolog A
  Uniprot ID: Q8NHW3
  ENSP ID: ENSP00000328364
MAAELAMGAELPSSPLAIEYVNDFDLMKFEVKKEPPEAERFCHRLPPGSLSSTPLSTPCSSVPSSPSFCAPSPGTGGGGGAGGGGGSSQAGGAPGPPSGGPGAVGGTSGKPALEDLYWMSGYQHHLNPEALNLTPEDAVEALIGSGHHGAHHGAHHPAAAAAYEAFRGPGFAGGGGADDMGAGHHHGAHHAAHHHHAAHHHHHHHHHHGGAGHGGGAGHHVRLEERFSDDQLVSMSVRELNRQLRGFSKEEVIRLKQKRRTLKNRGYAQSCRFKRVQQRHILESEKCQLQSQVEQLKLEVGRLAKERDLYKEKYEKLAGRGGPGSAGGAGFPREPSPPQAGPGGAKGTADFFL

SEQ ID NO: 96762 - protein, 323 aa, Homo sapiens
  Payload ID: 19303
  Gene Name: v-maf avian musculoaponeurotic fibrosarcoma oncogene homolog B
  Uniprot ID: Q9Y5Q3
  ENSP ID: ENSP00000362410
MAAELSMGPELPTSPLAMEYVNDFDLLKFDVKKEPLGRAERPGRPCTRLQPAGSVSSTPLSTPCSSVPSSPSFSPTEQKTHLEDLYWMASNYQQMNPEALNLTPEDAVEALIGSHPVPQPLQSFDSFRGAHHHHHHHHPHPHHAYPGAGVAHDELGPHAHPHHHHHHQASPPPSSAASPAQQLPTSHPGPGPHATASATAAGGNGSVEDRFSDDQLVSMSVRELNRHLRGFTKDEVIRLKQKRRTLKNRGYAQSCRYKRVQQKHHLENEKTQLIQQVEQLKQEVSRLARERDAYKVKCEKLANSGFREAGSTSDSPSSPEFFL

SEQ ID NO: 96763 - protein, 164 aa, Homo sapiens
  Payload ID: 19304
  Gene Name: v-maf avian musculoaponeurotic fibrosarcoma oncogene homolog F
  Uniprot ID: Q9ULX9
  ENSP ID: ENSP00000345393
MSVDPLSSKALKIKRELSENTPHLSDEALMGLSVRELNRHLRGLSAEEVTRLKQRRRTLKNRGYAASCRVKRVCQKEELQKQKSELEREVDKLARENAAMRLELDALRGKCEALQGFARSVAAARGPATLVAPASVITIVKSTPGSGSGPAHGPDPAHGPASCS

SEQ ID NO: 96764 - protein, 164 aa, Homo sapiens; identical to SEQ ID NO: 96763
  Payload ID: 19304
  Gene Name: v-maf avian musculoaponeurotic fibrosarcoma oncogene homolog F
  Uniprot ID: Q9ULX9
  ENSP ID: ENSP00000384094

SEQ ID NO: 96765 - protein, 164 aa, Homo sapiens; identical to SEQ ID NO: 96763
  Payload ID: 19304
  Gene Name: v-maf avian musculoaponeurotic fibrosarcoma oncogene homolog F
  Uniprot ID: Q9ULX9
  ENSP ID: ENSP00000388882

SEQ ID NO: 96766 - protein, 93 aa, Homo sapiens
  Payload ID: 19304
  Gene Name: v-maf avian musculoaponeurotic fibrosarcoma oncogene homolog F
  ENSP ID: ENSP00000391589
MGLSVRELNRHLRGLSAEEVTRLKQRRRTLKNRGYAASCRVKRVCQKEELQKQKSELEREVDKLARENAAMRLELDALRGKCEALQGFARSVA

SEQ ID NO: 96767 - protein, 125 aa, Homo sapiens
  Payload ID: 19304
  Gene Name: v-maf avian musculoaponeurotic fibrosarcoma oncogene homolog F
  ENSP ID: ENSP00000416493
MSVDPLSSKALKIKRELSENTPHLSDEALMGLSVRELNRHLRGLSAEEVTRLKQRRRTLKNRGYAASCRVKRVCQKEELQKQKSELEREVDKLARENAAMRLELDALRGKCEALQGFARSVAAAR

SEQ ID NO: 96768 - protein, 135 aa, Homo sapiens
  Payload ID: 19304
  Gene Name: v-maf avian musculoaponeurotic fibrosarcoma oncogene homolog F
  Uniprot ID: Q9ULX9
  ENSP ID: ENSP00000441482
MGLSVRELNRHLRGLSAEEVTRLKQRRRTLKNRGYAASCRVKRVCQKEELQKQKSELEREVDKLARENAAMRLELDALRGKCEALQGFARSVAAARGPATLVAPASVITIVKSTPGSGSGPAHGPDPAHGPASCS

SEQ ID NO: 96769 - protein, 164 aa, Homo sapiens; identical to SEQ ID NO: 96763
  Payload ID: 19304
  Gene Name: v-maf avian musculoaponeurotic fibrosarcoma oncogene homolog F
  Uniprot ID: Q9ULX9
  ENSP ID: ENSP00000442060

SEQ ID NO: 96770 - protein, 162 aa, Homo sapiens
  Payload ID: 19305
  Gene Name: v-maf avian musculoaponeurotic fibrosarcoma oncogene homolog G
  Uniprot ID: O15525
  ENSP ID: ENSP00000350369
MTTPNKGNKALKVKREPGENGTSLTDEELVTMSVRELNQHLRGLSKEEIVQLKQRRRTLKNRGYAASCRVKRVTQKEELEKQKAELQQEVEKLASENASMKLELDALRSKYEALQTFARTVARSPVAPARGPLAAGLGPLVPGKVAATSVITIVKSKTDARS

SEQ ID NO: 96771 - protein, 162 aa, Homo sapiens; identical to SEQ ID NO: 96770
  Payload ID: 19305
  Gene Name: v-maf avian musculoaponeurotic fibrosarcoma oncogene homolog G
  Uniprot ID: O15525
  ENSP ID: ENSP00000376173

SEQ ID NO: 96772 - protein, 98 aa, Homo sapiens
  Payload ID: 19305
  Gene Name: v-maf avian musculoaponeurotic fibrosarcoma oncogene homolog G
  ENSP ID: ENSP00000459634
MTTPNKGNKALKVKREPGENGTSLTDEELVTMSVRELNQHLRGLSKEEIVQLKQRRRTLKNRGYAASCRVKRVTQKEELEKQKAELQQEVEKLASENA

SEQ ID NO: 96773 - protein, 156 aa, Homo sapiens
  Payload ID: 19306
  Gene Name: v-maf avian musculoaponeurotic fibrosarcoma oncogene homolog K
  Uniprot ID: O60675
  ENSP ID: ENSP00000344903
MTTNPKPNKALKVKKEAGENAPVLSDDELVSMSVRELNQHLRGLTKEEVTRLKQRRRTLKNRGYAASCRIKRVTQKEELERQRVELQQEVEKLARENSSMRLELDALRSKYEALQTFARTVARGPVAPSKVATTSVITIVKSTELSSTSVPFSAAS

SEQ ID NO: 96774 - protein, 156 aa, Homo sapiens; identical to SEQ ID NO: 96773
  Payload ID: 19306
  Gene Name: v-maf avian musculoaponeurotic fibrosarcoma oncogene homolog K
  Uniprot ID: O60675
  ENSP ID: ENSP00000385437

SEQ ID NO: 96775 - protein, 156 aa, Homo sapiens; identical to SEQ ID NO: 96773
  Payload ID: 19306
  Gene Name: v-maf avian musculoaponeurotic fibrosarcoma oncogene homolog K
  Uniprot ID: O60675
  ENSP ID: ENSP00000386009

SEQ ID NO: 96776 - protein, 346 aa, Homo sapiens
  Payload ID: 19307
  Gene Name: v-mos Moloney murine sarcoma viral oncogene homolog
  Uniprot ID: P00540
  ENSP ID: ENSP00000310722
MPSPLALRPYLRSEFSPSVDARPCSSPSELPAKLLLGATLPRAPRLPRRLAWCSIDWEQVCLLQRLGAGGFGSVYKATYRGVPVAIKQVNKCTKNRLASRRSFWAELNVARLRHDNIVRVVAASTRTPAGSNSLGTIIMEFGGNVTLHQVIYGAAGHPEGDAGEPHCRTGGQLSLGKCLKYSLDVVNGLLFLHSQSIVHLDLKPANILISEQDVCKISDFGCSEKLEDLLCFQTPSYPLGGTYTHRAPELLKGEGVTPKADIYSFAITLWQMTTKQAPYSGERQHILYAVVAYDLRPSLSAAVFEDSLPGQRLGDVIQRCWRPSAAQRPSARLLLVDLTSLKAELG

SEQ ID NO: 96777 - protein, 726 aa, Homo sapiens [sequence omitted]

SEQ ID NO: 96778 - protein, 761 aa, Homo sapiens
  Payload ID: 19308
  Gene Name: v-myb avian myeloblastosis viral oncogene homolog
  Uniprot ID: P10242
  ENSP ID: ENSP00000339992
MARRPRHSIYSSDEDDEDFEMCDHDYDGLLPKSGKRHLGKTRWTREEDEKLKKLVEQNGTDDWKVIANYLPNRTDVQCQHRWQKVLNPELIKGPWTKEEDQRVIELVQKYGPKRWSVIAKHLKGRIGKQCRERWHNHLNPEVKKTSWTEEEDRIIYQAHKRLGNRWAEIAKLLPGRTDNAIKNHWNSTMRRKVEQEGYLQESSKASQPAVATSFQKNSHLMGFAQAPPTAQLPATGQPTVNNDYSYYHISEAQNVSSHVPYPVALHVNIVNVPQPAAAAIQRHYNDEDPEKEKRIKELELLLMSTENELKGQQVLPTQNHTCSYPGWHSTTIADHTRPHGDSAPVSCLGEHHSTPSLPADPGSLPEESASPARCMIVHQGTILDNVKNLLEFAETLQFIDSDSSSWCDLSSFEFFEEADFSPSQHHTGKALQLQQREGNGTKPAGEPSPRVNKRMLSESSLDPPKVLPPARHSTIPLVILRKKRGQASPLATGDCSSFIFADVSSSTPKRSPVKSLPFSPSQFLNTSSNHENSDLEMPSLTSTPLIGHKLTVTTPFHRDQTVKTQKENTVFRTPAIKRSILESSPRTPTPFKHALAAQEIKYGPLKMLPQTPSHLVEDLQDVIKQESDESGIVAEFQENGPPLLKKIKQEVESPTDKSGNFFCSHHWEGDSLNTQLFTQTSPVADAPNILTSSVLMAPASEDEDNVLKAFTVPKNRSLASPLQPCSSTWEPASCGKMEEQMTSSSQARKYVNAFSARTLVM

SEQ ID NO: 96779 - protein, 449 aa, Homo sapiens
  Payload ID: 19308
  Gene Name: v-myb avian myeloblastosis viral oncogene homolog
  ENSP ID: ENSP00000341050
MARRPRHSIYSSDEDDEDFEMCDHDYDGLLPKSGKRHLGKTRWTREEDEKLKKLVEQNGTDDWKVIANYLPNRTDVQCQHRWQKVLNPELIKGPWTKEEDQRVIELVQKYGPKRWSVIAKHLKGRIGKQCRERWHNHLNPEVKKTSWTEEEDRIIYQAHKRLGNRWAEIAKLLPGRTDNAIKNHWNSTMRRKVEQEGYLQESSKASQPAVATSFQKNSHLMGFAQAPPTAQLPATGQPTVNNDYSYYHISEAQNVSSHVPYPVALHVNIVNVPQPAAAAIQRHYNDEDPEKEKRIKELELLLMSTENELKGQQVLPTQNHTCSYPGWHSTTIADHTRPHGDSAPVSCLGEHHSTPSLPADPGSLPEESASPARCMIVHQGTILDNVKNLLEFAETLQFIDSFLNTSSNHENSDLEMPSLTSTPLIGHKLTVTTPFHRDQTVKTQKENTV

SEQ ID NO: 96780 - protein, 666 aa, Homo sapiens
  Payload ID: 19308
  Gene Name: v-myb avian myeloblastosis viral oncogene homolog
  Uniprot ID: P10242
  ENSP ID: ENSP00000356786
MARRPRHSIYSSDEDDEDFEMCDHDYDGLLPKSGKRHLGKTRWTREEDEKLKKLVEQNGTDDWKVIANYLPNRTDVQCQHRWQKVLNPELIKGPWTKEEDQRVIELVQKYGPKRWSVIAKHLKGRIGKQCRERWHNHLNPEVKKTSWTEEEDRIIYQAHKRLGNRWAEIAKLLPGRTDNAIKNHWNSTMRRKVEQEGYLQESSKASQPAVATSFQKNSHLMGFAQAPPTAQLPATGQPTVNNDYSYYHISEAQNVSSHVPYPVALHVNIVNVPQPAAAAIQRHYNDEDPEKEKRIKELELLLMSTENELKGQQVLPTQNHTCSYPGWHSTTIADHTRPHGDSAPVSCLGEHHSTPSLPADPGSLPEESASPARCMIVHQGTILDNVKNLLEFAETLQFIDSFLNTSSNHENSDLEMPSLTSTPLIGHKLTVTTPFHRDQTVKTQKENTVFRTPAIKRSILESSPRTPTPFKHALAAQEIKYGPLKMLPQTPSHLVEDLQDVIKQESDESGIVAEFQENGPPLLKKIKQEVESPTDKSGNFFCSHHWEGDSLNTQLFTQTSPVADAPTGVQWHDFGSLQPLPPGFKRFSCLSLPRSWDYRHPPPRPANFEFLVETGFLHVGQAGLELLTSGDLPASASQSARITGVSHRARPEYSYKLRFNGTSIRR

SEQ ID NO: 96781 - protein, 640 aa, Homo sapiens
  Payload ID: 19308
  Gene Name: v-myb avian myeloblastosis viral oncogene homolog
  Uniprot ID: P10242
  ENSP ID: ENSP00000356788
MARRPRHSIYSSDEDDEDFEMCDHDYDGLLPKSGKRHLGKTRWTREEDEKLKKLVEQNGTDDWKVIANYLPNRTDVQCQHRWQKVLNPELIKGPWTKEEDQRVIELVQKYGPKRWSVIAKHLKGRIGKQCRERWHNHLNPEVKKTSWTEEEDRIIYQAHKRLGNRWAEIAKLLPGRTDNAIKNHWNSTMRRKVEQEGYLQESSKASQPAVATSFQKNSHLMGFAQAPPTAQLPATGQPTVNNDYSYYHISEAQNVSSHVPYPVALHVNIVNVPQPAAAAIQRHYNDEDPEKEKRIKELELLLMSTENELKGQQVLPTQNHTCSYPGWHSTTIADHTRPHGDSAPVSCLGEHHSTPSLPADPGSLPEESASPARCMIVHQGTILDNVKNLLEFAETLQFIDSFLNTSSNHENSDLEMPSLTSTPLIGHKLTVTTPFHRDQTVKTQKENTVFRTPAIKRSILESSPRTPTPFKHALAAQEIKYGPLKMLPQTPSHLVEDLQDVIKQESDESGIVAEFQENGPPLLKKIKQEVESPTDKSGNFFCSHHWEGDSLNTQLFTQTSPVADAPNILTSSVLMAPASEDEDNVLKAFTVPKNRSLASPLQPCSSTWEPASCGKMEEQMTSSSQARKYVNAFSARTLVM

SEQ ID NO: 96782 - protein, 277 aa, Homo sapiens
  Payload ID: 19308
  Gene Name: v-myb avian myeloblastosis viral oncogene homolog
  ENSP ID: ENSP00000390460
EDEKLKKLVEQNGTDDWKVIANYLPNRTDVQCQHRWQKVLNPELIKGPWTKEEDQRVIELVQKYGPKRWSVIAKHLKGRIGKQCRERWHNHLNPEVKKTSWTEEEDRIIYQAHKRLGNRWAEIAKLLPGRTDNAIKNHWNSTMRRKVEQEGYLQESSKASQPAVATSFQKNSHLMGFAQAPPTAQLPATGQPTVNNDYSYYHISEAQNVSSHVPYPVALHVNIVNVPQPAAAAIQRHYNDEDPEKEKRIKELELLLMSTENELKGQQVLPVRLSSCA

SEQ ID NO: 96783 - protein, 299 aa, Homo sapiens
  Payload ID: 19308
  Gene Name: v-myb avian myeloblastosis viral oncogene homolog
  ENSP ID: ENSP00000403387
MARRPRHSIYSSDEDDEDFEMCDHDYDGLLPKSGKRHLGKTRWTREENRTDVQCQHRWQKVLNPELIKGPWTKEEDQRVIELVQKYGPKRWSVIAKHLKGRIGKQCRERWHNHLNPEVKKTSWTEEEDRIIYQAHKRLGNRWAEIAKLLPGRTDNAIKNHWNSTMRRKVEQEGYLQESSKASQPAVATSFQKNSHLMGFAQAPPTAQLPATGQPTVNNDYSYYHISEAQNVSSHVPYPVALHVNIVNVPQPAAAAIQRHYNDEDPEKEKRIKELELLLMSTENELKGQQVLPVRLSSCA

SEQ ID NO: 96784 - protein, 637 aa, Homo sapiens
  Payload ID: 19308
  Gene Name: v-myb avian myeloblastosis viral oncogene homolog
  Uniprot ID: P10242
  ENSP ID: ENSP00000410825
MARRPRHSIYSSDEDDEDFEMCDHDYDGLLPKSGKRHLGKTRWTREEDEKLKKLVEQNGTDDWKVIANYLPNRTDVQCQHRWQKVLNPELIKGPWTKEEDQRVIELVQKYGPKRWSVIAKHLKGRIGKQCRERWHNHLNPEVKKTSWTEEEDRIIYQAHKRLGNRWAEIAKLLPGRTDNAIKNHWNSTMRRKVEQEGYLQESSKASQPAVATSFQKNSHLMGFAQAPPTAQLPATGQPTVNNDYSYYHISEAQNVSSHVPYPVALHVNIVNVPQPAAAAIQRHYNDEDPEKEKRIKELELLLMSTENELKGQQTQNHTCSYPGWHSTTIADHTRPHGDSAPVSCLGEHHSTPSLPADPGSLPEESASPARCMIVHQGTILDNVKNLLEFAETLQFIDSFLNTSSNHENSDLEMPSLTSTPLIGHKLTVTTPFHRDQTVKTQKENTVFRTPAIKRSILESSPRTPTPFKHALAAQEIKYGPLKMLPQTPSHLVEDLQDVIKQESDESGIVAEFQENGPPLLKKIKQEVESPTDKSGNFFCSHHWEGDSLNTQLFTQTSPVADAPNILTSSVLMAPASEDEDNVLKAFTVPKNRSLASPLQPCSSTWEPASCGKMEEQMTSSSQARKYVNAFSARTLVM

SEQ ID NO: 96785 - protein, 554 aa, Homo sapiens
  Payload ID: 19308
  Gene Name: v-myb avian myeloblastosis viral oncogene homolog
  ENSP ID: ENSP00000413011
MARRPRHSIYSSDEDDEDFEMCDHDYDGLLPKSGKRHLGKTRWTREEDEKLKKLVEQNGTDDWKVIANYLPNRTDVQCQHRWQKVLNPELIKGPWTKEEDQRVIELVQKYGPKRWSVIAKHLKGRIGKQCRERWHNHLNPEVKKTSWTEEEDRIIYQAHKRLGNRWAEIAKLLPGRTDNAIKNHWNSTMRRKVEQEGYLQESSKASQPAVATSFQKNSHLMGFAQAPPTAQLPATGQPTVNNDYSYYHISEAQNVSSHVPYPVALHVNIVNVPQPAAAAIQRHYNDEDPEKEKRIKELELLLMSTENELKGQQVLPTQNHTCSYPGWHSTTIADHTRPHGDSAPVSCLGEHHSTPSLPADPGSLPEESASPARCMIVHQGTILDNDSSSWCDLSSFEFFEEADFSPSQHHTGKALQLQQREGNGTKPAGEPSPRVNKRMLSESSLDPPKVLPPARHSTIPLVILRKKRGQASPLATGDCSSFIFADVSSSTPKRSPVKSLPFSPSQFLNTSSNHENSDLEMPSLTSTPLIGHKLTVTTPFHRDQTVKTQKENTV

SEQ ID NO: 96786 - protein, 86 aa, Homo sapiens
  Payload ID: 19308
  Gene Name: v-myb avian myeloblastosis viral oncogene homolog
  ENSP ID: ENSP00000432042
TQNHTCSYPGWHSTTIADHTRPHGDSAPVSCLGEHHSTPSLPADPGSLPEESASPARCMIVHQGTILDNVKNLLEFAETLQFIDSM

SEQ ID NO: 96787 - protein, 388 aa, Homo sapiens
  Payload ID: 19308
  Gene Name: v-myb avian myeloblastosis viral oncogene homolog
  ENSP ID: ENSP00000432168
MARRPRHSIYSSDEDDEDFEMCDHDYDGLLPKSGKRHLGKTRWTREEDEKLKKLVEQNGTDDWKVIANYLPNRTDVQCQHRWQKVLNPELIKGPWTKEEDQRVIELVQKYGPKRWSVIAKHLKGRIGKQCRERWHNHLNPEVKKTSWTEEEDRIIYQAHKRLGNRWAEIAKLLPGRTDNAIKNHWNSTMRRKVEQEGYLQESSKASQPAVATSFQKNSHLMGFAQAPPTAQLPATGQPTVNNDYSYYHISEAQNVSSHVPYPVALHVNIVNVPQPAAAAIQRHYNDEDPEKEKRIKELELLLMSTENELKGQQVLPTQNHTCSYPGWHSTTIADHTRPHGDSAPVSCLGEHHSTPSLPADPGSLPEESASPARCRVSGGPCSTSEGQP

SEQ ID NO: 96788 - protein, 402 aa, Homo sapiens
  Payload ID: 19308
  Gene Name: v-myb avian myeloblastosis viral oncogene homolog
  Uniprot ID: P10242
  ENSP ID: ENSP00000432811
MARRPRHSIYSSDEDDEDFEMCDHDYDGLLPKSGKRHLGKTRWTREEDEKLKKLVEQNGTDDWKVIANYLPNRTDVQCQHRWQKVLNPELIKGPWTKEEDQRVIELVQKYGPKRWSVIAKHLKGRIGKQCRERWHNHLNPEVKKTSWTEEEDRIIYQAHKRLGNRWAEIAKLLPGRTDNAIKNHWNSTMRRKVEQEGYLQESSKASQPAVATSFQKNSHLMGFAQAPPTAQLPATGQPTVNNDYSYYHISEAQNVSSHVPYPVALHVNIVNVPQPAAAAIQRHYNDEDPEKEKRIKELELLLMSTENELKGQQVLPTQNHTCSYPGWHSTTIADHTRPHGDSAPVSCLGEHHSTPSLPADPGSLPEESASPARCMIVHQGTILDNVKNLLEFAETLQFIDSM

SEQ ID NO: 96789 - protein, 745 aa, Homo sapiens
  Payload ID: 19308
  Gene Name: v-myb avian myeloblastosis viral oncogene homolog
  Uniprot ID: P10242
  ENSP ID: ENSP00000432851
MARRPRHSIYSSDEDDEDFEMCDHDYDGLLPKSGKRHLGKTRWTREEDEKLKKLVEQNGTDDWKVIANYLPNRTDVQCQHRWQKVLNPELIKGPWTKEEDQRVIELVQKYGPKRWSVIAKHLKGRIGKQCRERWHNHLNPEVKKTSWTEEEDRIIYQAHKRLGNRWAEIAKLLPGRTDNAIKNHWNSTMRRKVEQEGYLQESSKASQPAVATSFQKNSHLMGFAQAPPTAQLPATGQPTVNNDYSYYHISEAQNVSSHVPYPVALHVNIVNVPQPAAAAIQRHYNDEDPEKEKRIKELELLLMSTENELKGQQVLPTQNHTCSYPGWHSTTIADHTRPHGDSAPVSCLGEHHSTPSLPADPGSLPEESASPARCMIVHQGTILDNDSSSWCDLSSFEFFEEADFSPSQHHTGKALQLQQREGNGTKPAGEPSPRVNKRMLSESSLDPPKVLPPARHSTIPLVILRKKRGQASPLATGDCSSFIFADVSSSTPKRSPVKSLPFSPSQFLNTSSNHENSDLEMPSLTSTPLIGHKLTVTTPFHRDQTVKTQKENTVFRTPAIKRSILESSPRTPTPFKHALAAQEIKYGPLKMLPQTPSHLVEDLQDVIKQESDESGIVAEFQENGPPLLKKIKQEVESPTDKSGNFFCSHHWEGDSLNTQLFTQTSPVADAPNILTSSVLMAPASEDEDNVLKAFTVPKNRSLASPLQPCSSTWEPASCGKMEEQMTSSSQARKYVNAFSARTLVM

SEQ ID NO: 96790 - protein, 388 aa, Homo sapiens; identical to SEQ ID NO: 96787
  Payload ID: 19308
  Gene Name: v-myb avian myeloblastosis viral oncogene homolog
  ENSP ID: ENSP00000432877

SEQ ID NO: 96791 - protein, 374 aa, Homo sapiens
  Payload ID: 19308
  Gene Name: v-myb avian myeloblastosis viral oncogene homolog
  ENSP ID: ENSP00000432948
MARRPRHSIYSSDEDDEDFEMCDHDYDGLLPKSGKRHLGKTRWTREEDEKLKKLVEQNGTDDWKVIANYLPNRTDVQCQHRWQKVLNPELIKGPWTKEEDQRVIELVQKYGPKRWSVIAKHLKGRIGKQCRERWHNHLNPEVKKTSWTEEEDRIIYQAHKRLGNRWAEIAKLLPGRTDNAIKNHWNSTMRRKVEQEGYLQESSKASQPAVATSFQKNSHLMGFAQAPPTAQLPATGQPTVNNDYSYYHISEAQNVSSHVPYPVALHVNIVNVPQPAAAAIQRHYNDEDPEKEKRIKELELLLMSTENELKGQQVLPTQNHTCSYPGWHSTTIADHTRPHGDSAPVSCLGEHHSTPSLPADPGSLPEESASPASS

SEQ ID NO: 96792 - protein, 611 aa, Homo sapiens
  Payload ID: 19308
  Gene Name: v-myb avian myeloblastosis viral oncogene homolog
  ENSP ID: ENSP00000433227
MARRPRHSIYSSDEDDEDFEMCDHDYDGLLPKSGKRHLGKTRWTREEDEKLKKLVEQNGTDDWKVIANYLPNRTDVQCQHRWQKVLNPELIKGPWTKEEDQRVIELVQKYGPKRWSVIAKHLKGRIGKQCRERWHNHLNPEVKKTSWTEEEDRIIYQAHKRLGNRWAEIAKLLPGRTDNAIKNHWNSTMRRKVEQEGYLQESSKASQPAVATSFQKNSHLMGFAQAPPTAQLPATGQPTVNNDYSYYHISEAQNVSSHVPYPVALHVNIVNVPQPAAAAIQRHYNDEDPEKEKRIKELELLLMSTENELKGQQVLPTQNHTCSYPGWHSTTIADHTRPHGDSAPVSCLGEHHSTPSLPADPGSLPEESASPARCMIVHQGTILDNVKNLLEFAETLQFIDSFLNTSSNHENSDLEMPSLTSTPLIGHKLTVTTPFHRDQTVKTQKENTVFRTPAIKRSILESSPRTPTPFKHALAAQEIKYGPLKMLPQTPSHLVEDLQDVIKQESDESGIVAEFQENGPPLLKKIKQEVESPTDKSGNFFCSHHWEGDSLNTQLFTQTSPVADAPNILTSSVLMAPASEDEDNVLKAFTVPKNRSLASPLQVITIPTLVF

SEQ ID NO: 96793 - protein, 446 aa, Homo sapiens
  Payload ID: 19308
  Gene Name: v-myb avian myeloblastosis viral oncogene homolog
  ENSP ID: ENSP00000433458
MARRPRHSIYSSDEDDEDFEMCDHDYDGLLPKSGKRHLGKTRWTREEDEKLKKLVEQNGTDDWKVIANYLPNRTDVQCQHRWQKVLNPELIKGPWTKEEDQRVIELVQKYGPKRWSVIAKHLKGRIGKQCRERWHNHLNPEVKKTSWTEEEDRIIYQAHKRLGNRWAEIAKLLPGRTDNAIKNHWNSTMRRKVEQEGYLQESSKASQPAVATSFQKNSHLMGFAQAPPTAQLPATGQPTVNNDYSYYHISEAQNVSSHVPYPVALHVNIVNVPQPAAAAIQRHYNDEDPEKEKRIKELELLLMSTENELKGQQTQNHTCSYPGWHSTTIADHTRPHGDSAPVSCLGEHHSTPSLPADPGSLPEESASPARCMIVHQGTILDNVKNLLEFAETLQFIDSFLNTSSNHENSDLEMPSLTSTPLIGHKLTVTTPFHRDQTVKTQKENTV

SEQ ID NO: 96794 - protein, 581 aa, Homo sapiens
  Payload ID: 19308
  Gene Name: v-myb avian myeloblastosis viral oncogene homolog
  ENSP ID: ENSP00000433745
MARRPRHSIYSSDEDDEDFEMCDHDYDGLLPKSGKRHLGKTRWTREEDEKLKKLVEQNGTDDWKVIANYLPNRTDVQCQHRWQKVLNPELIKGPWTKEEDQRVIELVQKYGPKRWSVIAKHLKGRIGKQCRERWHNHLNPEVKKTSWTEEEDRIIYQAHKRLGNRWAEIAKLLPGRTDNAIKNHWNSTMRRKVEQEGYLQESSKASQPAVATSFQKNSHLMGFAQAPPTAQLPATGQPTVNNDYSYYHISEAQNVSSHVPYPVALHVNIVNVPQPAAAAIQRHYNDEDPEKEKRIKELELLLMSTENELKGQQVLPTQNHTCSYPGWHSTTIADHTRPHGDSAPVSCLGEHHSTPSLPADPGSLPEESASPARCMIVHQGTILDNVKNLLEFAETLQFIDSFLNTSSNHENSDLEMPSLTSTPLIGHKLTVTTPFHRDQTVKTQKENTVFRTPAIKRSILESSPRTPTPFKHALAAQEIKYGPLKMLPQTPSHLVEDLQDVIKQESDESGIVAEFQENGPPLLKKIKQEVNTQPFGSNKLRILPPLFLVCSLMCLPLALCNTTTFRARFSYKVQRKGTARL

SEQ ID NO: 96795 - protein, 385 aa, Homo sapiens
  Payload ID: 19308
  Gene Name: v-myb avian myeloblastosis viral oncogene homolog
  ENSP ID: ENSP00000433844
MARRPRHSIYSSDEDDEDFEMCDHDYDGLLPKSGKRHLGKTRWTREEDEKLKKLVEQNGTDDWKVIANYLPNRTDVQCQHRWQKVLNPELIKGPWTKEEDQRVIELVQKYGPKRWSVIAKHLKGRIGKQCRERWHNHLNPEVKKTSWTEEEDRIIYQAHKRLGNRWAEIAKLLPGRTDNAIKNHWNSTMRRKVEQEGYLQESSKASQPAVATSFQKNSHLMGFAQAPPTAQLPATGQPTVNNDYSYYHISEAQNVSSHVPYPVALHVNIVNVPQPAAAAIQRHYNDEDPEKEKRIKELELLLMSTENELKGQQTQNHTCSYPGWHSTTIADHTRPHGDSAPVSCLGEHHSTPSLPADPGSLPEESASPARCRVSGGPCSTSEGQP

SEQ ID NO: 96796 - protein, 581 aa, Homo sapiens
  Payload ID: 19308
  Gene Name: v-myb avian myeloblastosis viral oncogene homolog
  ENSP ID: ENSP00000434420
MARRPRHSIYSSDEDDEDFEMCDHDYDGLLPKSGKRHLGKTRWTREEDEKLKKLVEQNGTDDWKVIANYLPNRTDVQCQHRWQKVLNPELIKGPWTKEEDQRVIELVQKYGPKRWSVIAKHLKGRIGKQCRERWHNHLNPEVKKTSWTEEEDRIIYQAHKRLGNRWAEIAKLLPGRTDNAIKNHWNSTMRRKVEQEGYLQESSKASQPAVATSFQKNSHLMGFAQAPPTAQLPATGQPTVNNDYSYYHISEAQNVSSHVPYPVALHVNIVNVPQPAAAAIQRHYNDEDPEKEKRIKELELLLMSTENELKGQQVLPTQNHTCSYPGWHSTTIADHTRPHGDSAPVSCLGEHHSTPSLPADPGSLPEESASPARCMIVHQGTILDNVKNLLEFAETLQFIDSFLNTSSNHENSDLEMPSLTSTPLIGHKLTVTTPFHRDQTVKTQKENTVFRTPAIKRSILESSPRTPTPFKHALAAQEIKYGPLKMLPQTPSHLVEDLQDVIKQESDESGIVAEFQENGPPLLKKIKQEVNTQPFGSNKLRILPPLFLVCSLMCLPLALCNTTTFRARFSYKVQRKGGISN

SEQ ID NO: 96797 - protein, 402 aa, Homo sapiens; identical to SEQ ID NO: 96788
  Payload ID: 19308
  Gene Name: v-myb avian myeloblastosis viral oncogene homolog
  Uniprot ID: P10242
  ENSP ID: ENSP00000434639

SEQ ID NO: 96798 - protein, 79 aa, Homo sapiens
  Payload ID: 19308
  Gene Name: v-myb avian myeloblastosis viral oncogene homolog
  ENSP ID: ENSP00000434675
MARRPRHSIYSSDEDDEDFEMCDHDYDGLLPKSGKRHLGKTRWTREENRTDVQCQHRWQKVLNPELIKGPWTKEEDQRN

SEQ ID NO: 96799 - protein, 758 aa, Homo sapiens
  Payload ID: 19308
  Gene Name: v-myb avian myeloblastosis viral oncogene homolog
  Uniprot ID: P10242
  ENSP ID: ENSP00000434723
MARRPRHSIYSSDEDDEDFEMCDHDYDGLLPKSGKRHLGKTRWTREEDEKLKKLVEQNGTDDWKVIANYLPNRTDVQCQHRWQKVLNPELIKGPWTKEEDQRVIELVQKYGPKRWSVIAKHLKGRIGKQCRERWHNHLNPEVKKTSWTEEEDRIIYQAHKRLGNRWAEIAKLLPGRTDNAIKNHWNSTMRRKVEQEGYLQESSKASQPAVATSFQKNSHLMGFAQAPPTAQLPATGQPTVNNDYSYYHISEAQNVSSHVPYPVALHVNIVNVPQPAAAAIQRHYNDEDPEKEKRIKELELLLMSTENELKGQQTQNHTCSYPGWHSTTIADHTRPHGDSAPVSCLGEHHSTPSLPADPGSLPEESASPARCMIVHQGTILDNVKNLLEFAETLQFIDSDSSSWCDLSSFEFFEEADFSPSQHHTGKALQLQQREGNGTKPAGEPSPRVNKRMLSESSLDPPKVLPPARHSTIPLVILRKKRGQASPLATGDCSSFIFADVSSSTPKRSPVKSLPFSPSQFLNTSSNHENSDLEMPSLTSTPLIGHKLTVTTPFHRDQTVKTQKENTVFRTPAIKRSILESSPRTPTPFKHALAAQEIKYGPLKMLPQTPSHLVEDLQDVIKQESDESGIVAEFQENGPPLLKKIKQEVESPTDKSGNFFCSHHWEGDSLNTQLFTQTSPVADAPNILTSSVLMAPASEDEDNVLKAFTVPKNRSLASPLQPCSSTWEPASCGKMEEQMTSSSQARKYVNAFSARTLVM

SEQ ID NO: 96800 - protein, 419 aa, Homo sapiens
  Payload ID: 19308
  Gene Name: v-myb avian myeloblastosis viral oncogene homolog
  ENSP ID: ENSP00000434795
MARRPRHSIYSSDEDDEDFEMCDHDYDGLLPKSGKRHLGKTRWTREEDEKLKKLVEQNGTDDWKVIANYLPNRTDVQCQHRWQKVLNPELIKGPWTKEEDQRVIELVQKYGPKRWSVIAKHLKGRIGKQCRERWHNHLNPEVKKTSWTEEEDRIIYQAHKRLGNRWAEIAKLLPGRTDNAIKNHWNSTMRRKVEQEGYLQESSKASQPAVATSFQKNSHLMGFAQAPPTAQLPATGQPTVNNDYSYYHISEAQNVSSHVPYPVALHVNIVNVPQPAAAAIQRHYNDEDPEKEKRIKELELLLMSTENELKGQQTQNHTCSYPGWHSTTIADHTRPHGDSAPVSCLGEHHSTPSLPADPGSLPEESASPARILHHGVISAVLNSLKKQIFHLANITQAKPYSFSKERAMGLNLQENLAQG

SEQ ID NO: 96801 - protein, 422 aa, Homo sapiens
  Payload ID: 19308
  Gene Name: v-myb avian myeloblastosis viral oncogene homolog
  ENSP ID: ENSP00000434816
MARRPRHSIYSSDEDDEDFEMCDHDYDGLLPKSGKRHLGKTRWTREEDEKLKKLVEQNGTDDWKVIANYLPNRTDVQCQHRWQKVLNPELIKGPWTKEEDQRVIELVQKYGPKRWSVIAKHLKGRIGKQCRERWHNHLNPEVKKTSWTEEEDRIIYQAHKRLGNRWAEIAKLLPGRTDNAIKNHWNSTMRRKVEQEGYLQESSKASQPAVATSFQKNSHLMGFAQAPPTAQLPATGQPTVNNDYSYYHISEAQNVSSHVPYPVALHVNIVNVPQPAAAAIQRHYNDEDPEKEKRIKELELLLMSTENELKGQQVLPTQNHTCSYPGWHSTTIADHTRPHGDSAPVSCLGEHHSTPSLPADPGSLPEESASPARILHHGVISAVLNSLKKQIFHLANITQAKPYSFSKERAMGLNLQENLAQG

SEQ ID NO: 96802 - protein, 374 aa, Homo sapiens; identical to SEQ ID NO: 96791
  Payload ID: 19308
  Gene Name: v-myb avian myeloblastosis viral oncogene homolog
  ENSP ID: ENSP00000434917

SEQ ID NO: 96803 - protein, 603 aa, Homo sapiens
  Payload ID: 19308
  Gene Name: v-myb avian myeloblastosis viral oncogene homolog
  Uniprot ID: P10242
  ENSP ID: ENSP00000435055
MARRPRHSIYSSDEDDEDFEMCDHDYDGLLPKSGKRHLGKTRWTREEDEKLKKLVEQNGTDDWKVIANYLPNRTDVQCQHRWQKVLNPELIKGPWTKEEDQRVIELVQKYGPKRWSVIAKHLKGRIGKQCRERWHNHLNPEVKKTSWTEEEDRIIYQAHKRLGNRWAEIAKLLPGRTDNAIKNHWNSTMRRKVEQEGYLQESSKASQPAVATSFQKNSHLMGFAQAPPTAQLPATGQPTVNNDYSYYHISEAQNVSSHVPYPVALHVNIVNVPQPAAAAIQRHYNDEDPEKEKRIKELELLLMSTENELKGQQVLPTQNHTCSYPGWHSTTIADHTRPHGDSAPVSCLGEHHSTPSLPADPGSLPEESASPARCMIVHQGTILDNVKNLLEFAETLQFIDSFLNTSSNHENSDLEMPSLTSTPLIGHKLTVTTPFHRDQTVKTQKENTVFRTPAIKRSILESSPRTPTPFKHALAAQEIKYGPLKMLPQTPSHLVEDLQDVIKQESDESGIVAEFQENGPPLLKKIKQENILTSSVLMAPASEDEDNVLKAFTVPKNRSLASPLQPCSSTWEPASCGKMEEQMTSSSQARKYVNAFSARTLVM

SEQ ID NO: 96804 - protein, 402 aa, Homo sapiens; identical to SEQ ID NO: 96788
  Payload ID: 19308
  Gene Name: v-myb avian myeloblastosis viral oncogene homolog
  Uniprot ID: P10242
  ENSP ID: ENSP00000435293

SEQ ID NO: 96805 - protein, 326 aa, Homo sapiens
  Payload ID: 19308
  Gene Name: v-myb avian myeloblastosis viral oncogene homolog
  ENSP ID: ENSP00000435497
MARRPRHSIYSSDEDDEDFEMCDHDYDGLLPKSGKRHLGKTRWTREENRTDVQCQHRWQKVLNPELIKGPWTKEEDQRVIELVQKYGPKRWSVIAKHLKGRIGKQCRERWHNHLNPEVKKTSWTEEEDRIIYQAHKRLGNRWAEIAKLLPGRTDNAIKNHWNSTMRRKVEQEGYLQESSKASQPAVATSFQKNSHLMGFAQAPPTAQLPATGQPTVNNDYSYYHISEAQNVSSHVPYPVALHVNIVNVPQPAAAAIQRHYNDEDPEKEKRIKELELLLMSTENELKGQQVLPLCGPLLNSDIFSDWAANWDGSLCFATYIVNQQRQ

SEQ ID NO: 96806 - protein, 350 aa, Homo sapiens
  Payload ID: 19308
  Gene Name: v-myb avian myeloblastosis viral oncogene homolog
  Uniprot ID: P10242
  ENSP ID: ENSP00000435578
MARRPRHSIYSSDEDDEDFEMCDHDYDGLLPKSGKRHLGKTRWTREEDEKLKKLVEQNGTDDWKVIANYLPNRTDVQCQHRWQKVLNPELIKGPWTKEEDQRVIELVQKYGPKRWSVIAKHLKGRIGKQCRERWHNHLNPEVKKTSWTEEEDRIIYQAHKRLGNRWAEIAKLLPGRTDNAIKNHWNSTMRRKVEQEGYLQESSKASQPAVATSFQKNSHLMGFAQAPPTAQLPATGQPTVNNDYSYYHISEAQNVSSHVPYPVALHVNIVNVPQPAAAAIQRHYNDEDPEKEKRIKELELLLMSTENELKGQQVLPLCGPLLNSDIFSDWAANWDGSLCFATYIVNQQRQ

SEQ ID NO: 96807 - protein, 364 aa, Homo sapiens
  Payload ID: 19308
  Gene Name: v-myb avian myeloblastosis viral oncogene homolog
  ENSP ID: ENSP00000435595
MARRPRHSIYSSDEDDEDFEMCDHDYDGLLPKSGKRHLGKTRWTREEDEKLKKLVEQNGTDDWKVIANYLPNRTDVQCQHRWQKVLNPELIKGPWTKEEDQRVIELVQKYGPKRWSVIAKHLKGRIGKQCRERWHNHLNPEVKKTSWTEEEDRIIYQAHKRLGNRWAEIAKLLPGRTDNAIKNHWNSTMRRKVEQEGYLQESSKASQPAVATSFQKNSHLMGFAQAPPTAQLPATGQPTVNNDYSYYHISEAQNVSSHVPYPVALHVNIVNVPQPAAAAIQRHYNDEDPEKEKRIKELELLLMSTENELKGQQVLPFLNTSSNHENSDLEMPSLTSTPLIGHKLTVTTPFHRDQTVKTQKENTV

SEQ ID NO: 96808 - protein, 555 aa, Homo sapiens
  Payload ID: 19308
  Gene Name: v-myb avian myeloblastosis viral oncogene homolog
  Uniprot ID: P10242
  ENSP ID: ENSP00000435938
MARRPRHSIYSSDEDDEDFEMCDHDYDGLLPKSGKRHLGKTRWTREEDEKLKKLVEQNGTDDWKVIANYLPNRTDVQCQHRWQKVLNPELIKGPWTKEEDQRVIELVQKYGPKRWSVIAKHLKGRIGKQCRERWHNHLNPEVKKTSWTEEEDRIIYQAHKRLGNRWAEIAKLLPGRTDNAIKNHWNSTMRRKVEQEGYLQESSKASQPAVATSFQKNSHLMGFAQAPPTAQLPATGQPTVNNDYSYYHISEAQNVSSHVPYPVALHVNIVNVPQPAAAAIQRHYNDEDPEKEKRIKELELLLMSTENELKGQQVLPFLNTSSNHENSDLEMPSLTSTPLIGHKLTVTTPFHRDQTVKTQKENTVFRTPAIKRSILESSPRTPTPFKHALAAQEIKYGPLKMLPQTPSHLVEDLQDVIKQESDESGIVAEFQENGPPLLKKIKQEVESPTDKSGNFFCSHHWEGDSLNTQLFTQTSPVADAPNILTSSVLMAPASEDEDNVLKAFTVPKNRSLASPLQPCSSTWEPASCGKMEEQMTSSSQARKYVNAFSARTLVM

SEQ ID NO: 96809 - protein, 347 aa, Homo sapiens
  Payload ID: 19308
  Gene Name: v-myb avian myeloblastosis viral oncogene homolog
  ENSP ID: ENSP00000436385
MARRPRHSIYSSDEDDEDFEMCDHDYDGLLPKSGKRHLGKTRWTREEDEKLKKLVEQNGTDDWKVIANYLPNRTDVQCQHRWQKVLNPELIKGPWTKEEDQRVIELVQKYGPKRWSVIAKHLKGRIGKQCRERWHNHLNPEVKKTSWTEEEDRIIYQAHKRLGNRWAEIAKLLPGRTDNAIKNHWNSTMRRKVEQEGYLQESSKASQPAVATSFQKNSHLMGFAQAPPTAQLPATGQPTVNNDYSYYHISEAQNVSSHVPYPVALHVNIVNVPQPAAAAIQRHYNDEDPEKEKRIKELELLLMSTENELKGQQLCGPLLNSDIFSDWAANWDGSLCFATYIVNQQRQ

SEQ ID NO: 96810 - protein, 347 aa, Homo sapiens; identical to SEQ ID NO: 96809
  Payload ID: 19308
  Gene Name: v-myb avian myeloblastosis viral oncogene homolog
  ENSP ID: ENSP00000436602

SEQ ID NO: 96811 - protein, 605 aa, Homo sapiens
  Payload ID: 19308
  Gene Name: v-myb avian myeloblastosis viral oncogene homolog
  Uniprot ID: P10242
  ENSP ID: ENSP00000436605
MARRPRHSIYSSDEDDEDFEMCDHDYDGLLPKSGKRHLGKTRWTREEDEKLKKLVEQNGTDDWKVIANYLPNRTDVQCQHRWQKVLNPELIKGPWTKEEDQRVIELVQKYGPKRWSVIAKHLKGRIGKQCRERWHNHLNPEVKKTSWTEEEDRIIYQAHKRLGNRWAEIAKLLPGRTDNAIKNHWNSTMRRKVEQEGYLQESSKASQPAVATSFQKNSHLMGFAQAPPTAQLPATGQPTVNNDYSYYHISEAQNVSSHVPYPVALHVNIVNVPQPAAAAIQTQNHTCSYPGWHSTTIADHTRPHGDSAPVSCLGEHHSTPSLPADPGSLPEESASPARCMIVHQGTILDNVKNLLEFAETLQFIDSFLNTSSNHENSDLEMPSLTSTPLIGHKLTVTTPFHRDQTVKTQKENTVFRTPAIKRSILESSPRTPTPFKHALAAQEIKYGPLKMLPQTPSHLVEDLQDVIKQESDESGIVAEFQENGPPLLKKIKQEVESPTDKSGNFFCSHHWEGDSLNTQLFTQTSPVADAPNILTSSVLMAPASEDEDNVLKAFTVPKNRSLASPLQPCSSTWEPASCGKMEEQMTSSSQARKYVNAFSARTLVM

SEQ ID NO: 96812 - protein, 103 aa, Homo sapiens
  Payload ID: 19308
  Gene Name: v-myb avian myeloblastosis viral oncogene homolog
  ENSP ID: ENSP00000436925
MARRPRHSIYSSDEDDEDFEMCDHDYDGLLPKSGKRHLGKTRWTREEDEKLKKLVEQNGTDDWKVIANYLPNRTDVQCQHRWQKVLNPELIKGPWTKEEDQRN

SEQ ID NO: 96813 - protein, 350 aa, Homo sapiens; identical to SEQ ID NO: 96806
  Payload ID: 19308
  Gene Name: v-myb avian myeloblastosis viral oncogene homolog
  Uniprot ID: P10242
  ENSP ID: ENSP00000437081

SEQ ID NO: 96814 - protein, 350 aa, Homo sapiens; identical to SEQ ID NO: 96806
  Payload ID: 19308
  Gene Name: v-myb avian myeloblastosis viral oncogene homolog
  Uniprot ID: P10242
  ENSP ID: ENSP00000437264

SEQ ID NO: 96815 - protein, 660 aa, Homo sapiens
  Payload ID: 19308
  Gene Name: v-myb avian myeloblastosis viral oncogene homolog
  ENSP ID: ENSP00000477898
MARRPRHSIYSSDEDDEDFEMCDHDYDGLLPKSGKRHLGKTRWTREEDEKLKKLVEQNGTDDWKVIANYLPNRTDVQCQHRWQKVLNPELIKGPWTKEEDQRVIELVQKYGPKRWSVIAKHLKGRIGKQCRERWHNHLNPEVKKTSWTEEEDRIIYQAHKRLGNRWAEIAKLLPGRTDNAIKNHWNSTMRRKVEQEGYLQESSKASQPAVATSFQKNSHLMGFAQAPPTAQLPATGQPTVNNDYSYYHISEAQNVSSHVPYPVALHVNIVNVPQPAAAAIQRHYNDEDPEKEKRIKELELLLMSTENELKGQQVLPTQNHTCSYPGWHSTTIADHTRPHGDSAPVSCLGEHHSTPSLPADPGSLPEESASPARCMIVHQGTILDNVKNLLEFAETLQFIDSFLNTSSNHENSDLEMPSLTSTPLIGHKLTVTTPFHRDQTVKTQKENTVFRTPAIKRSILESSPRTPTPFKHALAAQEIKYGPLKMLPQTPSHLVEDLQDVIKQESDESGIVAEFQENGPPLLKKIKQEVESPTDKSGNFFCSHHWEGDSLNTQLFTQTSPVADAPTGVQWHDFGSLQPLPPGFKRFSCLSLPRSWDYRHPPPRPANFEFLVETGFLHVGQAGLELLTSGDLPASASQSARITGVSHRARPGGIFLQAPF

SEQ ID NO: 96816 - protein, 612 aa, Homo sapiens
  Payload ID: 19308
  Gene Name: v-myb avian myeloblastosis viral oncogene homolog
  ENSP ID: ENSP00000479896
MARRPRHSIYSSDEDDEDFEMCDHDYDGLLPKSGKRHLGKTRWTREEDEKLKKLVEQNGTDDWKVIANYLPNRTDVQCQHRWQKVLNPELIKGPWTKEEDQRVIELVQKYGPKRWSVIAKHLKGRIGKQCRERWHNHLNPEVKKTSWTEEEDRIIYQAHKRLGNRWAEIAKLLPGRTDNAIKNHWNSTMRRKVEQEGYLQESSKASQPAVATSFQKNSHLMGFAQAPPTAQLPATGQPTVNNDYSYYHISEAQNVSSHVPYPVALHVNIVNVPQPAAAAIQRHYNDEDPEKEKRIKELELLLMSTENELKGQQVLPTQNHTCSYPGWHSTTIADHTRPHGDSAPVSCLGEHHSTPSLPADPGSLPEESASPARCMIVHQGTILDNVKNLLEFAETLQFIDSFLNTSSNHENSDLEMPSLTSTPLIGHKLTVTTPFHRDQTVKTQKENTVFRTPAIKRSILESSPRTPTPFKHALAAQEIKYGPLKMLPQTPSHLVEDLQDVIKQESDESGIVAEFQENGPPLLKKIKQEVESPTDKSGNFFCSHHWEGDSLNTQLFTQTSPVADAPNILTSSVLMAPASEDEDNVLKAFTVPKNRSLASPLQATKAQRLFQF

SEQ ID NO: 96817 - protein, 692 aa, Homo sapiens
  Payload ID: 19309
  Gene Name: v-myb avian myeloblastosis viral oncogene homolog-like 1
  Uniprot ID: P10243
  ENSP ID: ENSP00000428011
MAKRSRSEDEDDDLQYADHDYEVPQQKGLKKLWNRVKWTRDEDDKLKKLVEQHGTDDWTLIASHLQNRSDFQCQHRWQKVLNPELIKGPWTKEEDQRVIELVQKYGPKRWSLIAKHLKGRIGKQCRERWHNHLNPEVKKSSWTEEEDRIIYEAHKRLGNRWAEIAKLLPGRTDNSIKNHWNSTMRRKVEQEGYLQDGIKSERSSSKLQHKPCAAMDHMQTQNQFYIPVQIPGYQYVSPEGNCIEHVQPTSAFIQQPFIDEDPDKEKKIKELEMLLMSAENEVRRKRIPSQPGSFSSWSGSFLMDDNMSNTLNSLDEHTSEFYSMDENQPVSAQQNSPTKFLAVEANAVLSSLQTIPEFAETLELIESDPVAWSDVTSFDISDAAASPIKSTPVKLMRIQHNEGAMECQFNVSLVLEGKKNTCNGGNSEAVPLTSPNIAKFSTPPAILRKKRKMRVGHSPGSELRDGSLNDGGNMALKHTPLKTLPFSPSQFFNTCPGNEQLNIENPSFTSTPICGQKALITTPLHKETTPKDQKENVGFRTPTIRRSILGTTPRTPTPFKNALAAQEKKYGPLKIVSQPLAFLEEDIREVLKEETGTDLFLKEEDEPAYKSCKQENTASGKKVRKSLVLDNWEKEESGTQLLTEDISDMQSNCEWETVVYGKTEDQLIMTEQARRYLSTYTATSSTSRALIL

SEQ ID NO: 96818 - protein, 410 aa, Homo sapiens
  Payload ID: 19309
  Gene Name: v-myb avian myeloblastosis viral oncogene homolog-like 1
  ENSP ID: ENSP00000428265
MAKRSRSEDEDDDLQYADHDYEVPQQKGLKKLWNRVKWTRDEDDKLKKLVEQHGTDDWTLIASHLQNRSDFQCQHRWQKVLNPELIKGPWTKEEDQRVIELVQKYGKKRKMRVGHSPGSELRDGSLNDGGNMALKHTPLKTLPFSPSQFFNTCPGNEQLNIENPSFTSTPICGQKALITTPLHKETTPKDQKENVGFRTPTIRRSILGTTPRTPTPFKNALAAQEKKYGPLKIVSQPLAFLEEDIREVLKEETGTDLFLKEEDEPAYKSCKQENTASGKKVRKSLVLDNWEKEESGTQLLTEDISDMQSENRFTTSLLMIPLLEIHDNRCNLIPEKQDINSTNKTYTLTKKKPNPNTSKVVKLEKNLQSNCEWETVVYGKTEDQLIMTEQARRYLSTYTATSSTSRALIL

SEQ ID NO: 96819 - protein, 752 aa, Homo sapiens
  Payload ID: 19309
  Gene Name: v-myb avian myeloblastosis viral oncogene homolog-like 1
  Uniprot ID: P10243
  ENSP ID: ENSP00000429633
MAKRSRSEDEDDDLQYADHDYEVPQQKGLKKLWNRVKWTRDEDDKLKKLVEQHGTDDWTLIASHLQNRSDFQCQHRWQKVLNPELIKGPWTKEEDQRVIELVQKYGPKRWSLIAKHLKGRIGKQCRERWHNHLNPEVKKSSWTEEEDRIIYEAHKRLGNRWAEIAKLLPGRTDNSIKNHWNSTMRRKVEQEGYLQDGIKSERSSSKLQHKPCAAMDHMQTQNQFYIPVQIPGYQYVSPEGNCIEHVQPTSAFIQQPFIDEDPDKEKKIKELEMLLMSAENEVRRKRIPSQPGSFSSWSGSFLMDDNMSNTLNSLDEHTSEFYSMDENQPVSAQQNSPTKFLAVEANAVLSSLQTIPEFAETLELIESDPVAWSDVTSFDISDAAASPIKSTPVKLMRIQHNEGAMECQFNVSLVLEGKKNTCNGGNSEAVPLTSPNIAKFSTPPAILRKKRKMRVGHSPGSELRDGSLNDGGNMALKHTPLKTLPFSPSQFFNTCPGNEQLNIENPSFTSTPICGQKALITTPLHKETTPKDQKENVGFRTPTIRRSILGTTPRTPTPFKNALAAQEKKYGPLKIVSQPLAFLEEDIREVLKEETGTDLFLKEEDEPAYKSCKQENTASGKKVRKSLVLDNWEKEESGTQLLTEDISDMQSENRFTTSLLMIPLLEIHDNRCNLIPEKQDINSTNKTYTLTKKKPNPNTSKVVKLEKNLQSNCEWETVVYGKTEDQLIMTEQARRYLSTYTATSSTSRALIL

SEQ ID NO: 96820 - protein, 700 aa, Homo sapiens
  Payload ID: 19310
  Gene Name: v-myb avian myeloblastosis viral oncogene homolog-like 2
  Uniprot ID: P10244
  ENSP ID: ENSP00000217026
MSRRTRCEDLDELHYQDTDSDVPEQRDSKCKVKWTHEEDEQLRALVRQFGQQDWKFLASHFPNRTDQQCQYRWLRVLNPDLVKGPWTKEEDQKVIELVKKYGTKQWTLIAKHLKGRLGKQCRERWHNHLNPEVKKSCWTEEEDRIICEAHKVLGNRWAEIAKMLPGRTDNAVKNHWNSTIKRKVDTGGFLSESKDCKPPVYLLLELEDKDGLQSAQPTEGQGSLLTNWPSVPPTIKEEENSEEELAAATTSKEQEPIGTDLDAVRTPEPLEEFPKREDQEGSPPETSLPYKWVVEAANLLIPAVGSSLSEALDLIESDPDAWCDLSKFDLPEEPSAEDSINNSLVQLQASHQQQVLPPRQPSALVPSVTEYRLDGHTISDLSRSSRGELIPISPSTEVGGSGIGTPPSVLKRQRKRRVALSPVTENSTSLSFLDSCNSLTPKSTPVKTLPFSPSQFLNFWNKQDTLELESPSLTSTPVCSQKVVVTTPLHRDKTPLHQKHAAFVTPDQKYSMDNTPHTPTPFKNALEKYGPLKPLPQTPHLEEDLKEVLRSEAGIELIIEDDIRPEKQKRKPGLRRSPIKKVRKSLALDIVDEDVKLMMSTLPKSLSLPTTAPSNSSSLTLSGIKEDNSLLNQGFLQAKPEKAAVAQKPRSHFTTPAPMSSAWKTVACGGTRDQLFMQEKARQLLGRLKPSHTSRTLILS

SEQ ID NO: 96821 - protein, 676 aa, Homo sapiens
  Payload ID: 19310
  Gene Name: v-myb avian myeloblastosis viral oncogene homolog-like 2
  Uniprot ID: P10244
  ENSP ID: ENSP00000380072
MSRRTRCEDLDELHYQDTDSDVPEQRDSKCKVKWTHEENRTDQQCQYRWLRVLNPDLVKGPWTKEEDQKVIELVKKYGTKQWTLIAKHLKGRLGKQCRERWHNHLNPEVKKSCWTEEEDRIICEAHKVLGNRWAEIAKMLPGRTDNAVKNHWNSTIKRKVDTGGFLSESKDCKPPVYLLLELEDKDGLQSAQPTEGQGSLLTNWPSVPPTIKEEENSEEELAAATTSKEQEPIGTDLDAVRTPEPLEEFPKREDQEGSPPETSLPYKWVVEAANLLIPAVGSSLSEALDLIESDPDAWCDLSKFDLPEEPSAEDSINNSLVQLQASHQQQVLPPRQPSALVPSVTEYRLDGHTISDLSRSSRGELIPISPSTEVGGSGIGTPPSVLKRQRKRRVALSPVTENSTSLSFLDSCNSLTPKSTPVKTLPFSPSQFLNFWNKQDTLELESPSLTSTPVCSQKVVVTTPLHRDKTPLHQKHAAFVTPDQKYSMDNTPHTPTPFKNALEKYGPLKPLPQTPHLEEDLKEVLRSEAGIELIIEDDIRPEKQKRKPGLRRSPIKKVRKSLALDIVDEDVKLMMSTLPKSLSLPTTAPSNSSSLTLSGIKEDNSLLNQGFLQAKPEKAAVAQKPRSHFTTPAPMSSAWKTVACGGTRDQLFMQEKARQLLGRLKPSHTSRTLILS

SEQ ID NO: 96822 - protein, 257 aa, Homo sapiens
  Payload ID: 19311
  Gene Name: v-myc avian myelocytomatosis viral oncogene homolog
  ENSP ID: ENSP00000259523
MPLNVSFTNRNYDLDYDSVQPYFYCDEEENFYQQQQQSELQPPAPSEDIWKKFELLPTPPLSPSRRSGLCSPSYVAVTPFSLRGDNDGGGGSFSTADQLEMVTELLGGDMVNQSFICDPDDETFIKNIIIQDCMWSGFSAAAKLVSEKLASYQAARKDSGSPNPARGHSVCSTSSLYLQDLSAAASECIDPSVVFPYPLNDSSSPKSCASQDSSAFSPSSDSLLSSTESSPQGSPEPLVLHEETPPTTSSDSGGTRR

SEQ ID NO: 96823 - protein, 439 aa, Homo sapiens
  Payload ID: 19311
  Gene Name: v-myc avian myelocytomatosis viral oncogene homolog
  Uniprot ID: P01106
  ENSP ID: ENSP00000367207
MPLNVSFTNRNYDLDYDSVQPYFYCDEEENFYQQQQQSELQPPAPSEDIWKKFELLPTPPLSPSRRSGLCSPSYVAVTPFSLRGDNDGGGGSFSTADQLEMVTELLGGDMVNQSFICDPDDETFIKNIIIQDCMWSGFSAAAKLVSEKLASYQAARKDSGSPNPARGHSVCSTSSLYLQDLSAAASECIDPSVVFPYPLNDSSSPKSCASQDSSAFSPSSDSLLSSTESSPQGSPEPLVLHEETPPTTSSDSEEEQEDEEEIDVVSVEKRQAPGKRSESGSPSAGGHSKPPHSPLVLKRCHVSTHQHNYAAPPSTRKDYPAAKRVKLDSVRVLRQISNNRKCTSPRSSDTEENVKRRTHNVLERQRRNELKRSFFALRDQIPELENNEKAPKVVILKKATAYILSVQAEEQKLISEEDLLRKRREQLKHKLEQLRNSCA

SEQ ID NO: 96824 - protein, 184 aa, Homo sapiens
  Payload ID: 19311
  Gene Name: v-myc avian myelocytomatosis viral oncogene homolog
  ENSP ID: ENSP00000429441
LDFFRVVENQPPATMPLNVSFTNRNYDLDYDSVQPYFYCDEEENFYQQQQQSELQPPAPSEDIWKKFELLPTPPLSPSRRSGLCSPSYVAVTPFSLRGDNDGGGGSFSTADQLEMVTELLGGDMVNQSFICDPDDETFIKNIIIQDCMWSGFSAAAKLVSEKLASYQAARKDSGSPNPARGHSV

SEQ ID NO: 96825 - protein, 59 aa, Homo sapiens
  Payload ID: 19311
  Gene Name: v-myc avian myelocytomatosis viral oncogene homolog
  ENSP ID: ENSP00000430226
MTSTTTRCSRISTATRRRTSTSSSSRASCSPRRPARISGRNSSCCPPRPCPLAAAPGSA

SEQ ID NO: 96826 - protein, 453 aa, Homo sapiens
  Payload ID: 19311
  Gene Name: v-myc avian myelocytomatosis viral oncogene homolog
  ENSP ID: ENSP00000430235
LDFFRVVENQPPATMPLNVSFTNRNYDLDYDSVQPYFYCDEEENFYQQQQQSELQPPAPSEDIWKKFELLPTPPLSPSRRSGLCSPSYVAVTPFSLRGDNDGGGGSFSTADQLEMVTELLGGDMVNQSFICDPDDETFIKNIIIQDCMWSGFSAAAKLVSEKLASYQAARKDSGSPNPARGHSVCSTSSLYLQDLSAAASECIDPSVVFPYPLNDSSSPKSCASQDSSAFSPSSDSLLSSTESSPQGSPEPLVLHEETPPTTSSDSEEEQEDEEEIDVVSVEKRQAPGKRSESGSPSAGGHSKPPHSPLVLKRCHVSTHQHNYAAPPSTRKDYPAAKRVKLDSVRVLRQISNNRKCTSPRSSDTEENVKRRTHNVLERQRRNELKRSFFALRDQIPELENNEKAPKVVILKKATAYILSVQAEEQKLISEEDLLRKRREQLKHKLEQLRNSCA

SEQ ID NO: 96827 - protein, 454 aa, Homo sapiens
  Payload ID: 19311
  Gene Name: v-myc avian myelocytomatosis viral oncogene homolog
  ENSP ID: ENSP00000478887
LDFFRVVENQQPPATMPLNVSFTNRNYDLDYDSVQPYFYCDEEENFYQQQQQSELQPPAPSEDIWKKFELLPTPPLSPSRRSGLCSPSYVAVTPFSLRGDNDGGGGSFSTADQLEMVTELLGGDMVNQSFICDPDDETFIKNIIIQDCMWSGFSAAAKLVSEKLASYQAARKDSGSPNPARGHSVCSTSSLYLQDLSAAASECIDPSVVFPYPLNDSSSPKSCASQDSSAFSPSSDSLLSSTESSPQGSPEPLVLHEETPPTTSSDSEEEQEDEEEIDVVSVEKRQAPGKRSESGSPSAGGHSKPPHSPLVLKRCHVSTHQHNYAAPPSTRKDYPAAKRVKLDSVRVLRQISNNRKCTSPRSSDTEENVKRRTHNVLERQRRNELKRSFFALRDQIPELENNEKAPKVVILKKATAYILSVQAEEQKLISEEDLLRKRREQLKHKLEQLRNSCA

SEQ ID NO: 96828 - protein, 454 aa, Homo sapiens; identical to SEQ ID NO: 96827
  Payload ID: 19311
  Gene Name: v-myc avian myelocytomatosis viral oncogene homolog
  ENSP ID: ENSP00000479618

SEQ ID NO: 96829 - protein, 236 aa, Homo sapiens
  Payload ID: 19312
  Gene Name: v-myc avian myelocytomatosis viral oncogene lung carcinoma derived homolog
  Uniprot ID: P12524
  ENSP ID: ENSP00000361902
MCVCAGCRAAPSRRGAGPLQVAGGWSEGADMDYDSYQHYFYDYDCGEDFYRSTAPSEDIWKKFELVPSPPTSPPWGLGPGAGDPAPGIGPPEPWPGGCTGDEAESRGHSKGWGRNYASIIRRDCMWSGFSARERLERAVSDRLAPGAPRGNPPKASAAPDCTPSLEAGNPAPAAPCPLGEPKTQACSGSESPSDSGKDLPEPSKRGPPHGWPKLCPCLRSGIGSSQALGPSPPLFG

SEQ ID NO: 96830 - protein, 364 aa, Homo sapiens
  Payload ID: 19312
  Gene Name: v-myc avian myelocytomatosis viral oncogene lung carcinoma derived homolog
  Uniprot ID: P12524
  ENSP ID: ENSP00000361903
MDYDSYQHYFYDYDCGEDFYRSTAPSEDIWKKFELVPSPPTSPPWGLGPGAGDPAPGIGPPEPWPGGCTGDEAESRGHSKGWGRNYASIIRRDCMWSGFSARERLERAVSDRLAPGAPRGNPPKASAAPDCTPSLEAGNPAPAAPCPLGEPKTQACSGSESPSDSENEEIDVVTVEKRQSLGIRKPVTITVRADPLDPCMKHFHISIHQQQHNYAARFPPESCSQEEASERGPQEEVLERDAAGEKEDEEDEEIVSPPPVESEAAQSCHPKPVSSDTEDVTKRKNHNFLERKRRNDLRSRFLALRDQVPTLASCSKAPKVVILSKALEYLQALVGAEKRMATEKRQLRCRQQQLQKRIAYLTGY

SEQ ID NO: 96831 - protein, 394 aa, Homo sapiens
  Payload ID: 19312
  Gene Name: v-myc avian myelocytomatosis viral oncogene lung carcinoma derived homolog
  Uniprot ID: P12524
  ENSP ID: ENSP00000380494
MCVCAGCRAAPSRRGAGPLQVAGGWSEGADMDYDSYQHYFYDYDCGEDFYRSTAPSEDIWKKFELVPSPPTSPPWGLGPGAGDPAPGIGPPEPWPGGCTGDEAESRGHSKGWGRNYASIIRRDCMWSGFSARERLERAVSDRLAPGAPRGNPPKASAAPDCTPSLEAGNPAPAAPCPLGEPKTQACSGSESPSDSENEEIDVVTVEKRQSLGIRKPVTITVRADPLDPCMKHFHISIHQQQHNYAARFPPESCSQEEASERGPQEEVLERDAAGEKEDEEDEEIVSPPPVESEAAQSCHPKPVSSDTEDVTKRKNHNFLERKRRNDLRSRFLALRDQVPTLASCSKAPKVVILSKALEYLQALVGAEKRMATEKRQLRCRQQQLQKRIAYLTGY

SEQ ID NO: 96832 - protein, 100 aa, Homo sapiens
  Payload ID: 19312
  Gene Name: v-myc avian myelocytomatosis viral oncogene lung carcinoma derived homolog
  ENSP ID: ENSP00000434375
MDYDSYQHYFYDYDCGEDFYRSTAPSEDIWKKFELVPSPPTSPPWGLGPGAGDPAPGIGPPEPWPGGCTGDEAESRGHSKGWGRNYASIIRRDCMWSGFS

SEQ ID NO: 96833 - protein, 464 aa, Homo sapiens
  Payload ID: 19313
  Gene Name: v-myc avian myelocytomatosis viral oncogene neuroblastoma derived homolog
  Uniprot ID: P04198
  ENSP ID: ENSP00000281043
MPSCSTSTMPGMICKNPDLEFDSLQPCFYPDEDDFYFGGPDSTPPGEDIWKKFELLPTPPLSPSRGFAEHSSEPPSWVTEMLLENELWGSPAEEDAFGLGGLGGLTPNPVILQDCMWSGFSAREKLERAVSEKLQHGRGPPTAGSTAQSPGAGAASPAGRGHGGAAGAGRAGAALPAELAHPAAECVDPAVVFPFPVNKREPAPVPAAPASAPAAGPAVASGAGIAAPAGAPGVAPPRPGGRQTSGGDHKALSTSGEDTLSDSDDEDDEEEDEEEEIDVVTVEKRRSSSNTKAVTTFTITVRPKNAALGPGRAQSSELILKRCLPIHQQHNYAAPSPYVESEDAPPQKKIKSEASPRPLKSVIPPKAKSLSPRNSDSEDSERRRNHNILERQRRNDLRSSFLTLRDHVPELVKNEKAAKVVILKKATEYVHSLQAEEHQLLLEKEKLQARQQQLLKKIEHARTC

SEQ ID NO: 96834 - protein, 283 aa, Homo sapiens
  Payload ID: 19314
  Gene Name: voltage-dependent anion channel 1
  Uniprot ID: P21796
  ENSP ID: ENSP00000265333
MAVPPTYADLGKSARDVFTKGYGFGLIKLDLKTKSENGLEFTSSGSANTETTKVTGSLETKYRWTEYGLTFTEKWNTDNTLGTEITVEDQLARGLKLTFDSSFSPNTGKKNAKIKTGYKREHINLGCDMDFDIAGPSIRGALVLGYEGWLAGYQMNFETAKSRVTQSNFAVGYKTDEFQLHTNVNDGTEFGGSIYQKVNKKLETAVNLAWTAGNSNTRFGIAAKYQIDPDACFSAKVNNSSLIGLGYTQTLKPGIKLTLSALLDGKNVNAGGHKLGLGLEFQA

SEQ ID NO: 96835 - protein, 283 aa, Homo sapiens; identical to SEQ ID NO: 96834
  Payload ID: 19314
  Gene Name: voltage-dependent anion channel 1
  Uniprot ID: P21796
  ENSP ID: ENSP00000378484

SEQ ID NO: 96836 - protein, 283 aa, Homo sapiens; identical to SEQ ID NO: 96834
  Payload ID: 19314
  Gene Name: voltage-dependent anion channel 1
  Uniprot ID: P21796
  ENSP ID: ENSP00000378487

SEQ ID NO: 96837 - protein, 183 aa, Homo sapiens
  Payload ID: 19314
  Gene Name: voltage-dependent anion channel 1
  ENSP ID: ENSP00000390129
MAVPPTYADLGKSARDVFTKGYGFGLIKLDLKTKSENGLEFTSSGSANTETTKVTGSLETKYRWTEYGLTFTEKWNTDNTLGTEITVEDQLARGLKLTFDSSFSPNTGKKNAKIKTGYKREHINLGCDMDFDIAGPSIRGALVLGYEGWLAGYQMNFETAKSRVTQSNFAVGYKTDEFQLHTN

SEQ ID NO: 96838 - protein, 282 aa, Homo sapiens
  Payload ID: 19315
  Gene Name: voltage-dependent anion channel 2
  ENSP ID: ENSP00000298468
MATHGQTCARPMCIPPSYADLGKAARDIFNKGFGFGLVKLDVKTKSCSGVEFSTSGSSNTDTGKVTGTLETKYKWCEYGLTFTEKWNTDNTLGTEIAIEDQICQGLKLTFDTTFSPNTGKKSGKIKSSYKRECINLGCDVDFDFAGPAIHGSAVFGYEGWLAGYQMTFDSAKSKLTRNNFAVGYRTGDFQLHTNVNDGTEFGGSIYQKVCEDLDTSVNLAWTSGTNCTRFGIAAKYQLDPTASISAKVNNSSLIGVGYTQTLRPGVKLTLSALVDGKSINAG

SEQ ID NO: 96839 - protein, 194 aa, Homo sapiens
  Payload ID: 19315
  Gene Name: voltage-dependent anion channel 2
  ENSP ID: ENSP00000344876
MATHGQTCARPMCIPPSYADLGKAARDIFNKGFGFGLVKLDVKTKSCSGVEFSTSGSSNTDTGKVTGTLETKYKWCEYGLTFTEKWNTDNTLGTEIAIEDQICQGLKLTFDTTFSPNTGKKSGKIKSSYKRECINLGCDVDFDFAGPAIHGSAVFGYEGWLAGYQMTFDSAKSKLTRNNFAVGYRTGDFQLHTN

SEQ ID NO: 96840 - protein, 309 aa, Homo sapiens
  Payload ID: 19315
  Gene Name: voltage-dependent anion channel 2
  Uniprot ID: P45880
  ENSP ID: ENSP00000361635
MSWCNELRLPALKQHSIGRGLESHITMCIPPSYADLGKAARDIFNKGFGFGLVKLDVKTKSCSGVEFSTSGSSNTDTGKVTGTLETKYKWCEYGLTFTEKWNTDNTLGTEIAIEDQICQGLKLTFDTTFSPNTGKKSGKIKSSYKRECINLGCDVDFDFAGPAIHGSAVFGYEGWLAGYQMTFDSAKSKLTRNNFAVGYRTGDFQLHTNVNDGTEFGGSIYQKVCEDLDTSVNLAWTSGTNCTRFGIAAKYQLDPTASISAKVNNSSLIGVGYTQTLRPGVKLTLSALVDGKSINAGGHKVGLALELEA

SEQ ID NO: 96841 - protein, 294 aa, Homo sapiens
  Payload ID: 19315
  Gene Name: voltage-dependent anion channel 2
  Uniprot ID: P45880
  ENSP ID: ENSP00000361686
MATHGQTCARPMCIPPSYADLGKAARDIFNKGFGFGLVKLDVKTKSCSGVEFSTSGSSNTDTGKVTGTLETKYKWCEYGLTFTEKWNTDNTLGTEIAIEDQICQGLKLTFDTTFSPNTGKKSGKIKSSYKRECINLGCDVDFDFAGPAIHGSAVFGYEGWLAGYQMTFDSAKSKLTRNNFAVGYRTGDFQLHTNVNDGTEFGGSIYQKVCEDLDTSVNLAWTSGTNCTRFGIAAKYQLDPTASISAKVNNSSLIGVGYTQTLRPGVKLTLSALVDGKSINAGGHKVGLALELEA

SEQ ID NO: 96842 - protein, 109 aa, Homo sapiens
  Payload ID: 19315
  Gene Name: voltage-dependent anion channel 2
  ENSP ID: ENSP00000389551
MSWCNELRLPALKQHSIGRGLESHITMCIPPSYADLGKAARDIFNKGFGFGLVKLDVKTKSCSGVEFSTSGSSNTDTGKVTGTLETKYKWCEYGLTFTEKWNTDNTLGT

SEQ ID NO: 96843 - protein, 204 aa, Homo sapiens
  Payload ID: 19315
  Gene Name: voltage-dependent anion channel 2
  ENSP ID: ENSP00000401492
MATHGQTCARPMCIPPSYADLGKAARDIFNKGFGFGLVKLDVKTKSCSGVEFSTSGSSNTDTGKVTGTLETKYKWCEYGLTFTEKWNTDNTLGTEIAIEDQICQGLKLTFDTTFSPNTGKKSGKIKSSYKRECINLGCDVDFDFAGPAIHGSAVFGYEGWLAGYQMTFDSAKSKLTRNNFAVGYRTGDFQLHTNVNDGTEFGGS

SEQ ID NO: 96844 - protein, 294 aa, Homo sapiens; identical to SEQ ID NO: 96841
  Payload ID: 19315
  Gene Name: voltage-dependent anion channel 2
  Uniprot ID: P45880
  ENSP ID: ENSP00000443092

SEQ ID NO: 96845 - protein, 283 aa, Homo sapiens
  Payload ID: 19316
  Gene Name: voltage-dependent anion channel 3
  Uniprot ID: Q9Y277
  ENSP ID: ENSP00000022615
MCNTPTYCDLGKAAKDVFNKGYGFGMVKIDLKTKSCSGVEFSTSGHAYTDTGKASGNLETKYKVCNYGLTFTQKWNTDNTLGTEISWENKLAEGLKLTLDTIFVPNTGKKSGKLKASYKRDCFSVGSNVDIDFSGPTIYGWAVLAFEGWLAGYQMSFDTAKSKLSQNNFALGYKAADFQLHTHVNDGTEFGGSIYQKVNEKIETSINLAWTAGSNNTRFGIAAKYMLDCRTSLSAKVNNASLIGLGYTQTLRPGVKLTLSALIDGKNFSAGGHKVGLGFELEA

SEQ ID NO: 96846 - protein, 134 aa, Homo sapiens
  Payload ID: 19316
  Gene Name: voltage-dependent anion channel 3
  ENSP ID: ENSP00000428029
MCNTPTYCDLGKAAKDVFNKGYGFGMVKIDLKTKSCSGVMEFSTSGHAYTDTGKASGNLETKYKVCNYGLTFTQKWNTDNTLGTEISWENKLAEGLKLTLDTIFVPNTGKKSGKLKASYKRDCFSVGLGFELEA

SEQ ID NO: 96847 - protein, 165 aa, Homo sapiens
  Payload ID: 19316
  Gene Name: voltage-dependent anion channel 3
  ENSP ID: ENSP00000428519
MCNTPTYCDLGKAAKDVFNKGYGFGMVKIDLKTKSCSGVEFSTSGHAYTDTGKASGNLETKYKVCNYGLTFTQKWNTDNTLGTEISWENKLAEGLKLTLDTIFVPNTGKKSGKLKASYKRDCFSVGSNVDIDFSGPTIYGWAVLAFEGWLAGYQMSFDTAKSKLS

SEQ ID NO: 96848 - protein, 284 aa, Homo sapiens
  Payload ID: 19316
  Gene Name: voltage-dependent anion channel 3
  Uniprot ID: Q9Y277
  ENSP ID: ENSP00000428845
MCNTPTYCDLGKAAKDVFNKGYGFGMVKIDLKTKSCSGVMEFSTSGHAYTDTGKASGNLETKYKVCNYGLTFTQKWNTDNTLGTEISWENKLAEGLKLTLDTIFVPNTGKKSGKLKASYKRDCFSVGSNVDIDFSGPTIYGWAVLAFEGWLAGYQMSFDTAKSKLSQNNFALGYKAADFQLHTHVNDGTEFGGSIYQKVNEKIETSINLAWTAGSNNTRFGIAAKYMLDCRTSLSAKVNNASLIGLGYTQTLRPGVKLTLSALIDGKNFSAGGHKVGLGFELEA

SEQ ID NO: 96849 - protein, 108 aa, Homo sapiens
  Payload ID: 19316
  Gene Name: voltage-dependent anion channel 3
  ENSP ID: ENSP00000428977
MSSTKDMEFSTSGHAYTDTGKASGNLETKYKVCNYGLTFTQKWNTDNTLGTEISWENKLAEGLKLTLDTIFVPNTGKKSGKLKASYKRDCFSVGSNVDIDFSGPTIYG

SEQ ID NO: 96850 - protein, 158 aa, Homo sapiens
  Payload ID: 19316
  Gene Name: voltage-dependent anion channel 3
  ENSP ID: ENSP00000429006
MCNTPTYCDLGKAAKDVFNKGYGFGMVKIDLKTKSCSGVEFSTSGHAYTDTGKASGNLETKYKVCNYGLTFTQKWNTDNTLGTEISWENKLAEGLKLTLDTIFVPNTGKKSGKLKASYKRDCFSVGSNVDIDFSGPTIYGWAVLAFEGWLAGYQMSFD

SEQ ID NO: 96851 - protein, 57 aa, Homo sapiens
  Payload ID: 19316
  Gene Name: voltage-dependent anion channel 3
  ENSP ID: ENSP00000430373
MCNTPTYCDLGKAAKDVFNKGYGFGMVKIDLKTKSCSGVLCGNIHSDGIFYFWSCLH

SEQ ID NO: 96852 - protein, 100 aa, Homo sapiens
  Payload ID: 19316
  Gene Name: voltage-dependent anion channel 3
  ENSP ID: ENSP00000430908
MCNTPTYCDLGKAAKDVFNKGYGFGMVKIDLKTKSCSGVEFSTSGHAYTDTGKASGNLETKYKVCNYGLTFTQKWNTDNTLGTEISWENKKEEWEIEGLL

SEQ ID NO: 96853 - protein, 353 aa, Homo sapiens
  Payload ID: 19317
  Gene Name: vomeronasal 1 receptor 1
  Uniprot ID: Q9GZP7
  ENSP ID: ENSP00000322339
MVGDTLKLLSPLMTRYFFLLFYSTDSSDLNENQHPLDFDEMAFGKVKSGISFLIQTGVGILGNSFLLCFYNLILFTGHKLRPTDLILSQLALANSMVLFFKGIPQTMAAFGLKYLLNDTGCKFVFYYHRVGTRVSLSTICLLNGFQAIKLNPSICRWMEIKIRSPRFIDFCCLLCWAPHVLMNASVLLLVNGPLNSKNSSAKNNYGYCSYKASKRFSSLHAVLYFSPDFMSLGFMVWASGSMVFFLYRHKQQVQHNHSNRLSCRPSQEARATHTIMVLVSSFFVFYSVHSFLTIWTTVVANPGQWIVTNSVLVASCFPARSPFVLIMSDTHISQFCFACRTRKTLFPNLVVMP

SEQ ID NO: 96854 - protein, 395 aa, Homo sapiens
  Payload ID: 19318
  Gene Name: vomeronasal 1 receptor 2
  Uniprot ID: Q8NFZ6
  ENSP ID: ENSP00000351244
MTHTLYPTPFALYPINISAAWHLGPLPVSCFVSNKYQCSLAFGATTGLRVLVVVVPQTQLSFLSSLCLVSLFLHSLVSAHGEKPTKPVGLDPTLFQVVVGILGNFSLLYYYMFLYFRGYKPRSTDLILRHLTVADSLVILSKRIPETMATFGLKHFDNYFGCKFLLYAHRVGRGVSIGSTCLLSVFQVITINPRNSRWAEMKVKAPTYIGLSNILCWAFHMLVNAIFPIYTTGKWSNNNITKKGDLGYCSAPLSDEVTKSVYAALTSFHDVLCLGLMLWASSSIVLVLYRHKQQVQHICRNNLYPNSSPGNRAIQSILALVSTFALCYALSFITYVYLALFDNSSWWLVNTAALIIACFPTISPFVLMCRDPSRSRLCSICCRRNRRFFHDFRKM

SEQ ID NO: 96855 - protein, 301 aa, Homo sapiens
  Payload ID: 19319
  Gene Name: vomeronasal 1 receptor 4
  Uniprot ID: Q7Z5H5
  ENSP ID: ENSP00000310856
MASRYVAVGMILSQTVVGVLGSFSVLLHYLSFYCTGCRLRSTDLIVKHLIVANFLALRCKGVPQTMAAFGVRYFLNALGCKLVFYLHRVGRGVSIGTTCLLSVFQVITVSSRKSRWAKLKEKAPKHVGFSVLLCWIVCMLVNIIFPMYVTGKWNYTNITVNEDLGYCSGGGNNKIAQTLRAMLLSFPDVLCLGLMLWVSSSMVCILHRHKQRVQHIDRSNLSPRASPENRATQSILILVSTFVSSYTLSCLFQVCMALLDNPNSLLVNTSALMSVCFPTLSPFVLMSCDPSVYRFCFAWKR

SEQ ID NO: 96856 - protein, 197 aa, Homo sapiens
  Payload ID: 19320
  Gene Name: von Hippel-Lindau binding protein 1
  Uniprot ID: P61758
  ENSP ID: ENSP00000286428
MAAVKDSCGKGEMATGNGRRLHLGIPEAVFVEDVDSFMKQPGNETADTVLKKLDEQYQKYKFMELNLAQKKRRLKGQIPEIKQTLEILKYMQKKKESTNSMETRFLLADNLYCKASVPPTDKVCLWLGANVMLEYDIDEAQALLEKNLSTATKNLDSLEEDLDFLRDQFTTTEVNMARVYNWDVKRRNKDDSTKNKA

SEQ ID NO: 96857 - protein, 192 aa, Homo sapiens
  Payload ID: 19320
  Gene Name: von Hippel-Lindau binding protein 1
  ENSP ID: ENSP00000438694
MAPQPMIHTQQGLRTSSPSTPSPEHQEDVDSFMKQPGNETADTVLKKLDEQYQKYKFMELNLAQKKRRLKGQIPEIKQTLEILKYMQKKKESTNSMETRFLLADNLYCKASVPPTDKVCLWLGANVMLEYDIDEAQALLEKNLSTATKNLDSLEEDLDFLRDQFTTTEVNMARVYNWDVKRRNKDDSTKNKA

SEQ ID NO: 96858 - protein, 192 aa, Homo sapiens; identical to SEQ ID NO: 96857
  Payload ID: 19320
  Gene Name: von Hippel-Lindau binding protein 1
  ENSP ID: ENSP00000486053

SEQ ID NO: 96859 - protein, 213 aa, Homo sapiens
  Payload ID: 19321
  Gene Name: von Hippel-Lindau tumor suppressor, E3 ubiquitin protein ligase
  Uniprot ID: P40337
  ENSP ID: ENSP00000256474
MPRRAENWDEAEVGAEEAGVEEYGPEEDGGEESGAEESGPEESGPEELGAEEEMEAGRPRPVLRSVNSREPSQVIFCNRSPRVVLPVWLNFDGEPQPYPTLPPGTGRRIHSYRGHLWLFRDAGTHDGLLVNQTELFVPSLNVDGQPIFANITLPVYTLKERCLQVVRSLVKPENYRRLDIVRSLYEDLEDHPNVQKDLERLTQERIAHQRMGD

SEQ ID NO: 96860 - protein, 172 aa, Homo sapiens
  Payload ID: 19321
  Gene Name: von Hippel-Lindau tumor suppressor, E3 ubiquitin protein ligase
  Uniprot ID: P40337
  ENSP ID: ENSP00000344757
MPRRAENWDEAEVGAEEAGVEEYGPEEDGGEESGAEESGPEESGPEELGAEEEMEAGRPRPVLRSVNSREPSQVIFCNRSPRVVLPVWLNFDGEPQPYPTLPPGTGRRIHSYRVYTLKERCLQVVRSLVKPENYRRLDIVRSLYEDLEDHPNVQKDLERLTQERIAHQRMGD

SEQ ID NO: 96861 - protein, 139 aa, Homo sapiens
  Payload ID: 19322
  Gene Name: von Hippel-Lindau tumor suppressor-like
  Uniprot ID: Q6RSH7
  ENSP ID: ENSP00000464258
MPWRAGNGVGLEAQAGTQEAGPEEYCQEELGAEEEMAARAAWPVLRSVNSRELSRIIICNHSPRIVLPVWLNYYGKLLPYLTLLPGRDFRIHNFRSHPWLFRDARTHDKLLVNQTELFVPSSNVNGQPVFANITLQCIP

SEQ ID NO: 96862 - protein, 2813 aa, Homo sapiens
  Payload ID: 19323
  Gene Name: von Willebrand factor
  Uniprot ID: P04275
  ENSP ID: ENSP00000261405
MIPARFAGVLLALALILPGTLCAEGTRGRSSTARCSLFGSDFVNTFDGSMYSFAGYCSYLLAGGCQKRSFSIIGDFQNGKRVSLSVYLGEFFDIHLFVNGTVTQGDQRVSMPYASKGLYLETEAGYYKLSGEAYGFVARIDGSGNFQVLLSDRYFNKTCGLCGNFNIFAEDDFMTQEGTLTSDPYDFANSWALSSGEQWCERASPPSSSCNISSGEMQKGLWEQCQLLKSTSVFARCHPLVDPEPFVALCEKTLCECAGGLECACPALLEYARTCAQEGMVLYGWTDHSACSPVCPAGMEYRQCVSPCARTCQSLHINEMCQERCVDGCSCPEGQLLDEGLCVESTECPCVHSGKRYPPGTSLSRDCNTCICRNSQWICSNEECPGECLVTGQSHFKSFDNRYFTFSGICQYLLARDCQDHSFSIVIETVQCADDRDAVCTRSVTVRLPGLHNSLVKLKHGAGVAMDGQDVQLPLLKGDLRIQHTVTASVRLSYGEDLQMDWDGRGRLLVKLSPVYAGKTCGLCGNYNGNQGDDFLTPSGLAEPRVEDFGNAWKLHGDCQDLQKQHSDPCALNPRMTRFSEEACAVLTSPTFEACHRAVSPLPYLRNCRYDVCSCSDGRECLCGALASYAAACAGRGVRVAWREPGRCELNCPKGQVYLQCGTPCNLTCRSLSYPDEECNEACLEGCFCPPGLYMDERGDCVPKAQCPCYYDGEIFQPEDIFSDHHTMCYCEDGFMHCTMSGVPGSLLPDAVLSSPLSHRSKRSLSCRPPMVKLVCPADNLRAEGLECTKTCQNYDLECMSMGCVSGCLCPPGMVRHENRCVALERCPCFHQGKEYAPGETVKIGCNTCVCQDRKWNCTDHVCDATCSTIGMAHYLTFDGLKYLFPGECQYVLVQDYCGSNPGTFRILVGNKGCSHPSVKCKKRVTILVEGGEIELFDGEVNVKRPMKDETHFEVVESGRYIILLLGKALSVVWDRHLSISVVLKQTYQEKVCGLCGNFDGIQNNDLTSSNLQVEEDPVDFGNSWKVSSQCADTRKVPLDSSPATCHNNIMKQTMVDSSCRILTSDVFQDCNKLVDPEPYLDVCIYDTCSCESIGDCACFCDTIAAYAHVCAQHGKVVTWRTATLCPQSCEERNLRENGYECEWRYNSCAPACQVTCQHPEPLACPVQCVEGCHAHCPPGKILDELLQTCVDPEDCPVCEVAGRRFASGKKVTLNPSDPEHCQICHCDVVNLTCEACQEPGGLVVPPTDAPVSPTTLYVEDISEPPLHDFYCSRLLDLVFLLDGSSRLSEAEFEVLKAFVVDMMERLRISQKWVRVAVVEYHDGSHAYIGLKDRKRPSELRRIASQVKYAGSQVASTSEVLKYTLFQIFSKIDRPEASRITLLLMASQEPQRMSRNFVRYVQGLKKKKVIVIPVGIGPHANLKQIRLIEKQAPENKAFVLSSVDELEQQRDEIVSYLCDLAPEAPPPTLPPDMAQVTVGPGLLGVSTLGPKRNSMVLDVAFVLEGSDKIGEADFNRSKEFMEEVIQRMDVGQDSIHVTVLQYSYMVTVEYPFSEAQSKGDILQRVREIRYQGGNRTNTGLALRYLSDHSFLVSQGDREQAPNLVYMVTGNPASDEIKRLPGDIQVVPIGVGPNANVQELERIGWPNAPILIQDFETLPREAPDLVLQRCCSGEGLQIPTLSPAPDCSQPLDVILLLDGSSSFPASYFDEMKSFAKAFISKANIGPRLTQVSVLQYGSITTIDVPWNVVPEKAHLLSLVDVMQREGGPSQIGDALGFAVRYLTSEMHGARPGASKAVVILVTDVSVDSVDAAADAARSNRVTVFPIGIGDRYDAAQLRILAGPAGDSNVVKLQRIEDLPTMVTLGNSFLHKLCSGFVRICMDEDGNEKRPGDVWTLPDQCHTVTCQPDGQTLLKSHRVNCDRGLRPSCPNSQSPVKVEETCGCRWTCPCVCTGSSTRHIVTFDGQNFKLTGSCSYVLFQNKEQDLEVILHNGACSPGARQGCMKSIEVKHSALSVELHSDMEVTVNGRLVSVPYVGGNMEVNVYGAIMHEVRFNHLGHIFTFTPQNNEFQLQLSPKTFASKTYGLCGICDENGANDFMLRDGTVTTDWKTLVQEWTVQRPGQTCQPILEEQCLVPDSSHCQVLLLPLFAECHKVLAPATFYAICQQDSCHQEQVCEVIASYAHLCRTNGVCVDWRTPDFCAMSCPPSLVYNHCEHGCPRHCDGNVSSCGDHPSEGCFCPPDKVMLEGSCVPEEACTQCIGEDGVQHQFLEAWVPDHQPCQICTCLSGRKVNCTTQPCPTAKAPTCGLCEVARLRQNADQCCPEYECVCDPVSCDLPPVPHCERGLQPTLTNPGECRPNFTCACRKEECKRVSPPSCPPHRLPTLRKTQCCDEYECACNCVNSTVSCPLGYLASTATNDCGCTTTTCLPDKVCVHRSTIYPVGQFWEEGCDVCTCTDMEDAVMGLRVAQCSQKPCEDSCRSGFTYVLHEGECCGRCLPSACEVVTGSPRGDSQSSWKSVGSQWASPENPCLINECVRVKEEVFIQQRNVSCPQLEVPVCPSGFQLSCKTSACCPSCRCERMEACMLNGTVIGPGKTVMIDVCTTCRCMVQVGVISGFKLECRKTTCNPCPLGYKEENNTGECCGRCLPTACTIQLRGGQIMTLKRDETLQDGCDTHFCKVNERGEYFWEKRVTGCPPFDEHKCLAEGGKIMKIPGTCCDTCEEPECNDITARLQYVKVGSCKSEVEVDIHYCQGKCASKAMYSIDINDVQDQCSCCSPTRTEPMQVALHCTNGSVVYHEVLNAMECKCSPRKCSK

SEQ ID NO: 96863 - protein, 60 aa, Homo sapiens
  Payload ID: 19323
  Gene Name: von Willebrand factor
  ENSP ID: ENSP00000459134
MIPARFAGVLLALALILPETRCLQMPSPVGELRSIKVAQNCPILWGHRMRRKESKTWMDY

SEQ ID NO: 96864 - protein, 60 aa, Homo sapiens; identical to SEQ ID NO: 96863
  Payload ID: 19323
  Gene Name: von Willebrand factor
  ENSP ID: ENSP00000461331

SEQ ID NO: 96865 - protein, 445 aa, Homo sapiens
  Payload ID: 19324
  Gene Name: von Willebrand factor A domain containing 1
  Uniprot ID: Q6PCB0
  ENSP ID: ENSP00000417185
MLPWTALGLALSLRLALARSGAERGPPASAPRGDLMFLLDSSASVSHYEFSRVREFVGQLVAPLPLGTGALRASLVHVGSRPYTEFPFGQHSSGEAAQDAVRASAQRMGDTHTGLALVYAKEQLFAEASGARPGVPKVLVWVTDGGSSDPVGPPMQELKDLGVTVFIVSTGRGNFLELSAAASAPAEKHLHFVDVDDLHIIVQELRGSILDAMRPQQLHATEITSSGFRLAWPPLLTADSGYYVLELVPSAQPGAARRQQLPGNATDWIWAGLDPDTDYDVALVPESNVRLLRPQILRVRTRPGEAGPGASGPESGAGPAPTQLAALPAPEEAGPERIVISHARPRSLRVSWAPALGSAAALGYHVQFGPLRGGEAQRVEVPAGRNCTTLQGLAPGTAYLVTVTAAFRSGRESALSAKACTPDGPRPRPRPVPRAPTPGTASREP

SEQ ID NO: 96866 - protein, 64 aa, Homo sapiens
  Payload ID: 19324
  Gene Name: von Willebrand factor A domain containing 1
  Uniprot ID: Q6PCB0
  ENSP ID: ENSP00000423404
MLPWTALGLALSLRLALARSGAERGAQGPGRHRVHCQHRPRQLPGAVSRCLSPCREAPALCGRG

SEQ ID NO: 96867 - protein, 167 aa, Homo sapiens
  Payload ID: 19324
  Gene Name: von Willebrand factor A domain containing 1
  ENSP ID: ENSP00000463643
MFLLDSSASVSHYEFSRVREFVGQLVAPLPLGTGALRASLVHVGSRPYTEFPFGQHSSGEAAQDAVRASAQRMGDTHTGLALVYAKEQLFAEASGARPGVPKVLVWVTDGGSSDPVGPPMQELKDLGVTVFIVSTGRGNFLELSAAASAPAEKHLHFVDVDDLHIIV

SEQ ID NO: 96868 - protein, 148 aa, Homo sapiens
  Payload ID: 19324
  Gene Name: von Willebrand factor A domain containing 1
  ENSP ID: ENSP00000464343
MLPWTALGLALSLRLALARSGAERGPLGEGKHPLKESWGPGGPCLAVGLSGGPTPEAEHSSFPPGPPASAPRGDLMFLLDSSASVSHYEFSRVREFVGQLVAPLPLGTGALRASLVHVGSRPYTEFPFGQHSSGEAAQDAVRASAQRM

SEQ ID NO: 96869 - protein, 755 aa, Homo sapiens
  Payload ID: 19325
  Gene Name: von Willebrand factor A domain containing 2
  Uniprot ID: Q5GFL6
  ENSP ID: ENSP00000376708
MPPFLLLEAVCVFLFSRVPPSLPLQEVHVSKETIGKISAASKMMWCSAAVDIMFLLDGSNSVGKGSFERSKHFAITVCDGLDISPERVRVGAFQFSSTPHLEFPLDSFSTQQEVKARIKRMVFKGGRTETELALKYLLHRGLPGGRNASVPQILIIVTDGKSQGDVALPSKQLKERGVTVFAVGVRFPRWEELHALASEPRGQHVLLAEQVEDATNGLFSTLSSSAICSSATPDCRVEAHPCEHRTLEMVREFAGNAPCWRGSRRTLAVLAAHCPFYSWKRVFLTHPATCYRTTCPGPCDSQPCQNGGTCVPEGLDGYQCLCPLAFGGEANCALKLSLECRVDLLFLLDSSAGTTLDGFLRAKVFVKRFVRAVLSEDSRARVGVATYSRELLVAVPVGEYQDVPDLVWSLDGIPFRGGPTLTGSALRQAAERGFGSATRTGQDRPRRVVVLLTESHSEDEVAGPARHARARELLLLGVGSEAVRAELEEITGSPKHVMVYSDPQDLFNQIPELQGKLCSRQRPGCRTQALDLVFMLDTSASVGPENFAQMQSFVRSCALQFEVNPDVTQVGLVVYGSQVQTAFGLDTKPTRAAMLRAISQAPYLGGVGSAGTALLHIYDKVMTVQRGARPGVPKAVVVLTGGRGAEDAAVPAQKLRNNGISVLVVGVGPVLSEGLRRLAGPRDSLIHVAAYADLRYHQDVLIEWLCGEAKQPVNLCKPSPCMNEGSCVLQNGSYRCKCRDGWEGPHCENRFLRRP

SEQ ID NO: 96870 - protein, 421 aa, Homo sapiens
  Payload ID: 19325
  Gene Name: von Willebrand factor A domain containing 2
  Uniprot ID: Q5GFL6
  ENSP ID: ENSP00000473752
MEAHVFQKDWTATSASARWPLEGRLTVVALKLSLECRVDLLFLLDSSAGTTLDGFLRAKVFVKRFVRAVLSEDSRARVGVATYSRELLVAVPVGEYQDVPDLVWSLDGIPFRGGPTLTGSALRQAAERGFGSATRTGQDRPRRVVVLLTESHSEDEVAGPARHARARELLLLGVGSEAVRAELEEITGSPKHVMVYSDPQDLFNQIPELQGKLCSRQRPGCRTQALDLVFMLDTSASVGPENFAQMQSFVRSCALQFEVNPDVTQVGLVVYGSQVQTAFGLDTKPTRAAMLRAISQAPYLGGVGSAGTALLHIYDKVMTVQRGARPGVPKAVVVLTGGRGAEDAAVPAQKLRNNGISVLVVGVGPVLSEGLRRLAGPRDSLIHVAAYADLRYHQDVLIEWLCGGEWGNPHPQGCPHGRPSA

SEQ ID NO: 96871 - protein, 429 aa, Homo sapiens
  Payload ID: 19326
  Gene Name: von Willebrand factor A domain containing 3A
  ENSP ID: ENSP00000299840
  MOD_RES (1)..(1): Any amino acid
XHDAPLTIEFPNLDKTSAEWLKVNGLKAKKLSLYQVLAPNAFSPVEEFVPILQKTVSSTIHEKAMIQFEWHDGTVKNIHVDPPFLYKYQQQLSRAMRMYERRIEWLSLASRRIWGTVCEKRVVVLLDISATNSMYIIHIQHSLRLLLEEQLSNKDCFNLIAFGSTIESWRPEMVPVSHNNLQSAWRWALNLRCRGSRNVLSALRKAVEVDFKDKDKHQSQGIYLFTGGIPDQDMPTLSAYMAEACGGCDLQLNVCLFYVGEPKMDTTPPARYASHTDTAAAYKEVTRAAGGRFHWFGDTGIYESDDINSIMSEMEKALNYSQKCAFLMASLKNHSGKVLGSSALPKEKPKTLQLRSQPKKLCPPRPTVPLGARMSIKDDPDREKSPPLKSLKWRPLSSRVGISPGMAEWLRAEFWSQQDQLRPSQRKKG

SEQ ID NO: 96872 - protein, 1184 aa, Homo sapiens
  Payload ID: 19326
  Gene Name: von Willebrand factor A domain containing 3A
  Uniprot ID: A6NCI4
  ENSP ID: ENSP00000374049
MKKYRKISIGCFAMATQTSHVFHGQENMFLENHCIRRNTGRDSKKPLKQKNMNGLGQNSDNGLLVTHVNQTQDLLRLQGSETQSSDWEDSEDWLSAHSLKCQKLTLADLISQGTEVLEEGTNVVQKICFSTQIIRHFESKLSDTIEVYQERIQWLTENSKKAFGLIKGARVSILIDVSAISSGPQKEEFQKDLMSLIDEQLSHKEKLFVLSFGTNAGSLWPDPMEVSASTLQELKLWVKTLQPDGGSNLLQALKKIFTLKGLDSLVAIMRSCPDQPSEILSDYIQQSTMGRDLIIHFITYRCDDQMPPAVLKNLAEAVRGYYHCYSPKMEHYTSRDMDELLAEIQKAQSLLSHVQALQHSSPCEALTCTMEEISTEITNGPLISLLPKPPKHDAPLTIEFPNLDKTSAEWLKVNGLKAKKLSLYQVLAPNAFSPVEEFVPILQKTVSSTIHEKAMIQFEWHDGTVKNIHVDPPFLYKYQQQLSRAMRMYERRIEWLSLASRRIWGTVCEKRVVVLLDISATNSMYIIHIQHSLRLLLEEQLSNKDCFNLIAFGSTIESWRPEMVPVSHNNLQSAWRWALNLRCRGSRNVLSALRKAVEVDFKDKDKHQSQGIYLFTGGIPDQDMPTLSAYMAEACGGCDLQLNVCLFYVGEPKMDTTPPARYASHTDTAAAYKEVTRAAGGRFHWFGDTGIYESDDINSIMSEMEKALNYSQKCAFLMASLKNHSGKVLGSSALPKEKPKTLQLRSQPKKLCPPRPTVPLGARMSIKDDPDREKSPPLKSLKWRPLSSRVGISPAAAQPTKEGMMELRRKTKSREAETSLLLFYTEKGNDVGSVYKKYPQGRGLRRTSSSIDLPRKDTVCSSQEWVAKYGLKKLKLEISRCMGPNCTHQKSGQRSASAKHCSIFPSVEIHGVVRHIQWTPREMEVYIRHLEKVLRRYVQRLQWLLSGSRRLFGTVLESKVCILLDTSGSMGPYLQQVKTELVLLIWEQLRKCCDSFNLLSFAESFQSWQDTLVETTDAACHEAMQWVTHLQAQGSTSILQALLKAFSFHDLEGLYLLTDGKPDTSCSLVLNEVQKLREKRDVKVHTISLNCSDRAAVEFLRKLASFTGGRYHCPVGEDTLSKIHSLLTKGFINEKDPTLPPFEGDDLRILAQEITKARSFLWQAQSFRSQLQKKNDAEPKVTLS

SEQ ID NO: 96873 - protein, 286 aa, Homo sapiens
  Payload ID: 19326
  Gene Name: von Willebrand factor A domain containing 3A
  Uniprot ID: A6NCI4
  ENSP ID: ENSP00000456513
MEVYIRHLEKVLRRYVQRLQWLLSGPVLCSRTWYRQSMDRGVMMTAASGSRRLFGTVLESKVCILLDTSGSMGPYLQQVKTELVLLIWEQLRKCCDSFNLLSFAESFQSWQDTLVETTDAACHEAMQWVTHLQAQGSTSILQALLKAFSFHDLEGLYLLTDGKPDTSCSLVLNEVQKLREKRDVKVHTISLNCSDRAAVEFLRKLASFTGGRYHCPVGEDTLSKIHSLLTKGFINEKDPTLPPFEGDDLRILAQEITKARSFLWQAQSFRSQLQKKNDAEPKVTLS

SEQ ID NO: 96874 - protein, 147 aa, Homo sapiens
  Payload ID: 19326
  Gene Name: von Willebrand factor A domain containing 3A
  ENSP ID: ENSP00000457167
IPDQDMPTLSAYMAEACGGCDLQLNVCLFYVGEPKMDTTPPARYASHTDTAAAYKEVTRAAGGRFHWFGDTGIYESDDINSIMSEMEKALNYSQKCAFLMASLKNHSGKVLGSSALPKEKPKTLQLRSQPKKLCPPRPTVPLGARMV

SEQ ID NO: 96875 - protein, 31 aa, Homo sapiens
  Payload ID: 19326
  Gene Name: von Willebrand factor A domain containing 3A
  ENSP ID: ENSP00000457368
MSLIDEQLSHKEKLFVLSFGTNAGSLWPDPM

SEQ ID NO: 96876 - protein, 746 aa, Homo sapiens
  Payload ID: 19326
  Gene Name: von Willebrand factor A domain containing 3A
  ENSP ID: ENSP00000457770
MKKYRKISIGCFAMATQTSHVFHGQENMFLENHCIRRNTGRDSKKPLKQKNMNGLGQNSDNGLLVTHVNQTQDLLRLQGSETQSSDWEDSEDWLSAHSLKCQKLTLADLISQGTEVLEEGTNVVQKICFSTQIIRHFESKLSDTIEVYQERIQWLTENSKKAFGLIKGARVSILIDVSAISSGPQKEEFQKDLMSLIDEQLSHKEKLFVLSFGTNAGSLWPDPMEVSASTLQELKLWVKTLQPDGGSNLLQALKKIFTLKGLDSLVAIMRSCPDQPSEILSDYIQQSTMGRDLIIHFITYRCDDQMPPAVLKNLAEAVRGYYHCYSPKMEHYTSRDMDELLAEIQKAQSLLSHVQALQHSSPCEALTCTMEEISTEITNGPLISLLPKPPKHDAPLTIEFPNLDKTSAEWLKVNGLKAKKLSLYQVLAPNAFSPVEEFVPILQKTVSSTIHEKAMIQFEWHDGTVKNIHVDPPFLYKYQWNDYTAWIPRDLTHHSLKPTQQQLSRAMRMYERRIEWLSLASRRIWGTVCEKRVVVLLDISATNSMYIIHIQHSLRLLLEEQLSNKDCFNLIAFGSTIESWRPEMVPVSHNNLQSAWRWALNLRCRGSRNVLSALRKAVEVDFKDKDKHQSQGIYLFTGGIPDQDMPTLSAYMAEACGGCDLQLNVCLFYVGEPKMDTTPPARYASHTDTAAAYKEVTRAAGGRFHWFGDTGIYESDDINSIMSEMEKALNYSQKCAFLMASLKNHS

SEQ ID NO: 96877 - protein, 624 aa, Homo sapiens
  Payload ID: 19327
  Gene Name: von Willebrand factor A domain containing 3B
  Uniprot ID: Q502W6
  ENSP ID: ENSP00000388158
MEKSGPSSTISEQQLQRQEGWINTKTDLAEQSLISSEKWLQLHGLKSNKLTLKQILSQIGFPHCEDYVASLGRPVASRYADGLFPQLYRAEDGRVYNLTAKSELIYQFVEHLTQAVESYKQRMDWLTSKSRQIFGVILEQCVTIVLDFGGILEGELDLCREALTMVLQEQVAHITEFNIIRVSQEPVKWQENATPVTEQSIATAISWVEKLTVELTVSEAGRLDALLEAGRDKTIESIYYFVVGDVPEESKELLLQRALEIPCPVYTVSFNARGEGTIAFLKDLSAKTHSRFHAFAERTECVEFPAFSTKDGDNVMTWNSRKLKGKLPPGAGVREDVFLVWQEMEEACSTLAQIQRLVAEPPKPDVATVDCESETTSVEIASNPEDTWDSKTWLQKYGLKAQKLSLYDVLADCSFRHADGVVDIKAKPENESVQTSAETNKKTVHAKYCSRFVHAPWKDGSLVHVNITKEKCKWYSERIHTALARIRRRIKWLQDGSQSLFGRLHNDCIYILIDTSHSMKSKLDLVKDKIIQFIQEQLKYKSKFNFVKFDGQAVAWREQLAEVNEDNLEQAQSWIRDIKIGSSTNTLSALKTAFADKETQAIYLLTDGRPDQGTSSHLLLTAAV

SEQ ID NO: 96878 - protein, 124 aa, Homo sapiens
  Payload ID: 19327
  Gene Name: von Willebrand factor A domain containing 3B
  ENSP ID: ENSP00000391241
MEKSGPSSTISEQQLQRQEGWINTKTDLAEQSLISSEKWLQLHGLKSNKLTLKQILSQIGFPHCEDYVASLGRPVASRYADGLFPQLYRAEDGRVYNGFSRACEVAGKCYSCDRTVHSYCHQLG

SEQ ID NO: 96879 - protein, 101 aa, Homo sapiens
  Payload ID: 19327
  Gene Name: von Willebrand factor A domain containing 3B
  ENSP ID: ENSP00000396734
MEKSGPSSTISEQQLQRQEGWINTKTDLAEQSLISSEKWLQLHGLKSNKLTLKQILSQIGFPHCEDYVASLGRPVASRYADGLFPQLYRAEDGRVYNLNQN

SEQ ID NO: 96880 - protein, 303 aa, Homo sapiens
  Payload ID: 19327
  Gene Name: von Willebrand factor A domain containing 3B
  ENSP ID: ENSP00000396866
MEKSGPSSTISEQQLQRQEGWINTKTDLAEQSLISSEKWLQLHGLKSNKLTLKQILSQIGFPHCEDYVASLGRPVASRYADGLFPQLYRAEDGRVYNLTAKSELIYQFVEHLTQAVESYKQRMDWLTSKSRQIFGVILEQCVTIVLDFGGILEGELDLCREALTMVLQEQVAHITEFNIIRVSQEPVKWQENATPVTEQSIATAISWVEKLTVELTVSEAGRLDALLEAGRDKTELESERTCFSFGKRWRKPAARWPRSRGWWPSLPSPTWPLWTASQKQPLLRLHRIQKTPGTLRHGCRNMA

SEQ ID NO: 96881 - protein, 423 aa, Homo sapiens
  Payload ID: 19327
  Gene Name: von Willebrand factor A domain containing 3B
  ENSP ID: ENSP00000411168
MEKSGPSSTISEQQLQRQEGWINTKTDLAEQSLISSEKWLQLHGLKSNKLTLKQILSQIGFPHCEDYVASLGRPVASRYADGLFPQLYRAEDGRVYNLTAKSELIYQFVEHLTQAVESYKQRMDWLTSKSRQIFGVILEQCVTIVLDFGGILEGELDLCREALTMVLQEQVAHITEFNIIRVSQEPVKWQENATPVTEQSIATAISWVEKLTVELTVSEAGRLDALLEAGRDKTIESIYYFVVGDVPEESKELLLQRALEIPCPVYTVSFNARGEGTIAFLKDLSAKTHSRFHAFAERTECVEFPAFSTKDGDNVMTWNSRKLKGKLPPGAGVREDVFLVWQEMEEACSTLAQIQRLVAEPPKPDVATVDCGAVPSFESSGKIVFCLCDMLACPAQSQKQPLLRLHRIQKTPGTLRHGCRNMA

SEQ ID NO: 96882 - protein, 1294 aa, Homo sapiens
  Payload ID: 19327
  Gene Name: von Willebrand factor A domain containing 3B
  Uniprot ID: Q502W6
  ENSP ID: ENSP00000417955
MEKSGPSSTISEQQLQRQEGWINTKTDLAEQSLISSEKWLQLHGLKSNKLTLKQILSQIGFPHCEDYVASLGRPVASRYADGLFPQLYRAEDGRVYNLTAKSELIYQFVEHLTQAVESYKQRMDWLTSKSRQIFGVILEQCVTIVLDFGGILEGELDLCREALTMVLQEQVAHITEFNIIRVSQEPVKWQENATPVTEQSIATAISWVEKLTVELTVSEAGRLDALLEAGRDKTIESIYYFVVGDVPEESKELLLQRALEIPCPVYTVSFNARGEGTIAFLKDLSAKTHSRFHAFAERTECVEFPAFSTKDGDNVMTWNSRKLKGKLPPGAGVREDVFLVWQEMEEACSTLAQIQRLVAEPPKPDVATVDCESETTSVEIASNPEDTWDSKTWLQKYGLKAQKLSLYDVLADCSFRHADGVVDIKAKPENESVQTSAETNKKTVHAKYCSRFVHAPWKDGSLVHVNITKEKCKWYSERIHTALARIRRRIKWLQDGSQSLFGRLHNDCIYILIDTSHSMKSKLDLVKDKIIQFIQEQLKYKSKFNFVKFDGQAVAWREQLAEVNEDNLEQAQSWIRDIKIGSSTNTLSALKTAFADKETQAIYLLTDGRPDQPPETVIDQVKRFQEIPIYTISFNYNDEIANRFLKEVAALTGGEFHFYNFGCKDPTPPEAVQNEDLTLLVKEMEQGHSDLEKMQDLYSESLIMDWWYNAEKDGDSKHQKEICSMISTPEKCAKPQSDVDSTQTSSLNMLKGPWGLSDQKVQKKKVLHAESTKTSLLRSQMSSLRSSACSERKDGLSNASSRRTALSDKEMSILLAEEWLDDKSSEKVTREGSQVYDHDSSDVSSENWLKTYGLVAKKLTLMDALSVAAVPHSSTYVPVLDKHVVSKVFDEVFPLAHVCNDTNKMTLINPQGAKLNIYKRKVEQAIQSYEKRLNKIVWRALSQEEKEKLDANKPIQYLENKTVLNQALERLNWPISLKELSMLESEILAGKMYIQQAMELQEAAKKNYANKAPGEQQKLQGNPTKKTKSKRPDPLKGQKVIARCDENGFYFPGVVKKCVSRTQALVGFSYGDTKVVSTSFITPVGGAMPCPLLQVGDYVFAKIVIPKGFDFYVPAIVIALPNKHVATEKFYTVLKCNNRREFCPRSALIKISQNKYALSCSHIKSPPIPEDPEVEDVEARNSAFLFWPLKEADTQDSREPRREKPRRKKRPAKQPLQQAAPSDSDGSSHGISSHGSCQGTHPEPRTAHLHFPAAGRLGLSSHAIIATPPPRAALPCTLQATHSSKGLRSVPETL

SEQ ID NO: 96883 - protein, 104 aa, Homo sapiens
  Payload ID: 19327
  Gene Name: von Willebrand factor A domain containing 3B
  ENSP ID: ENSP00000432446
  MOD_RES (1)..(1): Any amino acid
XKTAFADKETQAIYLLTDGRPDQPPETVIDQVKRFQEIPIYTISFNYNDEIANRFLKEVAALTGGEFHFYNFGCKDPTPPEAVQASKGNLFYDFNPRKVCKASI

SEQ ID NO: 96884 - protein, 82 aa, Homo sapiens
  Payload ID: 19327
  Gene Name: von Willebrand factor A domain containing 3B
  ENSP ID: ENSP00000434226
  MOD_RES (1)..(1): Any amino acid
XTLMDALSVAAVPHSSTYVPVLDKHVVSKVFDECFPDQPQIGHLGNEVFPLAHVCNDTNKMTLINPQGAKLNIYKRKVEQAI

SEQ ID NO: 96885 - protein, 723 aa, Homo sapiens
  Payload ID: 19327
  Gene Name: von Willebrand factor A domain containing 3B
  ENSP ID: ENSP00000436153
  MOD_RES (1)..(1): Any amino acid
XKTAFADKETQAIYLLTDGRPDQPPETVIDQVKRFQEIPIYTISFNYNDEIANRFLKEVAALTGGEFHFYNFGCKDPTPPEAVQNEDLTLLVKEMEQGHSDLEKMQDLYSESLIMDWWYNAEKDGDSKHQKEICSMISTPEKCAKPQSDVDSTQTSSLNMLKGPWGLSDQKVQKKKVLHAESTKTSLLRSQMSSLRSSACSERKDGLSNASSRRTALSDKEMSILLAEEWLDDKSSEKVTREGSQVYDHDSSDVSSENWLKTYGLVAKKLTLMDALSVAAVPHSSTYVPVLDKHVVSKVFDEVFPLAHVCNDTNKMTLINPQGAKLNIYKRKVEQAIQSYEKRLNKIVWRALSQEEKEKLDANKPIQYLENKTVLNQALERLNWPISLKELSMLESEILAGKMYIQQAMELQEAAKKNYANKAPGEQQKLQGNPTKKTKSKRPDPLKGQKVIARCDENGFYFPGVVKKCVSRTQALVGFSYGDTKVVSTSFITPVGGAMPCPLLQVGDYVFAKIVIPKGFDFYVPAIVIALPNKHVATEKFYTVLKCNNRREFCPRSALIKISQNKYALSCSHIKSPPIPEDPEVEDVEARNSAFLFWPLKEADTQDSREPRREKPRRKKRPAKQPLQQAAPSDSDGSSHGISSHGSCQGTHPEPRVWVMGGEHNIAYLRNTLKSLSRIVHLTSSFRFWACLGSSAAKTLTSLSNAELCFPRQPTSTSPRPGV

SEQ ID NO: 96886 - protein, 105 aa, Homo sapiens
  Payload ID: 19327
  Gene Name: von Willebrand factor A domain containing 3B
  ENSP ID: ENSP00000437247
  MOD_RES (1)..(1): Any amino acid
XSKLDLVKDKIIQFIQEQLKYKSKFNFVKFDGQAVAWREQLAEVNEDNLEQAQSWIRDIKIGSSTNTLSALKTAFADKETQAIYLLTDGRPDQGTSSHLLLTAAV

SEQ ID NO: 96887 - protein, 416 aa, Homo sapiens
  Payload ID: 19327
  Gene Name: von Willebrand factor A domain containing 3B
  Uniprot ID: Q502W6
  ENSP ID: ENSP00000484764
MATKGMRLKSTKEVFPLAHVCNDTNKMTLINPQGAKLNIYKRKVEQAIQSYEKRLNKIVWRALSQEEKEKLDANKPIQYLENKTVLNQALERLNWPISLKELSMLESEILAGKMYIQQAMELQEAAKKNYANKAPGEQQKLQGNPTKKTKSKRPDPLKGQKVIARCDENGFYFPGVVKKCVSRTQALVGFSYGDTKVVSTSFITPVGGAMPCPLLQVGDYVFAKIVIPKGFDFYVPAIVIALPNKHVATEKFYTVLKCNNRREFCPRSALIKISQNKYALSCSHIKSPPIPEDPEVEDVEARNSAFLFWPLKEADTQDSREPRREKPRRKKRPAKQPLQQAAPSDSDGSSHGISSHGSCQGTHPEPRTAHLHFPAAGRLGLSSHAIIATPPPRAALPCTLQATHSSKGLRSVPETL

SEQ ID NO: 96888 - protein, 415 aa, Homo sapiens
  Payload ID: 19328
  Gene Name: von Willebrand factor A domain containing 5A
  Uniprot ID: O00534
  ENSP ID: ENSP00000355070
MVHFCGLLTLHREPVPLKSISVSVNIYEFVAGVSATLNYENEEKVPLEAFFVFPMDEDSAVYSFEALVDGKKIVAELQDKMKARTNYEKAISQGHQAFLLEGDSSSRDVFSCNVGNLQPGSKAAVTLKYVQELPLEADGALRFVLPAVLNPRYQFSGSSKDSCLNVKTPIVPVEDLPYTLSMVATIDSQHGIEKVQSNCPLSPTEYLGEDKTSAQVSLAAGHKFDRDVELLIYYNEVHTPSVVLEMGMPNMKPGHLMGDPSAMVSFYPNIPEDQPSNTCGEFIFLMDRSGSMQSPMSSQDTSQLRIQAAKETLILLLKSLPIGCYFNIYGFGSSYEACFPESVKYTQQTMEEALGRVKLMQADLGGTEILAPLQNIYRGPSIPGHPLQLFVFTDGEVTDTFSVIKEVRINRQKHR

SEQ ID NO: 96889 - protein, 431 aa, Homo sapiens
  Payload ID: 19328
  Gene Name: von Willebrand factor A domain containing 5A
  ENSP ID: ENSP00000376501
MSSVCDMSFLQKSCITMVHFCGLLTLHREPVPLKSISVSVNIYEFVAGVSATLNYENEEKVPLEAFFVFPMDEDSAVYSFEALVDGKKIVAELQDKMKARTNYEKAISQGHQAFLLEGDSSSRDVFSCNVGNLQPGSKAAVTLKYVQELPLEADGALRFVLPAVLNPRYQFSGSSKDSCLNVKTPIVPVEDLPYTLSMVATIDSQHGIEKVQSNCPLSPTEYLGEDKTSAQVSLAAGHKFDRDVELLIYYNEVHTPSVVLEMGMPNMKPGHLMGDPSAMVSFYPNIPEDQPSNTCGEFIFLMDRSGSMQSPMSSQDTSQLRIQAAKETLILLLKSLPIGCYFNIYGFGSSYEACFPESVKYTQQTMEEALGRVKLMQADLGGTEILAPLQNIYRGPSIPGHPLQLFVFTDGEVTDTFSVIKEVRINRQKHR

SEQ ID NO: 96890 - protein, 786 aa, Homo sapiens
  Payload ID: 19328
  Gene Name: von Willebrand factor A domain containing 5A
  Uniprot ID: O00534
  ENSP ID: ENSP00000376504
MVHFCGLLTLHREPVPLKSISVSVNIYEFVAGVSATLNYENEEKVPLEAFFVFPMDEDSAVYSFEALVDGKKIVAELQDKMKARTNYEKAISQGHQAFLLEGDSSSRDVFSCNVGNLQPGSKAAVTLKYVQELPLEADGALRFVLPAVLNPRYQFSGSSKDSCLNVKTPIVPVEDLPYTLSMVATIDSQHGIEKVQSNCPLSPTEYLGEDKTSAQVSLAAGHKFDRDVELLIYYNEVHTPSVVLEMGMPNMKPGHLMGDPSAMVSFYPNIPEDQPSNTCGEFIFLMDRSGSMQSPMSSQDTSQLRIQAAKETLILLLKSLPIGCYFNIYGFGSSYEACFPESVKYTQQTMEEALGRVKLMQADLGGTEILAPLQNIYRGPSIPGHPLQLFVFTDGEVTDTFSVIKEVRINRQKHRCFSFGIGEGTSTSLIKGIARASGGTSEFITGKDRMQSKALRTLKRSLQPVVEDVSLSWHLPPGLSAKMLSPEQTVIFRGQRLISYAQLTGRMPAAETTGEVCLKYTLQGKTFEDKVTFPLQPKPDVNLTIHRLAAKSLLQTKDMGLRETPASDKKDALNLSLESGVISSFTAFIAINKELNKPVQGPLAHRDVPRPILLGASAPLKIKCQSGFRKALHSDRPPSASQPRGELMCYKAKTFQMDDYSLCGLISHKDQHSPGFGENHLVQLIYHQNANGSWDLNEDLAKILGMSLEEIMAAQPAELVDSSGWATILAVIWLHSNGKDLKCEWELLERKAVAWMRAHAGSTMPSVVKAAITFLKSSVDPAIFAF

SEQ ID NO: 96891 - protein, 415 aa, Homo sapiens; identical to SEQ ID NO: 96888
  Payload ID: 19328
  Gene Name: von Willebrand factor A domain containing 5A
  Uniprot ID: O00534
  ENSP ID: ENSP00000404683

SEQ ID NO: 96892 - protein, 786 aa, Homo sapiens; identical to SEQ ID NO: 96890
  Payload ID: 19328
  Gene Name: von Willebrand factor A domain containing 5A
  Uniprot ID: O00534
  ENSP ID: ENSP00000407726

SEQ ID NO: 96893 - protein, 1215 aa, Homo sapiens
  Payload ID: 19329
  Gene Name: von Willebrand factor A domain containing 5B1
  Uniprot ID: Q5TIE3
  ENSP ID: ENSP00000289815
MPGLLNWITGAALPLTASDVTSCVSGYALGLTASLTYGNLEAQPFQGLFVYPLDECTTVIGFEAVIADRVVTVQIKDKAKLESGHFDASHVRSPTVTGNILQDGVSIAPHSCTPGKVTLDEDLERILFVANLGTIAPMENVTIFISTSSELPTLPSGAVRVLLPAVCAPTVPQFCTKSTGTSNQQAQGKDRHCFGAWAPGSWNKLCLATLLNTEVSNPMEYEFNFQLEIRGPCLLAGVESPTHEIRADAAPSARSAKSIIITLANKHTFDRPVEILIHPSEPHMPHVLIEKGDMTLGEFDQHLKGRTDFIKGMKKKSRAERKTEIIRKRLHKDIPHHSVIMLNFCPDLQSVQPCLRKAHGEFIFLIDRSSSMSGISMHRVKDAMLVALKSLMPACLFNIIGFGSTFKSLFPSSQTYSEDSLAMACDDIQRMKADMGGTNILSPLKWVIRQPVHRGHPRLLFVITDGAVNNTGKVLELVRNHAFSTRCYSFGIGPNVCHRLVKGLASVSEGSAELLMEGERLQPKMVKSLKKAMAPVLSDVTVEWIFPETTEVLVSPVSASSLFPGERLVGYGIVCDASLHISNPRSDKRRRYSMLHSQESGSSVFYHSQDDGPGLEGGDCAKNSGAPFILGQAKNARLASGDSTTKHDLNLSQRRRAYSTNQITNHKPLPRATMASDPMPAAKRYPLRKARLQDLTNQTSLDVQRWQIDLQPLLNSGQDLNQGPKLRGPGARRPSLLPQGCQPFLPWGQETQAWSPVRERTSDSRSPGDLEPSHHPSAFETETSSDWDPPAESQERASPSRPATPAPVLGKALVKGLHDSQRLQWEVSFELGTPGPERGGAQDADLWSETFHHLAARAIIRDFEQLAEREGEIEQGSNRRYQVSALHTSKACNIISKYTAFVPVDVSKSRYLPTVVEYPNSGAALRMLGSRALAQQWRGTSSGFGRPQTMLGEDSAPGNDMEASPTALFSEARSPGREKHGASEGPQRSLATNTLSSMKASENLFGSWLNLNKSRLLTRAAKGFLSKPLIKAVESTSGNQSFDYIPLVSLQLASGAFLLNEAFCEATHIPMEKLKWTSPFTCHRVSLTTRPSESKTPSPQLCTSSPPRHPSCDSFSLEPLAKGKLGLEPRAVVEHTGKLWATVVGLAWLEHSSASYFTEWELVAAKANSWLEQQEVPEGRTQGTLKAAARQLFVLLRHWDENLEFNMLCYNPNYV

SEQ ID NO: 96894 - protein, 1220 aa, Homo sapiens
  Payload ID: 19329
  Gene Name: von Willebrand factor A domain containing 5B1
  Uniprot ID: Q5TIE3
  ENSP ID: ENSP00000364220
MPGLLNWITGAALPLTASDVTSCVSGYALGLTASLTYGNLEAQPFQGLFVYPLDECTTVIGFEAVIADRVVTVQIKDKAKLESGHFDASHVRSPTVTGNILQDGVSIAPHSCTPGKVTLDEDLERILFVANLGTIAPMENVTIFISTSSELPTLPSGAVRVLLPAVCAPTVPQFCTKSTGTSNQQAQGKDRHCFGAWAPGSWNKLCLATLLNTEVSNPMEYEFNFQLEIRGPCLLAGVESPTHEIRADAAPSARSAKSIIITLANKHTFDRPVEILIHPSEPHMPHVLIEKGDMTLGEFDQHLKGRTDFIKGMKKKSRAERKTEIIRKRLHKDIPHHSVIMLNFCPDLQSVQPCLRKAHGEFIFLIDRSSSMSGISMHRVKDAMLVALKSLMPACLFNIIGFGSTFKSLFPSSQTYSEDSLAMACDDIQRMKADMGGTNILSPLKWVIRQPVHRGHPRLLFVITDGAVNNTGKVLELVRNHAFSTRCYSFGIGPNVCHRLVKGLASVSEGSAELLMEGERLQPKMVKSLKKAMAPVLSDVTVEWIFPETTEVLVSPVSASSLFPGERLVGYGIVCDASLHISNPRSDKRRRYSMLHSQESGSSVFYHSQDDGPGLEGGDCAKNSGAPFILGQAKNARLASGDSTTKHDLNLSQRRRAYSTNQITNHKPLPRATMASDPMPAAKRYPLRKARLQDLTNQTSLDVQRWQIDLQPLLNSGQDLNQGPKLRGPGARRPSLLPQGCQPFLPWGQETQAWSPVRERTSDSRSPGDLEPSHHPSAFETETSSDWDPPAESQERASPSRPATPAPVLGKALVKGLHDSQRLQWEVSFELGTPGPERGGAQDADLWSETFHHLAARAIIRDFEQLAEREGEIEQGSNRRYQVSALHTSKACNIISKYTAFVPVDVSKSRYLPTVVEYPNSAALRMLGSRALAQQWRGTSSGFGRPQTMLGEDSAPGNGKFQALNMEASPTALFSEARSPGREKHGASEGPQRSLATNTLSSMKASENLFGSWLNLNKSRLLTRAAKGFLSKPLIKAVESTSGNQSFDYIPLVSLQLASGAFLLNEAFCEATHIPMEKLKWTSPFTCHRVSLTTRPSESKTPSPQLCTSSPPRHPSCDSFSLEPLAKGKLGLEPRAVVEHTGKLWATVVGLAWLEHSSASYFTEWELVAAKANSWLEQQEVPEGRTQGTLKAAARQLFVLLRHWDENLEFNMLCYNPNYV

SEQ ID NO: 96895 - protein, 184 aa, Homo sapiens
  Payload ID: 19329
  Gene Name: von Willebrand factor A domain containing 5B1
  ENSP ID: ENSP00000431194
MPGLLNWITGAALPLTASDVTSCVSGYALGLTASLTYGNLEAQPFQGLFVYPLDECTTVIGFEAVIADRVVTVQIKDKAKLESGHFDASHVRSPTVTGDLGRGFGADPVRGQPGDHCPHGECHHLHQHLLGAPNAAQRGCEGPSACCLCPNRAPVLHQEHWHLQPTGPGQRQALLRCLGPGLLE

SEQ ID NO: 96896 - protein, 127 aa, Homo sapiens
  Payload ID: 19329
  Gene Name: von Willebrand factor A domain containing 5B1
  ENSP ID: ENSP00000432600
MPGLLNWITGAALPLTASDVTSCVSGYALGLTASLTYGNLEAQPFQGLFVYPLDECTTVIGFEAVIADRVVTVQIKDKAKLESGHFDASHVRSPTVTGNILQDGVSIAPHSCTPGKVTLDEDLERIL

SEQ ID NO: 96897 - protein, 444 aa, Homo sapiens
  Payload ID: 19329
  Gene Name: von Willebrand factor A domain containing 5B1
  ENSP ID: ENSP00000435623
  MOD_RES (1)..(1): Any amino acid
XCDASLHISNPRSDKRRRYSMLHSQESGSSVFYHSQDDGPGLEGGDCAKNSGAPFILGQAKNARLASGDSTTKHDLNLSQRRRAYSTNQITNHKPLPRATMASDPMPAAKRYPLRKARLQDLTNQTSLDVQRWQIDLQPLLNSGQDLNQGPKLRGPGARRPSLLPQGCQPFLPWGQETQAWSPVRERTSDSRSPGDLEPSHHPSAFETETSSDWDPPAESQERASPSRPATPAPVLGKALVKGLHDSQRLQWEVSFELGTPGPERGGAQDADLWSETFHHLAARAIIRDFEQLAEREGEIEQGSNRRYQVSALHTSKACNIISKYTAFVPVDVSKSRYLPTVVEYPNSGAALRMLGSRALAQQWRGTSSGFGRPQTMLGEDSAPGNGPRKCSQTLMGFKTKTETEHSVRGWKPRGALQNQSVLSTSWSHWPPKPRRTSSTPEPS

SEQ ID NO: 96898 - protein, 82 aa, Homo sapiens
  Payload ID: 19329
  Gene Name: von Willebrand factor A domain containing 5B1
  ENSP ID: ENSP00000437028
MPGLLNWITGAALPLTASDVTSCVSGYALGLTASLTYGNLEAQPFQGLFVYPLDECTTVIGFEAVIADRVVTVQIKDKAKLE

SEQ ID NO: 96899 - protein, 298 aa, Homo sapiens
  Payload ID: 19329
  Gene Name: von Willebrand factor A domain containing 5B1
  ENSP ID: ENSP00000437095
MPGLLNWITGAALPLTASDVTSCVSGYALGLTASLTYGNLEAQPFQGLFVYPLDECTTVIGFEAVIADRVVTVQIKDKAKLESGHFDASHVRSPTVTGNILQDGVSIAPHSCTPGKVTLDEDLERILFVANLGTIAPMENVTIFISTSSELPTLPSGAVRVLLPAVCAPTVPQFCTKSTGTSNQQAQGKDRHCFGAWAPGSWNKLCLATLLNTEVSNPMEYEFNFQLEIRGPCLLAGGEIEAAWPWSHCRSGAPNGAGMSLISGLDLGVPQRTPLSPDLMSLYPPCLSMPLRGGESHS

SEQ ID NO: 96900 - protein, 1024 aa, Homo sapiens
  Payload ID: 19330
  Gene Name: von Willebrand factor A domain containing 5B2
  ENSP ID: ENSP00000273794
MLVTGPCLLAGLESPSHALRADAPPHASSAATICVTLAEGHHCDRALEILLHPSEPHQPHLMLEGGSLSSAEYEARVRARRDFQRLQRRDSDGDRQVWFLQRRFHKDILLNPVLALSFCPDLSSKPGHLGTATRELLFLLDSSSVAHKDAIVLAVKSLPPQTLINLAVFGTLVQPLFPESRPCSDDAVQLICESIETLQVPSGPPDVLAALDWAVGQPQHRAYPRQLFLLTAASPMAATTHRTLELMRWHRGTARCFSFGLGPTCHQLLQGLSALSRGQAYFLRPGQRLQPMLVQALRKALEPALSDISVDWFVPDTVEALLTPREIPALYPGDQLLGYCSLFRVDGFRSRPPGGQEPGWQSSGGSVFPSPEEAPSAASPGTEPTGTSEPLGTGTVSAELSSPWAARDSEQTGTDALTDPVTDPGPNPSDTAIWRRIFQSSYIREQYVLTHCSASPEPGPGSTGSSESPGSQGPGSPEGSAPLEPPSQQGCRSLAWGEPAGSRSCPLPAPTPAPFKVGALSTEVLGRQHRAALAGRSLSSPPGRANQVPGRPRKPSLGAILDGPSPEPGQQLGQGLDDSGNLLSPAPMDWDMLMEPPFLFTAVPPSGELAPPAVPPQAPRCHVVIRGLCGEQPMCWEVGVGLETLWGPGDGSQPPSPPVREAAWDQALHRLTAASVVRDNEQLALRGGAETTADRGHARRCWLRALQTSKVSSAPSCFTCPVAVDATTREVLPGALQVCSSEPAEPPGTPPASHSHLDAAPLPTVVYSKGLQRGSPAGAWDSDQNGNSKRALGDPATPTEGPRRPPPRPPCRLSMGRRHKLCSPDPGQANNSEGSDHDYLPLVRLQEAPGSFRLDAPFCAAVRISQERLCRASPFAVHRASLSPTSASLPWALLGPGVGQGDSATASCSPSPSSGSEGPGQVDSGRGSDTEASEGAEGLGGTDLRGRTWATAVALAWLEHRCAAAFDEWELTAAKADCWLRAQHLPDGLDLAALKAAARGLFLLLRHWDQNLQLHLLCYSPANV

SEQ ID NO: 96901 - protein, 1242 aa, Homo sapiens
  Payload ID: 19330
  Gene Name: von Willebrand factor A domain containing 5B2
  Uniprot ID: Q8N398
  ENSP ID: ENSP00000398688
MPGLYCPSSWTPLPLTDSWVRACANGPCLSVRARLTYRNPQPQPVDGVFVYPLAEAEVVSGFEAEAAGRRVSFQLQSRRRSQAACCRALGPGLGTPTPRRCAQGHLVLDLAQARSTLVLPTGIIAAAGTMTVTLHSSRELPSRPDGVLHVALPTVLTPLAPPGPPGPPRPPGLCDDSPTSCFGVGSLQEEGLAWEELAAPRDVFSGPARCPAPYTFSFEMLVTGPCLLAGLESPSHALRADAPPHASSAATICVTLAEGHHCDRALEILLHPSEPHQPHLMLEGGSLSSAEYEARVRARRDFQRLQRRDSDGDRQVWFLQRRFHKDILLNPVLALSFCPDLSSKPGHLGTATRELLFLLDSSSVAHKDAIVLAVKSLPPQTLINLAVFGTLVQPLFPESRPCSDDAVQLICESIETLQVPSGPPDVLAALDWAVGQPQHRAYPRQLFLLTAASPMAATTHRTLELMRWHRGTARCFSFGLGPTCHQLLQGLSALSRGQAYFLRPGQRLQPMLVQALRKALEPALSDISVDWFVPDTVEALLTPREIPALYPGDQLLGYCSLFRVDGFRSRPPGGQEPGWQSSGGSVFPSPEEAPSAASPGTEPTGTSEPLGTGTVSAELSSPWAARDSEQSTDALTDPVTDPGPNPSDTAIWRRIFQSSYIREQYVLTHCSASPEPGPGSTGSSESPGSQGPGSPEGSAPLEPPSQQGCRSLAWGEPAGSRSCPLPAPTPAPFKVGALSTEVLGRQHRAALAGRSLSSPPGRANQVPGRPRKPSLGAILDGPSPEPGQQLGQGLDDSGNLLSPAPMDWDMLMEPPFLFTAVPPSGELAPPAVPPQAPRCHVVIRGLCGEQPMCWEVGVGLETLWGPGDGSQPPSPPVREAAWDQALHRLTAASVVRDNEQLALRGGAETTADRGHARRCWLRALQTSKVSSAPSCFTCPVAVDATTREVLPGALQVCSSEPAEPPGTPPASHSHLDAAPLPTVVYSKGLQRGSPAGAWDSDQNGNSKRALGDPATPTEGPRRPPPRPPCRLSMGRRHKLCSPDPGQANNSEGSDHDYLPLVRLQEAPGSFRLDAPFCAAVRISQERLCRASPFAVHRASLSPTSASLPWALLGPGVGQGDSATASCSPSPSSGSEGPGQVDSGRGSDTEASEGAEGLGGTDLRGRTWATAVALAWLEHRCAAAFDEWELTAAKADCWLRAQHLPDGLDLAALKAAARGLFLLLRHWDQNLQLHLLCYSPANV

SEQ ID NO: 96902 - protein, 891 aa, Homo sapiens
  Payload ID: 19331
  Gene Name: von Willebrand factor A domain containing 7
  Uniprot ID: Q9Y334
  ENSP ID: ENSP00000364840
MLPTEVPQSHPGPSALLLLQLLLPPTSAFFPNIWSLLAAPGSITHQDLTEEAALNVTLQLFLEQPPPGRPPLRLEDFLGRTLLADDLFAAYFGPGSSRRFRAALGEVSRANAAQDFLPTSRNDPDLHFDAERLGQGRARLVGALRETVVAARALDHTLARQRLGAALHALQDFYSHSNWVELGEQQPHPHLLWPRQELQNLAQVADPTCSDCEELSCPRNWLGFTLLTSGYFGTHPPKPPGKCSHGGHFDRSSSQPPRGGINKDSTSPGFSPHHMLHLQAAKLALLASIQAFSLLRSRLGDRDFSRLLDITPASSLSFVLDTTGSMGEEINAAKIQARHLVEQRRGSPMEPVHYVLVPFHDPGFGPVFTTSDPDSFWQQLNEIHALGGGDEPEMCLSALQLALLHTPPLSDIFVFTDASPKDAFLTNQVESLTQERRCRVTFLVTEDTSRVQGRARREILSPLRFEPYKAVALASGGEVIFTKDQHIRDVAAIVGESMAALVTLPLDPPVVVPGQPLVFSVDGLLQKITVRIHGDISSFWIKNPAGVSQGQEEGGGPLGHTRRFGQFWMVTMDDPPQTGTWEIQVTAEDTPGVRVQAQTSLDFLFHFGIPMEDGPHPGLYPLTQPVAGLQTQLLVEVTGLGSRANPGDPQPHFSHVILRGVPEGAELGQVPLEPVGPPERGLLAASLSPTLLSTPRPFSLELIGQDAAGRRLHRAAPQPSTVVPVLLELSGPSGFLAPGSKVPLSLRIASFSGPQDLDLRTFVNPSFSLTSNLSRAHLELNESAWGRLWLEVPDSAAPDSVVMVTVTAGGREANPVPPTHAFLRLLVSAPAPQDRHTTPTGSSDPILTTATPAFSPFTLVTQGRAGAGLAAGSPWWGTVGGVLLLLGLASW

SEQ ID NO: 96903 - protein, 891 aa, Homo sapiens; identical to SEQ ID NO: 96902
  Payload ID: 19331
  Gene Name: von Willebrand factor A domain containing 7
  Uniprot ID: Q9Y334
  ENSP ID: ENSP00000390732

SEQ ID NO: 96904 - protein, 891 aa, Homo sapiens; identical to SEQ ID NO: 96902
  Payload ID: 19331
  Gene Name: von Willebrand factor A domain containing 7
  Uniprot ID: Q9Y334
  ENSP ID: ENSP00000406943

SEQ ID NO: 96905 - protein, 891 aa, Homo sapiens
  Payload ID: 19331
  Gene Name: von Willebrand factor A domain containing 7
  ENSP ID: ENSP00000411804
MLPTEVPQSHPGPSALLLLQLLLPPTSAFFPNIWSLLAAPGSITHQDLTEEAALNVTLQLFLEQPPPGRPPLRLEDFLGRTLLADDLFAAYFGPGSSRRFRAALGEVSRANAAQDFLPTSRNDPDLHFDAERLGQGRARLVGALRETVVAARALDHTLARQRLGAALHALQDFYSHSNWVELGEQQPHPHLLWPRQELQNLAQVADPTCSDCEELSCPRNWLGFTLLTSGYFGTHPPKPPGKCSHGGHFDRSSSQPPRGGINKDSTSPGFSPHHMLHLQAAKLALLASIQAFSLLRSRLGDRDFSRLLDITPASSLSFVLDTTGSMGEEINAAKIQARHLVEQRRGSPMEPVHYVLVPFHDPGFGPVFTTSDPDSFWQQLNEIHALGGGDEPEMCLSALQLALLHTPPLSDIFVFTDASPKDAFLTNQVESLTQERRCRVTFLVTEDTSRVQGRARREILSPLRFEPYKAVALASGGEVIFTKDQHIRDVAAIVGESMAALVTLPLDPPVVVPGQPLVFSVDGLLQKITVRIHGDISSFWIKNPAGVSQGQEEGGGPLGHTRRFGQFWMVTMDDPPQTGTWEIQVTAEDTPGVRVQAQTSLDFLFHFGIPMEDGPHPGLYPLTQPVAGLQTQLLVEVTGLGSRANPGDPQPHFSHVILRGVPEGAELGQVPLEPVGPPERGLLAASLSPTLLSTPRPFSLELIGQDAAGRRLHRAAPQPSTVVPVLLELSGPSGFLAPGSKVPLSLRIASFSGPQDLDLRTFVNPSFSLTSNLSRAHLELNESAWGRLWLEVPDSAAPDSVVMVTVTAGGREANPVPPTHAFLRLLVSAPAPQDRHTTPTGSSDPILTTATPAFSPFTLVAQGRAGAGLAAGSPWWGTVGGVLLLLGLASW

SEQ ID NO: 96906 - protein, 891 aa, Homo sapiens; identical to SEQ ID NO: 96902
  Payload ID: 19331
  Gene Name: von Willebrand factor A domain containing 7
  Uniprot ID: Q9Y334
  ENSP ID: ENSP00000411910

SEQ ID NO: 96907 - protein, 891 aa, Homo sapiens; identical to SEQ ID NO: 96902
  Payload ID: 19331
  Gene Name: von Willebrand factor A domain containing 7
  Uniprot ID: Q9Y334
  ENSP ID: ENSP00000413704

SEQ ID NO: 96908 - protein, 1039 aa, Homo sapiens
  Payload ID: 19332
  Gene Name: von Willebrand factor A domain containing 8
  Uniprot ID: A3KMH1
  ENSP ID: ENSP00000281496
MQSRLLLLGAPGGHGGPASRRMRLLLRQVVQRRPGGDRQRPEVRLLHAGSGADTGDTVNIGDVSYKLKIPKNPELVPQNYISDSLAQSVVQHLRWIMQKDLLGQDVFLIGPPGPLRRSIAMQYLELTKREVEYIALSRDTTETDLKQRREIRAGTAFYIDQCAVRAATEGRTLILEGLEKAERNVLPVLNNLLENREMQLEDGRFLMSAERYDKLLRDHTKKELDSWKIVRVSENFRVIALGLPVPRYSGNPLDPPLRSRFQARDIYYLPFKDQLKLLYSIGANVSAEKVSQLLSFATTLCSQESSTLGLPDFPLDSLAAAVQILDSFPMMPIKHAIQWLYPYSILLGHEGKMAVEGVLKRFELQDSGSSLLPKEIVKVEKMMENHVSQASVTIRIADKEVTIKVPAGTRLLSQPCASDRFIQTLSHKQLQAEMMQSHMVKDICLIGGKGCGKTVIAKNFADTLGYNIEPIMLYQDMTARDLLQQRYTLPNGDTAWRSSPLVNAALEGKLVLLDGIHRVNAGTLAVLQRLIHDRELSLYDGSRLLREDRYMRLKEELQLSDEQLQKRSIFPIHPSFRIIALAEPPVIGSTAHQWLGPEFLTMFFFHYMKPLVKSEEIQVIKEKVPNVPQEALDKLLSFTHKLRETQDPTAQSLAASLSTRQLLRISRRLSQYPNENLHSAVTKACLSRFLPSLARSALEKNLADATIEINTDDNLEPELKDYKCEVTSGTLRIGAVSAPIYNAHEKMKVPDVLFYDNIQHVIVMEDMLKDFLLGEHLLLVGNQGVGKNKIVDRFLHLLNRPREYIQLHRDTTVQTLTLQPSVKDGLIVYEDSPLVKAVKLGHILVVDEADKAPTNVTCILKTLVENGEMILADGRRIVANSANVNGRENVVVIHPDFRMIVLANRPGFPFLGNDFFGTLGDIFSCHAVDNPKPHSELEMLRQYGPNVPEPILQKLVAAFGELRSLADQGIINYPYSTREVVNIVKHLQKFPTEGLSSVVRNVFDFDSYNNDMREILINTLHKYGIPIGAKPTSVQLAKE

SEQ ID NO: 96909 - protein, 1905 aa, Homo sapiens
  Payload ID: 19332
  Gene Name: von Willebrand factor A domain containing 8
  Uniprot ID: A3KMH1
  ENSP ID: ENSP00000368612
MQSRLLLLGAPGGHGGPASRRMRLLLRQVVQRRPGGDRQRPEVRLLHAGSGADTGDTVNIGDVSYKLKIPKNPELVPQNYISDSLAQSVVQHLRWIMQKDLLGQDVFLIGPPGPLRRSIAMQYLELTKREVEYIALSRDTTETDLKQRREIRAGTAFYIDQCAVRAATEGRTLILEGLEKAERNVLPVLNNLLENREMQLEDGRFLMSAERYDKLLRDHTKKELDSWKIVRVSENFRVIALGLPVPRYSGNPLDPPLRSRFQARDIYYLPFKDQLKLLYSIGANVSAEKVSQLLSFATTLCSQESSTLGLPDFPLDSLAAAVQILDSFPMMPIKHAIQWLYPYSILLGHEGKMAVEGVLKRFELQDSGSSLLPKEIVKVEKMMENHVSQASVTIRIADKEVTIKVPAGTRLLSQPCASDRFIQTLSHKQLQAEMMQSHMVKDICLIGGKGCGKTVIAKNFADTLGYNIEPIMLYQDMTARDLLQQRYTLPNGDTAWRSSPLVNAALEGKLVLLDGIHRVNAGTLAVLQRLIHDRELSLYDGSRLLREDRYMRLKEELQLSDEQLQKRSIFPIHPSFRIIALAEPPVIGSTAHQWLGPEFLTMFFFHYMKPLVKSEEIQVIKEKVPNVPQEALDKLLSFTHKLRETQDPTAQSLAASLSTRQLLRISRRLSQYPNENLHSAVTKACLSRFLPSLARSALEKNLADATIEINTDDNLEPELKDYKCEVTSGTLRIGAVSAPIYNAHEKMKVPDVLFYDNIQHVIVMEDMLKDFLLGEHLLLVGNQGVGKNKIVDRFLHLLNRPREYIQLHRDTTVQTLTLQPSVKDGLIVYEDSPLVKAVKLGHILVVDEADKAPTNVTCILKTLVENGEMILADGRRIVANSANVNGRENVVVIHPDFRMIVLANRPGFPFLGNDFFGTLGDIFSCHAVDNPKPHSELEMLRQYGPNVPEPILQKLVAAFGELRSLADQGIINYPYSTREVVNIVKHLQKFPTEGLSSVVRNVFDFDSYNNDMREILINTLHKYGIPIGAKPTSVQLAKELTLPEQTFMGYWTIGQARSGMQKLLCPVETHHIDIKGPALINIQEYPIERHEERSLNFTEECASWRIPLDEINIICDIATSHENEQNTLYVVTCNPASLYFMNMTGKSGFFVDFFDIFPRTANGVWHPFVTVAPLGSPLKGQVVLHEQQSNVILLLDTTGRALHRLILPSEKFTSKKPFWWNKEEAETYKMCKEFSHKNWLVFYKEKGNSLTVLDVLEGRTHTISLPINLKTVFLVAEDKWLLVESKTNQKYLLTKPAHIESEGSGVCQLYVLKEEPPSTGFGVTQETEFSIPHKISSDQLSSEHLSSAVEQKIASPNRILSDEKNYATIVVGFPDLMSPSEVYSWKRPSSLHKRSGTDTSFYRGKKKRGTPKQSNCVTLLDTNQVVRILPPGEVPLKDIYPKDVTPPQTSGYIEVTDLQSKKLRYIPIPRSESLSPYTTWLSTISDTDALLAEWDKSGVVTVDMGGHIRLWETGLERLQRSLMEWRNMIGQDDRNMQITINRDSGEDVSSPKHGKEDPDNMPHVGGNTWAGGTGGRDTAGLGGKGGPYRLDAGHTVYQVSQAEKDAVPEEVKRAAREMGQRAFQQRLKEIQMSEYDAATYERFSGAVRRQVHSLRIILDNLQAKGKERQWLRHQATGELDDAKIIDGLTGEKAIYKRRGELEPQLGSPQQKPKRLRLVVDVSGSMYRFNRMDGRLERTMEAVCMVMEAFENYEEKFQYDIVGHSGDGYNIGLVPMNKIPKDNKQRLEILKTMHAHSQFCMSGDHTLEGTEHAIKEIVKEEADEYFVIVLSDANLSRYGIHPAKFAQILTRDPQVNAFAIFIGSLGDQATRLQRTLPAGRSFVAMDTKDIPQILQQIFTSTMLSSV

SEQ ID NO: 96910 - protein, 518 aa, Homo sapiens
  Payload ID: 19333
  Gene Name: von Willebrand factor A domain containing 9
  Uniprot ID: Q96SY0
  ENSP ID: ENSP00000326379
MPTVVVMDVSLSMTRPVSIEGSEEYQRKHLAAHGLTMLFEHMATNYKLEFTALVVFSSLWELMVPFTRDYNTLQEALSNMDDYDKTCLESALVGVCNIVQQEWGGAIPCQVVLVTDGCLGIGRGSLRHSLATQNQRSESNRFPLPFPFPSKLYIMCMANLEELQSTDSLECLERLIDLNNGEGQIFTIDGPLCLKNVQSMFGKLIDLAYTPFHAVLKCGHLTADVQVFPRPEPFVVDEEIDPIPKVINTDLEIVGFIDIADISSPPVLSRHLVLPIALNKEGDEVGTGITDDNEDENSANQIAGKIPNFCVLLHGSLKVEGMVAIVQLGPEWHGMLYSQADSKKKSNLMMSLFEPGPEPLPWLGKMAQLGPISDAKENPYGEDDNKSPFPLQPKNKRSYAQNVTVWIKPSGLQTDVQKILRNARKLPEKTQTFYKELNRLRKAALAFGFLDLLKGVADMLERECTLLPETAHPDAAFQLTHAAQQLKLASTGTSEYAAYDQNITPLHTDFSGSSTERI

SEQ ID NO: 96911 - protein, 482 aa, Homo sapiens
  Payload ID: 19333
  Gene Name: von Willebrand factor A domain containing 9
  ENSP ID: ENSP00000396314
MPTVVVMDVSLSMTRPVSIEGSEEYQRKHLAAHGLTMLFEHMATNYKLEFTALVVFSSLWELMVPFTRDYNTLQVVLVTDGCLGIGRGSLRHSLATQNQRSESNRFPLPFPFPSKLYIMCMANLEELQSTDSLECLERLIDLNNGEGQIFTIDGPLCLKNVQSMFGKLIDLAYTPFHAVLKCGHLTADVQVFPRPEPFVVDEEIDPIPKVINTDLEIVGFIDIADISSPPVLSRHLVLPIALNKEGDEVGTGITDDNEDENSANQIAGKIPNFCVLLHGSLKVEGMVAIVQLGPEWHGMLYSQADSKKKSNLMMSLFEPGPEPLPWLGKMAQLGPISDAKENPYGEDDNKSPFPLQPKNKRSYAQNVTVWIKPSGLQTDVQKILRNARKLPEKTQTFYKELNRLRKAALAFGFLDLLKGVADMLERECTLLPETAHPDAAFQLTHAAQQLKLASTGTSEYAAYDQNITPLHTDFSGSSTERI

SEQ ID NO: 96912 - protein, 439 aa, Homo sapiens
  Payload ID: 19333
  Gene Name: von Willebrand factor A domain containing 9
  Uniprot ID: Q96SY0
  ENSP ID: ENSP00000402898
MDDYDKTCLESALVGVCNIVQQEWGGAIPCQVVLVTDGCLGIGRGSLRHSLATQNQRSESNRFPLPFPFPSKLYIMCMANLEELQSTDSLECLERLIDLNNGEGQIFTIDGPLCLKNVQSMFGKLIDLAYTPFHAVLKCGHLTADVQVFPRPEPFVVDEEIDPIPKVINTDLEIVGFIDIADISSPPVLSRHLVLPIALNKEGDEVGTGITDDNEDENSANQIAGKIPNFCVLLHGSLKVEGMVAIVQLGPEWHGMLYSQADSKKKSNLMMSLFEPGPEPLPWLGKMAQLGPISDAKENPYGEDDNKSPFPLQPKNKRSYAQNVTVWIKPSGLQTDVQKILRNARKLPEKTQTFYKELNRLRKAALAFGFLDLLKGVADMLERECTLLPETAHPDAAFQLTHAAQQLKLASTGTSEYAAYDQNITPLHTDFSGSSTERI

SEQ ID NO: 96913 - protein, 461 aa, Homo sapiens
  Payload ID: 19333
  Gene Name: von Willebrand factor A domain containing 9
  Uniprot ID: Q96SY0
  ENSP ID: ENSP00000408429
MPTESLCRRTVSGDGHGEALSNMDDYDKTCLESALVGVCNIVQQEWGGAIPCQVVLVTDGCLGIGRGSLRHSLATQNQRSESNRFPLPFPFPSKLYIMCMANLEELQSTDSLECLERLIDLNNGEGQIFTIDGPLCLKNVQSMFGKLIDLAYTPFHAVLKCGHLTADVQVFPRPEPFVVDEEIDPIPKVINTDLEIVGFIDIADISSPPVLSRHLVLPIALNKEGDEVGTGITDDNEDENSANQIAGKIPNFCVLLHGSLKVEGMVAIVQLGPEWHGMLYSQADSKKKSNLMMSLFEPGPEPLPWLGKMAQLGPISDAKENPYGEDDNKSPFPLQPKNKRSYAQNVTVWIKPSGLQTDVQKILRNARKLPEKTQTFYKELNRLRKAALAFGFLDLLKGVADMLERECTLLPETAHPDAAFQLTHAAQQLKLASTGTSEYAAYDQNITPLHTDFSGSSTERI

SEQ ID NO: 96914 - protein, 169 aa, Homo sapiens
  Payload ID: 19333
  Gene Name: von Willebrand factor A domain containing 9
  ENSP ID: ENSP00000454425
MPTESLCRRTVSGDGHGLSVCILIGNTGIIFIMPTVVVMDVSLSMTRPVSIEGSEEYQRKHLAAHGLTMLFEHMATNYKLEFTALVVFSSLWELMVPFTRDYNTLQEALSNMDDYDKTCLESALVGVCNIVQQEWGGAIPCQVVLVTDGCLGIGRGSLRHSLATQNQRS

SEQ ID NO: 96915 - protein, 71 aa, Homo sapiens
  Payload ID: 19333
  Gene Name: von Willebrand factor A domain containing 9
  ENSP ID: ENSP00000454743
MDDYDKTCLESALVGVCNIVQQEWGGAIPCQVVLVTDGCLGIGRGSLRHSLATQNQRSESNRFPLPFPFPS

SEQ ID NO: 96916 - protein, 57 aa, Homo sapiens
  Payload ID: 19333
  Gene Name: von Willebrand factor A domain containing 9
  ENSP ID: ENSP00000454972
MPTDCVRRWARGEWGGRGPGTAFRCLLGLQVKGLWVKNNPGPALGLPATVAAAPRCL

SEQ ID NO: 96917 - protein, 154 aa, Homo sapiens
  Payload ID: 19333
  Gene Name: von Willebrand factor A domain containing 9
  ENSP ID: ENSP00000455105
MPTVVVMDVSLSMTRPVSIEGSEEYQRKHLAAHGLTMLFEHMATNYKLEFTALVVFSSLWELMVPFTRDYNTLQEALSNMDDYDKTCLESALVGVCNIVQQEWGGAIPCQVVLVTDGCLGIGRGSLRHSLATQNQRSESNSSRAPIPWNALNVS

SEQ ID NO: 96918 - protein, 468 aa, Homo sapiens
  Payload ID: 19333
  Gene Name: von Willebrand factor A domain containing 9
  ENSP ID: ENSP00000456460
MPTVVVMDVSLSMTRPVSIEGSEEYQPLSNMDDYDKTCLESALVGVCNIVQQEWGGAIPCQVVLVTDGCLGIGRGSLRHSLATQNQRSESNRFPLPFPFPSKLYIMCMANLEELQSTDSLECLERLIDLNNGEGQIFTIDGPLCLKNVQSMFGKLIDLAYTPFHAVLKCGHLTADVQVFPRPEPFVVDEEIDPIPKVINTDLEIVGFIDIADISSPPVLSRHLVLPIALNKGDEVGTGITDDNEDENSANQIAGKIPNFCVLLHGSLKVEGMVAIVQLGPEWHGMLYSQADSKKKSNLMMSLFEPGPEPLPWLGKMAQLGPISDAKENPYGEDDNKSPFPLQPKNKRSYAQNVTVWIKPSGLQTDVQKILRNARKLPEKTQTFYKELNRLRKAALAFGFLDLLKGVADMLERECTLLPETAHPDAAFQLTHAAQQLKLASTGTSEYAAYDQNITPLHTDFSGSSTERI

SEQ ID NO: 96919 - protein, 39 aa, Homo sapiens
  Payload ID: 19333
  Gene Name: von Willebrand factor A domain containing 9
  ENSP ID: ENSP00000456956
MKLYLRTGEGLPEADGKAKEQEALSNMDDYDKTCLESAL

SEQ ID NO: 96920 - protein, 554 aa, Homo sapiens
  Payload ID: 19333
  Gene Name: von Willebrand factor A domain containing 9
  ENSP ID: ENSP00000457624
MKLYLRTGEGLPEADGKAKEQLSVCILIGNTGIIFIMPTVVVMDVSLSMTRPVSIEGSEEYQRKHLAAHGLTMLFEHMATNYKLEFTALVVFSSLWELMVPFTRDYNTLQEALSNMDDYDKTCLESALVGVCNIVQQEWGGAIPCQVVLVTDGCLGIGRGSLRHSLATQNQRSESNRFPLPFPFPSKLYIMCMANLEELQSTDSLECLERLIDLNNGEGQIFTIDGPLCLKNVQSMFGKLIDLAYTPFHAVLKCGHLTADVQVFPRPEPFVVDEEIDPIPKVINTDLEIVGFIDIADISSPPVLSRHLVLPIALNKEGDEVGTGITDDNEDENSANQIAGKIPNFCVLLHGSLKVEGMVAIVQLGPEWHGMLYSQADSKKKSNLMMSLFEPGPEPLPWLGKMAQLGPISDAKENPYGEDDNKSPFPLQPKNKRSYAQNVTVWIKPSGLQTDVQKILRNARKLPEKTQTFYKELNRLRKAALAFGFLDLLKGVADMLERECTLLPETAHPDAAFQLTHAAQQLKLASTGTSEYAAYDQNITPLHTDFSGSSTERI

SEQ ID NO: 96921 - protein, 76 aa, Homo sapiens
  Payload ID: 19333
  Gene Name: von Willebrand factor A domain containing 9
  ENSP ID: ENSP00000457922
MPTVVVMDVSLSMTRPVSIEGSEEYQPLSNMDDYDKTCLESALVGVCNIVQQEWGGAIPCQVVLVTDGCLGIGRGS

SEQ ID NO: 96922 - protein, 57 aa, Homo sapiens; identical to SEQ ID NO: 96916
  Payload ID: 19333
  Gene Name: von Willebrand factor A domain containing 9
  ENSP ID: ENSP00000457977

SEQ ID NO: 96923 - protein, 57 aa, Homo sapiens; identical to SEQ ID NO: 96916
  Payload ID: 19333
  Gene Name: von Willebrand factor A domain containing 9
  ENSP ID: ENSP00000458470

SEQ ID NO: 96924 - protein, 219 aa, Homo sapiens
  Payload ID: 19334
  Gene Name: von Willebrand factor C and EGF domains
  Uniprot ID: Q96DN2
  ENSP ID: ENSP00000301770
MWAGLLLRAACVALLLPGAPARGYTGRKPPGHFAAERRRLGPHVCLSGFGSGCCPGWAPSMGGGHCTLPLCSFGCGSGICIAPNVCSCQDGEQGATCPETHGPCGEYGCDLTCNHGGCQEVARVCPVGFSMTETAVGIRCTDIDECVTSSCEGHCVNTEGGFVCECGPGMQLSADRHSCQDTDECLGTPCQQRCKNSIGSYKCSCRTGFHLHGNRHSCM

SEQ ID NO: 96925 - protein, 955 aa, Homo sapiens
  Payload ID: 19334
  Gene Name: von Willebrand factor C and EGF domains
  Uniprot ID: Q96DN2
  ENSP ID: ENSP00000334186
MWAGLLLRAACVALLLPGAPARGYTGRKPPGHFAAERRRLGPHVCLSGFGSGCCPGWAPSMGGGHCTLPLCSFGCGSGICIAPNVCSCQDGEQGATCPETHGPCGEYGCDLTCNHGGCQEVARVCPVGFSMTETAVGIRCTDIDECVTSSCEGHCVNTEGGFVCECGPGMQLSADRHSCQDTDECLGTPCQQRCKNSIGSYKCSCRTGFHLHGNRHSCVDVNECRRPLERRVCHHSCHNTVGSFLCTCRPGFRLRADRVSCEAFPKAVLAPSAILQPRQHPSKMLLLLPEAGRPALSPGHSPPSGAPGPPAGVRTTRLPSPTPRLPTSSPSAPVWLLSTLLATPVPTASLLGNLRPPSLLQGEVMGTPSSPRGPESPRLAAGPSPCWHLGAMHESRSRWTEPGCSQCWCEDGKVTCEKVRCEAACSHPIPSRDGGCCPSCTGCFHSGVVRAEGDVFSPPNENCTVCVCLAGNVSCISPECPSGPCQTPPQTDCCTCVPVRCYFHGRWYADGAVFSGGGDECTTCVCQNGEVECSFMPCPELACPREEWRLGPGQCCFTCQEPTPSTGCSLDDNGVEFPIGQIWSPGDPCELCICQADGSVSCKRTDCVDSCPHPIRIPGQCCPDCSAGCTYTGRIFYNNETFPSVLDPCLSCICLLGSVACSPVDCPITCTYPFHPDGECCPVCRDCNYEGRKVANGQVFTLDDEPCTRCTCQLGEVSCEKVPCQRACADPALLPGDCCSSCPDSLSPLEEKQGLSPHGNVAFSKAGRSLHGDTEAPVNCSSCPGPPTASPSRPVLHLLQLLLRTNLMKTQTLPTSPAGAHGPHSLALGLTATFPGEPGASPRLSPGPSTPPGAPTLPLASPGAPQPPPVTPERSFSASGAQIVSRWPPLPGTLLTEASALSMMDPSPSKTPITLLGPRVLSPTTSRLSTALAATTHPGPQQPPVGASRGEESTM

SEQ ID NO: 96926 - protein, 173 aa, Homo sapiens
  Payload ID: 19334
  Gene Name: von Willebrand factor C and EGF domains
  ENSP ID: ENSP00000441565
MWAGLLLRAACVALLLPGAPARGYTGRKPPGHFAAERRRLGPHVCLSGFGSGCCPGWAPSMGGGHCTLRKCLSLCPKSSPPAVCVASPQSLVRGADGRPQFLVSHLHFSSQPSAPSAVGVASASLPMSAPARMESKGPPAQKPMDHVGSTAVTLPATMEAVRRWPECAPWASR

SEQ ID NO: 96927 - protein, 420 aa, Homo sapiens
  Payload ID: 19334
  Gene Name: von Willebrand factor C and EGF domains
  ENSP ID: ENSP00000442570
MPCPELACPREEWRLGPGQCCFTCQEPTPSTGCSLDDNGVEFPIGQIWSPGDPCELCICQADGSVSCKRTDCVDSCPHPIRIPGQCCPDCSAGCTYTGRIFYNNETFPSVLDPCLSCICLLGSVACSPVDCPITCTYPFHPDGECCPVCRDCNYEGRKVANGQVFTLDDEPCTRCTCQLGEVSCEKVPCQRACADPALLPGDCCSSCPDSLSPLEEKQGLSPHGNVAFSKAGRSLHGDTEAPVNCSSCPGPPTASPSRPVLHLLQLLLRTNLMKTQTLPTSPAGAHGPHSLALGLTATFPGEPGASPRLSPGPSTPPGAPTLPLASPGAPQPPPVTPERSFSASGAQIVSRWPPLPGTLLTEASALSMMDPSPSKTPITLLGPRVLSPTTSRLSTALAATTHPGPQQPPVGASRGEESTM

SEQ ID NO: 96928 - protein, 670 aa, Homo sapiens [sequence omitted]

SEQ ID NO: 96929 - protein, 325 aa, Homo sapiens
  Payload ID: 19335
  Gene Name: von Willebrand factor C domain containing 2
  Uniprot ID: Q2TAL6
  ENSP ID: ENSP00000341819
MPSSTAMAVGALSSSLLVTCCLMVALCSPSIPLEKLAQAPEQPGQEKREHASRDGPGRVNELGRPARDEGGSGRDWKSKSGRGLAGREPWSKLKQAWVSQGGGAKAGDLQVRPRGDTPQAEALAAAAQDAIGPELAPTPEPPEEYVYPDYRGKGCVDESGFVYAIGEKFAPGPSACPCLCTEEGPLCAQPECPRLHPRCIHVDTSQCCPQCKERKNYCEFRGKTYQTLEEFVVSPCERCRCEANGEVLCTVSACPQTECVDPVYEPDQCCPICKNGPNCFAETAVIPAGREVKTDECTICHCTYEEGTWRIERQAMCTRHECRQM

SEQ ID NO: 96930 - protein, 222 aa, Homo sapiens
  Payload ID: 19336
  Gene Name: von Willebrand factor C domain containing protein 2-like
  Uniprot ID: B2RUY7
  ENSP ID: ENSP00000308976
MALHIHEACILLLVIPGLVTSAAISHEDYPADEGDQISSNDNLIFDDYRGKGCVDDSGFVYKLGERFFPGHSNCPCVCALDGPVCDQPECPKIHPKCTKVEHNGCCPECKEVKNFCEYHGKNYKILEEFKPSPCEWCRCEPSNEVHCVVADCAVPECVNPVYEPEQCCPVCKNGPNCFAGTTIIPAGIEVKVDECNICHCHNGDWWKPAQCSKRECQGKQTV

SEQ ID NO: 96931 - protein, 139 aa, Homo sapiens
  Payload ID: 19336
  Gene Name: von Willebrand factor C domain containing protein 2-like
  ENSP ID: ENSP00000403779
MALHIHEACILLLVIPGLVTSAAISHEDYPADEGDQISSNDNLIFDDYRGKGCVDDSGFVYKLGERFFPGHSNCPCVCALDGPVCDQPECPKIHPKCTKVEHNGCCPECKEVKNFCEYHGKNYKILEEFKVQTALQERR

SEQ ID NO: 96932 - protein, 1590 aa, Homo sapiens
  Payload ID: 19337
  Gene Name: von Willebrand factor D and EGF domains
  Uniprot ID: Q8N2E2
  ENSP ID: ENSP00000275358
MPGGACVLVIALMFLAWGEAQECSPGGHQFLRSPYRSVRFDSWHLQQSAVQDLICDHSLSPGWYRFLILDRPAEMPTKCVEMNHCGTQAPIWLSLRDSETLPSPGEIKQLTACATWQFLFSTTKDCCLFQIPVSVRNCGNFSVYLLQPTQGCMGYCAEAISDARLHPCGSDETETGGDCVRQLAASLPPPPAGRPEVLVELIESRLFCRCSFDVPATKNSVGFHIAWSRLSSQEVKEELTQETTVQAFSLLELDGINLRLGDRIFCSASVFFLENPHVQSVAIESQEFFAGFKLQPELSTISEDGKEYYLRIESTVPIICSEFSELDQECKISLKLKTIGQGREHLGLNLALSSCHVDLLQTSSCANGTCSHTFVYYTAVTDFSRDGDRVSNIVVQPIVNEDFLWNNYIPDSIQIKVKDVPTAYCYTFTDPHIITFDGRVYDNFKTGTFVLYKSMSRDFEVHVRQWDCRSLHYPVSCNCGFVAQEGGDIVTFDMCNGQLRESQPYLFIKSQDVTRNIKISESYLGRKVTIWFSSGAFIRADLGEWGMSLTIRAPSVDYRNTLGLCGTFDENPENDFHDKNGMQIDQNFNNYVAFINEWRILPGKSMSDTLPVSMTSPGKPSYCSCSLDTAAYPSSEDLDSVSRSEIALGCKDLNHVSLSSLIPELDVTSEYINSDTLVREINKHTSPEEYNLNLFLQEKKHINLTKLGLNVQKHPGNEKEDSLQYLANKKYTQGRGSHSQEMRYNRQNRWKRQNFHEFPPLFAFPSLSQTDLEELTYFFPEDHAEDVQQEFFPSWPTPSGLTEYSTLTLCQETLANSSIGRLCLAFLGKRLDSVIEMCVKDVLLKDDLSWAEAGVALLENECEKRIVEEGKYNTEEYGTSIEDILSVLKCPNLCSGNGQCMEWGCACSPSFSSYDCSDSYDKAPEITELGNAGFCDVQKYNCMMVRVFGKGFKELPSIKCEVTKLQYNSSEWMPGEPIYTQTVFHNSRAVDCQLPTDVQQFDTMDLVGGKPTGKWQLKVSNDGYKFSNPKITVIYDGACQVCGLYKNDSCTIKENVCIIDGLCYVEGDKNPTSPCLICRPKISRFTWSFLENNQPPVIQALQDKLQTFYGENFEYQFVAFDPEGSDIHFTLDSGPEGASVSSAGLFMWKTDLLTTQQITVRLNDDCDAETRVTIEVTVKSCDCLNGGSCVSDRNFSPGSGVYLCVCLPGFHGSLCEVDISGCQSNPCGLGSYISGFHSYSCDCPPELKVETQFVNQFTTQTVVLTRSDKSVNKEEDDKNAQGRKRHVKPTSGNAFTICKYPCGKSRECVAPNICKCKPGYIGSNCQTALCDPDCKNHGKCIKPNICQCLPGHGGATCDEEHCNPPCQHGGTCLAGNLCTCPYGFVGPRCETMVCNRHCENGGQCLTPDICQCKPGWYGPTCSTALCDPVCLNGGSCNKPNTCLCPNGFFGEHCQNAFCHPPCKNGGHCMRNNVCVCREGYTGRRFQKSICDPTCMNGGKCVGPSTCSCPSGWSGKRCNTPICLQKCKNGGECIAPSICHCPSSWEGVRCQIPICNPKCLYGGRCIFPNVCSCRTEYSGVKCEKKIQIRRH

SEQ ID NO: 96933 - protein, 170 aa, Homo sapiens
  Payload ID: 19337
  Gene Name: von Willebrand factor D and EGF domains
  ENSP ID: ENSP00000317143
MPGGACVLVIALMFLAWGEAQECSPGGHQFLRSPYRSVRFDSWHLQQSAVQDLICDHSLSPGWYRFLILDRPAEMPTKCVEMNHCGTQAPIWLSLRDSETLPSPGEIKQLTACATWQFLFSTTKDCCLFQIPVSVRNCGNFSVYLLQPTQGCMGYCAEGFFAKIVKSPHT

SEQ ID NO: 96934 - protein, 1302 aa, Homo sapiens
  Payload ID: 19337
  Gene Name: von Willebrand factor D and EGF domains
  ENSP ID: ENSP00000401687
MPGGACVLVIALMFLAWGEAQECSPGGHQFLRSPYRSVRFDSWHLQQSAVQDLICDHSLSPGWYRFLILDRPAEMPTKCVEMNHCGTQAPIWLSLRDSETLPSPGEIKQLTACATWQFLFSTTKDCCLFQIPVSVRNCGNFSVYLLQPTQGCMGYCAEAISDARLHPCGSDETETGGDCVRQLAASLPPPPAGRPEVLVELIESRLFCRCSFDVPATKNSVGFHIAWSRLSSQEVKEELTQETTVQAFSLLELDGINLRLGDRIFCSASVFFLENPHVQSVAIESQEFFAGFKLQPELSTISEDGKEYYLRIESTVPIICSEFSELDQECKISLKLKTIGQGREHLGLNLALSSCHVDLLQTSSCANGTCSHTFVYYTAVTDFSRDGDRVSNIVVQPIVNEDFLWNNYIPDSIQIKVKDVPTAYCYTFTDPHIITFDGRVYDNFKTGTFVLYKSMSRDFEVHVRQWDCRSLHYPVSCNCGFVAQEGGDIVTFDMCNGQLRESQPYLFIKSQDVTRNIKISESYLGRKVTIWFSSGAFIRADLGEWGMSLTIRAPSVDYRNTLGLCGTFDENPENDFHDKNGMQIDQNFNNYVAFINEWRILPGKSMSDTLPVSMTSPGKPSYCSCSLDTAAYPSSEDLDSVSRSEIALGCKDLNHVSLSSLIPELDVTSEYINSDTLVREINKHTSPEEYNLNLFLQEKKHINLTKLGLNVQKHPGNEKEDSLQYLANKKYTQGRGSHSQEMRYNRQNRWKRQNFHEFPPLFAFPSLSQTDLEELTYFFPEDHAEDVQQEFFPSWPTPSGLTEYSTLTLCQETLANSSIGRLCLAFLGKRLDSVIEMCVKDVLLKDDLSWAEAGVALLENECEKRIVEEGKYNTEEYGTSIEDILSVLKCPNLCSGNGQCMEWGCACSPSFSSYDCSDSYDKAPEITELGNAGFCDVQKYNCMMVRVFGKGFKELPSIKCEVTKLQYNSSEWMPGEPIYTQTVFHNSRAVDCQLPTDVQQFDTMDLVGGKPTGKWQLKVSNDGYKFSNPKITVIYDGACQVCGLYKNDSCTIKENVCIIDGLCYVEGDKNPTSPCLICRPKISRFTWSFLENNQPPVIQALQDKLQTFYGENFEYQFVAFDPEGSDIHFTLDSGPEGASVSSAGLFMWKTDLLTTQQITVRLNDDCDAETRVTIEVTVKSCDCLNGGSCVSDRNFSPGSGVYLCVCLPGFHGSLCEVDISGCQSNPCGLGSYISGFHSYSCDCPPELKGKNCQEDVDECDSKPCFEGVACLNTFGSYHCGSCPEGFYGDGKICHGKSFYFLL

SEQ ID NO: 96935 - protein, 352 aa, Homo sapiens
  Payload ID: 19337
  Gene Name: von Willebrand factor D and EGF domains
  ENSP ID: ENSP00000428810
MPGGACVLVIALMFLAWGEAQECSPGGHQFLRSPYRSVRFDSWHLQQSAVQDLICDHSLSPGWYRFLILDRPAEMPTKCVEMNHCGTQAPIWLSLRDSETLPSPGEIKQLTACATWQFLFSTTKDCCLFQIPVSVRNCGNFSVYLLQPTQGCMGYCAEAISDARLHPCGSDETETGGDCVRQLAASLPPPPAGRPEVLVELIESRLFCRCSFDVPATKNSVGFHIAWSRLSSQEVKEELTQETTVQAFSLLELDGINLRLGDRIFCSASVFFLENPHVQSVAIESQEFFAGFKLQPELSTISEDGKEYYLRIESTVPIICSEFSELDQECKISLKLKTIGQDLVFFWGIYPC

SEQ ID NO: 96936 - protein, 944 aa, Homo sapiens
  Payload ID: 19337
  Gene Name: von Willebrand factor D and EGF domains
  ENSP ID: ENSP00000481403
MSLTIRAPSVDYRNTLGLCGTFDENPENDFHDKNGMQIDQNFNNYVAFINEWRILPGKSMSDTLPVSMTSPGKPSYCSCSLDTAAYPSSEDLDSVSRSEIALGCKDLNHVSLSSLIPELDVTSEYINSDTLVREINKHTSPEEYNLNLFLQEKKHINLTKLGLNVQKHPGNEKEDSLQYLANKKYTQGRGSHSQEMRYNRQNRWKRQNFHEFPPLFAFPSLSQTDLEELTYFFPEDHAEDVQQEFFPSWPTPSGLTEYSTLTLCQETLANSSIGRLCLAFLGKRLDSVIEMCVKDVLLKDDLSWAEAGVALLENECEKRIVEEGKYNTEEYGTSIEDILSVLKCPNLCSGNGQCMEWGCACSPSFSSYDCSDSYDKAPEITELGNAGFCDVQKYNCMMVRVFGKGFKELPSIKCEVTKLQYNSSEWMPGEPIYTQTVFHNSRAVDCQLPTDVQQFDTMDLVGGKPTGKWQLKVSNDGYKFSNPKITVIYDGACQVCGLYKNDSCTIKENVCIIDGLCYVEGDKNPTSPCLICRPKISRFTWSFLENNQPPVIQALQDKLQTFYGENFEYQFVAFDPEGSDIHFTLDSGPEGASVSSAGLFMWKTDLLTTQQITVRLNDDCDAETRVTIEVTVKSCDCLNGGSCVSDRNFSPGSGVYLCVCLPGFHGSLCEVDISGCQSNPCGLGSYISGFHSYSCDCPPELKVETQFVNQFTTQTVVLTRSDKSVNKEEDDKNAQGRKRHVKPTSGNAFTICKYPCGKSRECVAPNICKCKPGYIGSNCQTALCDPDCKNHGKCIKPNICQCLPGHGGATCDEEHCNPPCQHGGTCLAGNLCTCPYGFVGPRCETMVCNRHCENGGQCLTPDICQCKPGWYGPTCSTALCDPVCLNGGSCNKPNTCLCPNGFFGEHCQNAFCHPPCKNGGHCMRNNVCVCREGYTGRRFQKRHL

SEQ ID NO: 96937 - protein, 1058 aa, Homo sapiens
  Payload ID: 19338
  Gene Name: Vpr (HIV-1) binding protein
  Uniprot ID: Q9Y4B6
  ENSP ID: ENSP00000338857
MTTVVVHVDSKAELTTLLEQWEKEHGSGQDMVPILTRMSQLIEKETEEYRKGDPDPFDDRHPGRADPECMLGHLLRILFKNDDFMNALVNAYVMTSREPPLNTAACRLLLDIMPGLETAVVFQEKEGIVENLFKWAREADQPLRTYSTGLLGGAMENQDIAANYRDENSQLVAIVLRRLRELQLQEVALRQENKRPSPRKLSSEPLLPLDEEAVDMDYGDMAVDDAEIQKSALQIIINCVCGPDNRISSIGKFISGTPRRKLPQNPKSSEHTLAKMWNVVQSNNGIKVLLSLLSIKMPITDADQIRALACKALVGLSRSSTVRQIISKLPLFSSCQIQQLMKEPVLQDKRSDHVKFCKYAAELIERVSGKPLLIGTDVSLARLQKADVVAQSRISFPEKELLLLIRNHLISKGLGETATVLTKEADLPMTAASHSSAFTPVTAAASPVSLPRTPRIANGIATRLGSHAAVGASAPSAPTAHPQPRPPQGPLALPGPSYAGNSPLIGRISFIRERPSPCNGRKIRVLRQKSDHGAYSQSPAIKKQLDRHLPSPPTLDSIITEYLREQHARCKNPVATCPPFSLFTPHQCPEPKQRRQAPINFTSRLNRRASFPKYGGVDGGCFDRHLIFSRFRPISVFREANEDESGFTCCAFSARERFLMLGTCTGQLKLYNVFSGQEEASYNCHNSAITHLEPSRDGSLLLTSATWSQPLSALWGMKSVFDMKHSFTEDHYVEFSKHSQDRVIGTKGDIAHIYDIQTGNKLLTLFNPDLANNYKRNCATFNPTDDLVLNDGVLWDVRSAQAIHKFDKFNMNISGVFHPNGLEVIINTEIWDLRTFHLLHTVPALDQCRVVFNHTGTVMYGAMLQADDEDDLMEERMKSPFGSSFRTFNATDYKPIATIDVKRNIFDLCTDTKDCYLAVIENQGSMDALNMDTVCRLYEVGRQRLAEDEDEEEDQEEEEQEEEDDDEDDDDTDDLDELDTDQLLEAELEEDDNNENAGEDGDNDFSPSDEELANLLEEGEDGEDEDSDADEEVELILGDTDSSDNSDLEDDIILSLNE

SEQ ID NO: 96938 - protein, 1507 aa, Homo sapiens
  Payload ID: 19338
  Gene Name: Vpr (HIV-1) binding protein
  Uniprot ID: Q9Y4B6
  ENSP ID: ENSP00000393183
MTTVVVHVDSKAELTTLLEQWEKEHGSGQDMVPILTRMSQLIEKETEEYRKGDPDPFDDRHPGRADPECMLGHLLRILFKNDDFMNALVNAYVMTSREPPLNTAACRLLLDIMPGLETAVVFQEKEGIVENLFKWAREADQPLRTYSTGLLGGAMENQDIAANYRDENSQLVAIVLRRLRELQLQEVALRQENKRPSPRKLSSEPLLPLDEEAVDMDYGDMAVDVVDGDQEEASGDMEISFHLDSGHKTSSRVNSTTKPEDGGLKKNKSAKQGDRENFRKAKQKLGFSSSDPDRMFVELSNSSWSEMSPWVIGTNYTLYPMTPAIEQRLILQYLTPLGEYQELLPIFMQLGSRELMMFYIDLKQTNDVLLTFEALKHLASLLLHNKFATEFVAHGGVQKLLEIPRPSMAATGVSMCLYYLSYNQDAMERVCMHPHNVLSDVVNYTLWLMECSHASGCCHATMFFSICFSFRAVLELFDRYDGLRRLVNLISTLEILNLEDQGALLSDDEIFASRQTGKHTCMALRKYFEAHLAIKLEQVKQSLQRTEGGILVHPQPPYKACSYTHEQIVEMMEFLIEYGPAQLYWEPAEVFLKLSCVQLLLQLISIACNWKTYYARNDTVRFALDVLAILTVVPKIQLQLAESVDVLDEAGSTVSTVGISIILGVAEGEFFIHDAEIQKSALQIIINCVCGPDNRISSIGKFISGTPRRKLPQNPKSSEHTLAKMWNVVQSNNGIKVLLSLLSIKMPITDADQIRALACKALVGLSRSSTVRQIISKLPLFSSCQIQQLMKEPVLQDKRSDHVKFCKYAAELIERVSGKPLLIGTDVSLARLQKADVVAQSRISFPEKELLLLIRNHLISKGLGETATVLTKEADLPMTAASHSSAFTPVTAAASPVSLPRTPRIANGIATRLGSHAAVGASAPSAPTAHPQPRPPQGPLALPGPSYAGNSPLIGRISFIRERPSPCNGRKIRVLRQKSDHGAYSQSPAIKKQLDRHLPSPPTLDSIITEYLREQHARCKNPVATCPPFSLFTPHQCPEPKQRRQAPINFTSRLNRRASFPKYGGVDGGCFDRHLIFSRFRPISVFREANEDESGFTCCAFSARERFLMLGTCTGQLKLYNVFSGQEEASYNCHNSAITHLEPSRDGSLLLTSATWSQPLSALWGMKSVFDMKHSFTEDHYVEFSKHSQDRVIGTKGDIAHIYDIQTGNKLLTLFNPDLANNYKRNCATFNPTDDLVLNDGVLWDVRSAQAIHKFDKFNMNISGVFHPNGLEVIINTEIWDLRTFHLLHTVPALDQCRVVFNHTGTVMYGAMLQADDEDDLMEERMKSPFGSSFRTFNATDYKPIATIDVKRNIFDLCTDTKDCYLAVIENQGSMDALNMDTVCRLYEVGRQRLAEDEDEEEDQEEEEQEEEDDDEDDDDTDDLDELDTDQLLEAELEEDDNNENAGEDGDNDFSPSDEELANLLEEGEDGEDEDSDADEEVELILGDTDSSDNSDLEDDIILSLNE

SEQ ID NO: 96939 - protein, 1506 aa, Homo sapiens
  Payload ID: 19338
  Gene Name: Vpr (HIV-1) binding protein
  Uniprot ID: Q9Y4B6
  ENSP ID: ENSP00000421724
MTTVVVHVDSKAELTTLLEQWEKEHGSGQDMVPILTRMSQLIEKETEEYRKGDPDPFDDRHPGRADPECMLGHLLRILFKNDDFMNLVNAYVMTSREPPLNTAACRLLLDIMPGLETAVVFQEKEGIVENLFKWAREADQPLRTYSTGLLGGAMENQDIAANYRDENSQLVAIVLRRLRELQLQEVALRQENKRPSPRKLSSEPLLPLDEEAVDMDYGDMAVDVVDGDQEEASGDMEISFHLDSGHKTSSRVNSTTKPEDGGLKKNKSAKQGDRENFRKAKQKLGFSSSDPDRMFVELSNSSWSEMSPWVIGTNYTLYPMTPAIEQRLILQYLTPLGEYQELLPIFMQLGSRELMMFYIDLKQTNDVLLTFEALKHLASLLLHNKFATEFVAHGGVQKLLEIPRPSMAATGVSMCLYYLSYNQDAMERVCMHPHNVLSDVVNYTLWLMECSHASGCCHATMFFSICFSFRAVLELFDRYDGLRRLVNLISTLEILNLEDQGALLSDDEIFASRQTGKHTCMALRKYFEAHLAIKLEQVKQSLQRTEGGILVHPQPPYKACSYTHEQIVEMMEFLIEYGPAQLYWEPAEVFLKLSCVQLLLQLISIACNWKTYYARNDTVRFALDVLAILTVVPKIQLQLAESVDVLDEAGSTVSTVGISIILGVAEGEFFIHDAEIQKSALQIIINCVCGPDNRISSIGKFISGTPRRKLPQNPKSSEHTLAKMWNVVQSNNGIKVLLSLLSIKMPITDADQIRALACKALVGLSRSSTVRQIISKLPLFSSCQIQQLMKEPVLQDKRSDHVKFCKYAAELIERVSGKPLLIGTDVSLARLQKADVVAQSRISFPEKELLLLIRNHLISKGLGETATVLTKEADLPMTAASHSSAFTPVTAAASPVSLPRTPRIANGIATRLGSHAAVGASAPSAPTAHPQPRPPQGPLALPGPSYAGNSPLIGRISFIRERPSPCNGRKIRVLRQKSDHGAYSQSPAIKKQLDRHLPSPPTLDSIITEYLREQHARCKNPVATCPPFSLFTPHQCPEPKQRRQAPINFTSRLNRRASFPKYGGVDGGCFDRHLIFSRFRPISVFREANEDESGFTCCAFSARERFLMLGTCTGQLKLYNVFSGQEEASYNCHNSAITHLEPSRDGSLLLTSATWSQPLSALWGMKSVFDMKHSFTEDHYVEFSKHSQDRVIGTKGDIAHIYDIQTGNKLLTLFNPDLANNYKRNCATFNPTDDLVLNDGVLWDVRSAQAIHKFDKFNMNISGVFHPNGLEVIINTEIWDLRTFHLLHTVPALDQCRVVFNHTGTVMYGAMLQADDEDDLMEERMKSPFGSSFRTFNATDYKPIATIDVKRNIFDLCTDTKDCYLAVIENQGSMDALNMDTVCRLYEVGRQRLAEDEDEEEDQEEEEQEEEDDDEDDDDTDDLDELDTDQLLEAELEEDDNNENAGEDGDNDFSPSDEELANLLEEGEDGEDEDSDADEEVELILGDTDSSDNSDLEDDIILSLNE

SEQ ID NO: 96940 - protein, 941 aa, Homo sapiens; identical to SEQ ID NO: 96128
  Payload ID: 19339
  Gene Name: VPS11, CORVET/HOPS core subunit
  ENSP ID: ENSP00000485929

SEQ ID NO: 96941 - protein, 931 aa, Homo sapiens; identical to SEQ ID NO: 96129
  Payload ID: 19339
  Gene Name: VPS11, CORVET/HOPS core subunit
  ENSP ID: ENSP00000486795

SEQ ID NO: 96942 - protein, 181 aa, Homo sapiens; identical to SEQ ID NO: 96130
  Payload ID: 19339
  Gene Name: VPS11, CORVET/HOPS core subunit
  ENSP ID: ENSP00000487072
  MOD_RES (1)..(1): Any amino acid

SEQ ID NO: 96943 - protein, 484 aa, Homo sapiens; identical to SEQ ID NO: 96127
  Payload ID: 19339
  Gene Name: VPS11, CORVET/HOPS core subunit
  ENSP ID: ENSP00000487452

SEQ ID NO: 96944 - protein, 327 aa, Homo sapiens
  Payload ID: 19340
  Gene Name: VPS26 retromer complex component A
  Uniprot ID: O75436
  ENSP ID: ENSP00000263559
MSFLGGFFGPICEIDIVLNDGETRKMAEMKTEDGKVEKHYLFYDGESVSGKVNLAFKQPGKRLEHQGIRIEFVGQIELFNDKSNTHEFVNLVKELALPGELTQSRSYDFEFMQVEKPYESYIGANVRLRYFLKVTIVRRLTDLVKEYDLIVHQLATYPDVNNSIKMEVGIEDCLHIEFEYNKSKYHLKDVIVGKIYFLLVRIKIQHMELQLIKKEITGIGPSTTTETETIAKYEIMDGAPVKGESIPIRLFLAGYDPTPTMRDVNKKFSVRYFLNLVLVDEEDRRYFKQQEIILWRKAPEKLRKQRTNFHQRFESPESQASAEQPEM

SEQ ID NO: 96945 - protein, 327 aa, Homo sapiens; identical to SEQ ID NO: 96944
  Payload ID: 19340
  Gene Name: VPS26 retromer complex component A
  Uniprot ID: O75436
  ENSP ID: ENSP00000362480

SEQ ID NO: 96946 - protein, 251 aa, Homo sapiens
  Payload ID: 19340
  Gene Name: VPS26 retromer complex component A
  Uniprot ID: O75436
  ENSP ID: ENSP00000378532
MSFLGGFFGPICEIDIVLNDGETRKMAEMKTEDGKVEKHYLFYDGESVSGKVNLAFKQPGKRLEHQGIRIEFVGQIELFNDKSNTHEFVNLVKELALPGELTQSRSYDFEFMQVEKPYESYIGANVRLRYFLKVTIVRRLTDLVKEYDLIVHQLATYPDVNNSIKMEVGIEDCLHIEFEYNKSKYHLKDVIVGKIYFLLVRIKIQHMELQLIKKEITGIGPSTTTETETIAKYEIMDGAPVKGDNFMEKSS

SEQ ID NO: 96947 - protein, 63 aa, Homo sapiens
  Payload ID: 19340
  Gene Name: VPS26 retromer complex component A
  ENSP ID: ENSP00000473746
MSFLGGFFGPICEIDIVLNDGETRKMAEMKTEDGKVEKHYLFYDGESVSGKNFSMTRVILMNL

SEQ ID NO: 96948 - protein, 226 aa, Homo sapiens
  Payload ID: 19340
  Gene Name: VPS26 retromer complex component A
  ENSP ID: ENSP00000474611
MAEMKTEDGKVEKHYLFYDGESVSGKVNLAFKQPGKRLEHQGIRIEFVGQIELFNDKSNTHEFVNLVKELALPGELTQSRSYDFEFMQVEKPYESYIGANVRLRYFLKVTIVRRLTDLVKEYDLIVHQLATYPDVNNSIKMEVGIEDCLHIEFEYNKSKYHLKDVIVGKIYFLLVRIKIQHMELQLIKKEITGIGPSTTTETETIAKYEIMDGAPVKGDNFMEKSS

SEQ ID NO: 96949 - protein, 336 aa, Homo sapiens
  Payload ID: 19341
  Gene Name: VPS26 retromer complex component B
  Uniprot ID: Q4G0F5
  ENSP ID: ENSP00000281187
MSFFGFGQSVEVEILLNDAESRKRAEHKTEDGKKEKYFLFYDGETVSGKVSLALKNPNKRLEHQGIKIEFIGQIELYYDRGNHHEFVSLVKDLARPGEITQSQAFDFEFTHVEKPYESYTGQNVKLRYFLRATISRRLNDVVKEMDIVVHTLSTYPELNSSIKMEVGIEDCLHIEFEYNKSKYHLKDVIVGKIYFLLVRIKIKHMEIDIIKRETTGTGPNVYHENDTIAKYEIMDGAPVRGESIPIRLFLAGYELTPTMRDINKKFSVRYYLNLVLIDEEERRYFKQQEVVLWRKGDIVRKSMSHQAAIASQRFEGTTSLGEVRTPSQLSDNNCRQ

SEQ ID NO: 96950 - protein, 72 aa, Homo sapiens
  Payload ID: 19341
  Gene Name: VPS26 retromer complex component B
  ENSP ID: ENSP00000431672
  MOD_RES (1)..(1): Any amino acid
XAEHKTEDGKKEKYFLFYDGETVSGKVSLALKNPNKRLEHQGIKIEFIGQIAISFVLPSAAASMMLSKRWTL

SEQ ID NO: 96951 - protein, 336 aa, Homo sapiens; identical to SEQ ID NO: 96949
  Payload ID: 19341
  Gene Name: VPS26 retromer complex component B
  Uniprot ID: Q4G0F5
  ENSP ID: ENSP00000434162

SEQ ID NO: 96952 - protein, 48 aa, Homo sapiens
  Payload ID: 19341
  Gene Name: VPS26 retromer complex component B
  ENSP ID: ENSP00000486811
GEITQSQAFDFEFTHVEKPYESYTGQNVKLRGFVLSVCTAERKVLKPV

SEQ ID NO: 96953 - protein, 186 aa, Homo sapiens
  Payload ID: 19342
  Gene Name: VPS29 retromer complex component
  Uniprot ID: Q9UBQ0
  ENSP ID: ENSP00000353786
MAGHRLVLVLGDLHIPHRCNSLPAKFKKLLVPGKIQHILCTGNLCTKESYDYLKTLAGDVHIVRGDFDENLNYPEQKVVTVGQFKIGLIHGHQVIPWGDMASLALLQRQFDVDILISGHTHKFEAFEHENKFYINPGSATGAYNALETNIIPSFVLMDIQASTVVTYVYQLIGDDVKVERIEYKKP

SEQ ID NO: 96954 - protein, 87 aa, Homo sapiens
  Payload ID: 19342
  Gene Name: VPS29 retromer complex component
  ENSP ID: ENSP00000400048
MASLALLQRQFDVDILISGHTHKFEAFEHENKFYINPGSATGAYNALETNIIPSFVLMDIQASTVVTYVYQLIGDDVKVERIEYKKP

SEQ ID NO: 96955 - protein, 182 aa, Homo sapiens [sequence omitted]

SEQ ID NO: 96956 - protein, 87 aa, Homo sapiens; identical to SEQ ID NO: 96954
  Payload ID: 19342
  Gene Name: VPS29 retromer complex component
  ENSP ID: ENSP00000447634

SEQ ID NO: 96957 - protein, 214 aa, Homo sapiens
  Payload ID: 19342
  Gene Name: VPS29 retromer complex component
  ENSP ID: ENSP00000449044
MSRCALRGRDLALAIAGTVSFHGLLRLFRAGHRLVLVLGDLHIPHRCNSLPAKFKKLLVPGKIQHILCTGNLCTKESYDYLKTLAGDVHIVRGDFDENLNYPEQKVVTVGQFKIGLIHGHQVIPWGDMASLALLQRQFDVDILISGHTHKFEAFEHENKFYINPGSATGAYNALETNIIPSFVLMDIQASTVVTYVYQLIGDDVKVERIEYKKP

SEQ ID NO: 96958 - protein, 87 aa, Homo sapiens; identical to SEQ ID NO: 96954
  Payload ID: 19342
  Gene Name: VPS29 retromer complex component
  ENSP ID: ENSP00000449954

SEQ ID NO: 96959 - protein, 214 aa, Homo sapiens; identical to SEQ ID NO: 96957
  Payload ID: 19342
  Gene Name: VPS29 retromer complex component
  ENSP ID: ENSP00000480853

SEQ ID NO: 96960 - protein, 444 aa, Homo sapiens
  Payload ID: 19343
  Gene Name: VPS33B interacting protein, apical-basolateral polarity regulator, spe-39 homolog
  Uniprot ID: Q9H9C1
  ENSP ID: ENSP00000313098
MNRTKGDEEEYWNSSKFKAFTFDDEDDELSQLKESKRAVNSLRDFVDDDDDDDLERVSWSGEPVGSRTRPGSFQSLSDALSDTPAKSYAPELGRPKGEYRDYSNDWSPSDTVRRLRKGKVCSLERFRSLQDKLQLLEEAVSMHDGNVITAVLIFLKRTLSKEILFRELEVRQVALRHLIHFLKEIGDQKLLLDLFRFLDRTEELALSHYREHLNIQDPDKRKEFLKTCVGLPFSAEDSAHIQDHYTLLERQIIIEANDRHLESAGQTEIFRKHPRKASILNMPLVTTLFYSCFYHYTEAEGTFSSPVNLKKTFKIPDKQYVLTALAARAKLRAWNDVDALFTTKNWLGYTKKRAPIGFHRVVEILHKNNAPVQILQEYVNLVEDVDTKLNLATKFKCHDVVIDTYRDLKDRQQLLAYRSKVDKGSAEEEKIDALLSSSQIRWKN

SEQ ID NO: 96961 - protein, 493 aa, Homo sapiens
  Payload ID: 19343
  Gene Name: VPS33B interacting protein, apical-basolateral polarity regulator, spe-39 homolog
  Uniprot ID: Q9H9C1
  ENSP ID: ENSP00000339122
MNRTKGDEEEYWNSSKFKAFTFDDEDDELSQLKESKRAVNSLRDFVDDDDDDDLERVSWSGEPVGSISWSIRETAGNSGSTHEGREQLKSRNSFSSYAQLPKPTSTYSLSSFFRGRTRPGSFQSLSDALSDTPAKSYAPELGRPKGEYRDYSNDWSPSDTVRRLRKGKVCSLERFRSLQDKLQLLEEAVSMHDGNVITAVLIFLKRTLSKEILFRELEVRQVALRHLIHFLKEIGDQKLLLDLFRFLDRTEELALSHYREHLNIQDPDKRKEFLKTCVGLPFSAEDSAHIQDHYTLLERQIIIEANDRHLESAGQTEIFRKHPRKASILNMPLVTTLFYSCFYHYTEAEGTFSSPVNLKKTFKIPDKQYVLTALAARAKLRAWNDVDALFTTKNWLGYTKKRAPIGFHRVVEILHKNNAPVQILQEYVNLVEDVDTKLNLATKFKCHDVVIDTYRDLKDRQQLLAYRSKVDKGSAEEEKIDALLSSSQIRWKN

SEQ ID NO: 96962 - protein, 444 aa, Homo sapiens; identical to SEQ ID NO: 96960
  Payload ID: 19343
  Gene Name: VPS33B interacting protein, apical-basolateral polarity regulator, spe-39 homolog
  Uniprot ID: Q9H9C1
  ENSP ID: ENSP00000404815

SEQ ID NO: 96963 - protein, 519 aa, Homo sapiens
  Payload ID: 19343
  Gene Name: VPS33B interacting protein, apical-basolateral polarity regulator, spe-39 homolog
  ENSP ID: ENSP00000451857
MTTGLILFFQSGRPLGAGVRLGLGLRMNRTKGDEEEYWNSSKFKAFTFDDEDDELSQLKESKRAVNSLRDFVDDDDDDDLERVSWSGEPVGSISWSIRETAGNSGSTHEGREQLKSRNSFSSYAQLPKPTSTYSLSSFFRGRTRPGSFQSLSDALSDTPAKSYAPELGRPKGEYRDYSNDWSPSDTVRRLRKGKVCSLERFRSLQDKLQLLEEAVSMHDGNVITAVLIFLKRTLSKEILFRELEVRQVALRHLIHFLKEIGDQKLLLDLFRFLDRTEELALSHYREHLNIQDPDKRKEFLKTCVGLPFSAEDSAHIQDHYTLLERQIIIEANDRHLESAGQTEIFRKHPRKASILNMPLVTTLFYSCFYHYTEAEGTFSSPVNLKKTFKIPDKQYVLTALAARAKLRAWNDVDALFTTKNWLGYTKKRAPIGFHRVVEILHKNNAPVQILQEYVNLVEDVDTKLNLATKFKCHDVVIDTYRDLKDRQQLLAYRSKVDKGSAEEEKIDALLSSSQIRWKN

SEQ ID NO: 96964 - protein, 45 aa, Homo sapiens
  Payload ID: 19343
  Gene Name: VPS33B interacting protein, apical-basolateral polarity regulator, spe-39 homolog
  ENSP ID: ENSP00000452176
MNRTKGDEEEYWNSSKFKAFTFDDEDDELSQLKESKRAVNSLRDF

SEQ ID NO: 96965 - protein, 493 aa, Homo sapiens; identical to SEQ ID NO: 96961
  Payload ID: 19343
  Gene Name: VPS33B interacting protein, apical-basolateral polarity regulator, spe-39 homolog
  Uniprot ID: Q9H9C1
  ENSP ID: ENSP00000452181

SEQ ID NO: 96966 - protein, 493 aa, Homo sapiens; identical to SEQ ID NO: 96961
  Payload ID: 19343
  Gene Name: VPS33B interacting protein, apical-basolateral polarity regulator, spe-39 homolog
  Uniprot ID: Q9H9C1
  ENSP ID: ENSP00000452191

SEQ ID NO: 96967 - protein, 796 aa, Homo sapiens
  Payload ID: 19344
  Gene Name: VPS35 retromer complex component
  Uniprot ID: Q96QK1
  ENSP ID: ENSP00000299138
MPTTQQSPQDEQEKLLDEAIQAVKVQSFQMKRCLDKNKLMDALKHASNMLGELRTSMLSPKSYYELYMAISDELHYLEVYLTDEFAKGRKVADLYELVQYAGNIIPRLYLLITVGVVYVKSFPQSRKDILKDLVEMCRGVQHPLRGLFLRNYLLQCTRNILPDEGEPTDEETTGDISDSMDFVLLNFAEMNKLWVRMQHQGHSRDREKRERERQELRILVGTNLVRLSQLEGVNVERYKQIVLTGILEQVVNCRDALAQEYLMECIIQVFPDEFHLQTLNPFLRACAELHQNVNVKNIIIALIDRLALFAHREDGPGIPADIKLFDIFSQQVATVIQSRQDMPSEDVVSLQVSLINLAMKCYPDRVDYVDKVLETTVEIFNKLNLEHIATSSAVSKELTRLLKIPVDTYNNILTVLKLKHFHPLFEYFDYESRKSMSCYVLSNVLDYNTEIVSQDQVDSIMNLVSTLIQDQPDQPVEDPDPEDFADEQSLVGRFIHLLRSEDPDQQYLILNTARKHFGAGGNQRIRFTLPPLVFAAYQLAFRYKENSKVDDKWEKKCQKIFSFAHQTISALIKAELAELPLRLFLQGALAAGEIGFENHETVAYEFMSQAFSLYEDEISDSKAQLAAITLIIGTFERMKCFSEENHEPLRTQCALAASKLLKKPDQGRAVSTCAHLFWSGRNTDKNGEELHGGKRVMECLKKALKIANQCMDPSLQVQLFIEILNRYIYFYEKENDAVTIQVLNQLIQKIREDLPNLESSEETEQINKHFHNTLEHLRLRRESPESEGPIYEGLIL

SEQ ID NO: 96968 - protein, 48 aa, Homo sapiens
  Payload ID: 19344
  Gene Name: VPS35 retromer complex component
  ENSP ID: ENSP00000456274
MVSAEGAVAPGSTLLVAPALSHRPALQRVEKGPHRPFGIKTSPIWPAG

SEQ ID NO: 96969 - protein, 47 aa, Homo sapiens
  Payload ID: 19344
  Gene Name: VPS35 retromer complex component
  ENSP ID: ENSP00000461423
MPTTQQSPQDEQEKLLDEAIQAVKVQSFQMKRCLCFLYLKELLAFLS

SEQ ID NO: 96970 - protein, 41 aa, Homo sapiens
  Payload ID: 19344
  Gene Name: VPS35 retromer complex component
  ENSP ID: ENSP00000461469
MPTTQQSPQDEQEKLLDEAIQAVKVQSFQMKRCLELLAFLS

SEQ ID NO: 96971 - protein, 327 aa, Homo sapiens
  Payload ID: 19345
  Gene Name: VPS50 EARP/GARPII complex subunit
  Uniprot ID: Q96JG6
  ENSP ID: ENSP00000251739
MQKIKSLMTRQGLKSPQESLSDLGAIESLRVPGKEEFRELREQPSDPQAEQELINSIEQVYFSVDSFDIVKYELEKLPPVLNLQELEAYRDKLKQQQAAVSKKVADLILEKQPAYVKELERVTSLQTGLQLAAVICTNGRRHLNIAKEGFTQASLGLLANQRKRQLLIGLLKSLRTIKTLQRTDVRLSEMLEEEDYPGAIQLCLECQKAASTFKHYSCISELNSKLQDTLEQIEEQLDVALSKICKNFDINHYTKVQQAYRLLGKTQTAMDQLHMHFTQAIHNTVFQVVLGYVELCAGNTDTKFQKLQYKDLCTVCSDLITIHISLL

SEQ ID NO: 96972 - protein, 964 aa, Homo sapiens
  Payload ID: 19345
  Gene Name: VPS50 EARP/GARPII complex subunit
  Uniprot ID: Q96JG6
  ENSP ID: ENSP00000307666
MQKIKSLMTRQGLKSPQESLSDLGAIESLRVPGKEEFRELREQPSDPQAEQELINSIEQVYFSVDSFDIVKYELEKLPPVLNLQELEAYRDKLKQQQAAVSKKVADLILEKQPAYVKELERVTSLQTGLQLAAVICTNGRRHLNIAKEGFTQASLGLLANQRKRQLLIGLLKSLRTIKTLQRTDVRLSEMLEEEDYPGAIQLCLECQKAASTFKHYSCISELNSKLQDTLEQIEEQLDVALSKICKNFDINHYTKVQQAYRLLGKTQTAMDQLHMHFTQAIHNTVFQVVLGYVELCAGNTDTKFQKLQYKDLCTHVTPDSYIPCLADLCKALWEVMLSYYRTMEWHEKHDNEDTASASEGSNMIGTEETNFDRGYIKKKLEHGLTRIWQDVQLKVKTYLLGTDLSIFKYDDFIFVLDIISRLMQVGEEFCGSKSEVLQESIRKQSVNYFKNYHRTRLDELRMFLENETWELCPVKSNFSILQLHEFKFMEQSRSPSVSPSKQPVSTSSKTVTLFEQYCSGGNPFEIQANHKDEETEDVLASNGYESDEQEKSAYQEYDSDSDVPEELKRDYVDEQTGDGPVKSVSRETLKSRKKSDYSLNKVNAPILTNTTLNVIRLVGKYMQMMNILKPIAFDVIHFMSQLFDYYLYAIYTFFGRNDSLESTGLGLSSSRLRTTLNRIQESLIDLEVSADPTATLTAAEERKEKVPSPHLSHLVVLTSGDTLYGLAERVVATESLVFLAEQFEFLQPHLDAVMPAVKKPFLQQFYSQTVSTASELRKPIYWIVAGKALDYEQMLLLMANVKWDVKEIMSQHNIYVDALLKEFEQFNRRLNEVSKRVRIPLPVSNILWEHCIRLANRTIVEGYANVKKCSNEGRALMQLDFQQFLMKLEKLTDIRPIPDKEFVETYIKAYYLTENDMERWIKEHREYSTKQLTNLVNVCLGSHINKKARQKLLAAIDDIDRPKR

SEQ ID NO: 96973 - protein, 155 aa, Homo sapiens
  Payload ID: 19345
  Gene Name: VPS50 EARP/GARPII complex subunit
  ENSP ID: ENSP00000390584
  MOD_RES (1)..(1): Any amino acid
XRKPIYWIVAGKALDYEQMLLLMANVKWDVKEIMSQHNIYVDALLKEFEQFNRRLNEVSKRVRIPLPVSNILWEHCIRLANRTIVEGYANVKKCSNEGRALMQLDFQQFLMKLEKLTDIRPIPDKEFVETYIKAYYLTENDMERWIKEHRVRAGK

SEQ ID NO: 96974 - protein, 37 aa, Homo sapiens
  Payload ID: 19345
  Gene Name: VPS50 EARP/GARPII complex subunit
  ENSP ID: ENSP00000395433
MQKIKSLMTRQGLKSPQESLSDLGAIESLRVPGKLEP

SEQ ID NO: 96975 - protein, 189 aa, Homo sapiens
  Payload ID: 19345
  Gene Name: VPS50 EARP/GARPII complex subunit
  ENSP ID: ENSP00000405553
MQKIKSLMTRQGLKSPQESLSDLGAIESLRVPGKEEFRELREQPSDPQAEQELINSIEQVYFSVDSFDIVKYELELPPVLNLQELEAYRDKLKQQQAAVSKKVADLILEKQPAYVKELERVTSLQTGLQLAAVICTNGRRHLNIAKEGFTQASLGLLANQRKRQLLIGLLKSLRTIKTLQRTDVRLSEM

SEQ ID NO: 96976 - protein, 39 aa, Homo sapiens
  Payload ID: 19345
  Gene Name: VPS50 EARP/GARPII complex subunit
  ENSP ID: ENSP00000406787
MQKIKSLMTRQGLKSPQESLSDLGAIESLRVPGKVLSYT

SEQ ID NO: 96977 - protein, 469 aa, Homo sapiens
  Payload ID: 19345
  Gene Name: VPS50 EARP/GARPII complex subunit
  ENSP ID: ENSP00000414450
  MOD_RES (1)..(1): Any amino acid
XHYSCISELNSKLQDTLEQIEEQLDVALSKICKNFDINHYTKVQQAYRLLGKTQTAMDQLHMHFTQAIHNTVFQVVLGYVELCAGNTDTKFQKLQYKDLCTHVTPDSYIPCLADLCKALWEVMLSYYRTMEWHEKHDNEDTASASEGSNMIGTEETNFDRGYIKKKLEHGLTRIWQDVQLKVKTYLLGTDLSIFKYDDFIFVLDIISRLMQVGEEFCGSKSEVLQESIRKQSVNYFKNYHRTRLDELRMFLENETWELCPVKSNFSILQLHEFKFMEQSRSPSVSPSKQPVSTSSKTVTLFEQYCSGGNPFEIQANHKDEETEDVLASNGYESDEQEKSAYQEYDSDSDVPEELKRDYVDEQTGDGPVKSVSRETLKSRKKSDYSLNKVNAPILTNTTLNVIRLVDGVSLCCLGWSTVAHLHSLQAPPPGFKPFSCLSLPRSWDYRRPPPRPANFLYFLFFSRDGVSPC

SEQ ID NO: 96978 - protein, 39 aa, Homo sapiens; identical to SEQ ID NO: 96976
  Payload ID: 19345
  Gene Name: VPS50 EARP/GARPII complex subunit
  ENSP ID: ENSP00000415809

SEQ ID NO: 96979 - protein, 934 aa, Homo sapiens
  Payload ID: 19345
  Gene Name: VPS50 EARP/GARPII complex subunit
  Uniprot ID: Q96JG6
  ENSP ID: ENSP00000443104
MLTLEEFRELREQPSDPQAEQELINSIEQVYFSVDSFDIVKYELEKLPPVLNLQELEAYRDKLKQQQAAVSKKVADLILEKQPAYVKELERVTSLQTGLQLAAVICTNGRRHLNIAKEGFTQASLGLLANQRKRQLLIGLLKSLRTIKTLQRTDVRLSEMLEEEDYPGAIQLCLECQKAASTFKHYSCISELNSKLQDTLEQIEEQLDVALSKICKNFDINHYTKVQQAYRLLGKTQTAMDQLHMHFTQAIHNTVFQVVLGYVELCAGNTDTKFQKLQYKDLCTHVTPDSYIPCLADLCKALWEVMLSYYRTMEWHEKHDNEDTASASEGSNMIGTEETNFDRGYIKKKLEHGLTRIWQDVQLKVKTYLLGTDLSIFKYDDFIFVLDIISRLMQVGEEFCGSKSEVLQESIRKQSVNYFKNYHRTRLDELRMFLENETWELCPVKSNFSILQLHEFKFMEQSRSPSVSPSKQPVSTSSKTVTLFEQYCSGGNPFEIQANHKDEETEDVLASNGYESDEQEKSAYQEYDSDSDVPEELKRDYVDEQTGDGPVKSVSRETLKSRKKSDYSLNKVNAPILTNTTLNVIRLVGKYMQMMNILKPIAFDVIHFMSQLFDYYLYAIYTFFGRNDSLESTGLGLSSSRLRTTLNRIQESLIDLEVSADPTATLTAAEERKEKVPSPHLSHLVVLTSGDTLYGLAERVVATESLVFLAEQFEFLQPHLDAVMPAVKKPFLQQFYSQTVSTASELRKPIYWIVAGKALDYEQMLLLMANVKWDVKEIMSQHNIYVDALLKEFEQFNRRLNEVSKRVRIPLPVSNILWEHCIRLANRTIVEGYANVKKCSNEGRALMQLDFQQFLMKLEKLTDIRPIPDKEFVETYIKAYYLTENDMERWIKEHREYSTKQLTNLVNVCLGSHINKKARQKLLAAIDDIDRPKR

SEQ ID NO: 96980 - protein, 631 aa, Homo sapiens
  Payload ID: 19346
  Gene Name: VPS9 domain containing 1
  Uniprot ID: Q9Y2B5
  ENSP ID: ENSP00000374037
MAAAAGDGTVKPLQSAMKLANGAIELDTGNRPREAYTEYLRSIHYISQVLLEEVETTKEAGETVPPDTSKMLKLAQQCLERAQSTAAKLGKTRLKPTMPAAAPIPQPAGRHRRVYSDEGGKLSPFLPPEIFQKLQGAESQSCKKELTPLEEASLQNQKLKAAYEARMARLDPSQAMQKTSLTLSLQRQMMENLVIAKAREETLQRKMEERRLRLQEAANRRFCSQVALTPEEREQRALYAAILEYEQDHDWPKHWKAKLKRNPGDLSLVTSLVSHLLSLPDHPIAQLLRRLQCSVYSALYPAVSRAAAPAPGCCPPTPNPGSRRLRPSQSLHCMLSPPEPSAAPRPQDSPPTPPLQPGPVGSPSPLGDTASGLPDKDSSFEDLEQFLGTSERQGRGRGVQPEPQLQQLKTAVEEIHNAVDRLLSLTLLAFEGLNTAASKDRCLACIEEPFFSPLWPLLLALYRSVHRAREAALSRSMELYRNAPPTAIGIPTKLLPQNPEAKGATGYPYCAAAQELGLLVLESCPQKKLECIVRTLRIICVCAEDYCPTPEATPQAGPPPIAAAAIGADDLLPILSFVVLRSGLPQLVSECAALEEFIHEGYLIGEEGYCLTSLQSALSYVELLPRGGLAK

SEQ ID NO: 96981 - protein, 561 aa, Homo sapiens
  Payload ID: 19346
  Gene Name: VPS9 domain containing 1
  ENSP ID: ENSP00000454244
MLKLAQQCLERAQSTAAKLGKTRLKPTMPAAAPIPQPAGRHRRVYSDEGGKLSPFLPPEIFQKLQGAESQSCKKELTPLEEASLQNQKLKAAYEARMARLDPSQAMQKTSLTLSLQRQMMENLVIAKAREETLQRKMEERRLRLQEAANRRFCSQVALTPEEREQRALYAAILEYEQDHDWPKHWKAKLKRNPGDLSLVTSLVSHLLSLPDHPIAQLLRRLQCSVYSALYPAVSRAAAPAPGCCPPTPNPGSRRLRPSQSLHCMLSPPEPSAAPRPQDSPPTPPLQPGPVGSPSPLGDTASGLPDKDSSFEDLEQFLGTSERQGRGRGVQPEPQLQQLKTAVEEIHNAVDRLLSLTLLAFEGLNTAASKDRCLACIEEPFFSPLWPLLLALYRSVHRAREAALSRSMELYRNAPPTAIGIPTKLLPQNPEAKGATGYPYCAAAQELGLLVLESCPQKKLECIVRTLRIICVCAEDYCPTPEATPQAGPPPIAAAAIGADDLLPILSFVVLRSGLPQLVSECAALEEFIHEGYLIGEEGYCLTSLQSALSYVELLPRGGLAK

SEQ ID NO: 96982 - protein, 52 aa, Homo sapiens
  Payload ID: 19346
  Gene Name: VPS9 domain containing 1
  ENSP ID: ENSP00000454889
MAAAAGDGTVKPLQSAMKLANGAIELDTGNRPRRADATGGGLPAESEAEGCV

SEQ ID NO: 96983 - protein, 232 aa, Homo sapiens
  Payload ID: 19346
  Gene Name: VPS9 domain containing 1
  ENSP ID: ENSP00000455792
  MOD_RES (1)..(1): Any amino acid
XEPQLQQLKTAVEEIHNAVADRLLSLTLLAFEGLNTAASKDRCLACIEEPFFSPLWPLLLALYRSVHRAREAALSRSMELYRNAPPTAIGIPTKLLPQNPEAKGATGYPYCAAAQELGLLVLESCPQKKLECIVRTLRIICVCAEDYCPTPEATPQAGPPPIAAAAIGADDLLPILSFVVLRSGLPQLVSECAALEEFIHEGYLIGEEGYCLTSLQSALSYVELLPRGGLAK

SEQ ID NO: 96984 - protein, 438 aa, Homo sapiens
  Payload ID: 19346
  Gene Name: VPS9 domain containing 1
  ENSP ID: ENSP00000484791
MLLCPAQKTVFRLQLTTAAQCLWVYLRDKQVVVFLAYPTRAPGRNNGVTSLHWPDPTLSLSWTQEAYTEYLRSIHYISQVLLEEVETTKEAGETVPPDTSKMLKLAQQCLERAQSTAAKLGKTRLKPTMPAAAPIPQPAGRHRRVYSDEGGKLSPFLPPEIFQKLQGAESQSCKKELTPLEEASLQNQKLKAAYEARMARLDPSQAMQKTSLTLSLQRQMMENLVIAKAREETLQRKMEERRLRLQEAANRRFCSQVALTPEEREQRALYAAILEYEQDHDWPKHWKAKLKRNPGDLSLVTSLVSHLLSLPDHPIAQLLRRLQCSVYSALYPAVSRAAAPAPGCCPPTPNPGSRRLRPSQSLHCMLSPPEPSAAPRPQDSPPTPPLQPGPWGLPHPWGTPHLDCQTRTARSRTWSSSWGRLSGRAGAVGYSRSPSCSS

SEQ ID NO: 96985 - protein, 206 aa, Homo sapiens
  Payload ID: 19347
  Gene Name: v-ral simian leukemia viral oncogene homolog A (ras related)
  Uniprot ID: P11233
  ENSP ID: ENSP00000005257
MAANKPKGQNSLALHKVIMVGSGGVGKSALTLQFMYDEFVEDYEPTKADSYRKKVVLDGEEVQIDILDTAGQEDYAAIRDNYFRSGEGFLCVFSITEMESFAATADFREQILRVKEDENVPFLLVGNKSDLEDKRQVSVEEAKNRAEQWNVNYVETSAKTRANVDKVFFDLMREIRARKMEDSKEKNGKKKRKSLAKRIRERCCIL

SEQ ID NO: 96986 - protein, 101 aa, Homo sapiens
  Payload ID: 19347
  Gene Name: v-ral simian leukemia viral oncogene homolog A (ras related)
  ENSP ID: ENSP00000388975
MAANKPKGQNSLALHKVIMVGSGGVGKSALTLQFMYDEFVEDYEPTKADSYRKKVVLDGEEVQIDILDTAGQEDYAAIRDNYFRSGEGFLCVFSITEMESF

SEQ ID NO: 96987 - protein, 164 aa, Homo sapiens
  Payload ID: 19347
  Gene Name: v-ral simian leukemia viral oncogene homolog A (ras related)
  ENSP ID: ENSP00000413227
  MOD_RES (1)..(1): Any amino acid
XGQNSLALHKVIMVGSGGVGKSALTLQFMYDEFVEDYEPTKADSYRKKVVLDGEEVQIDILDTAGQEDYAAIRDNYFRSGEGFLCVFSITEMESFAATADFREQILRVKEDENVPFLLVGNKSDLEDKRQVSVEEAKNRAEQWNVNYVETSAKTRANVDKSGPS

SEQ ID NO: 96988 - protein, 206 aa, Homo sapiens
  Payload ID: 19348
  Gene Name: v-ral simian leukemia viral oncogene homolog B
  Uniprot ID: P11234
  ENSP ID: ENSP00000272519
MAANKSKGQSSLALHKVIMVGSGGVGKSALTLQFMYDEFVEDYEPTKADSYRKKVVLDGEEVQIDILDTAGQEDYAAIRDNYFRSGEGFLLVFSITEHESFTATAEFREQILRVKAEEDKIPLLVVGNKSDLEERRQVPVEEARSKAEEWGVQYVETSAKTRANVDKVFFDLMREIRTKKMSENKDKNGKKSSKNKKSFKERCCLL

SEQ ID NO: 96989 - protein, 46 aa, Homo sapiens
  Payload ID: 19348
  Gene Name: v-ral simian leukemia viral oncogene homolog B
  ENSP ID: ENSP00000393782
MAANKSKGQSSLALHKVIMVGSGGVGKSALTLQFMYDEECFKIIGI

SEQ ID NO: 96990 - protein, 167 aa, Homo sapiens
  Payload ID: 19348
  Gene Name: v-ral simian leukemia viral oncogene homolog B
  ENSP ID: ENSP00000398162
MAANKSKGQSSLALHKVIMVGSGGVGKSALTLQFMYDEFVEDYEPTKADSYRKKVVLDGEEVQIDILDTAGQEDYAAIRDNYFRSGEGFLLVFSITEHESFTATAEFREQILRVKAEEDKIPLLVVGNKSDLEERRQVPVEEARSKAEEWGVQYVETSAKTRANVDK

SEQ ID NO: 96991 - protein, 171 aa, Homo sapiens
  Payload ID: 19348
  Gene Name: v-ral simian leukemia viral oncogene homolog B
  ENSP ID: ENSP00000402866
MKQRQSALQWVICVSQPQKTSEMAANKSKGQSSLALHKVIMVGSGGVGKSALTLQFMYDEFVEDYEPTKADSYRKKVVLDGEEVQIDILDTAGQEDYAAIRDNYFRSGEGFLLVFSITEHESFTATAEFREQILRVKAEEDKIPLLVVGNKSDLEERRQVPVEEARSKAEE

SEQ ID NO: 96992 - protein, 112 aa, Homo sapiens
  Payload ID: 19348
  Gene Name: v-ral simian leukemia viral oncogene homolog B
  ENSP ID: ENSP00000407062
MAANKSKGQSSLALHKVIMVGSGGVGKSALTLQFMYDEFVEDYEPTKADSYRKKVVLDGEEVQIDILDTAGQEDYAAIRDNYFRSGEGFLLVFSITEHESFTATAEFREQIL

SEQ ID NO: 96993 - protein, 206 aa, Homo sapiens; identical to SEQ ID NO: 96988
  Payload ID: 19348
  Gene Name: v-ral simian leukemia viral oncogene homolog B
  Uniprot ID: P11234
  ENSP ID: ENSP00000414224

SEQ ID NO: 96994 - protein, 46 aa, Homo sapiens; identical to SEQ ID NO: 96989
  Payload ID: 19348
  Gene Name: v-ral simian leukemia viral oncogene homolog B
  ENSP ID: ENSP00000487037

SEQ ID NO: 96995 - protein, 619 aa, Homo sapiens
  Payload ID: 19349
  Gene Name: v-rel avian reticuloendotheliosis viral oncogene homolog
  Uniprot ID: Q04864
  ENSP ID: ENSP00000295025
MASGAYNPYIEIIEQPRQRGMRFRYKCEGRSAGSIPGEHSTDNNRTYPSIQIMNYYGKGKVRITLVTKNDPYKPHPHDLVGKDCRDGYYEAEFGQERRPLFFQNLGIRCVKKKEVKEAIITRIKAGINPFNVPEKQLNDIEDCDLNVVRLCFQVFLPDEHGNLTTALPPVVSNPIYDNRAPNTAELRICRVNKNCGSVRGGDEIFLLCDKVQKDDIEVRFVLNDWEAKGIFSQADVHRQVAIVFKTPPYCKAITEPVTVKMQLRRPSDQEVSESMDFRYLPDEKDTYGNKAKKQKTTLLFQKLCQDHVETGFRHVDQDGLELLTSGDPPTLASQSAGITVNFPERPRPGLLGSIGEGRYFKKEPNLFSHDAVVREMPTGVSSQAESYYPSPGPISSGLSHHASMAPLPSSSWSSVAHPTPRSGNTNPLSSFSTRTLPSNSQGIPPFLRIPVGNDLNASNACIYNNADDIVGMEASSMPSADLYGISDPNMLSNCSVNMMTTSSDSMGETDNPRLLSMNLENPSCNSVLDPRDLRQLHQMSSSSMSAGANSNTTVFVSQSDAFEGSDFSCADNSMINESGPSNSTNPNSHGFVQDSQYSGIGSMQNEQLSDSFPYEFFQV

SEQ ID NO: 96996 - protein, 587 aa, Homo sapiens
  Payload ID: 19349
  Gene Name: v-rel avian reticuloendotheliosis viral oncogene homolog
  Uniprot ID: Q04864
  ENSP ID: ENSP00000377989
MASGAYNPYIEIIEQPRQRGMRFRYKCEGRSAGSIPGEHSTDNNRTYPSIQIMNYYGKGKVRITLVTKNDPYKPHPHDLVGKDCRDGYYEAEFGQERRPLFFQNLGIRCVKKKEVKEAIITRIKAGINPFNVPEKQLNDIEDCDLNVVRLCFQVFLPDEHGNLTTALPPVVSNPIYDNRAPNTAELRICRVNKNCGSVRGGDEIFLLCDKVQKDDIEVRFVLNDWEAKGIFSQADVHRQVAIVFKTPPYCKAITEPVTVKMQLRRPSDQEVSESMDFRYLPDEKDTYGNKAKKQKTTLLFQKLCQDHVNFPERPRPGLLGSIGEGRYFKKEPNLFSHDAVVREMPTGVSSQAESYYPSPGPISSGLSHHASMAPLPSSSWSSVAHPTPRSGNTNPLSSFSTRTLPSNSQGIPPFLRIPVGNDLNASNACIYNNADDIVGMEASSMPSADLYGISDPNMLSNCSVNMMTTSSDSMGETDNPRLLSMNLENPSCNSVLDPRDLRQLHQMSSSSMSAGANSNTTVFVSQSDAFEGSDFSCADNSMINESGPSNSTNPNSHGFVQDSQYSGIGSMQNEQLSDSFPYEFFQV

SEQ ID NO: 96997 - protein, 548 aa, Homo sapiens
  Payload ID: 19350
  Gene Name: v-rel avian reticuloendotheliosis viral oncogene homolog A
  Uniprot ID: Q04206
  ENSP ID: ENSP00000311508
MDELFPLIFPAEPAQASGPYVEIIEQPKQRGMRFRYKCEGRSAGSIPGERSTDTTKTHPTIKINGYTGPGTVRISLVTKDPPHRPHPHELVGKDCRDGFYEAELCPDRCIHSFQNLGIQCVKKRDLEQAISQRIQTNNNPFQEEQRGDYDLNAVRLCFQVTVRDPSGRPLRLPPVLSHPIFDNRAPNTAELKICRVNRNSGSCLGGDEIFLLCDKVQKEDIEVYFTGPGWEARGSFSQADVHRQVAIVFRTPPYADPSLQAPVRVSMQLRRPSDRELSEPMEFQYLPDTDDRHRIEEKRKRTYETFKSIMKKSPFSGPTDPRPPPRRIAVPSRSSASVPKPAPQPYPFTSSLSTINYDEFPTMVFPSGQISQASALAPAPPQVLPQAPAPAPAPAMVSALAQAPAPVPVLAPGPPQAVAPPAPKPTQAGEGTLSEALLQLQFDDEDLGALLGNSTDPAVFTDLASVDNSEFQQLLNQGIPVAPHTTEPMLMEYPEAITRLVTGAQRPPDPAPAPLGAPGLPNGLLSGDEDFSSIADMDFSALLSQISS

SEQ ID NO: 96998 - protein, 551 aa, Homo sapiens
  Payload ID: 19350
  Gene Name: v-rel avian reticuloendotheliosis viral oncogene homolog A
  Uniprot ID: Q04206
  ENSP ID: ENSP00000384273
MDELFPLIFPAEPAQASGPYVEIIEQPKQRGMRFRYKCEGRSAGSIPGERSTDTTKTHPTIKINGYTGPGTVRISLVTKDPPHRPHPHELVGKDCRDGFYEAELCPDRCIHSFQNLGIQCVKKRDLEQAISQRIQTNNNPFQVPIEEQRGDYDLNAVRLCFQVTVRDPSGRPLRLPPVLSHPIFDNRAPNTAELKICRVNRNSGSCLGGDEIFLLCDKVQKEDIEVYFTGPGWEARGSFSQADVHRQVAIVFRTPPYADPSLQAPVRVSMQLRRPSDRELSEPMEFQYLPDTDDRHRIEEKRKRTYETFKSIMKKSPFSGPTDPRPPPRRIAVPSRSSASVPKPAPQPYPFTSSLSTINYDEFPTMVFPSGQISQASALAPAPPQVLPQAPAPAPAPAMVSALAQAPAPVPVLAPGPPQAVAPPAPKPTQAGEGTLSEALLQLQFDDEDLGALLGNSTDPAVFTDLASVDNSEFQQLLNQGIPVAPHTTEPMLMEYPEAITRLVTGAQRPPDPAPAPLGAPGLPNGLLSGDEDFSSIADMDFSALLSQISS

SEQ ID NO: 96999 - protein, 161 aa, Homo sapiens
  Payload ID: 19350
  Gene Name: v-rel avian reticuloendotheliosis viral oncogene homolog A
  ENSP ID: ENSP00000431153
MDELFPLIFPAEPAQASGPYVEIIEQPKQRGMRFRYKCEGRSAGSIPGERSTDTTKTHPTIKINGYTGPGTVRISLVTKDPPHRPHPHELVGKDCRDGFYEAELCPDRCIHSFQNLGIQCVKKRDLEQAISQRIQTNNNPFQGDSAGPIRQAPPPAACPFS

SEQ ID NO: 97000 - protein, 72 aa, Homo sapiens
  Payload ID: 19350
  Gene Name: v-rel avian reticuloendotheliosis viral oncogene homolog A
  ENSP ID: ENSP00000431304
  MOD_RES (1)..(1): Any amino acid
XQVTVRDPSGRPLRLPPVLSHPIFDNHDRHRIEEKRKRTYETFKSIMKKSPFSGPTDPRPPPRRIAVPSRSS

SEQ ID NO: 97001 - protein, 377 aa, Homo sapiens
  Payload ID: 19350
  Gene Name: v-rel avian reticuloendotheliosis viral oncogene homolog A
  ENSP ID: ENSP00000432537
MDELFPLIFPAEPAQASGPYVEIIEQPKQRGMRFRYKCEGRSAGSIPGERSTDTTKTHPTIKINGYTGPGTVRISLVTKDPPHRPHPHELVGKDCRDGFYEAELCPDRCIHSFQNLGIQCVKKRDLEQAISQRIQTNNNPFQVPIEEQRGDYDLNAVRLCFQVTVRDPSGRPLRLPPVLSHPIFDNRAPNTAELKICRVNRNSGSCLGGDEIFLLCDKVQKEDIEVYFTGPGWEARGSFSQADVHRQVAIVFRTPPYADPSLQAPVRVSMQLRRPSDRELSEPMEFQYLPDTDDRHRIEEKRKRTYETFKSIMKKSPFSGPTDPRPPPRRIAVPSRSSASVPKPGKDFLLSHWNDRFSSVQLRSSGDEDSWAPLQTY

SEQ ID NO: 97002 - protein, 134 aa, Homo sapiens
  Payload ID: 19350
  Gene Name: v-rel avian reticuloendotheliosis viral oncogene homolog A
  ENSP ID: ENSP00000432922
MDELFPLIFPAEPAQASGPYVEIIEQPKQRGMRFRYKCEGRSAGSIPGERSTDTTKTHPTIKFPEPGNPVCEEAGPGAGYQSAHPDQQQPLPSSYRRAAWGLRPECCAALLPGDSAGPIRQAPPPAACPFSSHL

SEQ ID NO: 97003 - protein, 64 aa, Homo sapiens
  Payload ID: 19350
  Gene Name: v-rel avian reticuloendotheliosis viral oncogene homolog A
  ENSP ID: ENSP00000433144
MDELFPLIFPAEPAQASGPYVEIIEQPKQRGMRFRYKCEGRSAGSIPGERSTDTTKTHPTIKFL

SEQ ID NO: 97004 - protein, 418 aa, Homo sapiens
  Payload ID: 19350
  Gene Name: v-rel avian reticuloendotheliosis viral oncogene homolog A
  ENSP ID: ENSP00000433526
MDELFPLIFPAEPAQASGPYVEIIEQPKQRGMRFRYKCEGRSAGSIPGERSTDTTKTHPTIKVWMSGPLYFGQINGYTGPGTVRISLVTKDPPHRPHPHELVGKDCRDGFYEAELCPDRCIHSFQNLGIQCVKKRDLEQAISQRIQTNNNPFQVPIEEQRGDYDLNAVRLCFQVTVRDPSGRPLRLPPVLSHPIFDNRAPNTAELKICRVNRNSGSCLGGDEIFLLCDKVQKEDIEVYFTGPGWEARGSFSQADVHRQVAIVFRTPPYADPSLQAPVRVSMQLRRPSDRELSEPMEFQYLPDTDDRHRIEEKRKRTYETFKSIMKKSPFSGPTDPRPPPRRIAVPSRSSASVPKPAPQPYPFTSSLSTINYDEFPTMVFPSGQISQASALAPAPPQVLPQAPAPAPAPAMVSALAQAP

SEQ ID NO: 97005 - protein, 29 aa, Homo sapiens
  Payload ID: 19350
  Gene Name: v-rel avian reticuloendotheliosis viral oncogene homolog A
  ENSP ID: ENSP00000433616
MRFRYKCEGRSAGSIPGERSTDTTKTHPT

SEQ ID NO: 97006 - protein, 49 aa, Homo sapiens
  Payload ID: 19350
  Gene Name: v-rel avian reticuloendotheliosis viral oncogene homolog A
  ENSP ID: ENSP00000434008
MDELFPLIFPADQWLHRTRDSAHLPGHQGPSSPASPPRACRKGLPGWLL

SEQ ID NO: 97007 - protein, 95 aa, Homo sapiens
  Payload ID: 19350
  Gene Name: v-rel avian reticuloendotheliosis viral oncogene homolog A
  ENSP ID: ENSP00000434098
MRFRYKCEGRSAGSIPGERSTDTTKTHPTIKINGYTGPGTVRISLVTKDPPHRPHPHELVGKDCRDGFYEAELCPDRCIHSFQNLGIQCVKKRDL

SEQ ID NO: 97008 - protein, 208 aa, Homo sapiens
  Payload ID: 19350
  Gene Name: v-rel avian reticuloendotheliosis viral oncogene homolog A
  ENSP ID: ENSP00000434372
MDEPAQASGPYVEIIEQPKQRGMRFRYKCEGRSAGSIPGERSTDTTKTHPTIKINGYTGPGTVRISLVTKDPPHRPHPHELVGKDCRDGFYEAELCPDRCIHSFQNLGIQCVKKRDLEQAISQRIQTNNNPFQVPIEEQRGDYDLNAVRLCFQVTVRDPSGRPLRLPPVLSHPIFDNRAPNTAELKICRVNRNSGSCLGGDEIFLLCD

SEQ ID NO: 97009 - protein, 85 aa, Homo sapiens
  Payload ID: 19350
  Gene Name: v-rel avian reticuloendotheliosis viral oncogene homolog A
  ENSP ID: ENSP00000434745
MDELFPLIFPAEPAQASGPYVEIIEQPKQRGMRFRYKCEGRSAGSIPGERSTDTTKTHPTIKDQGQCASPWSPRTLLTGLTPTSL

SEQ ID NO: 97010 - protein, 237 aa, Homo sapiens
  Payload ID: 19350
  Gene Name: v-rel avian reticuloendotheliosis viral oncogene homolog A
  ENSP ID: ENSP00000435290
MDELFPLIFPAEPAQASGPYVEIIEQPKQRGMRFRYKCEGRSAGSIPGERSTDTTKTHPTIKINGYTGPGTVRISLVTKDPPHRPHPHELVGKDCRDGFYEAELCPDRCIHSFQNLGIQCVKKRDLEQAISQRIQTNNNPFQVPIEEQRGDYDLNAVRLCFQVTVRDPSGRPLRLPPVLSHPIFDNRAPNTAELKICRVNRNSGSCLGGDEIFLLCDKVQKAHGIPVPARYRRSSPD

SEQ ID NO: 97011 - protein, 89 aa, Homo sapiens
  Payload ID: 19350
  Gene Name: v-rel avian reticuloendotheliosis viral oncogene homolog A
  ENSP ID: ENSP00000435531
MRFRYKCEGRSAGSIPGERSTDTTKTHPTIKINGYTGPGTVRISLVTKDPPHRPHPHELVGKDCRDGFYEAELCPDRCIHSFQNLGIQC

SEQ ID NO: 97012 - protein, 185 aa, Homo sapiens
  Payload ID: 19350
  Gene Name: v-rel avian reticuloendotheliosis viral oncogene homolog A
  ENSP ID: ENSP00000436545
MRFRYKCEGRSAGSIPGERSTDTTKTHPTIKINGYTGPGTVRISLVTKDPPHRPHPHELVGKDCRDGFYEAELCPDRCIHSFQNLGIQCVKKRDLEQAISQRIQTNNNPFQVPIEEQRGDYDLNAVRLCFQVTVRDPSGRPLRLPPVLSHPIFDNRAPNTAELKICRVNRNSGSCLGGDEIFLLC

SEQ ID NO: 97013 - protein, 153 aa, Homo sapiens
  Payload ID: 19350
  Gene Name: v-rel avian reticuloendotheliosis viral oncogene homolog A
  ENSP ID: ENSP00000437137
MDELFPLIFPAEPAQASGPYVEIIEQPKQRGMRFRYKCEGRSAGSIPGERSTDTTKTHPTIKINGYTGPGTVRISLVTKDPPHRPHPHELVGKDCRDGFYEAELCPDRCIHSSYRRAAWGLRPECCAALLPGDSAGPIRQAPPPAACPFSSHL

SEQ ID NO: 97014 - protein, 246 aa, Homo sapiens
  Payload ID: 19350
  Gene Name: v-rel avian reticuloendotheliosis viral oncogene homolog A
  ENSP ID: ENSP00000479572
MDELFPLIFPAEPAQASGPYVEIIEQPKQRGMRFRYKCEGRSAGSIPGERSTDTTKTHPTIKINGYTGPGTVRISLVTKDPPHRPHPHELVGKDCRDGFYEAELCPDRCIHSFQNLGIQCVKKRDLEQAISQRIQTNNNPFQVPIEEQRGDYDLNAVRLCFQVTVRDPSGRPLRLPPVLSHPIFDNRAPNTAELKICRVNRNSGSCLGGDEIFLLCDKVQKEDIEFCPQASTPALSLYVIPEHHQL

SEQ ID NO: 97015 - protein, 448 aa, Homo sapiens
  Payload ID: 19350
  Gene Name: v-rel avian reticuloendotheliosis viral oncogene homolog A
  ENSP ID: ENSP00000483705
MDELFPLIFPAEPAQASGPYVEIIEQPKQRGMRFRYKCEGRSAGSIPGERSTDTTKTHPTIKINGYTGPGTVRISLVTKDPPHRPHPHELVGKDCRDGFYEAELCPDRCIHSFQNLGIQCVKKRDLEQAISQRIQTNNNPFQVPIEEQRGDYDLNAVRLCFQVTVRDPSGRPLRLPPVLSHPIFDNRAPNTAELKICRVNRNSGSCLGGDEIFLLCDKVQKEDIEVYFTGPGWEARGSFSQADVHRQVAIVFRTPPYADPSLQAPVRVSMQLRRPSDRELSEPMEFQYLPDTDDRHRIEEKRKRTYETFKSIMKKSPFSGPTDPRPPPRRIAVPSRSSASVPKPAPQPYPFTSSLSTINYDEFPTMVFPSGQISQASALAPAPPQVLPQAPAPAPAPAMVSALAQRPPDPAPAPLGAPGLPNGLLSGDEDFSSIADMDFSALLSQISS

SEQ ID NO: 97016 - protein, 579 aa, Homo sapiens
  Payload ID: 19351
  Gene Name: v-rel avian reticuloendotheliosis viral oncogene homolog B
  Uniprot ID: Q01201
  ENSP ID: ENSP00000221452
MLRSGPASGPSVPTGRAMPSRRVARPPAAPELGALGSPDLSSLSLAVSRSTDELEIIDEYIKENGFGLDGGQPGPGEGLPRLVSRGAASLSTVTLGPVAPPATPPPWGCPLGRLVSPAPGPGPQPHLVITEQPKQRGMRFRYECEGRSAGSILGESSTEASKTLPAIELRDCGGLREVEVTACLVWKDWPHRVHPHSLVGKDCTDGICRVRLRPHVSPRHSFNNLGIQCVRKKEIEAAIERKIQLGIDPYNAGSLKNHQEVDMNVVRICFQASYRDQQGQMRRMDPVLSEPVYDKKSTNTSELRICRINKESGPCTGGEELYLLCDKVQKEDISVVFSRASWEGRADFSQADVHRQIAIVFKTPPYEDLEIVEPVTVNVFLQRLTDGVCSEPLPFTYLPRDHDSYGVDKKRKRGMPDVLGELNSSDPHGIESKRRKKKPAILDHFLPNHGSGPFLPPSALLPDPDFFSGTVSLPGLEPPGGPDLLDDGFAYDPTAPTLFTMLDLLPPAPPHASAVVCSGGAGAVVGETPGPEPLTLDSYQAPGPGDGGTASLVGSNMFPNHYREAAFGGGLLSPGPEAT

SEQ ID NO: 97017 - protein, 576 aa, Homo sapiens
  Payload ID: 19351
  Gene Name: v-rel avian reticuloendotheliosis viral oncogene homolog B
  ENSP ID: ENSP00000423287
MLRSGPASGPSVPTGRAMPSRRVARPPAAPELGALGSPDLSSLSLAVSRSTEIIDEYIKENGFGLDGGQPGPGEGLPRLVSRGAASLSTVTLGPVAPPATPPPWGCPLGRLVSPAPGPGPQPHLVITEQPKQRGMRFRYECEGRSAGSILGESSTEASKTLPAIELRDCGGLREVEVTACLVWKDWPHRVHPHSLVGKDCTDGICRVRLRPHVSPRHSFNNLGIQCVRKKEIEAAIERKIQLGIDPYNAGSLKNHQEVDMNVVRICFQASYRDQQGQMRRMDPVLSEPVYDKKSTNTSELRICRINKESGPCTGGEELYLLCDKVQKEDISVVFSRASWEGRADFSQADVHRQIAIVFKTPPYEDLEIVEPVTVNVFLQRLTDGVCSEPLPFTYLPRDHDSYGVDKKRKRGMPDVLGELNSSDPHGIESKRRKKKPAILDHFLPNHGSGPFLPPSALLPDPDFFSGTVSLPGLEPPGGPDLLDDGFAYDPTAPTLFTMLDLLPPAPPHASAVVCSGGAGAVVGETPGPEPLTLDSYQAPGPGDGGTASLVGSNMFPNHYREAAFGGGLLSPGPEAT

SEQ ID NO: 97018 - protein, 58 aa, Homo sapiens
  Payload ID: 19351
  Gene Name: v-rel avian reticuloendotheliosis viral oncogene homolog B
  ENSP ID: ENSP00000427348
MLRSGPASGPSVPTGRAMPSRRVARPPAAPELGALGSPDLSSLSLAVSRSTGSSSTDA

SEQ ID NO: 97019 - protein, 142 aa, Homo sapiens
  Payload ID: 19351
  Gene Name: v-rel avian reticuloendotheliosis viral oncogene homolog B
  ENSP ID: ENSP00000468460
  MOD_RES (1)..(1): Any amino acid
XSEPLPFTYLPRDHGPFLPPSALLPDPDFFSGTVSLPGLEPPGGPDLLDDGFAYDPTAPTLFTMLDLLPPAPPHASAVVCSGGAGAVVGETPGPEPLTLDSYQAPGPGDGGTASLVGSNMFPNHYREAAFGGGLLSPGPEAT

SEQ ID NO: 97020 - protein, 579 aa, Homo sapiens; identical to SEQ ID NO: 97016
  Payload ID: 19351
  Gene Name: v-rel avian reticuloendotheliosis viral oncogene homolog B
  Uniprot ID: Q01201
  ENSP ID: ENSP00000485826

SEQ ID NO: 97021 - protein, 387 aa, Homo sapiens
  Payload ID: 19352
  Gene Name: V-set and immunoglobulin domain containing 1
  Uniprot ID: Q86XK7
  ENSP ID: ENSP00000217957
MVFAFWKVFLILSCLAGQVSVVQVTIPDGFVNVTVGSNVTLICIYTTTVASREQLSIQWSFFHKKEMEPISIYFSQGGQAVAIGQFKDRITGSNDPGNASITISHMQPADSGIYICDVNNPPDFLGQNQGILNVSVLVKPSKPLCSVQGRPETGHTISLSCLSALGTPSPVYYWHKLEGRDIVPVKENFNPTTGILVIGNLTNFEQGYYQCTAINRLGNSSCEIDLTSSHPEVGIIVGALIGSLVGAAIIISVVCFARNKAKAKAKERNSKTIAELEPMTKINPRGESEAMPREDATQLEVTLPSSIHETGPDTIQEPDYEPKPTQEPAPEPAPGSEPMAVPDLDIELELEPETQSELEPEPEPEPESEPGVVVEPLSEDEKGVVKA

SEQ ID NO: 97022 - protein, 423 aa, Homo sapiens
  Payload ID: 19352
  Gene Name: V-set and immunoglobulin domain containing 1
  Uniprot ID: Q86XK7
  ENSP ID: ENSP00000402219
MVFAFWKVFLILSCLAGQVSVVQVTIPDGFVNVTVGSNVTLICIYTTTVASREQLSIQWSFFHKKEMEPISHSSCLSTEGMEEKAVSQCLKMTHARDARGRCSWTSEIYFSQGGQAVAIGQFKDRITGSNDPGNASITISHMQPADSGIYICDVNNPPDFLGQNQGILNVSVLVKPSKPLCSVQGRPETGHTISLSCLSALGTPSPVYYWHKLEGRDIVPVKENFNPTTGILVIGNLTNFEQGYYQCTAINRLGNSSCEIDLTSSHPEVGIIVGALIGSLVGAAIIISVVCFARNKAKAKAKERNSKTIAELEPMTKINPRGESEAMPREDATQLEVTLPSSIHETGPDTIQEPDYEPKPTQEPAPEPAPGSEPMAVPDLDIELELEPETQSELEPEPEPEPESEPGVVVEPLSEDEKGVVKA

SEQ ID NO: 97023 - protein, 168 aa, Homo sapiens
  Payload ID: 19352
  Gene Name: V-set and immunoglobulin domain containing 1
  ENSP ID: ENSP00000407102
MVFAFWKVFLILSCLAGQVSVVQVTIPDGFVNVTVGSNVTLICIYTTTVASREQLSIQWSFFHKKEMEPISHSSCLSTEGMEEKAVSQCLKMTHARDARGRCSWTSEIYFSQGGQAVAIGQFKDRITGSNDPGNASITISHMQPADSGIYICDVNNPPDFLGQNQGIL

SEQ ID NO: 97024 - protein, 540 aa, Homo sapiens
  Payload ID: 19353
  Gene Name: V-set and immunoglobulin domain containing 10
  Uniprot ID: Q8N0Z9
  ENSP ID: ENSP00000352172
MAAGGSAPEPRVLVCLGALLAGWVAVGLEAVVIGEVHENVTLHCGNISGLRGQVTWYRNNSEPVFLLSSNSSLRPAEPRFSLVDATSLHIESLSLGDEGIYTCQEILNVTQWFQVWLQVASGPYQIEVHIVATGTLPNGTLYAARGSQVDFSCNSSSRPPPVVEWWFQALNSSSESFGHNLTVNFFSLLLISPNLQGNYTCLALNQLSKRHRKVTTELLVYYPPPSAPQCWAQMASGSFMLQLTCRWDGGYPDPDFLWIEEPGGVIVGKSKLGVEMLSESQLSDGKKFKCVTSHIVGPESGASCMVQIRGPSLLSEPMKTCFTGGNVTLTCQVSGAYPPAKILWLRNLTQPEVIIQPSSRHLITQDGQNSTLTIHNCSQDLDEGYYICRADSPVGVREMEIWLSVKEPLNIGGIVGTIVSLLLLGLAIISGLLLHYSPVFCWKVGNTSRGQNMDDVMVLVDSEEEEEEEEEEEEDAAVGEQEGAREREELPKEIPKQDHIHRVTALVNGNIEQMGNGFQDLQDDSSEEQSDIVQEEDRPV

SEQ ID NO: 97025 - protein, 189 aa, Homo sapiens
  Payload ID: 19353
  Gene Name: V-set and immunoglobulin domain containing 10
  ENSP ID: ENSP00000442861
MAAGGSAPEPRVLVCLGALLAGWVAVGLEAVVIGEVHENVTLHCGNISGLRGQVTWYRNNSEPVFLLSSNSSLRPAEPRFSLVDATSLHIESLSLGDEGIYTCQEILNVTQWFQVWLQVANPPPSAPQCWAQMASGSFMLQLTCRWDGGYPDPDFLWIEEPGGVIVGKSKLGVEMLSESQLSDGKKFKC

SEQ ID NO: 97026 - protein, 867 aa, Homo sapiens
  Payload ID: 19354
  Gene Name: V-set and immunoglobulin domain containing 10 like
  Uniprot ID: Q86VR7
  ENSP ID: ENSP00000335623
MDNPQALPLFLLLASLVGILTLRASSGLQQTNFSSAFSSDSKSSSQGLGVEVPSIKPPSWKVPDQFLDSKASAGISDSSWFPEALSSNMSGSFWSNVSAEGQDLSPVSPFSETPGSEVFPDISDPQVPAKDPKPSFTVKTPASNISTQVSHTKLSVEAPDSKFSPDDMDLKLSAQSPESKFSAETHSAASFPQQVGGPLAVLVGTTIRLPLVPIPNPGPPTSLVVWRRGSKVLAAGGLGPGAPLISLDPAHRDHLRFDQARGVLELASAQLDDAGVYTAEVIRAGVSQQTHEFTVGVYEPLPQLSVQPKAPETEEGAAELRLRCLGWGPGRGELSWSRDGRALEAAESEGAETPRMRSEGDQLLIVRPVRSDHARYTCRVRSPFGHREAAADVSVFYGPDPPTITVSSDRDAAPARFVTAGSNVTLRCAAASRPPADITWSLADPAEAAVPAGSRLLLPAVGPGHAGTYACLAANPRTGRRRRSLLNLTVADLPPGAPQCSVEGGPGDRSLRFRCSWPGGAPAASLQFQGLPEGIRAGPVSSVLLAAVPAHPRLSGVPITCLARHLVATRTCTVTPEAPREVLLHPLVAETRLGEAEVALEASGCPPPSRASWAREGRPLAPGGGSRLRLSQDGRKLHIGNFSLDWDLGNYSVLCSGALGAGGDQITLIGPSISSWRLQRARDAAVLTWDVERGALISSFEIQAWPDGPALGRTSTYRDWVSLLILGPQERSAVVPLPPRNPGTWTFRILPILGGQPGTPSQSRVYRAGPTLSHGAIAGIVLGSLLGLALLAVLLLLCICCLCRFRGKTPEKKKHPSTLVPVVTPSEKKMHSVTPVEISWPLDLKVPLEDHSSTRAYQAQTPVQLSL

SEQ ID NO: 97027 - protein, 196 aa, Homo sapiens
  Payload ID: 19354
  Gene Name: V-set and immunoglobulin domain containing 10 like
  ENSP ID: ENSP00000473046
MTCPPGPHSAQLKGVPGTAASASAARGPAGPLLPPCSSRVSPKASAPGQCPLCCWRPSPPTPGSAASPSPALLATWWPRVPAQSRRRPPERCCCIRWWQRHGWGRQRWHWRPLVVPHPHGHPGPGKGGPWLQEAGVACGSVKMGGNSTSATSAWIGTWEITPCCAVGRWVLAVTRSPSLDPPYPRGGFREPEMQPC

SEQ ID NO: 97028 - protein, 327 aa, Homo sapiens
  Payload ID: 19355
  Gene Name: V-set and immunoglobulin domain containing 2
  Uniprot ID: Q96IQ7
  ENSP ID: ENSP00000318684
MAELPGPFLCGALLGFLCLSGLAVEVKVPTEPLSTPLGKTAELTCTYSTSVGDSFALEWSFVQPGKPISESHPILYFTNGHLYPTGSKSKRVSLLQNPPTVGVATLKLTDVHPSDTGTYLCQVNNPPDFYTNGLGLINLTVLVPPSNPLCSQSGQTSVGGSTALRCSSSEGAPKPVYNWVRLGTFPTPSPGSMVQDEVSGQLILTNLSLTSSGTYRCVATNQMGSASCELTLSVTEPSQGRVAGALIGVLLGVLLLSVAAFCLVRFQKERGKKPKETYGGSDLREDAIAPGISEHTCMRADSSKGFLERPSSASTVTTTKSKLPMVV

SEQ ID NO: 97029 - protein, 284 aa, Homo sapiens
  Payload ID: 19355
  Gene Name: V-set and immunoglobulin domain containing 2
  Uniprot ID: Q96IQ7
  ENSP ID: ENSP00000385013
MAELPGPFLCGALLGFLCLSGLAVEVKVPTEPLSTPLGKTAELTCTYSTSVGDSFALEWSFVQPGKPISESHPILYFTNGHLYPTGSKSKRVSLLQNPPTVGVATLKLTDVHPSDTGTYLCQVNNPPDFYTNGLGLINLTVLVPPSNPLCSQSGQTSVGGSTALRCSSSEGAPKPVYNWVRLGTFPTPSPGSMVQDEVSGQLILTNLSLTSSGTYRCVATNQMGSASCELTLSVTEPSQGRVAGALIGVLLGVLLLSVAAFCLVRFQKERGKKPKETYGGSDLR

SEQ ID NO: 97030 - protein, 399 aa, Homo sapiens
  Payload ID: 19356
  Gene Name: V-set and immunoglobulin domain containing 4
  Uniprot ID: Q9Y279
  ENSP ID: ENSP00000363869
MGILLGLLLLGHLTVDTYGRPILEVPESVTGPWKGDVNLPCTYDPLQGYTQVLVKWLVQRGSDPVTIFLRDSSGDHIQQAKYQGRLHVSHKVPGDVSLQLSTLEMDDRSHYTCEVTWQTPDGNQVVRDKITELRVQKLSVSKPTVTTGSGYGFTVPQGMRISLQCQARGSPPISYIWYKQQTNNQEPIKVATLSTLLFKPAVIADSGSYFCTAKGQVGSEQHSDIVKFVVKDSSKLLKTKTEAPTTMTYPLKATSTVKQSWDWTTDMDGYLGETSAGPGKSLPVFAIILIISLCCMVVFTMAYIMLCRKTSQQEHVYEAARAHAREANDSGETMRVAIFASGCSSDEPTSQNLGNNYSDEPCIGQEYQIIAQINGNYARLLDTVPLDYEFLATEGKSVC

SEQ ID NO: 97031 - protein, 274 aa, Homo sapiens
  Payload ID: 19356
  Gene Name: V-set and immunoglobulin domain containing 4
  ENSP ID: ENSP00000393108
  MOD_RES (1)..(1): Any amino acid
XDHIQQAKYQGRLHVSHKVPGDVSLQLSTLEMDDRSHYTCEVTWQTPDGNQVVRDKITELRVQKLSVSKPTVTTGSGYGFTVPQGMRISLQCQARGSPPISYIWYKQQTNNQEPIKVATLSTLLFKPAVIADSGSYFCTAKGQVGSEQHSDIVKFVVKDSSKLLKTKTEAPTTMTYPLKATSTVKQSWDWTTDMDGYLGETSAGPGKSLPVFAIILIISLCCMVVFTMAYIMLCRKTSQQEHVYEAASPKCPPTNTGAAGSHWLCPGICQMHLK

SEQ ID NO: 97032 - protein, 305 aa, Homo sapiens
  Payload ID: 19356
  Gene Name: V-set and immunoglobulin domain containing 4
  Uniprot ID: Q9Y279
  ENSP ID: ENSP00000394143
MGILLGLLLLGHLTVDTYGRPILEVPESVTGPWKGDVNLPCTYDPLQGYTQVLVKWLVQRGSDPVTIFLRDSSGDHIQQAKYQGRLHVSHKVPGDVSLQLSTLEMDDRSHYTCEVTWQTPDGNQVVRDKITELRVQKHSSKLLKTKTEAPTTMTYPLKATSTVKQSWDWTTDMDGYLGETSAGPGKSLPVFAIILIISLCCMVVFTMAYIMLCRKTSQQEHVYEAARAHAREANDSGETMRVAIFASGCSSDEPTSQNLGNNYSDEPCIGQEYQIIAQINGNYARLLDTVPLDYEFLATEGKSVC

SEQ ID NO: 97033 - protein, 321 aa, Homo sapiens
  Payload ID: 19356
  Gene Name: V-set and immunoglobulin domain containing 4
  Uniprot ID: Q9Y279
  ENSP ID: ENSP00000411581
MGILLGLLLLGHLTVDTYGRPILEVPESVTGPWKGDVNLPCTYDPLQGYTQVLVKWLVQRGSDPVTIFLRDSSGDHIQQAKYQGRLHVSHKVPGDVSLQLSTLEMDDRSHYTCEVTWQTPDGNQVVRDKITELRVQKLSVSKPTVTTGSGYGFTVPQGMRISLQCQARGSPPISYIWYKQQTNNQEPIKVATLSTLLFKPAVIADSGSYFCTAKGQVGSEQHSDIVKFVVKDSSKLLKTKTEAPTTMTYPLKATSTVKQSWDWTTDMDGYLGETSAGPGKSLPVFAIILIISLCCMVVFTMAYIMLCRKTSQQEHVYEAAR

SEQ ID NO: 97034 - protein, 414 aa, Homo sapiens
  Payload ID: 19357
  Gene Name: V-set and immunoglobulin domain containing 8
  Uniprot ID: Q5VU13
  ENSP ID: ENSP00000357080
MRVGGAFHLLLVCLSPALLSAVRINGDGQEVLYLAEGDNVRLGCPYVLDPEDYGPNGLDIEWMQVNSDPAHHRENVFLSYQDKRINHGSLPHLQQRVRFAASDPSQYDASINLMNLQVSDTATYECRVKKTTMATRKVIVTVQARPAVPMCWTEGHMTYGNDVVLKCYASGGSQPLSYKWAKISGHHYPYRAGSYTSQHSYHSELSYQESFHSSINQGLNNGDLVLKDISRADDGLYQCTVANNVGYSVCVVEVKVSDSRRIGVIIGIVLGSLLALGCLAVGIWGLVCCCCGGSGAGGARGAFGYGNGGGVGGGACGDLASEIREDAVAPGCKASGRGSRVTHLLGYPTQNVSRSLRRKYAPPPCGGPEDVALAPCTAAAACEAGPSPVYVKVKSAEPADCAEGPVQCKNGLLV

SEQ ID NO: 97035 - protein, 236 aa, Homo sapiens
  Payload ID: 19358
  Gene Name: V-set and transmembrane domain containing 1
  Uniprot ID: Q6UX27
  ENSP ID: ENSP00000343366
MTAEFLSLLCLGLCLGYEDEKKNEKPPKPSLHAWPSSVVEAESNVTLKCQAHSQNVTFVLRKVNDSGYKQEQSSAENEAEFPFTDLKPKDAGRYFCAYKTTASHEWSESSEHLQLVVTDKHDELEAPSMKTDTRTIFVAIFSCISILLLFLSVFIIYRCSQHSSSSEESTKRTSHSKLPEQEAAEADLSNMERVSLSTADPQGVTYAELSTSALSEAASDTTQEPPGSHEYAALKV

SEQ ID NO: 97036 - protein, 205 aa, Homo sapiens
  Payload ID: 19358
  Gene Name: V-set and transmembrane domain containing 1
  Uniprot ID: Q6UX27
  ENSP ID: ENSP00000365813
MTAEFLSLLCLGLCLGYEDEKKNEKPPKPSLHAWPSSVVEAESNVTLKCQAHSQNVTFVLRKVNDSGYKQEQSSAENEAEFPFTDLKPKDAGRYFCAYKTTASHEWSESSEHLQLVVTDKHDELEAPSMKTGSSSEESTKRTSHSKLPEQEAAEADLSNMERVSLSTADPQGVTYAELSTSALSEAASDTTQEPPGSHEYAALKV

SEQ ID NO: 97037 - protein, 174 aa, Homo sapiens
  Payload ID: 19358
  Gene Name: V-set and transmembrane domain containing 1
  Uniprot ID: Q6UX27
  ENSP ID: ENSP00000401926
MTAEFLSLLCLGLCLGYEDEKKNEKPPKPSLHAWPSSVVEAESNVTLKCQAHSQNVTFVLRKVNDSGYKQEQSSAENEAEFPFTDLKPKDAGRYFCAYKTTASHEWSESSEHLQLVVTDKHDELEAPSMKTDTRTIFVAIFSCISILLLFLSVFIIYRCSQHSELRERKGREGE

SEQ ID NO: 97038 - protein, 126 aa, Homo sapiens
  Payload ID: 19358
  Gene Name: V-set and transmembrane domain containing 1
  ENSP ID: ENSP00000409412
EFPFTDLKPKDAGRYFCAYKTTASHEWSESSEHLQLVVTDKHDELEAPSMKTGSSSEESTKRTSHSKLPEQEAAEADLSNMERVSLSTADPQGVTYAELSTSALSEAASDTTQEPPGSHEYAALKV

SEQ ID NO: 97039 - protein, 143 aa, Homo sapiens
  Payload ID: 19358
  Gene Name: V-set and transmembrane domain containing 1
  ENSP ID: ENSP00000413006
MTAEFLSLLCLGLCLGYEDEKKNEKPPKPSLHAWPSSVVEAESNVTLKCQAHSQNVTFVLRKVNDSGYKQEQSSAENEAEFPFTDLKPKDAGRYFCAYKTTASHEWSESSEHLQLVVTDKHDELEAPSMKTVAHVCNTRTLGR

SEQ ID NO: 97040 - protein, 116 aa, Homo sapiens
  Payload ID: 19358
  Gene Name: V-set and transmembrane domain containing 1
  ENSP ID: ENSP00000444153
MTAEFLSLLCLDTRTIFVAIFSCISILLLFLSVFIIYRCSQHSSSSEESTKRTSHSKLPEQEAAEADLSNMERVSLSTADPQGVTYAELSTSALSEAASDTTQEPPGSHEYAALKV

SEQ ID NO: 97041 - protein, 116 aa, Homo sapiens; identical to SEQ ID NO: 97040
  Payload ID: 19358
  Gene Name: V-set and transmembrane domain containing 1
  ENSP ID: ENSP00000478214

SEQ ID NO: 97042 - protein, 143 aa, Homo sapiens; identical to SEQ ID NO: 97039
  Payload ID: 19358
  Gene Name: V-set and transmembrane domain containing 1
  ENSP ID: ENSP00000478333

SEQ ID NO: 97043 - protein, 236 aa, Homo sapiens; identical to SEQ ID NO: 97035
  Payload ID: 19358
  Gene Name: V-set and transmembrane domain containing 1
  ENSP ID: ENSP00000478582

SEQ ID NO: 97044 - protein, 205 aa, Homo sapiens; identical to SEQ ID NO: 97036
  Payload ID: 19358
  Gene Name: V-set and transmembrane domain containing 1
  ENSP ID: ENSP00000479198

SEQ ID NO: 97045 - protein, 143 aa, Homo sapiens; identical to SEQ ID NO: 97039
  Payload ID: 19358
  Gene Name: V-set and transmembrane domain containing 1
  ENSP ID: ENSP00000479448

SEQ ID NO: 97046 - protein, 116 aa, Homo sapiens; identical to SEQ ID NO: 97040
  Payload ID: 19358
  Gene Name: V-set and transmembrane domain containing 1
  ENSP ID: ENSP00000479529

SEQ ID NO: 97047 - protein, 148 aa, Homo sapiens
  Payload ID: 19358
  Gene Name: V-set and transmembrane domain containing 1
  ENSP ID: ENSP00000479639
LRSRQGPTRLPRLECSGAITAHCSLDLPGPDKHDELEAPSMKTDTRTIFVAIFSCISILLLFLSVFIIYRCSQHSSSSEESTKRTSHSKLPEQEAAEADLSNMERVSLSTADPQGVTYAELSTSALSEAASDTTQEPPGSHEYAALKV

SEQ ID NO: 97048 - protein, 205 aa, Homo sapiens; identical to SEQ ID NO: 97036
  Payload ID: 19358
  Gene Name: V-set and transmembrane domain containing 1
  ENSP ID: ENSP00000479748

SEQ ID NO: 97049 - protein, 116 aa, Homo sapiens; identical to SEQ ID NO: 97040
  Payload ID: 19358
  Gene Name: V-set and transmembrane domain containing 1
  ENSP ID: ENSP00000479856

SEQ ID NO: 97050 - protein, 116 aa, Homo sapiens; identical to SEQ ID NO: 97040
  Payload ID: 19358
  Gene Name: V-set and transmembrane domain containing 1
  ENSP ID: ENSP00000479956

SEQ ID NO: 97051 - protein, 205 aa, Homo sapiens; identical to SEQ ID NO: 97036
  Payload ID: 19358
  Gene Name: V-set and transmembrane domain containing 1
  ENSP ID: ENSP00000480383

SEQ ID NO: 97052 - protein, 143 aa, Homo sapiens; identical to SEQ ID NO: 97039
  Payload ID: 19358
  Gene Name: V-set and transmembrane domain containing 1
  ENSP ID: ENSP00000480528

SEQ ID NO: 97053 - protein, 236 aa, Homo sapiens; identical to SEQ ID NO: 97035
  Payload ID: 19358
  Gene Name: V-set and transmembrane domain containing 1
  ENSP ID: ENSP00000480533

SEQ ID NO: 97054 - protein, 236 aa, Homo sapiens; identical to SEQ ID NO: 97035
  Payload ID: 19358
  Gene Name: V-set and transmembrane domain containing 1
  ENSP ID: ENSP00000480547

SEQ ID NO: 97055 - protein, 116 aa, Homo sapiens; identical to SEQ ID NO: 97040
  Payload ID: 19358
  Gene Name: V-set and transmembrane domain containing 1
  ENSP ID: ENSP00000480671

SEQ ID NO: 97056 - protein, 143 aa, Homo sapiens; identical to SEQ ID NO: 97039
  Payload ID: 19358
  Gene Name: V-set and transmembrane domain containing 1
  ENSP ID: ENSP00000480734

SEQ ID NO: 97057 - protein, 143 aa, Homo sapiens; identical to SEQ ID NO: 97039
  Payload ID: 19358
  Gene Name: V-set and transmembrane domain containing 1
  ENSP ID: ENSP00000480873

SEQ ID NO: 97058 - protein, 205 aa, Homo sapiens; identical to SEQ ID NO: 97036
  Payload ID: 19358
  Gene Name: V-set and transmembrane domain containing 1
  ENSP ID: ENSP00000481140

SEQ ID NO: 97059 - protein, 148 aa, Homo sapiens; identical to SEQ ID NO: 97047
  Payload ID: 19358
  Gene Name: V-set and transmembrane domain containing 1
  ENSP ID: ENSP00000481221

SEQ ID NO: 97060 - protein, 148 aa, Homo sapiens; identical to SEQ ID NO: 97047
  Payload ID: 19358
  Gene Name: V-set and transmembrane domain containing 1
  ENSP ID: ENSP00000481287

SEQ ID NO: 97061 - protein, 174 aa, Homo sapiens; identical to SEQ ID NO: 97037
  Payload ID: 19358
  Gene Name: V-set and transmembrane domain containing 1
  Uniprot ID: Q6UX27
  ENSP ID: ENSP00000481977

SEQ ID NO: 97062 - protein, 236 aa, Homo sapiens; identical to SEQ ID NO: 97035
  Payload ID: 19358
  Gene Name: V-set and transmembrane domain containing 1
  ENSP ID: ENSP00000482197

SEQ ID NO: 97063 - protein, 116 aa, Homo sapiens; identical to SEQ ID NO: 97040
  Payload ID: 19358
  Gene Name: V-set and transmembrane domain containing 1
  ENSP ID: ENSP00000482300

SEQ ID NO: 97064 - protein, 236 aa, Homo sapiens; identical to SEQ ID NO: 97035
  Payload ID: 19358
  Gene Name: V-set and transmembrane domain containing 1
  ENSP ID: ENSP00000482555

SEQ ID NO: 97065 - protein, 143 aa, Homo sapiens; identical to SEQ ID NO: 97039
  Payload ID: 19358
  Gene Name: V-set and transmembrane domain containing 1
  ENSP ID: ENSP00000482726

SEQ ID NO: 97066 - protein, 143 aa, Homo sapiens; identical to SEQ ID NO: 97039
  Payload ID: 19358
  Gene Name: V-set and transmembrane domain containing 1
  ENSP ID: ENSP00000482869

SEQ ID NO: 97067 - protein, 236 aa, Homo sapiens; identical to SEQ ID NO: 97035
  Payload ID: 19358
  Gene Name: V-set and transmembrane domain containing 1
  Uniprot ID: Q6UX27
  ENSP ID: ENSP00000482985

SEQ ID NO: 97068 - protein, 205 aa, Homo sapiens; identical to SEQ ID NO: 97036
  Payload ID: 19358
  Gene Name: V-set and transmembrane domain containing 1
  ENSP ID: ENSP00000483104

SEQ ID NO: 97069 - protein, 116 aa, Homo sapiens; identical to SEQ ID NO: 97040
  Payload ID: 19358
  Gene Name: V-set and transmembrane domain containing 1
  ENSP ID: ENSP00000483406

SEQ ID NO: 97070 - protein, 205 aa, Homo sapiens; identical to SEQ ID NO: 97036
  Payload ID: 19358
  Gene Name: V-set and transmembrane domain containing 1
  ENSP ID: ENSP00000483411

SEQ ID NO: 97071 - protein, 236 aa, Homo sapiens; identical to SEQ ID NO: 97035
  Payload ID: 19358
  Gene Name: V-set and transmembrane domain containing 1
  ENSP ID: ENSP00000483412

SEQ ID NO: 97072 - protein, 116 aa, Homo sapiens; identical to SEQ ID NO: 97040
  Payload ID: 19358
  Gene Name: V-set and transmembrane domain containing 1
  ENSP ID: ENSP00000483560

SEQ ID NO: 97073 - protein, 148 aa, Homo sapiens; identical to SEQ ID NO: 97047
  Payload ID: 19358
  Gene Name: V-set and transmembrane domain containing 1
  ENSP ID: ENSP00000483778

SEQ ID NO: 97074 - protein, 205 aa, Homo sapiens; identical to SEQ ID NO: 97036
  Payload ID: 19358
  Gene Name: V-set and transmembrane domain containing 1
  ENSP ID: ENSP00000483797

SEQ ID NO: 97075 - protein, 143 aa, Homo sapiens; identical to SEQ ID NO: 97039
  Payload ID: 19358
  Gene Name: V-set and transmembrane domain containing 1
  ENSP ID: ENSP00000483798

SEQ ID NO: 97076 - protein, 148 aa, Homo sapiens; identical to SEQ ID NO: 97047
  Payload ID: 19358
  Gene Name: V-set and transmembrane domain containing 1
  ENSP ID: ENSP00000484093

SEQ ID NO: 97077 - protein, 148 aa, Homo sapiens; identical to SEQ ID NO: 97047
  Payload ID: 19358
  Gene Name: V-set and transmembrane domain containing 1
  ENSP ID: ENSP00000484173

SEQ ID NO: 97078 - protein, 148 aa, Homo sapiens; identical to SEQ ID NO: 97047
  Payload ID: 19358
  Gene Name: V-set and transmembrane domain containing 1
  ENSP ID: ENSP00000484513

SEQ ID NO: 97079 - protein, 148 aa, Homo sapiens; identical to SEQ ID NO: 97047
  Payload ID: 19358
  Gene Name: V-set and transmembrane domain containing 1
  ENSP ID: ENSP00000484547

SEQ ID NO: 97080 - protein, 143 aa, Homo sapiens; identical to SEQ ID NO: 97039
  Payload ID: 19358
  Gene Name: V-set and transmembrane domain containing 1
  ENSP ID: ENSP00000484653

SEQ ID NO: 97081 - protein, 205 aa, Homo sapiens; identical to SEQ ID NO: 97036
  Payload ID: 19358
  Gene Name: V-set and transmembrane domain containing 1
  Uniprot ID: Q6UX27
  ENSP ID: ENSP00000484699

SEQ ID NO: 97082 - protein, 116 aa, Homo sapiens; identical to SEQ ID NO: 97040
  Payload ID: 19358
  Gene Name: V-set and transmembrane domain containing 1
  ENSP ID: ENSP00000484758

SEQ ID NO: 97083 - protein, 236 aa, Homo sapiens; identical to SEQ ID NO: 97035
  Payload ID: 19358
  Gene Name: V-set and transmembrane domain containing 1
  Uniprot ID: Q6UX27
  ENSP ID: ENSP00000484806

SEQ ID NO: 97084 - protein, 236 aa, Homo sapiens; identical to SEQ ID NO: 97035
  Payload ID: 19358
  Gene Name: V-set and transmembrane domain containing 1
  ENSP ID: ENSP00000484844

SEQ ID NO: 97085 - protein, 205 aa, Homo sapiens; identical to SEQ ID NO: 97036
  Payload ID: 19358
  Gene Name: V-set and transmembrane domain containing 1
  Uniprot ID: Q6UX27
  ENSP ID: ENSP00000484886

SEQ ID NO: 97086 - protein, 132 aa, Homo sapiens
  Payload ID: 19359
  Gene Name: V-set and transmembrane domain containing 2 like
  Uniprot ID: Q96N03
  ENSP ID: ENSP00000362558
MGAPLAVALGALHYLALFLQLGGATRPAGHAPWDNHVSGHGGQGGGQQHLPQAAPVPGEAHGRRHLRVPRHRLQRRQGPAPQGQGLPAGAARGELRPASARSPSRRARPAAPQARQGAEEALGGPGGLQPLD

SEQ ID NO: 97087 - protein, 204 aa, Homo sapiens
  Payload ID: 19359
  Gene Name: V-set and transmembrane domain containing 2 like
  Uniprot ID: Q96N03
  ENSP ID: ENSP00000362560
MGAPLAVALGALHYLALFLQLGGATRPAGHAPWDNHVSGHALFTETPHDMTARTGEDVEMACSFRGSGSPSYSLEIQWWYVRSHRDWTDKQAWASNQLKASQQEDAGKEATKISVVKVVGSNISHKLRLSRVKPTDEGTYECRVIDFSDGKARHHKVKAYLRVQPGENSVLHLPEAPPAAPAPPPPKPGKELRKRSVDQEACSL

SEQ ID NO: 97088 - protein, 149 aa, Homo sapiens
  Payload ID: 19359
  Gene Name: V-set and transmembrane domain containing 2 like
  Uniprot ID: Q96N03
  ENSP ID: ENSP00000406537
MGAPLAVALGALHYLALFLQLGGATRPAGHAPWDNHVSGHALFTETPHDMTARTGEDVEMACSFRGSGSPSYSLEIQWWYVRSHRDWTDKQAWASNQVVKVVGSNISHKLRLSRVKPTDEGTYECRVIDFSDGKARHHKVKAYLRVQPG

SEQ ID NO: 97089 - protein, 244 aa, Homo sapiens
  Payload ID: 19360
  Gene Name: V-set and transmembrane domain containing 2A
  Uniprot ID: Q8TAG5
  ENSP ID: ENSP00000303108
MMGIFLVYVGFVFFSVLYVQQGLSSQAKFTEFPRNVTATEGQNVEMSCAFQSGSASVYLEIQWWFLRGPEDLDPGAEGAGAQVELLPDRDPDSDGTKISTVKVQGNDISHKLQISKVRKKDEGLYECRVTDANYGELQEHKAQAYLKVNANSHARRMQAFEASPMWLQDMKPRKNVSAAIPSSIHGSANQRTHSTSSPQVVAKIPKQSPQSGMETHFEPFILPLTNAPQKGQSYRVDRFMNGDF

SEQ ID NO: 97090 - protein, 240 aa, Homo sapiens
  Payload ID: 19360
  Gene Name: V-set and transmembrane domain containing 2A
  ENSP ID: ENSP00000384103
MMGIFLVYVGFVFFSVLYVQQGLSSQAKFTEFPRNVTATEGQNVEMSCAFQSGSASVYLEIQWWFLRGPEDLDPGAEGAGAQVELLPDRDPDSDGTKISTVKVQGNDISHKLQISKVRKKDEGLYECRVTDANYGELQEHKAQAYLKVNANSHARRMQAFEASPMWLQDMKPRKNVSAAIPSSIHGSANQRTHSTSSPQVVAKIPKQSPQSAKSKSPVKSTERTAKLTLNSKHHPAPTVL

SEQ ID NO: 97091 - protein, 309 aa, Homo sapiens
  Payload ID: 19360
  Gene Name: V-set and transmembrane domain containing 2A
  ENSP ID: ENSP00000384701
MMGIFLVYVGFVFFSVLYVQQGLSSQAKFTEFPRNVTATEGQNVEMSCAFQSGSASVYLEIQWWFLRGPEDLDPGAEGAGAQVELLPDRDPDSDGTKISTVKVQGNDISHKLQISKVRKKDEGLYECRVTDANYGELQEHKAQAYLKVNANSHARRMQAFEASPMWLQDMKPRKNVSAAIPSSIHGSANQRTHSTSSPQVVAKIPKQSPQSVSPILPEVKHLHRPPLLVLPFFSLSSLFSTDPLPTFPTSHRTVKRLPAPLPQPGHGSTPGVQSCVLAPPAKSKSPVKSTERTAKLTLNSKHHPAPTVL

SEQ ID NO: 97092 - protein, 236 aa, Homo sapiens
  Payload ID: 19360
  Gene Name: V-set and transmembrane domain containing 2A
  Uniprot ID: Q8TAG5
  ENSP ID: ENSP00000384967
MMGIFLVYVGFVFFSVLYVQQGLSSQAKFTEFPRNVTATEGQNVEMSCAFQSGSASVYLEIQWWFLRGPEDLDPGAEGAGAQVELLPDRDPDSDGTKISTVKVQGNDISHKLQISKVRKKDEGLYECRVTDANYGELQEHKAQAYLKVNANSHARRMQAFEASPMWLQDMKPRKNVSAAIPSSIHGSANQRTHSTSSPQVVAKIPKQSPQSGARIATSHGLSVLLLVCGFVKGALL

SEQ ID NO: 97093 - protein, 285 aa, Homo sapiens
  Payload ID: 19361
  Gene Name: V-set and transmembrane domain containing 2B
  Uniprot ID: A6NLU5
  ENSP ID: ENSP00000335038
MEQRNRLGALGYLPPLLLHALLLFVADAAFTEVPKDVTVREGDDIEMPCAFRASGATSYSLEIQWWYLKEPPRELLHELALSVPGARSKVTNKDATKISTVRVQGNDISHRLRLSAVRLQDEGVYECRVSDYSDDDTQEHKAQAMLRVLSRFAPPNMQAAEAVSHIQSSGPRRHGPASAANANNAGAASRTTSEPGRGDKSPPPGSPPAAIDPAVPEAAAASAAHTPTTTVAAAAAASSASPPSGQAVLLRQRHGSGTGRSYTTDPLLSLLLLALHKFLRLLLGH

SEQ ID NO: 97094 - protein, 191 aa, Homo sapiens
  Payload ID: 19362
  Gene Name: V-set and transmembrane domain containing 4
  Uniprot ID: Q8IW00
  ENSP ID: ENSP00000298454
MRLLALAAAALLARAPAPEVCAALNVTVSPGPVVDYLEGENATLLCHVSQKRRKDSLLAVRWFFAHSFDSQEALMVKMTKLRVVQYYGNFSRSAKRRRLRLLEEQRGALYRLSVLTLQPSDQGHYVCRVQEISRHRNKWTAWSNGSSATEMRGVSSHPVERGAFLGISLVILPHSLPFTADLTMASFLQSS

SEQ ID NO: 97095 - protein, 320 aa, Homo sapiens
  Payload ID: 19362
  Gene Name: V-set and transmembrane domain containing 4
  Uniprot ID: Q8IW00
  ENSP ID: ENSP00000331062
MRLLALAAAALLARAPAPEVCAALNVTVSPGPVVDYLEGENATLLCHVSQKRRKDSLLAVRWFFAHSFDSQEALMVKMTKLRVVQYYGNFSRSAKRRRLRLLEEQRGALYRLSVLTLQPSDQGHYVCRVQEISRHRNKWTAWSNGSSATEMRVISLKASEESSFEKTKETWAFFEDLYVYAVLVCCVGILSILLFMLVIVWQSVFNKRKSRVRHYLVKCPQNSSGETVTSVTSLAPLQPKKGKRQKEKPDIPPAVPAKAPIAPTFHKPKLLKPQRKVTLPKIAEENLTYAELELIKPHRAAKGAPTSTVYAQILFEENKL

SEQ ID NO: 97096 - protein, 20 aa, Homo sapiens
  Payload ID: 19363
  Gene Name: V-set and transmembrane domain containing 5
  ENSP ID: ENSP00000381277
  MOD_RES (1)..(1): Any amino acid
XRHKLKESTTEEIELEDVEC

SEQ ID NO: 97097 - protein, 200 aa, Homo sapiens
  Payload ID: 19363
  Gene Name: V-set and transmembrane domain containing 5
  Uniprot ID: A8MXK1
  ENSP ID: ENSP00000386607
MRPLPSGRRKTRGISLGLFALCLAAARCLQSQGVSLYIPQATINATVKEDILLSVEYSCHGVPTIEWTYSSNWGTQKIVEWKPGTQANISQSHKDRVCTFDNGSIQLFSVGVRDSGYYVITVTERLGSSQFGTIVLHVSEILYEDLHFVAVILAFLAAVAAVLISLMWVCNKCAYKFQRKRRHKLKESTTEEIELEDVEC

SEQ ID NO: 97098 - protein, 166 aa, Homo sapiens
  Payload ID: 19364
  Gene Name: V-set domain containing T cell activation inhibitor 1
  Uniprot ID: Q7Z7D3
  ENSP ID: ENSP00000328168
MASLGQILFWSIISIIIILAGAIALIIGFGISAFSMPEVNVDYNASSETLRCEAPRWFPQPTVVWASQVDQGANFSEVSNTSFELNSENVTMKVVSVLYNVTINNTYSCMIENDIAKATGDIKVTESEIKRRSHLQLLNSKASLCVSSFFAISWALLPLSPYLMLK

SEQ ID NO: 97099 - protein, 285 aa, Homo sapiens
  Payload ID: 19364
  Gene Name: V-set domain containing T cell activation inhibitor 1
  ENSP ID: ENSP00000351899
MVLLTSRMKPLTSRIISIIIILAGAIALIIGFGISGRHSITVTTVASAGNIGEDGILSCTFEPDIKLSDIVIQWLKEGVLGLVHEFKEGKDELSEQDEMFRGRTAVFADQVIVGNASLRLKNVQLTDAGTYKCYIITSKGKGNANLEYKTGAFSMPEVNVDYNASSETLRCEAPRWFPQPTVVWASQVDQGANFSEVSNTSFELNSENVTMKVVSVLYNVTINNTYSCMIENDIAKATGDIKVTESEIKRRSHLQLLNSKASLCVSSFFAISWALLPLSPYLMLK

SEQ ID NO: 97100 - protein, 282 aa, Homo sapiens
  Payload ID: 19364
  Gene Name: V-set domain containing T cell activation inhibitor 1
  Uniprot ID: Q7Z7D3
  ENSP ID: ENSP00000358470
MASLGQILFWSIISIIIILAGAIALIIGFGISGRHSITVTTVASAGNIGEDGILSCTFEPDIKLSDIVIQWLKEGVLGLVHEFKEGKDELSEQDEMFRGRTAVFADQVIVGNASLRLKNVQLTDAGTYKCYIITSKGKGNANLEYKTGAFSMPEVNVDYNASSETLRCEAPRWFPQPTVVWASQVDQGANFSEVSNTSFELNSENVTMKVVSVLYNVTINNTYSCMIENDIAKATGDIKVTESEIKRRSHLQLLNSKASLCVSSFFAISWALLPLSPYLMLK

SEQ ID NO: 97101 - protein, 187 aa, Homo sapiens
  Payload ID: 19364
  Gene Name: V-set domain containing T cell activation inhibitor 1
  Uniprot ID: Q7Z7D3
  ENSP ID: ENSP00000444724
MFRGRTAVFADQVIVGNASLRLKNVQLTDAGTYKCYIITSKGKGNANLEYKTGAFSMPEVNVDYNASSETLRCEAPRWFPQPTVVWASQVDQGANFSEVSNTSFELNSENVTMKVVSVLYNVTINNTYSCMIENDIAKATGDIKVTESEIKRRSHLQLLNSKASLCVSSFFAISWALLPLSPYLMLK

SEQ ID NO: 97102 - protein, 87 aa, Homo sapiens [sequence omitted]

SEQ ID NO: 97103 - protein, 220 aa, Homo sapiens
  Payload ID: 19365
  Gene Name: WAP four-disulfide core domain 1
  Uniprot ID: Q9HC57
  ENSP ID: ENSP00000219454
MPLTGVGPGSCRRQIIRALCLLLLLLHAGSAKNIWKRALPARLAEKSRAEEAGAPGGPRQPRADRCPPPPRTLPPGACQAARCQADSECPRHRRCCYNGCAYACLEAVPPPPVLDWLVQPKPRWLGGNGWLLDGPEEVLQAEACSTTEDGAEPLLCPSGYECHILSPGDVAEGIPNRGQCVKQRRQADGRILRHKLYKEYPEGDSKNVAEPGRGQQKHFQ

SEQ ID NO: 97104 - protein, 220 aa, Homo sapiens; identical to SEQ ID NO: 97103
  Payload ID: 19365
  Gene Name: WAP four-disulfide core domain 1
  Uniprot ID: Q9HC57
  ENSP ID: ENSP00000456920

SEQ ID NO: 97105 - protein, 66 aa, Homo sapiens
  Payload ID: 19365
  Gene Name: WAP four-disulfide core domain 1
  ENSP ID: ENSP00000481580
MPLTGVGPGSCRRQIIRALCLLLLLLHAGSAKNIWKRALPARLAEKSRVSAWDGEAGAACVGGSQP

SEQ ID NO: 97106 - protein, 79 aa, Homo sapiens
  Payload ID: 19366
  Gene Name: WAP four-disulfide core domain 10A
  Uniprot ID: Q9H1F0
  ENSP ID: ENSP00000361726
MAPQTLLPVLVLCVLLLQAQGGYRDKKRMQKTQLSPEIKVCQQQPKLYLCKHLCESHRDCQANNICCSTYCGNVCMSIL

SEQ ID NO: 97107 - protein, 73 aa, Homo sapiens
  Payload ID: 19367
  Gene Name: WAP four-disulfide core domain 10B
  Uniprot ID: Q8IUB3
  ENSP ID: ENSP00000327628
MAPQTLLLVLVLCVLLLQAQGGYRDKMRMQRIKVCEKRPSIDLCIHHCSYFQKCETNKICCSAFCGNICMSIL

SEQ ID NO: 97108 - protein, 89 aa, Homo sapiens
  Payload ID: 19367
  Gene Name: WAP four-disulfide core domain 10B
  Uniprot ID: Q8IUB3
  ENSP ID: ENSP00000337466
MVSCERRASKSVGQILLWDFGYTCRLSHRRRNSTEILSRNLPALYTGIKVCEKRPSIDLCIHHCSYFQKCETNKICCSAFCGNICMSIL

SEQ ID NO: 97109 - protein, 87 aa, Homo sapiens
  Payload ID: 19368
  Gene Name: WAP four-disulfide core domain 11
  Uniprot ID: Q8NEX6
  ENSP ID: ENSP00000318753
MVSLMKLWIPMLMTFFCTVLLSVLGEMRKKRYDRKELLLEECWGKPNVKECTNKCSKAFRCKDKNYTCCWTYCGNICWINVETSGDY

SEQ ID NO: 97110 - protein, 87 aa, Homo sapiens; identical to SEQ ID NO: 97109
  Payload ID: 19368
  Gene Name: WAP four-disulfide core domain 11
  Uniprot ID: Q8NEX6
  ENSP ID: ENSP00000348968

SEQ ID NO: 97111 - protein, 87 aa, Homo sapiens; identical to SEQ ID NO: 97109
  Payload ID: 19368
  Gene Name: WAP four-disulfide core domain 11
  Uniprot ID: Q8NEX6
  ENSP ID: ENSP00000479579

SEQ ID NO: 97112 - protein, 111 aa, Homo sapiens
  Payload ID: 19369
  Gene Name: WAP four-disulfide core domain 12
  Uniprot ID: Q8WWY7
  ENSP ID: ENSP00000361871
MGSSSFLVLMVSLVLVTLVAVEGVKEGIEKAGVCPADNVRCFKSDPPQCHTDQDCLGERKCCYLHCGFKCVIPVKELEEGGNKDEDVSRPYPEPGWEAKCPGSSSTRCPQK

SEQ ID NO: 97113 - protein, 93 aa, Homo sapiens
  Payload ID: 19370
  Gene Name: WAP four-disulfide core domain 13
  Uniprot ID: Q8IUB5
  ENSP ID: ENSP00000302938
MKPVLPLQFLVVFCLALQLVPGSPKQRVLKYILEPPPCISAPENCTHLCTMQEDCEKGFQCCSSFCGIVCSSETFQKRNRIKHKGSEVIMPAN

SEQ ID NO: 97114 - protein, 102 aa, Homo sapiens
  Payload ID: 19371
  Gene Name: WAP four-disulfide core domain 2
  Uniprot ID: Q14508
  ENSP ID: ENSP00000217425
MPACRLGPLAAALLLSLLLFGFTLVSGTGAEKTGVCPELQADQNCTQECVSDSECADNLKCCSAGCATFCSLPNALFHWHLKTRRLWEISGPRPRRPTWDSS

SEQ ID NO: 97115 - protein, 76 aa, Homo sapiens
  Payload ID: 19371
  Gene Name: WAP four-disulfide core domain 2
  Uniprot ID: Q14508
  ENSP ID: ENSP00000340215
MPACRLGPLAAALLLSLLLFGFTLVSDKEGSCPQVNINFPQLGLCRDQCQVDSQCPGQMKCCRNGCGKVSCVTPNF

SEQ ID NO: 97116 - protein, 73 aa, Homo sapiens
  Payload ID: 19371
  Gene Name: WAP four-disulfide core domain 2
  Uniprot ID: Q14508
  ENSP ID: ENSP00000342890
MLQVQVNLPVSPLPTYPYSFFYPDKEGSCPQVNINFPQLGLCRDQCQVDSQCPGQMKCCRNGCGKVSCVTPNF

SEQ ID NO: 97117 - protein, 124 aa, Homo sapiens
  Payload ID: 19371
  Gene Name: WAP four-disulfide core domain 2
  Uniprot ID: Q14508
  ENSP ID: ENSP00000361761
MPACRLGPLAAALLLSLLLFGFTLVSGTGAEKTGVCPELQADQNCTQECVSDSECADNLKCCSAGCATFCSLPNDKEGSCPQVNINFPQLGLCRDQCQVDSQCPGQMKCCRNGCGKVSCVTPNF

SEQ ID NO: 97118 - protein, 79 aa, Homo sapiens
  Payload ID: 19371
  Gene Name: WAP four-disulfide core domain 2
  ENSP ID: ENSP00000404760
MPACRLGPLAAALLLSLLLFGFTLVSGTGAEKTGVCPELQADQNCTQECVSDSECADNLKCCSAGCATFCSLPNGQLAE

SEQ ID NO: 97119 - protein, 231 aa, Homo sapiens
  Payload ID: 19372
  Gene Name: WAP four-disulfide core domain 3
  Uniprot ID: Q8IUB2
  ENSP ID: ENSP00000243938
MMLSCLFLLKALLALGSLESWITAGEHAKEGECPPHKNPCKELCQGDELCPAEQKCCTTGCGRICRDIPKGRKRDCPRVIRKQSCLKRCITDETCPGVKKCCTLGCNKSCVVPISKQKLAEFGGECPADPLPCEELCDGDASCPQGHKCCSTGCGRTCLGDIEGGRGGDCPKVLVGLCIVGCVMDENCQAGEKCCKSGCGRFCVPPVLPPKLTMNPNWTVRSDSELEIPVP

SEQ ID NO: 97120 - protein, 225 aa, Homo sapiens
  Payload ID: 19372
  Gene Name: WAP four-disulfide core domain 3
  ENSP ID: ENSP00000337815
  MOD_RES (1)..(1): Any amino acid
XIKEALLALGSLESWITAGEHAKEGECPPHKNPCKELCQGDELCPAEQKCCTTGCGRICRDIPKGRKRDCPRVIRKQSCLKRCITDETCPGVKKCCTLGCNKSCVVPISKQKLAEFGGECPADPLPCEELCDGDASCPQGHKCCSTGCGRTCLGDIEGGRGGDCPKVLVGLCIVGCVMDENCQAGEKCCKSGCGRFCVPPVLPPKLTMNPNWTVRSDSELEIPVP

SEQ ID NO: 97121 - protein, 94 aa, Homo sapiens
  Payload ID: 19372
  Gene Name: WAP four-disulfide core domain 3
  ENSP ID: ENSP00000361713
MMLSCLFLLKALLALGSLESWITAGEHGRGGDCPKVLVGLCIVGCVMDENCQAGEKCCKSGCGRFCVPPVLPPKLTMNPNWTVRSDSELEIPVP

SEQ ID NO: 97122 - protein, 137 aa, Homo sapiens
  Payload ID: 19372
  Gene Name: WAP four-disulfide core domain 3
  ENSP ID: ENSP00000361715
MMLSCLFLLKALLALGSLESWITAGEHAKEGECPPHKNPCKELCQGDELCPAEQKCCTTGCGRICRDIPKGRGGDCPKVLVGLCIVGCVMDENCQAGEKCCKSGCGRFCVPPVLPPKLTMNPNWTVRSDSELEIPVP

SEQ ID NO: 97123 - protein, 224 aa, Homo sapiens
  Payload ID: 19373
  Gene Name: WAP four-disulfide core domain 5
  Uniprot ID: Q8TCV5
  ENSP ID: ENSP00000312381
MRTQSLLLLGALLAVGSQLPAVFGRKKGEKSGGCPPDDGPCLLSVPDQCVEDSQCPLTRKCCYRACFRQCVPRVSVKLGSCPEDQLRCLSPMNHLCHKDSDCSGKKRCCHSACGRDCRDPARGTAPGCPGQANSDLGSVALHLSWGPTERVHDGRPGALPAGQHYLYQRWFQPSDNHWPADTSLQPIHPWFLLLGVKVHSLSSEEGLCITPVLCTTAIRASHPS

SEQ ID NO: 97124 - protein, 123 aa, Homo sapiens
  Payload ID: 19373
  Gene Name: WAP four-disulfide core domain 5
  Uniprot ID: Q8TCV5
  ENSP ID: ENSP00000361875
MRTQSLLLLGALLAVGSQLPAVFGRKKGEKSGGCPPDDGPCLLSVPDQCVEDSQCPLTRKCCYRACFRQCVPRVSVKLGSCPEDQLRCLSPMNHLCHKDSDCSGKKRCCHSACGRDCRDPARG

SEQ ID NO: 97125 - protein, 131 aa, Homo sapiens
  Payload ID: 19374
  Gene Name: WAP four-disulfide core domain 6
  Uniprot ID: Q9BQY6
  ENSP ID: ENSP00000361750
MGLSGLLPILVPFILLGDIQEPGHAEGILGKPCPKIKVECEVEEIDQCTKPRDCPENMKCCPFSRGKKCLDFRKIYAVCHRRLAPAWPPYHTGGTIKKTKICSEFIYGGSQGNNNNFQTEAICLVTCKKYH

SEQ ID NO: 97126 - protein, 86 aa, Homo sapiens
  Payload ID: 19374
  Gene Name: WAP four-disulfide core domain 6
  Uniprot ID: Q9BQY6
  ENSP ID: ENSP00000361755
MGLSGLLPILVPFILLGDIQEPGHAEGILGKPCPKIKVECEVEEIDQCTKPRDCPENMKCCPFSRGKKCLDFRKVSLTLYHKEELE

SEQ ID NO: 97127 - protein, 241 aa, Homo sapiens
  Payload ID: 19375
  Gene Name: WAP four-disulfide core domain 8
  Uniprot ID: Q8IUA0
  ENSP ID: ENSP00000289953
MWTVRTEGGHFPLHSPTFSWRNVAFLLLLSLALEWTSAMLTKKIKHKPGLCPKERLTCTTELPDSCNTDFDCKEYQKCCFFACQKKCMDPFQEPCMLPVRHGNCNHEAQRWHFDFKNYRCTPFKYRGCEGNANNFLNEDACRTACMLIVKDGQCPLFPFTERKECPPSCHSDIDCPQTDKCCESRCGFVCARAWTVKKGFCPRKPLLCTKIDKPKCLQDEECPLVEKCCSHCGLKCMDPRR

SEQ ID NO: 97128 - protein, 241 aa, Homo sapiens; identical to SEQ ID NO: 97127
  Payload ID: 19375
  Gene Name: WAP four-disulfide core domain 8
  Uniprot ID: Q8IUA0
  ENSP ID: ENSP00000361735

SEQ ID NO: 97129 - protein, 89 aa, Homo sapiens
  Payload ID: 19376
  Gene Name: WAP four-disulfide core domain 9
  Uniprot ID: Q8NEX5
  ENSP ID: ENSP00000320532
MKPWILLLVMFISGVVMLLPVLGSFWNKDPFLDMIRETEQCWVQPPYKYCEKRCTKIMTCVRPNHTCCWTYCGNICLDNEEPLKSMLNP

SEQ ID NO: 97130 - protein, 548 aa, Homo sapiens
  Payload ID: 19377
  Gene Name: WAP, follistatin/kazal, immunoglobulin, kunitz and netrin domain containing 1
  Uniprot ID: Q96NZ8
  ENSP ID: ENSP00000324763
MPALRPLLPLLLLLRLTSGAGLLPGLGSHPGVCPNQLSPNLWVDAQSTCERECSRDQDCAAAEKCCINVCGLHSCVAARFPGSPAAPTTAASCEGFVCPQQGSDCDIWDGQPVCRCRDRCEKEPSFTCASDGLTYYNRCYMDAEACLRGLHLHIVPCKHVLSWPPSSPGPPETTARPTPGAAPVPPALYSSPSPQAVQVGGTASLHCDVSGRPPPAVTWEKQSHQRENLIMRPDQMYGNVVVTSIGQLVLYNARPEDAGLYTCTARNAAGLLRADFPLSVVQREPARDAAPSIPAPAECLPDVQACTGPTSPHLVLWHYDPQRGGCMTFPARGCDGAARGFETYEACQQACARGPGDACVLPAVQGPCRGWEPRWAYSPLLQQCHPFVYGGCEGNGNNFHSRESCEDACPVPRTPPCRACRLRSKLALSLCRSDFAIVGRLTEVLEEPEAAGGIARVALEDVLKDDKMGLKFLGTKYLEVTLSGMDWACPCPNMTAGDGPLVIMGEVRDGVAVLDAGSYVRAASEKRVKKILELLEKQACELLNRFQD

SEQ ID NO: 97131 - protein, 576 aa, Homo sapiens
  Payload ID: 19378
  Gene Name: WAP, follistatin/kazal, immunoglobulin, kunitz and netrin domain containing 2
  Uniprot ID: Q8TEU8
  ENSP ID: ENSP00000311184
MWAPRCRRFWSRWEQVAALLLLLLLLGVPPRSLALPPIRYSHAGICPNDMNPNLWVDAQSTCRRECETDQECETYEKCCPNVCGTKSCVAARYMDVKGKKGPVGMPKEATCDHFMCLQQGSECDIWDGQPVCKCKDRCEKEPSFTCASDGLTYYNRCYMDAEACSKGITLAVVTCRYHFTWPNTSPPPPETTMHPTTASPETPELDMAAPALLNNPVHQSVTMGETVSFLCDVVGRPRPEITWEKQLEDRENVVMRPNHVRGNVVVTNIAQLVIYNAQLQDAGIYTCTARNVAGVLRADFPLSVVRGHQAAATSESSPNGTAFPAAECLKPPDSEDCGEEQTRWHFDAQANNCLTFTFGHCHRNLNHFETYEACMLACMSGPLAACSLPALQGPCKAYAPRWAYNSQTGQCQSFVYGGCEGNGNNFESREACEESCPFPRGNQRCRACKPRQKLVTSFCRSDFVILGRVSELTEEPDSGRALVTVDEVLKDEKMGLKFLGQEPLEVTLLHVDWACPCPNVTVSEMPLIIMGEVDGGMAMLRPDSFVGASSARRVRKLREVMHKKTCDVLKEFLGLH

SEQ ID NO: 97132 - protein, 483 aa, Homo sapiens
  Payload ID: 19378
  Gene Name: WAP, follistatin/kazal, immunoglobulin, kunitz and netrin domain containing 2
  ENSP ID: ENSP00000405889
MDVKGKKGPVGMPKEATCDHFMCLQQGSECDIWDGQPVCKCKDRCEKEPSFTCASDGLTYYNRCYMDAEACSKGITLAVVTCRYHFTWPNTSPPPPETTMHPTTASPETPELDMAAPALLNNPVHQSVTMGETVSFLCDVVGRPRPEITWEKQLEDRENVVMRPNHVRGNVVVTNIAQLVIYNAQLQDAGIYTCTARNVAGVLRADFPLSVVRGHQAAATSESSPNGTAFPAAECLKPPDSEDCGEEQTRWHFDAQANNCLTFTFGHCHRNLNHFETYEACMLACMSGPLAACSLPALQGPCKAYAPRWAYNSQTGQCQSFVYGGCEGNGNNFESREACEESCPFPRGNQRCRACKPRQKLVTSFCRSDFVILGRVSELTEEPDSGRALVTVDEVLKDEKMGLKFLGQEPLEVTLLHVDWACPCPNVTVSEMPLIIMGEVDGGMAMLRPDSFVGASSARRVRKLREVMHKKTCDVLKEFLGLH

SEQ ID NO: 97133 - protein, 402 aa, Homo sapiens
  Payload ID: 19379
  Gene Name: WAPL cohesin release factor
  ENSP ID: ENSP00000263070
MDLDRASLDLMIRLLELEQDASSAKLLNEKDMNKIKEKIRRLCETVHNKHLDLENITTGHLAMETLLSLTSKRAGDWFKEELRLLGGLDHIVDKVKECVDHLSRDEDEEKLVASLWGAERCLRVLESVTVHNPENQSYLIAYKDSQLIVSSAKALQHCEELIQQYNRAEDSICLADSKPLPHQNVTNHVGKAVEDCMRAIIGVLLNLTNDNEWGSTKTGEQDGLIGTALNCVLQVPKYLPQEQRFDIRVLLFLERERAAQLAESKTDELIKDAPTTQHDKSGEWQETSGEIQWVSTEKTDGTEEKHKKEEEDEELDLNKALQHAGKHMEDCIVASYTALLLGCLCQESPINVTTVREYLPEGDFSIMTEMLKKFLSFMNLTCAVGTTGQKSISRVIEYLEHC

SEQ ID NO: 97134 - protein, 1190 aa, Homo sapiens
  Payload ID: 19379
  Gene Name: WAPL cohesin release factor
  Uniprot ID: Q7Z5K2
  ENSP ID: ENSP00000298767
MTSRFGKTYSRKGGNGSSKFDEVFSNKRTTLSTKWGETTFMAKLGQKRPNFKPDIQEIPKKPKVEEESTGDPFGFDSDDESLPVSSKNLAQVKCSSYSESSEAAQLEEVTSVLEANSKISHVVVEDTVVSDKCFPLEDTLLGKEKSTNRIVEDDASISSCNKLITSDKVENFHEEHEKNSHHIHKNADDSTKKPNAETTVASEIKETNDTWNSQFGKRPESPSEISPIKGSVRTGLFEWDNDFEDIRSEDCILSLDSDPLLEMKDDDFKNRLENLNEAIEEDIVQSVLRPTNCRTYCRANKTKSSQGASNFDKLMDGTSQALAKANSESSKDGLNQAKKGGVSCGTSFRGTVGRTRDYTVLHPSCLSVCNVTIQDTMERSMDEFTASTPADLGEAGRLRKKADIATSKTTTRFRPSNTKSKKDVKLEFFGFEDHETGGDEGGSGSSNYKIKYFGFDDLSESEDDEDDDCQVERKTSKKRTKTAPSPSLQPPPESNDNSQDSQSGTNNAENLDFTEDLPGVPESVKKPINKQGDKSKENTRKIFSGPKRSPTKAVYNARHWNHPDSEELPGPPVVKPQSVTVRLSSKEPNQKDDGVFKAPAPPSKVIKTVTIPTQPYQDIVTALKCRREDKELYTVVQHVKHFNDVVEFGENQEFTDDIEYLLSGLKSTQPLNTRCLSVISLATKCAMPSFRMHLRAHGMVAMVFKTLDDSQHHQNLSLCTAALMYILSRDRLNMDLDRASLDLMIRLLELEQDASSAKLLNEKDMNKIKEKIRRLCETVHNKHLDLENITTGHLAMETLLSLTSKRAGDWFKEELRLLGGLDHIVDKVKECVDHLSRDEDEEKLVASLWGAERCLRVLESVTVHNPENQSYLIAYKDSQLIVSSAKALQHCEELIQQYNRAEDSICLADSKPLPHQNVTNHVGKAVEDCMRAIIGVLLNLTNDNEWGSTKTGEQDGLIGTALNCVLQVPKYLPQEQRFDIRVLGLGLLINLVEYSARNRHCLVNMETSCSFDSSICSGEGDDSLRIGGQVHAVQALVQLFLERERAAQLAESKTDELIKDAPTTQHDKSGEWQETSGEIQWVSTEKTDGTEEKHKKEEEDEELDLNKALQHAGKHMEDCIVASYTALLLGCLCQESPINVTTVREYLPEGDFSIMTEMLKKFLSFMNLTCAVGTTGQKSISRVIEYLEHC

SEQ ID NO: 97135 - protein, 402 aa, Homo sapiens; identical to SEQ ID NO: 97133
  Payload ID: 19379
  Gene Name: WAPL cohesin release factor
  ENSP ID: ENSP00000361145

SEQ ID NO: 97136 - protein, 1190 aa, Homo sapiens; identical to SEQ ID NO: 97134
  Payload ID: 19379
  Gene Name: WAPL cohesin release factor
  Uniprot ID: Q7Z5K2
  ENSP ID: ENSP00000481451

SEQ ID NO: 97137 - protein, 465 aa, Homo sapiens
  Payload ID: 19380
  Gene Name: WAS protein family homolog 1
  Uniprot ID: A8K0Z3
  ENSP ID: ENSP00000485627
MTPVRMQHSLAGQTYAVPFIQPDLRREEAVQQMADALQYLQKVSGDIFSRISQQVEQSRSQVQAIGEKVSLAQAKIEKIKGSKKAIKVFSSAKYPAPGRLQEYGSIFTGAQDPGLQRRPRHRIQSKHRPLDERALQEKLKDFPVCVSTKPEPEDDAEEGLGGLPSNISSVSSLLLFNTTENLYKKYVFLDPLAGAVTKTHVMLGAETEEKLFDAPLSISKREQLEQQVPENYFYVPDLGQVPEIHVPSYLPDLPGIANDLMYSADLGPGIAPSAPGTIPELPTFHTEVAEPLKVDLQDGVLTPPPPPPPPPPAPEVLASAPPLPPSTAAPVGQGARQDDSSSSASPSVQGAPREVVDPSGGWATLLESIRQAGGIGKAKLRSMKERKLEKQQQKEQEQVRATSQGGHLMSDLFNKLVMRRKGISGKGPGAGEGPGGAFVRVSDSIPPLPPPQQPQAEEDEDDWES

SEQ ID NO: 97138 - protein, 140 aa, Homo sapiens
  Payload ID: 19381
  Gene Name: WAS protein family, member 1
  ENSP ID: ENSP00000265601
MPLVKRNIDPRHLCHTALPRGIKNELECVTNISLANIIRQLSSLSKYAEDIFGELFNEAHSFSFRVNSLQERVDRLSVSVTQLDPKEEELSLQDITMRKAFRSSTIQDQQLFDRKTLPIPLQETYDVCEQPPPLNILTPY

SEQ ID NO: 97139 - protein, 559 aa, Homo sapiens
  Payload ID: 19381
  Gene Name: WAS protein family, member 1
  Uniprot ID: Q92558
  ENSP ID: ENSP00000352425
MPLVKRNIDPRHLCHTALPRGIKNELECVTNISLANIIRQLSSLSKYAEDIFGELFNEAHSFSFRVNSLQERVDRLSVSVTQLDPKEEELSLQDITMRKAFRSSTIQDQQLFDRKTLPIPLQETYDVCEQPPPLNILTPYRDDGKEGLKFYTNPSYFFDLWKEKMLQDTEDKRKEKRKQKQKNLDRPHEPEKVPRAPHDRRREWQKLAQGPELAEDDANLLHKHIEVANGPASHFETRPQTYVDHMDGSYSLSALPFSQMSELLTRAEERVLVRPHEPPPPPPMHGAGDAKPIPTCISSATGLIENRPQSPATGRTPVFVSPTPPPPPPPLPSALSTSSLRASMTSTPPPPVPPPPPPPATALQAPAVPPPPAPLQIAPGVLHPAPPPIAPPLVQPSPPVARAAPVCETVPVHPLPQGEVQGLPPPPPPPPLPPPGIRPSSPVTVTALAHPPSGLHPTPSTAPGPHVPLMPPSPPSQVIPASEPKRHPSTLPVISDARSVLLEAIRKGIQLRKVEEQREQEAKHERIENDVATILSRRIAVEYSDSEDDSEFDEVDWLE

SEQ ID NO: 97140 - protein, 140 aa, Homo sapiens; identical to SEQ ID NO: 97138
  Payload ID: 19381
  Gene Name: WAS protein family, member 1
  ENSP ID: ENSP00000357934

SEQ ID NO: 97141 - protein, 559 aa, Homo sapiens; identical to SEQ ID NO: 97139
  Payload ID: 19381
  Gene Name: WAS protein family, member 1
  Uniprot ID: Q92558
  ENSP ID: ENSP00000376365

SEQ ID NO: 97142 - protein, 559 aa, Homo sapiens; identical to SEQ ID NO: 97139
  Payload ID: 19381
  Gene Name: WAS protein family, member 1
  Uniprot ID: Q92558
  ENSP ID: ENSP00000376366

SEQ ID NO: 97143 - protein, 559 aa, Homo sapiens; identical to SEQ ID NO: 97139
  Payload ID: 19381
  Gene Name: WAS protein family, member 1
  Uniprot ID: Q92558
  ENSP ID: ENSP00000376367

SEQ ID NO: 97144 - protein, 559 aa, Homo sapiens; identical to SEQ ID NO: 97139
  Payload ID: 19381
  Gene Name: WAS protein family, member 1
  Uniprot ID: Q92558
  ENSP ID: ENSP00000376368

SEQ ID NO: 97145 - protein, 89 aa, Homo sapiens
  Payload ID: 19381
  Gene Name: WAS protein family, member 1
  ENSP ID: ENSP00000402663
MPLVKRNIDPRHLCHTALPRGIKNELECVTNISLANIIRQLSSLSKYAEDIFGELFNEAHSFSFRVNSLQERVDRLSVSVTQLDPKEEE

SEQ ID NO: 97146 - protein, 89 aa, Homo sapiens; identical to SEQ ID NO: 97145
  Payload ID: 19381
  Gene Name: WAS protein family, member 1
  ENSP ID: ENSP00000404142

SEQ ID NO: 97147 - protein, 180 aa, Homo sapiens
  Payload ID: 19381
  Gene Name: WAS protein family, member 1
  ENSP ID: ENSP00000407041
MPLVKRNIDPRHLCHTALPRGIKNELECVTNISLANIIRQLSSLSKYAEDIFGELFNEAHSFSFRVNSLQERVDRLSVSVTQLDPKEEELSLQDITMRKAFRSSTIQDQQLFDRKTLPIPLQETYDVCEQPPPLNILTPYRDDGKEGLKFYTNPSYFFDLWKEKMLQDTEDKRKEKRKQK

SEQ ID NO: 97148 - protein, 281 aa, Homo sapiens
  Payload ID: 19382
  Gene Name: WAS protein family, member 2
  Uniprot ID: Q9Y6W5
  ENSP ID: ENSP00000439883
MPLVTRNIEPRHLCRQTLPSVRSELECVTNITLANVIRQLGSLSKYAEDIFGELFTQANTFASRVSSLAERVDRLQVKVTQLDPKEEEVSLQGINTRKAFRSSTIQDQKLFDRNSLPVPVLETYNTCDTPPPLNNLTPYRDDGKEALKFYTDPSYFFDLWKEKMLQDTKDIMKEKRKHRKEKKDNPNRGNVNPRKIKTRKEEWEKMKMGQEFVESKEKLGTSGYPPTLVYQNGSIGCVENVDASSYPPPPQSDSASSPSPSFSEDNLPPPPAEFRFSAAQG

SEQ ID NO: 97149 - protein, 498 aa, Homo sapiens
  Payload ID: 19382
  Gene Name: WAS protein family, member 2
  Uniprot ID: Q9Y6W5
  ENSP ID: ENSP00000483313
MPLVTRNIEPRHLCRQTLPSVRSELECVTNITLANVIRQLGSLSKYAEDIFGELFTQANTFASRVSSLAERVDRLQVKVTQLDPKEEEVSLQGINTRKAFRSSTIQDQKLFDRNSLPVPVLETYNTCDTPPPLNNLTPYRDDGKEALKFYTDPSYFFDLWKEKMLQDTKDIMKEKRKHRKEKKDNPNRGNVNPRKIKTRKEEWEKMKMGQEFVESKEKLGTSGYPPTLVYQNGSIGCVENVDASSYPPPPQSDSASSPSPSFSEDNLPPPPAEFSYPVDNQRGSGLAGPKRSSVVSPSHPPPAPPLGSPPGPKPGFAPPPAPPPPPPPMIGIPPPPPPVGFGSPGTPPPPSPPSFPPHPDFAAPPPPPPPPAADYPTLPPPPLSQPTGGAPPPPPPPPPPGPPPPPFTGADGQPAIPPPLSDTTKPKSSLPAVSDARSDLLSAIRQGFQLRRVEEQREQEKRDVVGNDVATILSRRIAVEYSDSEDDSSEFDEDDWSD

SEQ ID NO: 97150 - protein, 502 aa, Homo sapiens
  Payload ID: 19383
  Gene Name: WAS protein family, member 3
  Uniprot ID: Q9UPY6
  ENSP ID: ENSP00000335055
MPLVKRNIEPRHLCRGALPEGITSELECVTNSTLAAIIRQLSSLSKHAEDIFGELFNEANNFYIRANSLQDRIDRLAVKVTQLDSTVEEVSLQDINMKKAFKSSTVQDQQVVSKNSIPNPVADIYNQSDKPPPLNILTPYRDDKKDGLKFYTDPSYFFDLWKEKMLQDTEDKRKEKRRQKEQKRIDGTTREVKKVRKARNRRQEWNMMAYDKELRPDNRLSQSVYHGASSEGSLSPDTRSHASDVTDYSYPATPNHSLHPQPVTPSYAAGDVPPHGPASQAAEHEYRPPSASARHMALNRPQQPPPPPPPQAPEGSQASAPMAPADYGMLPAQIIEYYNPSGPPPPPPPPVIPSAQTAFVSPLQMPMQPPFPASASSTHAAPPHPPSTGLLVTAPPPPGPPPPPPGPPGPGSSLSSSPMHGPPVAEAKRQEPAQPPISDARSDLLAAIRMGIQLKKVQEQREQEAKREPVGNDVATILSRRIAVEYSDSDDDSEFDENDWSD

SEQ ID NO: 97151 - protein, 499 aa, Homo sapiens
  Payload ID: 19383
  Gene Name: WAS protein family, member 3
  Uniprot ID: Q9UPY6
  ENSP ID: ENSP00000354325
MPLVKRNIEPRHLCRGALPEGITSELECVTNSTLAAIIRQLSSLSKHAEDIFGELFNEANNFYIRANSLQDRIDRLAVKVTQLDSTVEEVSLQDINMKKAFKSSTVQDQQVVSKNSIPNPVADIYNQSDKPPPLNILTPYRDDKKDGLKFYTDPSYFFDLWKEKMLQDTEDKRKEKRRQKREKHKLNPNRNQQVNVRKVRTRKEEWERRKMGIEFMSDAKKLEQAGSAKEDRVPSGSHASDVTDYSYPATPNHSLHPQPVTPSYAAGDVPPHGPASQAAEHEYRPPSASARHMALNRPQQPPPPPPPQAPEGSQASAPMAPADYGMLPAQIIEYYNPSGPPPPPPPPVIPSAQTAFVSPLQMPMQPPFPASASSTHAAPPHPPSTGLLVTAPPPPGPPPPPPGPPGPGSSLSSSPMHGPPVAEAKRQEPAQPPISDARSDLLAAIRMGIQLKKVQEQREQEAKREPVGNDVATILSRRIAVEYSDSDDDSEFDENDWSD

SEQ ID NO: 97152 - protein, 809 aa, Homo sapiens
  Payload ID: 19384
  Gene Name: WAS protein homolog associated with actin, golgi membranes and microtubules
  Uniprot ID: Q8TF30
  ENSP ID: ENSP00000286760
MEDEQPDSLEGWVPVREGLFAEPERHRLRFLVAWNGAEGKFAVTCHDRTAQQRRLREGARLGPEPEPKPEAAVSPSSWAGLLSAAGLRGAHRQLAALWPPLERCFPRLPPELDVGGGGAWGLGLGLWALLWPTRAGPGEAALQELCGQLERYLGAAADGCGGATVRDALFPAEGGAADCESPREFRERALRARWVEADARLRQVIQGHGKANTMVALMNVYQEEDEAYQELVTVATMFFQYLLQPFRAMREVATLCKLDILKSLDEDDLGPRRVVALEKEAEEWTRRAEEAVVSIQDITVNYFKETVKALAGMQKEMEQDAKRFGQAAWATAIPRLEKLQLMLARETLQLMRAKELCLNHKRAEIQGKMEDLPEQEKNTNVVDELEIQFYEIQLELYEVKFEILKNEEILLTTQLDSLKRLIKEKQDEVVYYDPCENPEELKVIDCVVGLQDDKNLEVKELRRQCQQLESKRGRICAKRASLRSRKDQCKENHRFRLQQAEESIRYSRQHHSIQMKRDKIKEEEQKKKEWINQERQKTLQRLRSFKDKRLAQSVRNTSGSEPVAPNLPSDLSQQMCLPASHAVSVIHPSSRKTRGVPLSEAGNVKSPKCQNCHGNIPVQVFVPVGDQTHSKSSEELSLPPPPPPPPPPPPPPPPPPPPLRALSSSSQAATHQNLGFRAPVKDDQPRPLVCESPAERPRDSLESFSCPGSMDEVLASLRHGRAPLRKVEVPAVRPPHASINEHILAAIRQGVKLKKVHPDLGPNPSSKPTSNRRTSDLERSIKAALQRIKRVSADSEEDSDEQDPGQWDG

SEQ ID NO: 97153 - protein, 510 aa, Homo sapiens
  Payload ID: 19385
  Gene Name: WAS/WASL interacting protein family, member 1
  Uniprot ID: O43516
  ENSP ID: ENSP00000272746
MPVPPPPAPPPPPTFALANTEKPTLNKTEQAGRNALLSDISKGKKLKKTVTNDRSAPILDKPKGAGAGGGGGGFGGGGGFGGGGGGGGGGSFGGGGPPGLGGLFQAGMPKLRSTANRDNDSGGSRPPLLPPGGRSTSAKPFSPPSGPGRFPVPSPGHRSGPPEPQRNRMPPPRPDVGSKPDSIPPPVPSTPRPIQSSPHNRGSPPVPGGPRQPSPGPTPPPFPGNRGTALGGGSIRQSPLSSSSPFSNRPPLPPTPSRALDDKPPPPPPPVGNRPSIHREAVPPPPPQNNKPPVPSTPRPSASSQAPPPPPPPSRPGPPPLPPSSSGNDETPRLPQRNLSLSSSTPPLPSPGRSGPLPPPPSERPPPPVRDPPGRSGPLPPPPPVSRNGSTSRALPATPQLPSRSGVDSPRSGPRPPLPPDRPSAGAPPPPPPSTSIRNGFQDSPCEDEWESRFYFHPISDLPPPEPYVQTTKSYPSKLARNESRSGSNRRERGAPPLPPIPRPPKQAAE

SEQ ID NO: 97154 - protein, 503 aa, Homo sapiens
  Payload ID: 19385
  Gene Name: WAS/WASL interacting protein family, member 1
  Uniprot ID: O43516
  ENSP ID: ENSP00000352802
MPVPPPPAPPPPPTFALANTEKPTLNKTEQAGRNALLSDISKGKKLKKTVTNDRSAPILDKPKGAGAGGGGGGFGGGGGFGGGGGGGGGGSFGGGGPPGLGGLFQAGMPKLRSTANRDNDSGGSRPPLLPPGGRSTSAKPFSPPSGPGRFPVPSPGHRSGPPEPQRNRMPPPRPDVGSKPDSIPPPVPSTPRPIQSSPHNRGSPPVPGGPRQPSPGPTPPPFPGNRGTALGGGSIRQSPLSSSSPFSNRPPLPPTPSRALDDKPPPPPPPVGNRPSIHREAVPPPPPQNNKPPVPSTPRPSASSQAPPPPPPPSRPGPPPLPPSSSGNDETPRLPQRNLSLSSSTPPLPSPGRSGPLPPPPSERPPPPVRDPPGRSGPLPPPPPVSRNGSTSRALPATPQLPSRSGVDSPRSGPRPPLPPDRPSAGAPPPPPPSTSIRNGFQDSPCEDEWESRFYFHPISDLPPPEPYVQTTKSYPSKLARNESRSGSNRRERGAPPLPPIPR

SEQ ID NO: 97155 - protein, 503 aa, Homo sapiens; identical to SEQ ID NO: 97154
  Payload ID: 19385
  Gene Name: WAS/WASL interacting protein family, member 1
  Uniprot ID: O43516
  ENSP ID: ENSP00000376329

SEQ ID NO: 97156 - protein, 503 aa, Homo sapiens; identical to SEQ ID NO: 97154
  Payload ID: 19385
  Gene Name: WAS/WASL interacting protein family, member 1
  Uniprot ID: O43516
  ENSP ID: ENSP00000376330

SEQ ID NO: 97157 - protein, 493 aa, Homo sapiens
  Payload ID: 19385
  Gene Name: WAS/WASL interacting protein family, member 1
  Uniprot ID: O43516
  ENSP ID: ENSP00000386431
MPVPPPPAPPPPPTFALANTEKPTLNKTEQAGRNALLSDISKGKKLKKTVTNDRSAPILDKPKGAGAGGGGGGFGGGGGFGGGGGGGGGGSFGGGGPPGLGGLFQAGMPKLRSTANRDNDSGGSRPPLLPPGGRSTSAKPFSPPSGPGRFPVPSPGHRSGPPEPQRNRMPPPRPDVGSKPDSIPPPVPSTPRPIQSSPHNRGSPPVPGGPRQPSPGPTPPPFPGNRGTALGGGSIRQSPLSSSSPFSNRPPLPPTPSRALDDKPPPPPPPVGNRPSIHREAVPPPPPQNNKPPVPSTPRPSASSQAPPPPPPPSRPGPPPLPPSSSGNDETPRLPQRNLSLSSSTPPLPSPGRSGPLPPPPSERPPPPVRDPPGRSGPLPPPPPVSRNGSTSRALPATPQLPSRSGVDSPRSGPRPPLPPDRPSAGAPPPPPPSTSIRNGFQDSPCEDEWESRFYFHPISDLPPPEPYVQTTKSYPSKLARNESRSEYFCQGF

SEQ ID NO: 97158 - protein, 131 aa, Homo sapiens
  Payload ID: 19385
  Gene Name: WAS/WASL interacting protein family, member 1
  ENSP ID: ENSP00000386757
MPVPPPPAPPPPPTFALANTEKPTLNKTEQAGRNALLSDISKGKKLKKTVTNDRSAPILDKPKGAGAGGGGGGFGGGGGFGGGGGGGGGGSFGGGGPPGLGGLFQAGMPKLRSTANRDNGLAGVGRKGRSK

SEQ ID NO: 97159 - protein, 403 aa, Homo sapiens
  Payload ID: 19385
  Gene Name: WAS/WASL interacting protein family, member 1
  ENSP ID: ENSP00000387150
MPVPPPPAPPPPPTFALANTEKPTLNKTEQAGRNALLSDISKGKKLKKTVTNDRSAPILDKPKGAGAGGGGGGFGGGGGFGGGGGGGGGGSFGGGGPPGLGGLFQAGMPKLRSTANRDNDSGGSRPPLLPPGGRSTSAKPFSPPSGPGRFPVPSPGHRSGPPEPQRNRMPPPRPDVGSKPDSIPPPVPSTPRPIQSSPHNRGSPPVPGGPRQPSPGPTPPPFPGNRGTALGGGSIRQSPLSSSSPFSNRPPLPPTPSRALDDKPPPPPPPVGNRPSIHREAVPPPPPQNNKPPVPSTPRPSASSQAPPPPPPPSRPGPPPLPPSSSGNDETPRLPQRNLSLSSSTPPLPSPGRSGPLPPPPSERPPPPVRDPPGRSGMTRRGVSCFQNPACPNVPIILSVKIV

SEQ ID NO: 97160 - protein, 99 aa, Homo sapiens
  Payload ID: 19385
  Gene Name: WAS/WASL interacting protein family, member 1
  ENSP ID: ENSP00000388454
MPVPPPPAPPPPPTFALANTEKPTLNKTEQAGRNALLSDISKGKKLKKTVTNDRSAPILDKPKGAGAGGGGGGFGGGGGFGGGGGGGGGGSFGGGGPPG

SEQ ID NO: 97161 - protein, 157 aa, Homo sapiens
  Payload ID: 19385
  Gene Name: WAS/WASL interacting protein family, member 1
  ENSP ID: ENSP00000391785
MPVPPPPAPPPPPTFALANTEKPTLNKTEQAGRNALLSDISKGKKLKKTVTNDRSAPILDRAGAGGGGGGFGGGGGFGGGGGGGGGGSFGGGGPPGLGGLFQAGMPKLRSTANRDNDSGGSRPPLLPPGGRSTSAKPFSPPSGPGRFPVPSPGHRSG

SEQ ID NO: 97162 - protein, 492 aa, Homo sapiens
  Payload ID: 19385
  Gene Name: WAS/WASL interacting protein family, member 1
  ENSP ID: ENSP00000479992
MPVPPPPAPPPPPTFALANTEKPTLNKTEQAGRNALLSDISKGKKLKKTVTNDRSAPILDKPKGAGAGGGGGGFGGGGGFGGGGGGGGGGSFGGGGPPGLGGLFQAGMPKLRSTANRDNDSGGSRPPLLPPGGRSTSAKPFSPPSGPGRFPVPSPGHRSGPPEPQRNRMPPPRPDVGSKPDSIPPPVPSTPRPIQSSPHNRGSPPVPGGPRQPSPGPTPPPFPGNRGTALGGGSIRQSPLSSSSPFSNRPPLPPTPSRALDDKPPPPPPPVGNRPSIHREAVPPPPPQNNKPPVPSTPRPSAPHRPHLRPPPSRPGPPPLPPSSSGNDETPRLPQRNLSLSSSTPPLPSPGRSGPLPPPPSERPPPPVRDPPGRSGPLPPPPPVSRNGSTSRALPATPQLPSRSGVDSPRSGPRPPLPPDRPSAGAPPPPPPSTSIRNGFQDSPCEDEWESRFYFHPISDLPPPEPYVQTTKSYPSKLARNESRSEYFCQGF

SEQ ID NO: 97163 - protein, 440 aa, Homo sapiens
  Payload ID: 19386
  Gene Name: WAS/WASL interacting protein family, member 2
  Uniprot ID: Q8TF74
  ENSP ID: ENSP00000320924
MPIPPPPPPPPGPPPPPTFHQANTEQPKLSRDEQRGRGALLQDICKGTKLKKVTNINDRSAPILEKPKGSSGGYGSGGAALQPKGGLFQGGVLKLRPVGAKDGSENLAGKPALQIPSSRAAAPRPPVSAASGRPQDDTDSSRASLPELPRMQRPSLPDLSRPNTTSSTGMKHSSSAPPPPPPGRRANAPPTPLPMHSSKAPAYNREKPLPPTPGQRLHPGREGPPAPPPVKPPPSPVNIRTGPSGQSLAPPPPPYRQPPGVPNGPSSPTNESAPELPQRHNSLHRKTPGPVRGLAPPPPTSASPSLLSNRPPPPARDPPSRGAAPPPPPPVIRNGARDAPPPPPPYRMHGSEPPSRGKPPPPPSRTPAGPPPPPPPPLRNGHRDSITTVRSFLDDFESKYSFHPVEDFPAPEEYKHFQRIYPSKTNRAARGAPPLPPILR

SEQ ID NO: 97164 - protein, 182 aa, Homo sapiens
  Payload ID: 19386
  Gene Name: WAS/WASL interacting protein family, member 2
  ENSP ID: ENSP00000377663
MPIPPPPPPPPGPPPPPTFHQANTEQPKLSRDEQRGRGALLQDICKGTKLKKVTNINDRSAPILETPPPPPPVIRNGARDAPPPPPPYRMHGSEPPSRGKPPPPPSRTPAGPPPPPPPPLRNGHRDSITTVRSFLDDFESKYSFHPVEDFPAPEEYKHFQRIYPSKTNRAARGAPPLPPILR

SEQ ID NO: 97165 - protein, 440 aa, Homo sapiens; identical to SEQ ID NO: 97163
  Payload ID: 19386
  Gene Name: WAS/WASL interacting protein family, member 2
  Uniprot ID: Q8TF74
  ENSP ID: ENSP00000462350

SEQ ID NO: 97166 - protein, 63 aa, Homo sapiens
  Payload ID: 19386
  Gene Name: WAS/WASL interacting protein family, member 2
  ENSP ID: ENSP00000462386
MHGSEPPSRGKPPPPPSRTPAGPPPPPPPPLRNGHRDSITTVRSFLDDFESKYSFHPVEDFPA

SEQ ID NO: 97167 - protein, 440 aa, Homo sapiens; identical to SEQ ID NO: 97163
  Payload ID: 19386
  Gene Name: WAS/WASL interacting protein family, member 2
  Uniprot ID: Q8TF74
  ENSP ID: ENSP00000462826

SEQ ID NO: 97168 - protein, 103 aa, Homo sapiens
  Payload ID: 19386
  Gene Name: WAS/WASL interacting protein family, member 2
  ENSP ID: ENSP00000463149
MPIPPPPPPPPGPPPPPTFHQANTEQPKLSRDEQRGRGALLQDICKGTKLKKVTNINDRSAPILEKPKGSSGGYGSGGAALQPKGGLFQGGVLKLRPVGAKDG

SEQ ID NO: 97169 - protein, 79 aa, Homo sapiens
  Payload ID: 19386
  Gene Name: WAS/WASL interacting protein family, member 2
  ENSP ID: ENSP00000463869
MPIPPPPPPPPGPPPPPTFHQANTEQPKLSRDEQRGRGALLQDICKGTKLKKSRKEAVVAMALEELPCSPREVSSKEEC

SEQ ID NO: 97170 - protein, 483 aa, Homo sapiens
  Payload ID: 19387
  Gene Name: WAS/WASL interacting protein family, member 3
  Uniprot ID: A6NGB9
  ENSP ID: ENSP00000242140
MPVPPPPPPPLPPPPPPLGAPPPPPPSAPPVSTDTSSLRRADPKGRSALLADIQQGTRLRKVTQINDRSAPQIESSKGTNKEGGGSANTRGASTPPTLGDLFAGGFPVLRPAGQRDVAGGKTGQGPGSRAPSPRLPNKTISGPLIPPASPRLGNTSEAHGAARTAPPRPNVPAPPPPTPPPPPPPLPPPLPSSSPIKTPLVSPPGPLTKGNLPVVAPPVPCAPPPPPPPPPPTPPPLPPASVLSDKAVKPQLAPLHLPPIPPPLPLLPPCGYPGLKAEPASPAQDAQEPPAPPPPLPPYASCSPRASLPAPPLPGVNSSSETPPPLPPKSPSFQAPPQKAGAQALPAPPAPPGSQPFLQKKRHGRPGAGGGKLNPPPAPPARSPTTELSSKSQQATAWTPTQQPGGQLRNGSLHIIDDFESKFTFHSVEDFPPPDEYKPCQKIYPSKIPRSRTPGPWLQAEAVGQSSDDIKGRNSQLSLKTLR

SEQ ID NO: 97171 - protein, 483 aa, Homo sapiens
  Payload ID: 19387
  Gene Name: WAS/WASL interacting protein family, member 3
  ENSP ID: ENSP00000386790
MPVPPPPPPPLPPPPPPLGAPPPPPPSAPPVSTDTSSLRRADPKGRSALLADIQQGTRLRKVTQINDRSAPQIESSKGTNKEGGGSANTRGASTPPTLGDLFAGGFPVLRPAGQRDVAGGKTGQGPGSRAPSPRLPNKTISGPLIPPASPRLGNTSEAHGAARTAPPRPNVPAPPPPTPPPPPPPLPPPLPSSSPIKTPLVSPPGPLTKGNLPVVAPPVPCAPPPPPPPPPPTPPPLPPASVLSDKAVKPQLAPLHLPPIPPPLPLLPPCGYPGLKAEPASPAQDAQEPPAPPPPLPPYASCSPRASLPAPPLPGVNSSSETPPPLPPKSPSFQAPPQKAGAQALPAPPAPPGSQPFLQKKRHGRPGAGGGKLNPPPAPPARSPTTELSSKSQQATAWTPTQQPGGQLRNGSLHIIDDFESKFTFHSVEDFPPPDEYKPCQKIYPSKIPRSRTPGPWLQAEAVGQSSDDIKGRNSQVTQASCL

SEQ ID NO: 97172 - protein, 483 aa, Homo sapiens; identical to SEQ ID NO: 97170
  Payload ID: 19387
  Gene Name: WAS/WASL interacting protein family, member 3
  Uniprot ID: A6NGB9
  ENSP ID: ENSP00000386878

SEQ ID NO: 97173 - protein, 309 aa, Homo sapiens
  Payload ID: 19388
  Gene Name: WBP2 N-terminal like
  Uniprot ID: Q6ICG8
  ENSP ID: ENSP00000328800
MAVNQSHTENRRGALIPNGESLLKRSPNVELSFPQRSEGSNVFSGRKTGTLFLTSYRVIFITSCSISDPMLSFMMPFDLMTNLTVEQPVFAANFIKGTIQAAPYGGWEGQATFKLVFRNGDAIEFAQLMVKAASAAARGFPLRTLNDWFSSMGIYVITGEGNMCTPQMPCSVIVYGAPPAGYGAPPPGYGAPPAGYGAQPVGNEGPPVGYRASPVRYGAPPLGYGAPPAGYGAPPLGYGAPPLGYGTPPLGYGAPPLGYGAPPAGNEGPPAGYRASPAGSGARPQESTAAQAPENEASLPSASSSQVHS

SEQ ID NO: 97174 - protein, 309 aa, Homo sapiens; identical to SEQ ID NO: 97173
  Payload ID: 19388
  Gene Name: WBP2 N-terminal like
  Uniprot ID: Q6ICG8
  ENSP ID: ENSP00000332983

SEQ ID NO: 97175 - protein, 273 aa, Homo sapiens
  Payload ID: 19388
  Gene Name: WBP2 N-terminal like
  ENSP ID: ENSP00000389598
MAVNQSHTENRRGALIPNGESLLKRSPNVELSFPQRSEGSNVFSGRKTGTLFLTSYRVIFITSCSISDPMLSFMMPFDLMTNLTVEQPVFAANFIKGTIQAAPYGGWEGQATFKLVFRNGDAIEFAQLMVKAASAVIVYGAPPAGYGAPPPGYGAPPAGYGAQPVGNEGPPVGYRASPVRYGAPPLGYGAPPAGYGAPPLGYGAPPLGYGTPPLGYGAPPLGYGAPPAGNEGPPAGYRASPAGSGARPQESTAAQAPENEASLPSASSSQVHS

SEQ ID NO: 97176 - protein, 83 aa, Homo sapiens
  Payload ID: 19388
  Gene Name: WBP2 N-terminal like
  ENSP ID: ENSP00000400236
MAVNQSHTENRRGALIPNGESLLKRSPNVELSFPQRSEGSNVFSGRKTGTLFLTSYRYLLQTSLRELFRQLHMVAGKDKLLLN

SEQ ID NO: 97177 - protein, 309 aa, Homo sapiens; identical to SEQ ID NO: 97173
  Payload ID: 19388
  Gene Name: WBP2 N-terminal like
  Uniprot ID: Q6ICG8
  ENSP ID: ENSP00000401002

SEQ ID NO: 97178 - protein, 235 aa, Homo sapiens [sequence omitted]

SEQ ID NO: 97179 - protein, 677 aa, Homo sapiens
  Payload ID: 19389
  Gene Name: WD and tetratricopeptide repeats 1
  Uniprot ID: Q8N5D0
  ENSP ID: ENSP00000317971
MAKVNITRDLIRRQIKERGALSFERRYHVTDPFIRRLGLEAELQGHSGCVNCLEWNEKGDLLASGSDDQHTIVWDPLHHKKLLSMHTGHTANIFSVKFLPHAGDRILITGAADSKVHVHDLTVKETIHMFGDHTNRVKRIATAPMWPNTFWSAAEDGLIRQYDLRENSKHSEVLIDLTEYCGQLVEAKCLTVNPQDNNCLAVGASGPFVRLYDIRMIHNHRKSMKQSPSAGVHTFCDRQKPLPDGAAQYYVAGHLPVKLPDYNNRLRVLVATYVTFSPNGTELLVNMGGEQVYLFDLTYKQRPYTFLLPRKCHSSGEVQNGKMSTNGVSNGVSNGLHLHSNGFRLPESRGHVSPQVELPPYLERVKQQANEAFACQQWTQAIQLYSKAVQRAPHNAMLYGNRAAAYMKRKWDGDHYDALRDCLKAISLNPCHLKAHFRLARCLFELKYVAEALECLDDFKGKFPEQAHSSACDALGRDITAALFSKNDGEEKKGPGGGAPVRLRSTSRKDSISEDEMVLRERSYDYQFRYCGHCNTTTDIKEANFFGSNAQYIVSGSDDGSFFIWEKETTNLVRVLQGDESIVNCLQPHPSYCFLATSGIDPVVRLWNPRPESEDLTGRVVEDMEGASQANQRRMNADPLEVMLLNMGYRITGLSSGGAGASDDEDSSEGQVQCRPS

SEQ ID NO: 97180 - protein, 676 aa, Homo sapiens
  Payload ID: 19389
  Gene Name: WD and tetratricopeptide repeats 1
  Uniprot ID: Q8N5D0
  ENSP ID: ENSP00000355317
MAKVNITRDLIRRQIKERGALSFERRYHVTDPFIRRLGLEAELQGHSGCVNCLEWNEKGDLLASGSDDQHTIVWDPLHHKKLLSMHTGHTANIFSVKFLPHAGDRILITGAADSKVHVHDLTVKETIHMFGDHTNRVKRIATAPMWPNTFWSAAEDGLIRQYDLRENSKHSEVLIDLTEYCGQLVEAKCLTVNPQDNNCLAVGASGPFVRLYDIRMIHNHRKSMKQSPSAGVHTFCDRQKPLPDGAAQYYVAGHLPVKLPDYNNRLRVLVATYVTFSPNGTELLVNMGGEQVYLFDLTYKQRPYTFLLPRKCHSSGVQNGKMSTNGVSNGVSNGLHLHSNGFRLPESRGHVSPQVELPPYLERVKQQANEAFACQQWTQAIQLYSKAVQRAPHNAMLYGNRAAAYMKRKWDGDHYDALRDCLKAISLNPCHLKAHFRLARCLFELKYVAEALECLDDFKGKFPEQAHSSACDALGRDITAALFSKNDGEEKKGPGGGAPVRLRSTSRKDSISEDEMVLRERSYDYQFRYCGHCNTTTDIKEANFFGSNAQYIVSGSDDGSFFIWEKETTNLVRVLQGDESIVNCLQPHPSYCFLATSGIDPVVRLWNPRPESEDLTGRVVEDMEGASQANQRRMNADPLEVMLLNMGYRITGLSSGGAGASDDEDSSEGQVQCRPS

SEQ ID NO: 97181 - protein, 615 aa, Homo sapiens
  Payload ID: 19389
  Gene Name: WD and tetratricopeptide repeats 1
  Uniprot ID: Q8N5D0
  ENSP ID: ENSP00000434578
MAKVNITRDLIRRQIKERGALSFERRYHVTDPFIRRLGLEAELQGHSGCVNCLEWNEKGDLLASGSDDQHTIVWDPLHHKKLLSMHTGHTANIFSVKFLPHAGDRILITGAADSKVHVHDLTVKETIHMFGDHTNRVKRIATAPMWPNTFWSAAEDGLIRQYDLRENSKHSEVLIDLTEYCGQLVEAKCLTVNPQDNNCLAVGASGPFVRLYDIRMIHNHRKSMKQSPSAGVHTFCDRQKPLPDGAAQYYVAGHLPVKLPDYNNRLRVLVATYVTFSPNGTELLVNMGGEQVYLFDLTYKQRPYTFLLPRKCHSSGEVQNGKMSTNGVSNGVSNGLHLHSNGFRLPESRGHVSPQVELPPYLERVKQQANEAFACQQWTQAIQLYSKAVQRAPHNAMLYGNRAAAYMKRKWDGDHYDALRDCLKAISLNPCHLKAHFRLARCLFELKYVAEALECLDDFKGKFPEQAHSSACDALGRDITAALFSKNDGEEKKGPGGGAPVRLRSTSRKDSISEDEMVLRERSYDYQFRYCGHCNTTTDIKEANFFGRRPPTWSVCSKGMSPLSTACSHTPATASWPPVASILLCGSGTPDQRVKTSQAESWKIWRVLHRPTSGA

SEQ ID NO: 97182 - protein, 125 aa, Homo sapiens
  Payload ID: 19389
  Gene Name: WD and tetratricopeptide repeats 1
  ENSP ID: ENSP00000435903
IVSGSDDGSFFIWEKETTNLVRVLQGDESIVNCLQPHPSYCFLATSGIDPVVRLWNPRPESEDLTGRVVEDMEGASQANQRRMNADPLEVMLLNMGYRITGLSSGGAGASDDEDSSEGQVQCRPS

SEQ ID NO: 97183 - protein, 410 aa, Homo sapiens
  Payload ID: 19390
  Gene Name: WD repeat and FYVE domain containing 1
  Uniprot ID: Q8IWB7
  ENSP ID: ENSP00000233055
MAAEIHSRPQSSRPVLLSKIEGHQDAVTAALLIPKEDGVITASEDRTIRVWLKRDSGQYWPSIYHTMASPCSAMAYHHDSRRIFVGQDNGAVMEFHVSEDFNKMNFIKTYPAHQNRVSAIIFSLATEWVISTGHDKCVSWMCTRSGNMLGRHFFTSWASCLQYDFDTQYAFVGDYSGQITLLKLEQNTCSVITTLKGHEGSVACLWWDPIQRLLFSGASDNSIIMWDIGGRKGRTLLLQGHHDKVQSLCYLQLTRQLVSCSSDGGIAVWNMDVSREEAPQWLESDSCQKCEQPFFWNIKQMWDTKTLGLRQHHCRKCGQAVCGKCSSKRSSYPVMGFEFQVRVCDSCYDSIKDEDRTSLATFHEGKHNISHMSMDIARGLMVTCGTDRIVKIWDMTPVVGCSLATGFSPH

SEQ ID NO: 97184 - protein, 215 aa, Homo sapiens
  Payload ID: 19390
  Gene Name: WD repeat and FYVE domain containing 1
  ENSP ID: ENSP00000395416
MAAEIHSRPQSSRPVLLSKIEGHQDAVTAALLIPKEDGVITASEDRTIRVWLKRDSGQYWPSIYHTMASHQNRVSAIIFSLATEWVISTGHDKCVSWMCTRSGNMLGRHFFTSWASCLQYDFDTQYAFVGDYSGQITLLKLEQNTCSVITTLKGHEGSVACLWWDPIQRLLFSGASDNSIIMWDIGGRKGRTLLLQGHHDKVQSLCYLQLTRQLV

SEQ ID NO: 97185 - protein, 400 aa, Homo sapiens
  Payload ID: 19391
  Gene Name: WD repeat and FYVE domain containing 2
  Uniprot ID: Q96P53
  ENSP ID: ENSP00000298125
MAAEIQPKPLTRKPILLQRMEGSQEVVNMAVIVPKEEGVISVSEDRTVRVWLKRDSGQYWPSVYHAMPSPCSCMSFNPETRRLSIGLDNGTISEFILSEDYNKMTPVKNYQAHQSRVTMILFVLELEWVLSTGQDKQFAWHCSESGQRLGGYRTSAVASGLQFDVETRHVFIGDHSGQVTILKLEQENCTLVTTFRGHTGGVTALCWDPVQRVLFSGSSDHSVIMWDIGGRKGTAIELQGHNDRVQALSYAQHTRQLISCGGDGGIVVWNMDVERQETPEWLDSDSCQKCDQPFFWNFKQMWDSKKIGLRQHHCRKCGKAVCGKCSSKRSSIPLMGFEFEVRVCDSCHEAITDEERAPTATFHDSKHNIVHVHFDATRGWLLTSGTDKVIKLWDMTPVVS

SEQ ID NO: 97186 - protein, 62 aa, Homo sapiens
  Payload ID: 19391
  Gene Name: WD repeat and FYVE domain containing 2
  ENSP ID: ENSP00000482942
MAAEIQPKPLTRKPILLQRMEGSQEVVNMAVIVPKEEGVISVSEDRSNGKHCKHTPVASILQ

SEQ ID NO: 97187 - protein, 3526 aa, Homo sapiens
  Payload ID: 19392
  Gene Name: WD repeat and FYVE domain containing 3
  Uniprot ID: Q8IZQ1
  ENSP ID: ENSP00000295888
MNMVKRIMGRPRQEECSPQDNALGLMHLRRLFTELCHPPRHMTQKEQEEKLYMMLPVFNRVFGNAPPNTMTEKFSDLLQFTTQVSRLMVTEIRRRASNKSTEAASRAIVQFLEINQSEEASRGWMLLTTINLLASSGQKTVDCMTTMSVPSTLVKCLYLFFDLPHVPEAVGGAQNELPLAERRGLLQKVFVQILVKLCSFVSPAEELAQKDDLQLLFSAITSWCPPYNLPWRKSAGEVLMTISRHGLSVNVVKYIHEKECLSTCVQNMQQSDDLSPLEIVEMFAGLSCFLKDSSDVSQTLLDDFRIWQGYNFLCDLLLRLEQAKEAESKDALKDLVNLITSLTTYGVSELKPAGITTGAPFLLPGFAVPQPAGKGHSVRNVQAFAVLQNAFLKAKTSFLAQIILDAITNIYMADNANYFILESQHTLSQFAEKISKLPEVQNKYFEMLEFVVFSLNYIPCKELISVSILLKSSSSYHCSIIAMKTLLKFTRHDYIFKDVFREVGLLEVMVNLLHKYAALLKDPTQALNEQGDSRNNSSVEDQKHLALLVMETLTVLLQGSNTNAGIFREFGGARCAHNIVKYPQCRQHALMTIQQLVLSPNGDDDMGTLLGLMHSAPPTELQLKTDILRALLSVLRESHRSRTVFRKVGGFVYITSLLVAMERSLSCPPKNGWEKVNQNQVFELLHTVFCTLTAAMRYEPANSHFFKTEIQYEKLADAVRFLGCFSDLRKISAMNVFPSNTQPFQRLLEEDVISIESVSPTLRHCSKLFIYLYKVATDSFDSRAEQIPPCLTSESSLPSPWGTPALSRKRHAYHSVSTPPVYPPKNVADLKLHVTTSSLQSSDAVIIHPGAMLAMLDLLASVGSVTQPEHALDLQLAVANILQSLVHTERNQQVMCEAGLHARLLQRCSAALADEDHSLHPPLQRMFERLASQALEPMVLREFLRLASPLNCGAWDKKLLKQYRVHKPSSLSYEPEMRSSMITSLEGLGTDNVFSLHEDNHYRISKSLVKSAEGSTVPLTRVKCLVSMTTPHDIRLHGSSVTPAFVEFDTSLEGFGCLFLPSLAPHNAPTNNTVTTGLIDGAVVSGIGSGERFFPPPSGLSYSSWFCIEHFSSPPNNHPVRLLTVVRRANSSEQHYVCLAIVLSAKDRSLIVSTKEELLQNYVDDFSEESSFYEILPCCARFRCGELIIEGQWHHLVLVMSKGMLKNSTAALYIDGQLVNTVKLHYVHSTPGGSGSANPPVVSTVYAYIGTPPAQRQIASLVWRLGPTHFLEEVLPSSNVTTIYELGPNYVGSFQAVCMPCKDAKSEGVVPSPVSLVPEEKVSFGLYALSVSSLTVARIRKVYNKLDSKAIAKQLGISSHENATPVKLIHNSAGHLNGSARTIGAALIGYLGVRTFVPKPVATTLQYVGGAAAILGLVAMASDVEGLYAAVKALVCVVKSNPLASKEMERIKGYQLLAMLLKKKRSLLNSHILHLTFSLVGTVDSGHETSIIPNSTAFQDLLCDFEVWLHAPYELHLSLFEHFIELLTESSEASKNAKLMREFQLIPKLLLTLRDMSLSQPTIAAISNVLSFLLQGFPSSNDLLRFGQFISSTLPTFAVCEKFVVMEINNEEKLDTGTEEEFGGLVSANLILLRNRLLDILLKLIYTSKEKTSINLQACEELVKTLGFDWIMMFMEEHLHSTTVTAAMRILVVLLSNQSILIKFKEGLSGGGWLEQTDSVLTNKIGTVLGFNVGRSAGGRSTVREINRDACHFPGFPVLQSFLPKHTNVPALYFLLMALFLQQPVSELPENLQVSVPVISCRSKQGCQFDLDSIWTFIFGVPASSGTVVSSIHNVCTEAVFLLLGMLRSMLTSPWQSEEEGSWLREYPVTLMQFFRYLYHNVPDLASMWMSPDFLCALAATVFPFNIRPYSEMVTDLDDEVGSPAEEFKAFAADTGMNRSQSEYCNVGTKTYLTNHPAKKFVFDFMRVLIIDNLCLTPASKQTPLIDLLLEASPERSTRTQQKEFQTYILDSVMDHLLAADVLLGEDASLPITSGGSYQVLVNNVFYFTQRVVDKLWQGMFNKESKLLIDFIIQLIAQSKRRSQGLSLDAVYHCLNRTILYQFSRAHKTVPQQVALLDSLRVLTVNRNLILGPGNHDQEFISCLAHCLINLHVGSNVDGFGLEAEARMTTWHIMIPSDIEPDGSYSQDISEGRQLLIKAVNRVWTELIHSKKQVLEELFKVTLPVNERGHVDIATARPLIEEAALKCWQNHLAHEKKCISRGEALAPTTQSKLSRVSSGFGLSKLTGSRRNRKESGLNKHSLSTQEISQWMFTHIAVVRDLVDTQYKEYQERQQNALKYVTEEWCQIECELLRERGLWGPPIGSHLDKWMLEMTEGPCRMRKKMVRNDMFYNHYPYVPETEQETNVASEIPSKQPETPDDIPQKKPARYRRAVSYDSKEYYMRLASGNPAIVQDAIVESSEGEAAQQEPEHGEDTIAKVKGLVKPPLKRSRSAPDGGDEENQEQLQDQIAEGSSIEEEEKTDNATLLRLLEEGEKIQHMYRCARVQGLDTSEGLLLFGKEHFYVIDGFTMTATREIRDIETLPPNMHEPIIPRGARQGPSQLKRTCSIFAYEDIKEVHKRRYLLQPIAVEVFSGDGRNYLLAFQKGIRNKVYQRFLAVVPSLTDSSESVSGQRPNTSVEQGSGLLSTLVGEKSVTQRWERGEISNFQYLMHLNTLAGRSYNDLMQYPVFPWILADYDSEEVDLTNPKTFRNLAKPMGAQTDERLAQYKKRYKDWEDPNGETPAYHYGTHYSSAMIVASYLVRMEPFTQIFLRLQGGHFDLADRMFHSVREAWYSASKHNMADVKELIPEFFYLPEFLFNSNNFDLGCKQNGTKLGDVILPPWAKGDPREFIRVHREALECDYVSAHLHEWIDLIFGYKQQGPAAVEAVNVFHHLFYEGQVDIYNINDPLKETATIGFINNFGQIPKQLFKKPHPPKRVRSRLNGDNAGISVLPGSTSDKIFFHHLDNLRPSLTPVKELKEPVGQIVCTDKGILAVEQNKVLIPPTWNKTFAWGYADLSCRLGTYESDKAMTVYECLSEWGQILCAICPNPKLVITGGTSTVVCVWEMGTSKEKAKTVTLKQALLGHTDTVTCATASLAYHIIVSGSRDRTCIIWDLNKLSFLTQLRGHRAPVSALCINELTGDIVSCAGTYIHVWSINGNPIVSVNTFTGRSQQIICCCMSEMNEWDTQNVIVTGHSDGVVRFWRMEFLQVPETPAPEPAEVLEMQEDCPEAQIGQEAQDEDSSDSEADEQSISQDPKDTPSQPSSTSHRPRAASCRATAAWCTDSGSDDSRRWSDQLSLDEKDGFIFVNYSEGQTRAHLQGPLSHPHPNPIEVRNYSRLKPGYRWERQLVFRSKLTMHTAFDRKDNAHPAEVTALGISKDHSRILVGDSRGRVFSWSVSDQPGRSAADHWVKDEGGDSCSGCSVRFSLTERRHHCRNCGQLFCQKCSRFQSEIKRLKISSPVRVCQNCYYNLQHERGSEDGPRNC

SEQ ID NO: 97188 - protein, 9 aa, Homo sapiens
  Payload ID: 19392
  Gene Name: WD repeat and FYVE domain containing 3
  ENSP ID: ENSP00000422741
MNMVKRIMG

SEQ ID NO: 97189 - protein, 639 aa, Homo sapiens
  Payload ID: 19392
  Gene Name: WD repeat and FYVE domain containing 3
  ENSP ID: ENSP00000424987
RKKMVRNDMFYNHYPYVPETEQETNVAKPARYRRAVSYDSKEYYMRLASGNPAIVQDAIVESSEGEAAQQEPEHGEDTIAKVKGLVKPPLKRSRSAPDGGDEENQEQLQDQIAEGSSIEEEEKTDNATLLRLLEEGEKIQHMYRCARVQGLDTSEGLLLFGKEHFYVIDGFTMTATREIRDIETLPPNMHEPIIPRGARQGPSQLKRTCSIFAYEDIKEVHKRRYLLQPIAVEVFSGDGRNYLLAFQKGIRNKVYQRFLAVVPSLTDSSESVSGQRPNTSVEQGSGLLSTLVGEKSVTQRWERGEISNFQYLMHLNTLAGRSYNDLMQYPVFPWILADYDSEEVDLTNPKTFRNLAKPMGAQTDERLAQYKKRYKDWEDPNGETPAYHYGTHYSSAMIVASYLVRMEPFTQIFLRLQGGHFDLADRMFHSVREAWYSASKHNMADVKELIPEFFYLPEFLFNSNNFDLGCKQNGTKLGDVILPPWAKGDPREFIRVHREALECDYVSAHLHEWIDLIFGYKQQGPAAVEAVNVFHHLFYEGQVDIYNINDPLKETATIGFINNFGQIPKQLFKKPHPPKRVRSRLNGDNAGISVLPGSTSDKIFFHHLDNLRPSLTPVKELKEPVGQIVCTDKGILAVE

SEQ ID NO: 97190 - protein, 60 aa, Homo sapiens
  Payload ID: 19392
  Gene Name: WD repeat and FYVE domain containing 3
  ENSP ID: ENSP00000425699
MNMVKRIMGRPRQEECSPQDNALGLMHLRRLFTELCHPPRHMTQKEQEEKLYMMLPVFNR

SEQ ID NO: 97191 - protein, 80 aa, Homo sapiens
  Payload ID: 19392
  Gene Name: WD repeat and FYVE domain containing 3
  ENSP ID: ENSP00000426813
  MOD_RES (1)..(1): Any amino acid
XAPPNTMTEKFSDLLQFTTQVSRLMVTEIRRRASNKSTEKQCALLSPKDFKATTPSEAASRAIVQFLEINQSEEASRGWM

SEQ ID NO: 97192 - protein, 1129 aa, Homo sapiens
  Payload ID: 19393
  Gene Name: WD repeat and HMG-box DNA binding protein 1
  Uniprot ID: O75717
  ENSP ID: ENSP00000353793
MPATRKPMRYGHTEGHTEVCFDDSGSFIVTCGSDGDVRIWEDLDDDDPKFINVGEKAYSCALKSGKLVTAVSNNTIQVHTFPEGVPDGILTRFTTNANHVVFNGDGTKIAAGSSDFLVKIVDVMDSSQQKTFRGHDAPVLSLSFDPKDIFLASASCDGSVRVWQISDQTCAISWPLLQKCNDVINAKSICRLAWQPKSGKLLAIPVEKSVKLYRRESWSHQFDLSDNFISQTLNIVTWSPCGQYLAAGSINGLIIVWNVETKDCMERVKHEKGYAICGLAWHPTCGRISYTDAEGNLGLLENVCDPSGKTSSSKVSSRVEKDYNDLFDGDDMSNAGDFLNDNAVEIPSFSKGIINDDEDDEDLMMASGRPRQRSHILEDDENSVDISMLKTGSSLLKEEEEDGQEGSIHNLPLVTSQRPFYDGPMPTPRQKPFQSGSTPLHLTHRFMVWNSIGIIRCYNDEQDNAIDVEFHDTSIHHATHLSNTLNYTIADLSHEAILLACESTDELASKLHCLHFSSWDSSKEWIIDLPQNEDIEAICLGQGWAAAATSALLLRLFTIGGVQKEVFSLAGPVVSMAGHGEQLFIVYHRGTGFDGDQCLGVQLLELGKKKKQILHGDPLPLTRKSYLAWIGFSAEGTPCYVDSEGIVRMLNRGLGNTWTPICNTREHCKGKSDHYWVVGIHENPQQLRCIPCKGSRFPPTLPRPAVAILSFKLPYCQIATEKGQMEEQFWRSVIFHNHLDYLAKNGYEYEESTKNQATKEQQELLMKMLALSCKLEREFRCVELADLMTQNAVNLAIKYASRSRKLILAQKLSELAVEKAAELTATQVEEEEEEEDFRKKLNAGYSNTATEWSQPRFRNQVEEDAEDSGEADDEEKPEIHKPGQNSFSKSTNSSDVSAKSGAVTFSSQGRVNPFKVSASSKEPAMSMNSARSTNILDNMGKSSKKSTALSRTTNNEKSPIIKPLIPKPKPKQASAASYFQKRNSQTNKTEEVKEENLKNVLSETPAICPPQNTENQRPKTGFQMWLEENRSNILSDNPDFSDEADIIKEGMIRFRVLSTEERKVWANKAKGETASEGTEAKKRKRVVDESDETENQEEKAKENLNLSKKQKPLDFSTNQKLSAFAFKQE

SEQ ID NO: 97193 - protein, 1006 aa, Homo sapiens
  Payload ID: 19393
  Gene Name: WD repeat and HMG-box DNA binding protein 1
  Uniprot ID: O75717
  ENSP ID: ENSP00000399349
MDSSQQKTFRGHDAPVLSLSFDPKDIFLASASCDGSVRVWQISDQTCAISWPLLQKCNDVINAKSICRLAWQPKSGKLLAIPVEKSVKLYRRESWSHQFDLSDNFISQTLNIVTWSPCGQYLAAGSINGLIIVWNVETKDCMERVKHEKGYAICGLAWHPTCGRISYTDAEGNLGLLENVCDPSGKTSSSKVSSRVEKDYNDLFDGDDMSNAGDFLNDNAVEIPSFSKGIINDDEDDEDLMMASGRPRQRSHILEDDENSVDISMLKTGSSLLKEEEEDGQEGSIHNLPLVTSQRPFYDGPMPTPRQKPFQSGSTPLHLTHRFMVWNSIGIIRCYNDEQDNAIDVEFHDTSIHHATHLSNTLNYTIADLSHEAILLACESTDELASKLHCLHFSSWDSSKEWIIDLPQNEDIEAICLGQGWAAAATSALLLRLFTIGGVQKEVFSLAGPVVSMAGHGEQLFIVYHRGTGFDGDQCLGVQLLELGKKKKQILHGDPLPLTRKSYLAWIGFSAEGTPCYVDSEGIVRMLNRGLGNTWTPICNTREHCKGKSDHYWVVGIHENPQQLRCIPCKGSRFPPTLPRPAVAILSFKLPYCQIATEKGQMEEQFWRSVIFHNHLDYLAKNGYEYEESTKNQATKEQQELLMKMLALSCKLEREFRCVELADLMTQNAVNLAIKYASRSRKLILAQKLSELAVEKAAELTATQVEEEEEEEDFRKKLNAGYSNTATEWSQPRFRNQVEEDAEDSGEADDEEKPEIHKPGQNSFSKSTNSSDVSAKSGAVTFSSQGRVNPFKVSASSKEPAMSMNSARSTNILDNMGKSSKKSTALSRTTNNEKSPIIKPLIPKPKPKQASAASYFQKRNSQTNKTEEVKEENLKNVLSETPAICPPQNTENQRPKTGFQMWLEENRSNILSDNPDFSDEADIIKEGMIRFRVLSTEERKVWANKAKGETASEGTEAKKRKRVVDESDETENQEEKAKENLNLSKKQKPLDFSTNQKLSAFAFKQE

SEQ ID NO: 97194 - protein, 168 aa, Homo sapiens
  Payload ID: 19393
  Gene Name: WD repeat and HMG-box DNA binding protein 1
  ENSP ID: ENSP00000413435
MPATRKPMRYGHTEGHTEVCFDDSGSFIVTCGSDGDVRIWEDLDDDDPKFINVGEKAYSCALKSGKLVTAVSNNTIQVHTFPEGVPDGILTRFTTNANHVVFNGDGTKIAAGSSDFLVKIVDVMDSSQQKTFRGHDAPVLSLSFDPKDIFLASASCDGSVRVWQISDQ

SEQ ID NO: 97195 - protein, 64 aa, Homo sapiens
  Payload ID: 19393
  Gene Name: WD repeat and HMG-box DNA binding protein 1
  ENSP ID: ENSP00000456806
  MOD_RES (1)..(1): Any amino acid
XGSSLLKEEEEDGQEGSIHNLPLVTSQRPFYDGPMPTPRQKPFQSGSTPLHLTHRFMQASLPAL

SEQ ID NO: 97196 - protein, 421 aa, Homo sapiens
  Payload ID: 19394
  Gene Name: WD repeat and SOCS box containing 1
  Uniprot ID: Q9Y6I7
  ENSP ID: ENSP00000262394
MASFPPRVNEKEIVRLRTIGELLAPAAPFDKKCGRENWTVAFAPDGSYFAWSQGHRTVKLVPWSQCLQNFLLHGTKNVTNSSSLRLPRQNSDGGQKNKPREHIIDCGDIVWSLAFGSSVPEKQSRCVNIEWHRFRFGQDQLLLATGLNNGRIKIWDVYTGKLLLNLVDHTEVVRDLTFAPDGSLILVSASRDKTLRVWDLKDDGNMMKVLRGHQNWVYSCAFSPDSSMLCSVGASKAVFLWNMDKYTMIRKLEGHHHDVVACDFSPDGALLATASYDTRVYIWDPHNGDILMEFGHLFPPPTPIFAGGANDRWVRSVSFSHDGLHVASLADDKMVRFWRIDEDYPVQVAPLSNGLCCAFSTDGSVLAAGTHDGSVYFWATPRQVPSLQHLCRMSIRRVMPTQEVQELPIPSKLLEFLSYRI

SEQ ID NO: 97197 - protein, 275 aa, Homo sapiens
  Payload ID: 19394
  Gene Name: WD repeat and SOCS box containing 1
  Uniprot ID: Q9Y6I7
  ENSP ID: ENSP00000327055
MASFPPRVNEKEIGKLLLNLVDHTEVVRDLTFAPDGSLILVSASRDKTLRVWDLKDDGNMMKVLRGHQNWVYSCAFSPDSSMLCSVGASKAVFLWNMDKYTMIRKLEGHHHDVVACDFSPDGALLATASYDTRVYIWDPHNGDILMEFGHLFPPPTPIFAGGANDRWVRSVSFSHDGLHVASLADDKMVRFWRIDEDYPVQVAPLSNGLCCAFSTDGSVLAAGTHDGSVYFWATPRQVPSLQHLCRMSIRRVMPTQEVQELPIPSKLLEFLSYRI

SEQ ID NO: 97198 - protein, 213 aa, Homo sapiens
  Payload ID: 19394
  Gene Name: WD repeat and SOCS box containing 1
  ENSP ID: ENSP00000416112
MASFPPRVNEKEIDGSYFAWSQGHRTVKLVPWSQCLQNFLLHGTKNVTNSSSLRLPRQNSDGGQKNKPREHIIDCGDIVWSLAFGSSVPEKQSRCVNIEWHRFRFGQDQLLLATGLNNGRIKIWDVYTGKLLLNLVDHTEVVRDLTFAPDGSLILVSASRDKTLRVWDLKDDGNMMKVLRGHQNWVYSCAFSPDSSMLCSVGASKAVVAAILV

SEQ ID NO: 97199 - protein, 98 aa, Homo sapiens
  Payload ID: 19394
  Gene Name: WD repeat and SOCS box containing 1
  ENSP ID: ENSP00000461991
MASFPPRVNEKEIGKLLLNLVDHTEVVRDLTFAPDGSLILVSASRDKTLRVWDLKDDGNMMKVLRGHQNWVYSCAFSPDSSMLCSVGASKAVVAAILV

SEQ ID NO: 97200 - protein, 78 aa, Homo sapiens
  Payload ID: 19394
  Gene Name: WD repeat and SOCS box containing 1
  ENSP ID: ENSP00000462365
MASFPPRVNEKEIAPAAPFDKKCGRENWTVAFAPDGSYFAWSQGHRTVKLVPWSQCLQNFLLHGTKNVTNSSSLRLPR

SEQ ID NO: 97201 - protein, 54 aa, Homo sapiens
  Payload ID: 19394
  Gene Name: WD repeat and SOCS box containing 1
  ENSP ID: ENSP00000462595
MASFPPRVNEKEIGNMMKVLRGHQNWVYSCAFSPDSSMLCSVGASKAVVAAILV

SEQ ID NO: 97202 - protein, 207 aa, Homo sapiens
  Payload ID: 19394
  Gene Name: WD repeat and SOCS box containing 1
  ENSP ID: ENSP00000462737
MASFPPRVNEKEIVFLFFLLVRLRTIGELLAPAAPFDKKCGRENWTVAFAPDGSYFAWSQGHRTVKLVPWSQCLQNFLLHGTKNVTNSSSLRLPRQNSDGGQKNKPREHIIDCGDIVWSLAFGSSVPEKQSRCVNIEWHRFRFGQDQLLLATGLNNGRIKIWDVYTGKLLLNLVDHTEVVRDLTFAPDGSLILVSASRDKTLRVWDL

SEQ ID NO: 97203 - protein, 143 aa, Homo sapiens
  Payload ID: 19394
  Gene Name: WD repeat and SOCS box containing 1
  ENSP ID: ENSP00000462900
MASFPPRVNEKEIGKLLLNLVDHTEVVRDLTFAPDGSLILVSASRDKTLRVWDLKDDGNMMKVLRGHQNWVYSCAFSPDSSMLCSVGASKAVFLWNMDKYTMIRKLEGHHHDVVACDFSPDGALLATASYDTRVYIWDPHNGD

SEQ ID NO: 97204 - protein, 74 aa, Homo sapiens
  Payload ID: 19394
  Gene Name: WD repeat and SOCS box containing 1
  ENSP ID: ENSP00000463621
MASFPPRVNEKEIVRLRTIGELLAPAAPFDKKCGRENWTVAFAPDGSYFAWSQGHRTVKLVPWSQCLQNLKTPP

SEQ ID NO: 97205 - protein, 247 aa, Homo sapiens
  Payload ID: 19394
  Gene Name: WD repeat and SOCS box containing 1
  ENSP ID: ENSP00000464109
MASFPPRVNEKEIVRLRTIGELLAPAAPFDKKCGRENWTVAFAPDGSYFAWSQGHRTVKLVPWSQCLQNFLLHGTKNVTNSSSLRLPRQNSDGGQKNKPREHIIDCGDIVWSLAFGSSVPEKQSRCVNIEWHRFRFGQDQLLLATGLNNGRIKIWDVYTGKLLLNLVDHTEVVRDLTFAPDGSLILVSASRDKTLRVWDLKDDGNMMKVLRGHQNWVYSCAFSPDSSMLCSVGASKAVRVKVLVHSL

SEQ ID NO: 97206 - protein, 404 aa, Homo sapiens
  Payload ID: 19395
  Gene Name: WD repeat and SOCS box containing 2
  Uniprot ID: Q9NYS7
  ENSP ID: ENSP00000319474
MEAGEEPLLLAELKPGRPHQFDWKSSCETWSVAFSPDGSWFAWSQGHCIVKLIPWPLEEQFIPKGFEAKSRSSKNETKGRGSPKEKTLDCGQIVWGLAFSPWPSPPSRKLWARHHPQVPDVSCLVLATGLNDGQIKIWEVQTGLLLLNLSGHQDVVRDLSFTPSGSLILVSASRDKTLRIWDLNKHGKQIQVLSGHLQWVYCCSISPDCSMLCSAAGEKSVFLWSMRSYTLIRKLEGHQSSVVSCDFSPDSALLVTASYDTNVIMWDPYTGERLRSLHHTQVDPAMDDSDVHISSLRSVCFSPEGLYLATVADDRLLRIWALELKTPIAFAPMTNGLCCTFFPHGGVIATGTRDGHVQFWTAPRVLSSLKHLCRKALRSFLTTYQVLALPIPKKMKEFLTYRTF

SEQ ID NO: 97207 - protein, 421 aa, Homo sapiens
  Payload ID: 19395
  Gene Name: WD repeat and SOCS box containing 2
  Uniprot ID: Q9NYS7
  ENSP ID: ENSP00000409131
MRVDRESRFLRGTGTGEAVAVEEPLLLAELKPGRPHQFDWKSSCETWSVAFSPDGSWFAWSQGHCIVKLIPWPLEEQFIPKGFEAKSRSSKNETKGRGSPKEKTLDCGQIVWGLAFSPWPSPPSRKLWARHHPQVPDVSCLVLATGLNDGQIKIWEVQTGLLLLNLSGHQDVVRDLSFTPSGSLILVSASRDKTLRIWDLNKHGKQIQVLSGHLQWVYCCSISPDCSMLCSAAGEKSVFLWSMRSYTLIRKLEGHQSSVVSCDFSPDSALLVTASYDTNVIMWDPYTGERLRSLHHTQVDPAMDDSDVHISSLRSVCFSPEGLYLATVADDRLLRIWALELKTPIAFAPMTNGLCCTFFPHGGVIATGTRDGHVQFWTAPRVLSSLKHLCRKALRSFLTTYQVLALPIPKKMKEFLTYRTF

SEQ ID NO: 97208 - protein, 61 aa, Homo sapiens
  Payload ID: 19395
  Gene Name: WD repeat and SOCS box containing 2
  ENSP ID: ENSP00000438433
MEAGEEPLLLAELKPGRPHQFDWKSSCETWSVAFSPDGSWFAWSQGHCIVKLIPWPLEEQL

SEQ ID NO: 97209 - protein, 406 aa, Homo sapiens
  Payload ID: 19395
  Gene Name: WD repeat and SOCS box containing 2
  ENSP ID: ENSP00000439450
MLSPAPEEPLLLAELKPGRPHQFDWKSSCETWSVAFSPDGSWFAWSQGHCIVKLIPWPLEEQFIPKGFEAKSRSSKNETKGRGSPKEKTLDCGQIVWGLAFSPWPSPPSRKLWARHHPQVPDVSCLVLATGLNDGQIKIWEVQTGLLLLNLSGHQDVVRDLSFTPSGSLILVSASRDKTLRIWDLNKHGKQIQVLSGHLQWVYCCSISPDCSMLCSAAGEKSVFLWSMRSYTLIRKLEGHQSSVVSCDFSPDSALLVTASYDTNVIMWDPYTGERLRSLHHTQVDPAMDDSDVHISSLRSVCFSPEGLYLATVADDRLLRIWALELKTPIAFAPMTNGLCCTFFPHGGVIATGTRDGHVQFWTAPRVLSSLKHLCRKALRSFLTTYQVLALPIPKKMKEFLTYRTF

SEQ ID NO: 97210 - protein, 245 aa, Homo sapiens
  Payload ID: 19395
  Gene Name: WD repeat and SOCS box containing 2
  ENSP ID: ENSP00000440386
MLSPAPEEPLLLAELKPGRPHQFDWKSSCETWSVAFSPDGSWFAWSQGHCIVKLIPWPLEEQFIPKGFEAKSRSSKNETKGRGSPKEKTLDCGQIVWGLAFSPWPSPPSRKLWARHHPQVPDVSCLVLATGLNDGQIKIWEVQTGLLLLNLSGHQDVVRDLSFTPSGSLILVSASRDKTLRIWDLNKHGKQIQVLSGHLQWVYCCSISPDCSMLCSAAGEKSVFLWSMRSYTLIRKLEGHQSSVV

SEQ ID NO: 97211 - protein, 194 aa, Homo sapiens
  Payload ID: 19395
  Gene Name: WD repeat and SOCS box containing 2
  Uniprot ID: Q9NYS7
  ENSP ID: ENSP00000444431
MLCSAAGEKSVFLWSMRSYTLIRKLEGHQSSVVSCDFSPDSALLVTASYDTNVIMWDPYTGERLRSLHHTQVDPAMDDSDVHISSLRSVCFSPEGLYLATVADDRLLRIWALELKTPIAFAPMTNGLCCTFFPHGGVIATGTRDGHVQFWTAPRVLSSLKHLCRKALRSFLTTYQVLALPIPKKMKEFLTYRTF

SEQ ID NO: 97212 - protein, 56 aa, Homo sapiens
  Payload ID: 19395
  Gene Name: WD repeat and SOCS box containing 2
  ENSP ID: ENSP00000445547
MLCSAAGEKSVFLWSMRSYTLIRKLEGHQSSVVSCDFSPDSALLVTASYDTNPHPG

SEQ ID NO: 97213 - protein, 746 aa, Homo sapiens
  Payload ID: 19396
  Gene Name: WD repeat containing planar cell polarity effector
  Uniprot ID: O95876
  ENSP ID: ENSP00000272321
MRREFCWDAYSKAAGSRASSPLPRQDRDSFCHQMSFCLTELHLWSLKNTLHIADRDIGIYQYYDKKDPPATEHGNLEKKQKLAESRDYPWTLKNRRPEKLRDSLKELEELMQNSRCVLSKWKNKYVCQLLFGSGVLVSLSLSGPQLEKVVIDRSLVGKLISDTISDALLTDSFIILSFLAQNKLCFIQFTKKMESSDVNKRLEKLSALDYKIFYYEIPGPINKTTERHLAINCVHDRVVCWWPLVNDDAWPWAPISSEKDRANLLLLGYAQGRLEVLSSVRTEWDPLDVRFGTKQPYQVFTVEHSVSVDKEPMADSCIYECIRNKIQCVSVTRIPLKSKAISCCRNVTEDKLILGCEDSSLILYETHRRVTLLAQTELLPSLISCHPSGAILLVGSNQGELQIFDMALSPINIQLLAEDRLPRETLQFSKLFDASSSLVQMQWIAPQVVSQKGEGSDIYDLLFLRFERGPLGVLLFKLGVFTRGQLGLIDIIFQYIHCDEIYEAINILSSMNWDTLGHQCFISMSAIVNHLLRQKLTPEREAQLETSLGTFYAPTRPLLDSTILEYRDQISKYARRFFHHLLRYQRFEKAFLLAVDVGARDLFMDIHYLALDKGELALAEVARKRASDIDAESITSGVELLGPLDRGDMLNEAFIGLSLAPQGEDSFPDNLPPSCPTHRHILQQRILNGSSNRQIIDRRNELEKDICSGFLMTNTCNAEDGELREDGREQEIRDGGSLKMIHFGLV

SEQ ID NO: 97214 - protein, 587 aa, Homo sapiens
  Payload ID: 19396
  Gene Name: WD repeat containing planar cell polarity effector
  Uniprot ID: O95876
  ENSP ID: ENSP00000381552
MFSSLHSALLTDSFIILSFLAQNKLCFIQFTKKMESSDVNKRLEKLSALDYKIFYYEIPGPINKTTERHLAINCVHDRVVCWWPLVNDDAWPWAPISSEKDRANLLLLGYAQGRLEVLSSVRTEWDPLDVRFGTKQPYQVFTVEHSVSVDKEPMADSCIYECIRNKIQCVSVTRIPLKSKAISCCRNVTEDKLILGCEDSSLILYETHRRVTLLAQTELLPSLISCHPSGAILLVGSNQGELQIFDMALSPINIQLLAEDRLPRETLQFSKLFDASSSLVQMQWIAPQVVSQKGEGSDIYDLLFLRFERGPLGVLLFKLGVFTRGQLGLIDIIFQYIHCDEIYEAINILSSMNWDTLGHQCFISMSAIVNHLLRQKLTPEREAQLETSLGTFYAPTRPLLDSTILEYRDQISKYARRFFHHLLRYQRFEKAFLLAVDVGARDLFMDIHYLALDKGELALAEVARKRASDIDAESITSGVELLGPLDRGDMLNEAFIGLSLAPQGEDSFPDNLPPSCPTHRHILQQRILNGSSNRQIIDRRNELEKDICSGFLMTNTCNAEDGELREDGREQEIRDGGSLKMIHFGLV

SEQ ID NO: 97215 - protein, 554 aa, Homo sapiens
  Payload ID: 19396
  Gene Name: WD repeat containing planar cell polarity effector
  ENSP ID: ENSP00000386592
MESSDVNKRLEKLSALDYKIFYYEIPGPINKTTERHLAINCVHDRVVCWWPLVNDDAWPWAPISSEKDRANLLLLGYAQGRLEVLSSVRTEWDPLDVRFGTKQPYQVFTVEHSVSVDKEPMADSCIYECIRNKIQCVSVTRIPLKSKAISCCRNVTEDKLILGCEDSSLILYETHRRVTLLAQTELLPSLISCHPSGAILLVGSNQGELQIFDMALSPINIQLLAEDRLPRETLQFSKLFDASSSLVQMQWIAPQVVSQKGEGSDIYDLLFLRFERGPLGVLLFKLGVFTRGQLGLIDIIFQYIHCDEIYEAINILSSMNWDTLGHQCFISMSAIVNHLLRQKLTPEREAQLETSLGTFYAPTRPLLDSTILEYRDQISKYARRFFHHLLRYQRFEKAFLLAVDVGARDLFMDIHYLALDKGELALAEVARKRASDIDAESITSGVELLGPLDRGDMLNEAFIGLSLAPQGEDSFPDNLPPSCPTHRHILQQRILNGSSNRQIIDRRNELEKDICSGFLMTNTCNAEDGELREDGREQEIRDGGSLKMIHFGLV

SEQ ID NO: 97216 - protein, 554 aa, Homo sapiens; identical to SEQ ID NO: 97215
  Payload ID: 19396
  Gene Name: WD repeat containing planar cell polarity effector
  ENSP ID: ENSP00000386769

SEQ ID NO: 97217 - protein, 402 aa, Homo sapiens
  Payload ID: 19396
  Gene Name: WD repeat containing planar cell polarity effector
  ENSP ID: ENSP00000386795
YYEIPGPINKTTERHLAINCVHDRVVCWWPLVNDDAWPWAPISSEKDRANLLLLGYAQGRLEVLSSVRTEWDPLDVRFGTKQPYQVFTVEHSVSVDKEPMADSCIYECIRNKIQCVSVTRIPLKSKAISCCRNVTEDKLILGCEDSSLILYETHRRVTLLAQTELLPSLISCHPSGAILLVGSNQGELQIFDMALSPINIQLLAEDRLPRETLQFSKLFDASSSLVQMQWIAPQVVSQKGEGSDIYDLLFLRFERGPLGVLLFKLGVFTRGQLGLIDIIFQYIHCDEIYEAINILSSMNWDTLGHQCFISMSAIVNHLLRQKLTPEREAQLETSLGTFYAPTRPLLDSTILEYRDQISKYARRFFHHLLRYQRFEKAFLLAVDVGARDLFMNSWDPWTEGIC

SEQ ID NO: 97218 - protein, 618 aa, Homo sapiens
  Payload ID: 19396
  Gene Name: WD repeat containing planar cell polarity effector
  Uniprot ID: O95876
  ENSP ID: ENSP00000387222
MRREFCWDAYSKAAGSRASSPLPRQDRDSFCHQMSFCLTELHLWSLKNTLHIADRDIGIYQYYDKKDPPATEHGNLEKKQKLAESRDYPWTLKNRRPEKLRDSLKELEELMQNSRCVLSKWKNKYVCQLLFGSGVLVSLSLSGPQLEKVVIDRSLVGKLISDTISDALLTDSFIILSFLAQNKLCFIQFTKKMESSDVNKRLEKLSALDYKIFYYEIPGPINKTTERHLAINCVHDRVVCWWPLVNDDAWPWAPISSEKDRANLLLLGYAQGRLEVLSSVRTEWDPLDVRFGTKQPYQVFTVEHSVSVDKEPMADSCIYECIRNKIQCVSVTRIPLKSKAISCCRNVTEDKLILGCEDSSLILYETHRRVTLLAQTELLPSLISCHPSGAILLVGSNQGELQIFDMALSPINIQLLAEDRLPRETLQFSKLFDASSSLVQMQWIAPQVVSQKGEGSDIYDLLFLRFERGPLGVLLFKLGVFTRGQLGLIDIIFQYIHCDEIYEAINILSSMNWDTLGHQCFISMSAIVNHLLRQKLTPEREAQLETSLGTFYAPTRPLLDSTILEYRDQISKYARRFFHHLLRYQRFEKAFLLAVDVGARDLFMASCYLTSNYTTRLQ

SEQ ID NO: 97219 - protein, 84 aa, Homo sapiens
  Payload ID: 19396
  Gene Name: WD repeat containing planar cell polarity effector
  ENSP ID: ENSP00000396226
MRREFCWDAYSKAAGSRASSPLPRQDRDSFCHQMSFCLTELHLWSLKNTLHIADRDIGIYQYYDKKDPPARDYPWTLKNRRPEK

SEQ ID NO: 97220 - protein, 132 aa, Homo sapiens
  Payload ID: 19396
  Gene Name: WD repeat containing planar cell polarity effector
  ENSP ID: ENSP00000409982
  MOD_RES (1)..(1): Any amino acid
XREFCWDAYSKAAGSRASSPLPRQDRDSFCHQMSFCLTELHLWSLKNTLHIADRDIGIYQYYDKKDPPATEHGNLEKKQKLAESRDYPWTLKNRRPEKLRDSLKELEELMQNSRCVLSKWKNKYVCQVCWCL

SEQ ID NO: 97221 - protein, 46 aa, Homo sapiens
  Payload ID: 19396
  Gene Name: WD repeat containing planar cell polarity effector
  ENSP ID: ENSP00000411429
MRREFCWDAYSKAAGSRASSPLPRQKTMINSGQNTENPQLSEGTGE

SEQ ID NO: 97222 - protein, 8 aa, Homo sapiens
  Payload ID: 19396
  Gene Name: WD repeat containing planar cell polarity effector
  ENSP ID: ENSP00000430288
MESSDVNK

SEQ ID NO: 97223 - protein, 548 aa, Homo sapiens
  Payload ID: 19397
  Gene Name: WD repeat containing, antisense to TP53
  Uniprot ID: Q9BUR4
  ENSP ID: ENSP00000324203
MKTLETQPLAPDCCPSDQDPAPAHPSPHASPMNKNADSELMPPPPERGDPPRLSPDPVAGSAVSQELREGDPVSLSTPLETEFGSPSELSPRIEEQELSENTSLPAEEANGSLSEEEANGPELGSGKAMEDTSGEPAAEDEGDTAWNYSFSQLPRFLSGSWSEFSTQPENFLKGCKWAPDGSCILTNSADNILRIYNLPPELYHEGEQVEYAEMVPVLRMVEGDTIYDYCWYSLMSSAQPDTSYVASSSRENPIHIWDAFTGELRASFRAYNHLDELTAAHSLCFSPDGSQLFCGFNRTVRVFSTARPGRDCEVRATFAKKQGQSGIISCIAFSPAQPLYACGSYGRSLGLYAWDDGSPLALLGGHQGGITHLCFHPDGNRFFSGARKDAELLCWDLRQSGYPLWSLGREVTTNQRIYFDLDPTGQFLVSGSTSGAVSVWDTDGPGNDGKPEPVLSFLPQKDCTNGVSLHPSLPLLATASGQRVFPEPTESGDEGEELGLPLLSTRHVHLECRLQLWWCGGAPDSSIPDDHQGEKGQGGTEGGVGELI

SEQ ID NO: 97224 - protein, 548 aa, Homo sapiens; identical to SEQ ID NO: 97223
  Payload ID: 19397
  Gene Name: WD repeat containing, antisense to TP53
  Uniprot ID: Q9BUR4
  ENSP ID: ENSP00000379727

SEQ ID NO: 97225 - protein, 548 aa, Homo sapiens; identical to SEQ ID NO: 97223
  Payload ID: 19397
  Gene Name: WD repeat containing, antisense to TP53
  Uniprot ID: Q9BUR4
  ENSP ID: ENSP00000397219

SEQ ID NO: 97226 - protein, 548 aa, Homo sapiens; identical to SEQ ID NO: 97223
  Payload ID: 19397
  Gene Name: WD repeat containing, antisense to TP53
  Uniprot ID: Q9BUR4
  ENSP ID: ENSP00000411061

SEQ ID NO: 97227 - protein, 287 aa, Homo sapiens
  Payload ID: 19397
  Gene Name: WD repeat containing, antisense to TP53
  ENSP ID: ENSP00000432991
MKTLETQPLAPDCCPSDQDPAPAHPSPHASPMNKNADSELMPPPPERGDPPRLSPDPVAGSAVSQELREGDPVSLSTPLETEFGSPSELSPRIEEQELSENTSLPAEEANGSLSEEEANGPELGSGKAMEDTSGEPAAEDEGDTAWNYSFSQLPRFLSGSWSEFSTQPENFLKGCKWAPDGSCILTNSADNILRIYNLPPELYHEGEQVEYAEMVPVLRMVEGDTIYDYCWYSLMSSAQPDTSYTGVSVSMSLSAWPAAAGRTRFISGTHSLESSGLPFAPTTTWMS

SEQ ID NO: 97228 - protein, 515 aa, Homo sapiens
  Payload ID: 19397
  Gene Name: WD repeat containing, antisense to TP53
  ENSP ID: ENSP00000434999
MKTLETQPLAPDCCPSDQDPAPAHPSPHASPMNKNADSELMPPPPERGDPPRLSPDPVAGSAVSQELREGDPVSLSTPLETEFGSPSELSPRIEEQELSENTSLPAEEANGSLSEEEANGPELGSGKAMEDTSGEPAAEDEGDTAPDGSCILTNSADNILRIYNLPPELYHEGEQVEYAEMVPVLRMVEGDTIYDYCWYSLMSSAQPDTSYVASSSRENPIHIWDAFTGELRASFRAYNHLDELTAAHSLCFSPDGSQLFCGFNRTVRVFSTARPGRDCEVRATFAKKQGQSGIISCIAFSPAQPLYACGSYGRSLGLYAWDDGSPLALLGGHQGGITHLCFHPDGNRFFSGARKDAELLCWDLRQSGYPLWSLGREVTTNQRIYFDLDPTGQFLVSGSTSGAVSVWDTDGPGNDGKPEPVLSFLPQKDCTNGVSLHPSLPLLATASGQRVFPEPTESGDEGEELGLPLLSTRHVHLECRLQLWWCGGAPDSSIPDDHQGEKGQGGTEGGVGELI

SEQ ID NO: 97229 - protein, 46 aa, Homo sapiens
  Payload ID: 19397
  Gene Name: WD repeat containing, antisense to TP53
  ENSP ID: ENSP00000465025
DELTAAHSLCFSPDGSQLFCGFNRTVRVFSTARPGRDCEVRATFGC

SEQ ID NO: 97230 - protein, 460 aa, Homo sapiens
  Payload ID: 19398
  Gene Name: WD repeat containing, antisense to TP73
  Uniprot ID: Q9P2S5
  ENSP ID: ENSP00000270708
MNFSEVFKLSSLLCKFSPDGKYLASCVQYRLVVRDVNTLQILQLYTCLDQIQHIEWSADSLFILCAMYKRGLVQVWSLEQPEWHCKIDEGSAGLVASCWSPDGRHILNTTEFHLRITVWSLCTKSVSYIKYPKACLQGITFTRDGRYMALAERRDCKDYVSIFVCSDWQLLRHFDTDTQDLTGIEWAPNGCVLAVWDTCLEYKILLYSLDGRLLSTYSAYEWSLGIKSVAWSPSSQFLAVGSYDGKVRILNHVTWKMITEFGHPAAINDPKIVVYKEAEKSPQLGLGCLSFPPPRAGAGPLPSSESKYEIASVPVSLQTLKPVTDRANPKIGIGMLAFSPDSYFLATRNDNIPNAVWVWDIQKLRLFAVLEQLSPVRAFQWDPQQPRLAICTGGSRLYLWSPAGCMSVQVPGEGDFAVLSLCWHLSGDSMALLSKDHFCLCFLETEAVVGTACRQLGGHT

SEQ ID NO: 97231 - protein, 435 aa, Homo sapiens
  Payload ID: 19398
  Gene Name: WD repeat containing, antisense to TP73
  ENSP ID: ENSP00000367573
MNFSEVFKLSSLLCKFSPDGKYLASCVQYRLVVRDVNTLQILQLYTCLDQIQHIEWSADSLFILCAMYKRGLVQVWSLEQPEWHCKIDEGSAGLVASCWSPDGRHILNTTEFHLRITVWSLCTKSVSYIKYPKACLQGITFTRDGRYMALAERRDCKDYVSIFVCSDWQLLRHFDTDTQDLTGIEWAPNGCVLAVWDTCLEYKILLYSLDGRLLSTYSAYEWSLGIKSVAWSPSSQFLAVGSYDGKVRILNHVTWKMITEFGHPAAINDPKIVVYKEAEKSPQLGLGCLSFPPPRAGAGPLPSSESKYEIASVPVSLQTLKPVTDRANPKIGIGMLAFSPDSYFLATRNDNIPNAVWVWDIQKLRLFAVLEQLSPVRAFQWDPQQPRLAICTGGSRLYLWSPAGCMSVQVPGEGKHIPEATDVAALLCAVWHHTG

SEQ ID NO: 97232 - protein, 179 aa, Homo sapiens
  Payload ID: 19398
  Gene Name: WD repeat containing, antisense to TP73
  ENSP ID: ENSP00000389738
MNFSEVFKLSSLLCKFSPDGKYLASCVQYRLVVRDVNTLQILQLYTCLDQIQHIEWSADSLFILCAMYKRGLVQVWSLEQPEWHCKIDEGSAGLVASCWSPDGRHILNTTEFHLRITVWSLCTKSVSYIKYPKACLQGITFTRDGRYMALAERRDCKDYVSIFVCSDWQLLRYKILLYS

SEQ ID NO: 97233 - protein, 304 aa, Homo sapiens
  Payload ID: 19398
  Gene Name: WD repeat containing, antisense to TP73
  ENSP ID: ENSP00000416192
MNFSEVFKLSSLLCKFSPDGKYLASCVQYRLVVRDVNTLQILQLYTCLDQIQHIEWSADSLFILCAMYKRGLVQVWSLEQPEWHCKIDEGSAGLVASCWSPDGRHILNTTEFHLRITVWSLCTKSVSYIKYPKACLQGITFTRDGRYMALAERRDCKDYVSIFVCSDWQLLRHFDTDTQDLTGIEWAPNGCVLAVWDTCLEVRILNHVTWKMITEFGHPAAINDPKIVVYKEAEKSPQLGLGCLSFPPPRAGAGPLPSSESKYEIASVPVSLQTLKPVTDRANPKIGIGMLAFSPDSYFLATRN

SEQ ID NO: 97234 - protein, 200 aa, Homo sapiens
  Payload ID: 19398
  Gene Name: WD repeat containing, antisense to TP73
  ENSP ID: ENSP00000463084
MYKRGLVQVWSLEQPEWHCKIDEGSAGLVASCWSPDGRHILNTTEFHLRITVWSLCTKSVSYIKYPKACLQGITFTRDGRYMALAERRDCKDYVSIFVCSDWQLLRHFDTDTQDLTGIEWAPNGCVLAVWDTCLEYKILLYSLDGRLLSTYSAYEWSLGIKSVAWSPSSQFLAVGSYDGKVRILNHVTWKMITEFGHPAA

SEQ ID NO: 97235 - protein, 466 aa, Homo sapiens
  Payload ID: 19399
  Gene Name: WD repeat domain 1
  Uniprot ID: O75083
  ENSP ID: ENSP00000371889
MPYEIKKVFASLPQVERGVSKIIGGDPKGNNFLYTNGKCVILRNIDDHSRFVNCVRFSPDGNRFATASADGQIYIYDGKTGEKVCALGGSKAHDGGIYAISWSPDSTHLLSASGDKTSKIWDVSVNSVVSTFPMGSTVLDQQLGCLWQKDHLLSVSLSGYINYLDRNNPSKPLHVIKGHSKSIQCLTVHKNGGKSYIYSGSHDGHINYWDSETGENDSFAGKGHTNQVSRMTVDESGQLISCSMDDTVRYTSLMLRDYSGQGVVKLDVQPKCVAVGPGGYAVVVCIGQIVLLKDQRKCFSIDNPGYEPEVVAVHPGGDTVAIGGVDGNVRLYSILGTTLKDEGKLLEAKGPVTDVAYSHDGAFLAVCDASKVVTVFSVADGYSENNVFYGHHAKIVCLAWSPDNEHFASGGMDMMVYVWTLSDPETRVKIQDAHRLHHVSSLAWLDEHTLVTTSHDASVKEWTITY

SEQ ID NO: 97236 - protein, 606 aa, Homo sapiens
  Payload ID: 19399
  Gene Name: WD repeat domain 1
  Uniprot ID: O75083
  ENSP ID: ENSP00000371890
MPYEIKKVFASLPQVERGVSKIIGGDPKGNNFLYTNGKCVILRNIDNPALADIYTEHAHQVVVAKYAPSGFYIASGDVSGKLRIWDTTQKEHLLKYEYQPFAGKIKDIAWTEDSKRIAVVGEGREKFGAVFLWDSGSSVGEITGHNKVINSVDIKQSRPYRLATGSDDNCAAFFEGPPFKFKFTIGDHSRFVNCVRFSPDGNRFATASADGQIYIYDGKTGEKVCALGGSKAHDGGIYAISWSPDSTHLLSASGDKTSKIWDVSVNSVVSTFPMGSTVLDQQLGCLWQKDHLLSVSLSGYINYLDRNNPSKPLHVIKGHSKSIQCLTVHKNGGKSYIYSGSHDGHINYWDSETGENDSFAGKGHTNQVSRMTVDESGQLISCSMDDTVRYTSLMLRDYSGQGVVKLDVQPKCVAVGPGGYAVVVCIGQIVLLKDQRKCFSIDNPGYEPEVVAVHPGGDTVAIGGVDGNVRLYSILGTTLKDEGKLLEAKGPVTDVAYSHDGAFLAVCDASKVVTVFSVADGYSENNVFYGHHAKIVCLAWSPDNEHFASGGMDMMVYVWTLSDPETRVKIQDAHRLHHVSSLAWLDEHTLVTTSHDASVKEWTITY

SEQ ID NO: 97237 - protein, 245 aa, Homo sapiens
  Payload ID: 19399
  Gene Name: WD repeat domain 1
  ENSP ID: ENSP00000425481
MPRRICVSAEKVFASLPQVERGVSKIIGGDPKGNNFLYTNGKCVILRNIDNPALADIYTEHAHQVVVAKYAPSGFYIASGDVSGKLRIWDTTQKEHLLKYEYQPFAGKIKDIAWTEDSKRIAVVGEGREKFGAVFLWDSGSSVGEITGHNKVINSVDIKQSRPYRLATGSDDNCAAFFEGPPFKFKFTIGDHSRFVNCVRFSPDGNRFATASADGQIYIYDGKTGEKVCALGGSKAHDGGIYAVS

SEQ ID NO: 97238 - protein, 466 aa, Homo sapiens; identical to SEQ ID NO: 97235
  Payload ID: 19399
  Gene Name: WD repeat domain 1
  Uniprot ID: O75083
  ENSP ID: ENSP00000426725

SEQ ID NO: 97239 - protein, 606 aa, Homo sapiens; identical to SEQ ID NO: 97236
  Payload ID: 19399
  Gene Name: WD repeat domain 1
  Uniprot ID: O75083
  ENSP ID: ENSP00000427687

SEQ ID NO: 97240 - protein, 1224 aa, Homo sapiens
  Payload ID: 19400
  Gene Name: WD repeat domain 11
  Uniprot ID: Q9BZH6
  ENSP ID: ENSP00000263461
MLPYTVNFKVSARTLTGALNAHNKAAVDWGWQGLIAYGCHSLVVVIDSITAQTLQVLEKHKADVVKVKWARENYHHNIGSPYCLRLASADVNGKIIVWDVAAGVAQCEIQEHAKPIQDVQWLWNQDASRDLLLAIHPPNYIVLWNADTGTKLWKKSYADNILSFSFDPFDPSHLTLLTSEGIVFISDFSPSKPPSGPGKKVYISSPHSSPAHNKLATATGAKKALNKVKILITQEKPSAEFITLNDCLQLAYLPSKRNHMLLLYPREILILDLEVNQTVGVIAIERTGVPFLQVIPCFQRDGLFCLHENGCITLRVRRSYNNIFTTSNEEPDPDPVQELTYDLRSQCDAIRVTKTVRPFSMVCCPVNENAAALVVSDGRVMIWELKSAVCNRNSRNSSSGVSPLYSPVSFCGIPVGVLQNKLPDLSLDNMIGQSAIAGEEHPRGSILREVHLKFLLTGLLSGLPAPQFAIRMCPPLTTKNIKMYQPLLAVGTSNGSVLVYHLTSGLLHKELSIHSCEVKGIEWTSLTSFLSFATSTPNNMGLVRNELQLVDLPTGRSIAFRGERGNDESAIEMIKVSHLKQYLAVVFRDKPLELWDVRTCTLLREMSKNFPTITALEWSPSHNLKSLRKKQLATREAMARQTVVSDTELSIVESSVISLLQEAESKSELSQNISAREHFVFTDIDGQVYHLTVEGNSVKDSARIPPDGSMGSITCIAWKGDTLVLGDMDGNLNFWDLKGRVSRGIPTHRSWVRKIRFAPGKGNQKLIAMYNDGAEVWDTKEVQMVSSLRSGRNVTFRILDVDWCTSDKVILASDDGCIRVLEMSMKSACFRMDEQELTEPVWCPYLLVPRASLALKAFLLHQPWNGQYSLDISHVDYPENEEIKNLLQEQLNSLSNDIKKLLLDPEFTLLQRCLLVSRLYGDESELHFWTVAAHYLHSLSQEKSASTTAPKEAAPRDKLSNPLDICYDVLCENAYFQKFQLERVNLQEVKRSTYDHTRKCTDQLLLLGQTDRAVQLLLETSADNQHYYCDSLKACLVTTVTSSGPSQSTIKLVATNMIANGKLAEGVQLLCLIDKAADACRYLQTYGEWNRAAWLAKVRLNPEECADVLRRWVDHLCSPQVNQKSKALLVLLSLGCFFSVAETLHSMRYFDRAALFVEACLKYGAFEVTEDTEKLITAIYADYARSLKNLGFKQGAVLFASKAGAAGKDLLNELESPKEEPIEE

SEQ ID NO: 97241 - protein, 199 aa, Homo sapiens
  Payload ID: 19400
  Gene Name: WD repeat domain 11
  ENSP ID: ENSP00000474595
MLLLYPREILILDLEVNQTVGVIAIERTGVPFLQVIPCFQRDGLFCLHENGCITLRVRRSYNNIFTTSNEEPDPDPVQELTYDLRSQCDAIRVTKTVRPFSMVCCPVNENAAALVVSDGRVMIWELKSAVCNRNSRNRAKCNCWGRTSQRFNSAGSAPQVPADGTAFRTARTTVCYSYVSTVDHKKHQDVSATAGCWYK

SEQ ID NO: 97242 - protein, 312 aa, Homo sapiens
  Payload ID: 19400
  Gene Name: WD repeat domain 11
  ENSP ID: ENSP00000474880
MLLLYPREILILDLEVNQTVGVIAIERTGVPFLQVIPCFQRDGLFCLHENGCITLRVRRSYNNIFTTSNEEPDPDPVQELTYDLRSQCDAIRVTKTVRPFSMVCCPVNENAAALVVSDGRVMIWELKSAVCNRNSRNSSSGVSPLYSPVSFCGIPVGVLQNKLPDLSLDNMIGQSAIAGEEHPRGSILREVHLKFLLTGLLSGLPAPQFAIRMCPPLTTKNIKMYQPLLAVGTSNGSVLVYHLTSGLLHKELSIHSCEVKGIEWTSLTSFLSFATSTPNNMGLVRNELQLVDLPTGRSIAFRGERGNDESAI

SEQ ID NO: 97243 - protein, 95 aa, Homo sapiens
  Payload ID: 19400
  Gene Name: WD repeat domain 11
  ENSP ID: ENSP00000475076
MLPYTVNFKVSARTLTGALNAHNKAAVDWGWQGLIAYGCHSLVVVIDSITAQTLQVPADGTAFRTARTTVCYSYVSTVDHKKHQDVSATAGCWYK

SEQ ID NO: 97244 - protein, 423 aa, Homo sapiens [sequence omitted]

SEQ ID NO: 97245 - protein, 485 aa, Homo sapiens
  Payload ID: 19402
  Gene Name: WD repeat domain 13
  Uniprot ID: Q9H1Z4
  ENSP ID: ENSP00000218056
MAAVWQQVLAVDARYNAYRTPTFPQFRTQYIRRRSQLLRENAKAGHPPALRRQYLRLRGQLLGQRYGPLSEPGSARAYSNSIVRSSRTTLDRMEDFEDDPRALGARGHRRSVSRGSYQLQAQMNRAVYEDRPPGSVVPTSAAEASRAMAGDTSLSENYAFAGMYHVFDQHVDEAVPRVRFANDDRHRLACCSLDGSISLCQLVPAPPTVLRVLRGHTRGVSDFAWSLSNDILVSTSLDATMRIWASEDGRCIREIPDPDSAELLCCTFQPVNNNLTVVGNAKHNVHVMNISTGKKVKGGSSKLTGRVLALSFDAPGRLLWAGDDRGSVFSFLFDMATGKLTKAKRLVVHEGSPVTSISARSWVSREARDPSLLINACLNKLLLYRVVDNEGTLQLKRSFPIEQSSHPVRSIFCPLMSFRQGACVVTGSEDMCVHFFDVERAAKAAVNKLQGHSAPVLDVSFNCDESLLASSDASGMVIVWRREQK

SEQ ID NO: 97246 - protein, 485 aa, Homo sapiens; identical to SEQ ID NO: 97245
  Payload ID: 19402
  Gene Name: WD repeat domain 13
  Uniprot ID: Q9H1Z4
  ENSP ID: ENSP00000365919

SEQ ID NO: 97247 - protein, 107 aa, Homo sapiens
  Payload ID: 19402
  Gene Name: WD repeat domain 13
  ENSP ID: ENSP00000480532
MKLAPQQQGVLPPGVWSSRPFHFGVARHKGHEPESVDVLAFVVHAAAGGHARGGGRGMAAVWQQVLAVDARYNAYRTPTFPQFRTQYIRRRSQLLRENAKAGHPPAL

SEQ ID NO: 97248 - protein, 43 aa, Homo sapiens
  Payload ID: 19402
  Gene Name: WD repeat domain 13
  ENSP ID: ENSP00000482667
MAAVWQQVLAVDASFGRSISAGAASCCGRMPRLGTPQRCVGST

SEQ ID NO: 97249 - protein, 187 aa, Homo sapiens
  Payload ID: 19402
  Gene Name: WD repeat domain 13
  ENSP ID: ENSP00000483191
LLCCTFQPVNNNLTVVRLQDTHSPRVGNAKHNVHVMNISTGKKVKGGSSKLTGRVLALSFDAPGRLLWAGDDRGSVFSFLFDMATGKLTKAKRLVVHEGSPVTSISARSWVSREARDPSLLINACLNKLLLYRVVDNEGTLQLKRSFPIEQSSHPVRSIFCPLMSFRQGACVVTGSEDMCVHFFDVE

SEQ ID NO: 97250 - protein, 43 aa, Homo sapiens; identical to SEQ ID NO: 97248
  Payload ID: 19402
  Gene Name: WD repeat domain 13
  ENSP ID: ENSP00000484996

SEQ ID NO: 97251 - protein, 1322 aa, Homo sapiens
  Payload ID: 19403
  Gene Name: WD repeat domain 17
  Uniprot ID: Q8IZU2
  ENSP ID: ENSP00000280190
MAWMTYISNWFEQDDWYEGLQRANMSQVRQVGLLAAGCQPWNKDVCAASGDRFAYCATLAIYIYQLDHRYNEFKLHAIMSEHKKTITAISWCPHNPDLFASGSTDNLVIIWNVAEQKVIAKLDSTKGIPASLSWCWNAEDVVAFVSHRGPLFIWTISGPDSGVIVHKDAHSFLSDICMFRWHTHQKGKVVFGHIDGSLSIFHPGNKNQKHVLRPESLEGTDEEDPVTALEWDPLSTDYLLVVNLHYGIRLVDSESLSCITTFNLPSAAASVQCLAWVPSAPGMFITGDSQVGVLRIWNVSRTTPIDNLKLKKTGFHCLHVLNSPPRKKFSVQSPTKNHYTSSTSEAVPPPTLTQNQAFSLPPGHAVCCFLDGGVGLYDMGAKKWDFLRDLGHVETIFDCKFKPDDPNLLATASFDGTIKVWDINTLTAVYTSPGNEGVIYSLSWAPGGLNCIAGGTSRNGAFIWNVQKGKIIQRFNEHGTNGIFCIAWSHKDSKRIATCSSDGFCIIRTIDGKVLHKYKHPAAVFGCDWSQNNKDMIATGCEDTNVRVYYVATSSDQPLKVFSGHTAKVFHVKWSPLREGILCSGSDDGTVRIWDYTQDACINILNGHTAPVRGLMWNTEIPYLLISGSWDYTIKVWDTREGTCVDTVYDHGADVYGLTCHPSRPFTMASCSRDSTVRLWSLTALVTPVQINILADRSWEEIIGNTDYAIEPGTPPLLCGKVSRDIRQEIEKLTANSQVKKLRWFSECLSPPGGSDNLWNLVAVIKGQDDSLLPQNYCKGIMHLKHLIKFRTSEAQELTTVKMSKFGGGIGVPAKEERLKEAAEIHLRLGQIQRYCELMVELGEWDKALSIAPGVSVKYWKKLMQRRADQLIQEDKDDVIPYCIAIGDVKKLVHFFMSRGQLKEALLVAQAACEGNMQPLHVSVPKGASYSDDIYKEDFNELLHKVSKELAEWYFQDGRAVLAACCHLAIDNIELAMAYLIRGNELELAVCVGTVLGESAAPATHYALELLARKCMMISVCFPCVGYSVPFCYVNRNLAADLLLMIPDNELHLIKLCAFYPGCTEEINDLHDKCKLPTVEECMQLAETARADDNIFETVKYYLLSQEPEKALPIGISFVKEYISSSDWTLDTIYPVLDLLSYIRTEKLLLHTCTEARNELLILCGYIGALLAIRRQYQSIVPALYEYTSQLLKRREVSVPLKIEYLSEELDAWRACTQSTNRSLEDSPYTPPSDSQRMIYATLLKRLKEESLKGIIGPDYVTGSNLPSHSDIHISCLTGLKIQGPVFFLEDGKSAISLNDALMWAKVNPFSPLGTGIRLNPF

SEQ ID NO: 97252 - protein, 1297 aa, Homo sapiens
  Payload ID: 19403
  Gene Name: WD repeat domain 17
  ENSP ID: ENSP00000422200
MAWMTYISNWFEQDDWYEGLQRANMSQVRQVGLLAAGCQPWNKDVCAASGDRFAYCATLAIYIYQLDHRYNEFKLHAIMSEHKKTITAISWCPHNPDLFASGSTDNLVIIWNVAEQKVIAKLDSTKGIPASLSWCWNAEDVVAFVSHRGPLFIWTISGPDSGVIVHKDAHSFLSDICMFRWHTHQKGKVVFGHIDGSLSIFHPDEEDPVTALEWDPLSTDYLLVVNLHYGIRLVDSESLSCITTFNLPSAAASVQCLAWVPSAPGMFITGDSQVGVLRIWNVSRTTPIDNLKLKKTGFHCLHVLNSPPRKKFSVQSPTKNHYTSSTSEAVPPPTLTQNQAFSLPPGHAVCCFLDGGVGLYDMGAKKWDFLRDLGHVETIFDCKFKPDDPNLLATASFDGTIKVWDINTLTAVYTSPGNEGVIYSLSWAPGGLNCIAGGTSRNGAFIWNVQKGKIIQRFNEHGTNGIFCIAWSHKDSKRIATCSSDGFCIIRTIDGKVLHKYKHPAAVFGCDWSQNNKDMIATGCEDTNVRVYYVATSSDQPLKVFSGHTAKVFHVKWSPLREGILCSGSDDGTVRIWDYTQDACINILNGHTAPVRGLMWNTEIPYLLISGSWDYTIKVWDTREGTCVDTVYDHGADVYGLTCHPSRPFTMASCSRDSTVRLWSLTALVTPVQINILADRSWEEIIGNTDYAIEPGTPPLLCGKVSRDIRQEIEKLTANSQVKKLRWFSECLSPPGGSDNLWNLVAVIKGQDDSLLPQNYCKGIMHLKHLIKFRTSEAQELTTVKMSKFGGGIGVPAKEERLKEAAEIHLRLGQIQRYCELMVELGEWDKALSIAPGVSVKYWKKLMQRRADQLIQEDKDDVIPYCIAIGDVKKLVHFFMSRGQLKEALLVAQAACEGNMQPLHVSVPKGASYSDDIYKEDFNELLHKVSKELAEWYFQDGRAVLAACCHLAIDNIELAMAYLIRGNELELAVCVGTVLGESAAPATHYALELLARKCMMISVCFPCVGYRNLAADLLLMIPDNELHLIKLCAFYPGCTEEINDLHDKCKLPTVEECMQLAETARADDNIFETVKYYLLSQEPEKALPIGISFVKEYISSSDWTLDTIYPVLDLLSYIRTEKLLLHTCTEARNELLILCGYIGALLAIRRQYQSIVPALYEYTSQLLKRREVSVPLKIEYLSEELDAWRACTQSTNRSLEDSPYTPPSDSQRMIYATLLKRLKEESLKGIIGPDYVTGSNLPSHSDIHISCLTGLKIQGPVFFLEDGKSAISLNDALMWAKVNPFSPLGTGIRLNPF

SEQ ID NO: 97253 - protein, 1283 aa, Homo sapiens
  Payload ID: 19403
  Gene Name: WD repeat domain 17
  Uniprot ID: Q8IZU2
  ENSP ID: ENSP00000422763
MSQVRQVGLLAAGCQPWNKDVCAASGDRFAYCATLAIYIYQLDHRYNEFKLHAIMSEHKKTITAISWCPHNPDLFASGSTDNLVIIWNVAEQKVIAKLDSTKGIPASLSWCWNAEDVVAFVSHRGPLFIWTISGPDSGVIVHKDAHSFLSDICMFRWHTHQKGKVVFGHIDGSLSIFHPGNKNQKHVLRPESLEGTDEEDPVTALEWDPLSTDYLLVVNLHYGIRLVDSESLSCITTFNLPSAAASVQCLAWVPSAPGMFITGDSQVGVLRIWNVSRTTPIDNLKLKKTGFHCLHVLNSPPRKKFSVQSPTKNHYTSSTSEAVPPPTLTQNQAFSLPPGHAVCCFLDGGVGLYDMGAKKWDFLRDLGHVETIFDCKFKPDDPNLLATASFDGTIKVWDINTLTAVYTSPGNEGVIYSLSWAPGGLNCIAGGTSRNGAFIWNVQKGKIIQRFNEHGTNGIFCIAWSHKDSKRIATCSSDGFCIIRTIDGKVLHKYKHPAAVFGCDWSQNNKDMIATGCEDTNVRVYYVATSSDQPLKVFSGHTAKVFHVKWSPLREGILCSGSDDGTVRIWDYTQDACINILNGHTAPVRGLMWNTEIPYLLISGSWDYTIKVWDTREGTCVDTVYDHGADVYGLTCHPSRPFTMASCSRDSTVRLWSLTALVTPVQINILADRSWEEIIGNTDYAIEPGTPPLLCGKVSRDIRQEIEKLTANSQVKKLRWFSECLSPPGGSDNLWNLVAVIKGQDDSLLPQNYCKGIMHLKHLIKFRTSEAQELTTVKMSKFGGGIGVPAKEERLKEAAEIHLRLGQIQRYCELMVELGEWDKALSIAPGVSVKYWKKLMQRRADQLIQEDKDDVIPYCIAIGDVKKLVHFFMSRGQLKEALLVAQAACEGNMQPLHVSVPKGASYSDDIYKEDFNELLHKVSKELAEWYFQDGRAVLAACCHLAIDNIELAMAYLIRGNELELAVCVGTVLGESAAPATHYALELLARKCMMISVWNLAADLLLMIPDNELHLIKLCAFYPGCTEEINDLHDKCKLPTVEECMQLAETARADDNIFETVKYYLLSQEPEKALPIGISFVKEYISSSDWTLDTIYPVLDLLSYIRTEKLLLHTCTEARNELLILCGYIGALLAIRRQYQSIVPALYEYTSQLLKRREVSVPLKIEYLSEELDAWRACTQSTNRSLEDSPYTPPSDSQRMIYATLLKRLKEESLKGIIGPDYVTGSNLPSHSDIHISCLTGLKIQGPVFFLEDGKSAISLNDALMWAKVNPFSPLGTGIRLNPF

SEQ ID NO: 97254 - protein, 226 aa, Homo sapiens
  Payload ID: 19403
  Gene Name: WD repeat domain 17
  ENSP ID: ENSP00000426847
  MOD_RES (1)..(1): Any amino acid
XIPASLSWCWNAEDVVAFVSHRGPLFIWTISGPDSGVIVHKDAHSFLSDICMFRWHTHQKGKVVFGHIDGSLSIFHPVSVQSPTKNHYTSSTSEAVPPPTLTQNQAFSLPPGHAVCCFLDGGVGLYDMGAKKWDFLRDLGHVETIFDCKFKPDDPNLLATASFDGTIKVWDINTLTAVYTSPGNEGVIYSLSWAPGGLNCIAGGTSRNGAFIWNVQKGKIIQRFNE

SEQ ID NO: 97255 - protein, 557 aa, Homo sapiens
  Payload ID: 19403
  Gene Name: WD repeat domain 17
  ENSP ID: ENSP00000426985
  MOD_RES (1)..(1): Any amino acid
XWNLVAVIKGQDDSLLPQNYCKGIMHLKHLIKFRTSEAQELTTVKMSKFGGGIGVPAKEERLKEAAEIHLRLGQIQRYCELMVELGEWDKALSIAPGVSVKYWKKLMQRRADQLIQEDKDDVIPYCIAIGDVKKLVHFFMSRGQLKEALLVAQAACEGNMQPLHVSVPKGASYSDDIYKEDFNELLHKVSKELAEWYFQDGRAVLAACCHLAIDNIELAMAYLIRGNELELAVCVGTVLGESAAPATHYALELLARKCMMISVCFPCVGYRNLAADLLLMIPDNELHLIKLCAFYPGCTEEINDLHDKCKLPTVEECMQLAETARADDNIFETVKYYLLSQEPEKALPIGISFVKEYISSSDWTLDTIYPVLDLLSYIRTEKLLLHTCTEARNELLILCGYIGALLAIRRQYQSIVPALYEYTSQLLKRREVSVPLKIEYLSEELDAWRACTQSTNRSLEDSPYTPPSDSQRMIYATLLKRLKEESLKGIIGPDYVTGSNLPSHSDIHISCLTGLKIQGPVFFLEDGKSAISLNDALMWAKVNPFSPLGTGIRLNPF

SEQ ID NO: 97256 - protein, 101 aa, Homo sapiens
  Payload ID: 19403
  Gene Name: WD repeat domain 17
  ENSP ID: ENSP00000427502
MAWMTYISNWFEQDDWYEGLQRANMSQVRQVGLLAAGCQPWNKDVCAASGDRFAYCATLAIYIYQGSLLLLVGAGMQRMWWHLFPTEAHCSFGPSQDQIVE

SEQ ID NO: 97257 - protein, 429 aa, Homo sapiens
  Payload ID: 19404
  Gene Name: WD repeat domain 18
  ENSP ID: ENSP00000251289
  MOD_RES (1)..(1): Any amino acid
XAPMEVAVCTDSAAPMWSCIVWELHSGANLLTYRGGQAGPRGLALLNGEYLLAAQLGKNYISAWELQRKDQLQQKIMCPGPVTCLTASPNGLYVLAGVAESIHLWEVSTGNLLVILSRHYQDVSCLQFTGDSSHFISGGKDCLVLVWSLCSVLQADPSRIPAPRHVWSHHALPITDLHCGFGGPLARVATSSLDQTVKLWEVSSGELLLSVLFDVSIMAVTMDLAEHHMFCGGSEGSIFQVDLFTWPGQRERSFHPEQDAGKVFKGNQVTCLSVSTDGSVLLSGSHDETVRLWDVQSKQCIRTVALKGPVTNAAILLAPVSMLSSDFRPSLPLPHFNKHLLGAEHGDEPRHGGLTLRLGLHQQGSEPSYLDRTEQLQAVLCSTMEKSVLGGQDQLRVRVTELEDEVRNLRKINRDLFDFSTRFITRPAK

SEQ ID NO: 97258 - protein, 409 aa, Homo sapiens
  Payload ID: 19404
  Gene Name: WD repeat domain 18
  ENSP ID: ENSP00000464855
MAAPMEVAVCTDSAAPMWSCIVWELHSGANLLTYRGGQAGPRGLALLNGEYLLAAQLGKNYISAWELQRKDQLQQKIMCPGPVTCLTASPNGLYVLAGVAESIHLWEVSTGNLLVILSRHYQDVSCLQFTGDSSHFISGGKDCLVLVWSLCSVLQADPSRIPAPRHVWSHHALPITDLHCGFGGPLARVATSSLDQTVKLWEVSSGELLLSVLFDVSIMAVTMDLAEHHMFCGGSEGSIFQVDLFTWPGQRERSFHPEQDAGKVFKGHRNQVTCLSVSTDGSVLLSGSHDETVRLWDVQSKQCIRTVALKGPVTNAAILLAPVSMLSSDFRPSLPLPHFNKHLLGAEHGDEPRHGGLTLRLGLHQQSVLGGQDQLRVRVTELEDEVRNLRKINRDLFDFSTRFITRPAK

SEQ ID NO: 97259 - protein, 152 aa, Homo sapiens
  Payload ID: 19404
  Gene Name: WD repeat domain 18
  ENSP ID: ENSP00000465826
MAAPMEVAVCTDSAAPMWSCIVWELHSGANLLTYRGGQAGPRGLALLNGEYLLAAQLGKNYISAWELQRKDQLQQKIMCPGPVTCLTASPNGLYVLAGVAESIHLWEVSTGNLLVILSRHYQDVSCLQFTGDSSHFISGGKDCLVLVWSLCR

SEQ ID NO: 97260 - protein, 268 aa, Homo sapiens
  Payload ID: 19404
  Gene Name: WD repeat domain 18
  ENSP ID: ENSP00000466551
  MOD_RES (1)..(1): Any amino acid
XAPMEVAVCTDSAAPMWSCIVWELHSGANLLTYRGGQAGPRGLALLNGEYLLAAQLGKNYISAWELQRKDQLQQKIMCPGPVTCLTASPNGLYVLAGVAESIHLWEVSTGNLLVILSRHYQDVSCLQFTGDSSHFISGGKDCLVLVWSLCSVLQADPSRIPAPRHVWSHHALPITDLHCGFGGPLARVATSSLDQTVKLWEVSSGELLLSVLFDVSIMAVTMDLAEHHMFCGGSEGSIFQVDLFTWPGQRERSFHPEQDAGKVFKGHR

SEQ ID NO: 97261 - protein, 394 aa, Homo sapiens
  Payload ID: 19404
  Gene Name: WD repeat domain 18
  ENSP ID: ENSP00000475744
  MOD_RES (1)..(1): Any amino acid
XAPMEVAVCTDSAAPMWSCIVWELHSGANLLTYRGGQAGPRGLALLNGEYLLAAQLGKNYISAWELQRKVSTGNLLVILSRHYQDVSCLQFTGDSSHFISGGKDCLVLVWSLCSVLQADPSRIPAPRHVWSHHALPITDLHCGFGGPLARVATSSLDQTVKLWEVSSGELLLSVLFDVSIMAVTMDLAEHHMFCGGSEGSIFQVDLFTWPGQRERSFHPEQDAGKVFKGHRNQVTCLSVSTDGSVLLSGSHDETVRLWDVQSKQCIRTVALKGPVTNAAILLAPVSMLSSDFRPSLPLPHFNKHLLGAEHGDEPRHGGLTLRLGLHQQGSEPSYLDRTEQLQAVLCSTMEKSVLGGQDQLRVRVTELEDEVRNLRKINRDLFDFSTRFITRPAK

SEQ ID NO: 97262 - protein, 48 aa, Homo sapiens
  Payload ID: 19404
  Gene Name: WD repeat domain 18
  ENSP ID: ENSP00000475953
  MOD_RES (1)..(1): Any amino acid
XKGHRNQVTCLSVSTDGSVLLSGSHDETVRLWDVQSKQCIRTVALKAC

SEQ ID NO: 97263 - protein, 432 aa, Homo sapiens
  Payload ID: 19404
  Gene Name: WD repeat domain 18
  Uniprot ID: Q9BV38
  ENSP ID: ENSP00000476117
MAAPMEVAVCTDSAAPMWSCIVWELHSGANLLTYRGGQAGPRGLALLNGEYLLAAQLGKNYISAWELQRKDQLQQKIMCPGPVTCLTASPNGLYVLAGVAESIHLWEVSTGNLLVILSRHYQDVSCLQFTGDSSHFISGGKDCLVLVWSLCSVLQADPSRIPAPRHVWSHHALPITDLHCGFGGPLARVATSSLDQTVKLWEVSSGELLLSVLFDVSIMAVTMDLAEHHMFCGGSEGSIFQVDLFTWPGQRERSFHPEQDAGKVFKGHRNQVTCLSVSTDGSVLLSGSHDETVRLWDVQSKQCIRTVALKGPVTNAAILLAPVSMLSSDFRPSLPLPHFNKHLLGAEHGDEPRHGGLTLRLGLHQQGSEPSYLDRTEQLQAVLCSTMEKSVLGGQDQLRVRVTELEDEVRNLRKINRDLFDFSTRFITRPAK

SEQ ID NO: 97264 - protein, 144 aa, Homo sapiens
  Payload ID: 19404
  Gene Name: WD repeat domain 18
  ENSP ID: ENSP00000484670
VCTDSAAPMWSCIVWELHSGANLLTYRGGQAGPRGLALLNGEYLLAAQLGKNYISAWELQRKDQLQQKIMCPGPVTCLTASPNGLYVLAGVAESIHLWEVSTGNLLVILSRHYQDVSCLQFTGDSSHFISGGKDCLVLVWSLCR

SEQ ID NO: 97265 - protein, 1342 aa, Homo sapiens
  Payload ID: 19405
  Gene Name: WD repeat domain 19
  Uniprot ID: Q8NEZ3
  ENSP ID: ENSP00000382717
MKRIFSLLEKTWLGAPIQFAWQKTSGNYLAVTGADYIVKIFDRHGQKRSEINLPGNCVAMDWDKDGDVLAVIAEKSSCIYLWDANTNKTSQLDNGMRDQMSFLLWSKVGSFLAVGTVKGNLLIYNHQTSRKIPVLGKHTKRITCGCWNAENLLALGGEDKMITVSNQEGDTIRQTQVRSEPSNMQFFLMKMDDRTSAAESMISVVLGKKTLFFLNLNEPDNPADLEFQQDFGNIVCYNWYGDGRIMIGFSCGHFVVISTHTGELGQEIFQARNHKDNLTSIAVSQTLNKVATCGDNCIKIQDLVDLKDMYVILNLDEENKGLGTLSWTDDGQLLALSTQRGSLHVFLTKLPILGDACSTRIAYLTSLLEVTVANPVEGELPITVSVDVEPNFVAVGLYHLAVGMNNRAWFYVLGENAVKKLKDMEYLGTVASICLHSDYAAALFEGKVQLHLIESEILDAQEERETRLFPAVDDKCRILCHALTSDFLIYGTDTGVVQYFYIEDWQFVNDYRHPVSVKKIFPDPNGTRLVFIDEKSDGFVYCPVNDATYEIPDFSPTIKGVLWENWPMDKGVFIAYDDDKVYTYVFHKDTIQGAKVILAGSTKVPFAHKPLLLYNGELTCQTQSGKVNNIYLSTHGFLSNLKDTGPDELRPMLAQNLMLKRFSDAWEMCRILNDEAAWNELARACLHHMEVEFAIRVYRRIGNVGIVMSLEQIKGIEDYNLLAGHLAMFTNDYNLAQDLYLASSCPIAALEMRRDLQHWDSALQLAKHLAPDQIPFISKEYAIQLEFAGDYVNALAHYEKGITGDNKEHDEACLAGVAQMSIRMGDIRRGVNQALKHPSRVLKRDCGAILENMKQFSEAAQLYEKGLYYDKAASVYIRSKNWAKVGDLLPHVSSPKIHLQYAKAKEADGRYKEAVVAYENAKQWQSVIRIYLDHLNNPEKAVNIVRETQSLDGAKMVARFFLQLGDYGSAIQFLVMSKCNNEAFTLAQQHNKMEIYADIIGSEDTTNEDYQSIALYFEGEKRYLQAGKFFLLCGQYSRALKHFLKCPSSEDNVAIEMAIETVGQAKDELLTNQLIDHLLGENDGMPKDAKYLFRLYMALKQYREAAQTAIIIAREEQSAGNYRNAHDVLFSMYAELKSQKIKIPSEMATNLMILHSYILVKIHVKNGDHMKGARMLIRVANNISKFPSHIVPILTSTVIECHRAGLKNSAFSFAAMLMRPEYRSKIDAKYKKKIEGMVRRPDISEIEEATTPCPFCKFLLPECELLCPGCKNSIPYCIATGRHMLKDDWTVCPHCDFPALYSELKIMLNTESTCPMCSERLNAAQLKKISDCTQYLRTEEEL

SEQ ID NO: 97266 - protein, 135 aa, Homo sapiens
  Payload ID: 19405
  Gene Name: WD repeat domain 19
  ENSP ID: ENSP00000421401
  MOD_RES (1)..(1): Any amino acid
XKPLLLYNGELTCQTQSGKVNNIYLSTHGFLSNLKDTGPDELRPMLAQNLMLKRFSDAWEMCRILNDEAAWNELARACLHHMEVEFAIRVYRRIGNVGIVMSLEQIKDTLPCLPTIITWLRTCTLHPAVLLLPWR

SEQ ID NO: 97267 - protein, 42 aa, Homo sapiens
  Payload ID: 19405
  Gene Name: WD repeat domain 19
  ENSP ID: ENSP00000421888
MITVSNQEGDTIRQTQVRSEPSNMQFFLMKMDDRTSAAESMV

SEQ ID NO: 97268 - protein, 481 aa, Homo sapiens
  Payload ID: 19405
  Gene Name: WD repeat domain 19
  ENSP ID: ENSP00000423491
MKRIFSLLEKTWLGAPIQFAWQKTSGNYLAVTGADYIVKIFDRHGQKRSEINLPGNCVAMDWDKDGDVLAVIAEKSSCIYLWDANTNKTSQLDNGMRDQMSFLLWSKVGSFLAVGTVKGNLLIYNHQTSRKIPVLGKHTKRITCGCWNAENLLALGGEDKMITVSNQEGDTIRQTQVRSEPSNMQFFLMKMDDRTSAAESMISVVLGKKTLFFLNLNEPDNPADLEFQQDFGNIVCYNWYGDGRIMIGFSCGHFVVISTHTGELGQEIFQARNHKDNLTSIAVSQTLNKVATCGDNCIKIQDLVDLKDMYVILNLDEENKGLGTLSWTDDGQLLALSTQRGSLHVFLTKLPILGDACSTRIAYLTSLLEVTVANPVEGELPITVSVDVEPNFVAVGLYHLAVGMNNRAWFYVLGENAVKKLKDMEYLGTVASICLHSDYAAALFEGKVQLHLKAKSWMLKKNVRLGFSQQWMISAVSYAMP

SEQ ID NO: 97269 - protein, 99 aa, Homo sapiens
  Payload ID: 19405
  Gene Name: WD repeat domain 19
  ENSP ID: ENSP00000423706
MKRIFSLLEKTWLGAPIQFAWQKTSGNYLAVTGADYIVKIFDRHGQKRSEINLPGNCVAMDWDKDGDVLAVIAEKSSCIYLWDANTNKTSQLDNGMRHK

SEQ ID NO: 97270 - protein, 100 aa, Homo sapiens
  Payload ID: 19405
  Gene Name: WD repeat domain 19
  ENSP ID: ENSP00000424319
MKRIFSLLEKTWLGAPIQFAWQKTSGNYLAVTGADYIVKIFDRHGQKRSEINLPGNCVAMDWDKDGDVLAVIAEKSSCIYLWDANTNKTSQLDNGMRKTY

SEQ ID NO: 97271 - protein, 78 aa, Homo sapiens
  Payload ID: 19405
  Gene Name: WD repeat domain 19
  ENSP ID: ENSP00000425949
MKRIFSLLEKTWLGAPIQFAWQKTSGNYLAVTGNCVAMDWDKDGDVLAVIAEKSSCIYLWDANTNKTSQLDNGMRKTY

SEQ ID NO: 97272 - protein, 142 aa, Homo sapiens
  Payload ID: 19405
  Gene Name: WD repeat domain 19
  ENSP ID: ENSP00000426918
MDWDKDGDVLAVIAEKSSCIYLWDANTNKTSQLDNGMRDQMSFLLWSKVGSFLAVGTVKGNLLIYNHQTSRKIPVLGKHTKRITCGCWNAENLLALGGEDKMITVSNQEGDTIRQTQVRSEPSNMQFFLMKMDDRTSAAESM

SEQ ID NO: 97273 - protein, 86 aa, Homo sapiens
  Payload ID: 19406
  Gene Name: WD repeat domain 20
  Uniprot ID: Q8TBZ3
  ENSP ID: ENSP00000299135
MATEGGGKEMNEIKTQFTTREGLYKLLPHSEYSRPNRVPFNSQGSNPVRVSFVNLNDQSGNGDRLCFNVGRELYFYIYKGVRKTIP

SEQ ID NO: 97274 - protein, 195 aa, Homo sapiens
  Payload ID: 19406
  Gene Name: WD repeat domain 20
  Uniprot ID: Q8TBZ3
  ENSP ID: ENSP00000314209
MATEGGGKEMNEIKTQFTTREGLYKLLPHSEYSRPNRVPFNSQGSNPVRVSFVNLNDQSGNGDRLCFNVGRELYFYIYKGVRKAADLSKPIDKRIYKGTQPTCHDFNHLTATAESVSLLVGFSAGQVQLIDPIKKETSKLFNEENSCQHLWKVDWNEERQNEGSKTSEEALVTVQPAEHFCRQEDRMQGVLQDQN

SEQ ID NO: 97275 - protein, 581 aa, Homo sapiens
  Payload ID: 19406
  Gene Name: WD repeat domain 20
  Uniprot ID: Q8TBZ3
  ENSP ID: ENSP00000335434
MATEGGGKEMNEIKTQFTTREGLYKLLPHSEYSRPNRVPFNSQGSNPVRVSFVNLNDQSGNGDRLCFNVGRELYFYIYKGVRKAADLSKPIDKRIYKGTQPTCHDFNHLTATAESVSLLVGFSAGQVQLIDPIKKETSKLFNEERLIDKSRVTCVKWVPGSESLFLVAHSSGNMYLYNVEHTCGTTAPHYQLLKQGESFAVHTCKSKSTRNPLLKWTVGEGALNEFAFSPDGKFLACVSQDGFLRVFNFDSVELHGTMKSYFGGLLCVCWSPDGKYIVTGGEDDLVTVWSFVDCRVIARGHGHKSWVSVVAFDPYTTSVEEGDPMEFSGSDEDFQDLLHFGRDRANSTQSRLSKRNSTDSRPVSVTYRFGSVGQDTQLCLWDLTEDILFPHQPLSRARTHTNVMNATSPPAGSNGNSVTTPGNSVPPPLPRSNSLPHSAVSNAGSKSSVMDGAIASGVSKFATLSLHDRKERHHEKDHKRNHSMGHISSKSSDKLNLVTKTKTDPAKTLGTPLCPRMEDVPLLEPLICKKIAHERLTVLIFLEDCIVTACQEGFICTWGRPGKVGSLSSPSQASSPGGTVV

SEQ ID NO: 97276 - protein, 569 aa, Homo sapiens
  Payload ID: 19406
  Gene Name: WD repeat domain 20
  Uniprot ID: Q8TBZ3
  ENSP ID: ENSP00000341037
MATEGGGKEMNEIKTQFTTREGLYKLLPHSEYSRPNRVPFNSQGSNPVRVSFVNLNDQSGNGDRLCFNVGRELYFYIYKGVRKAADLSKPIDKRIYKGTQPTCHDFNHLTATAESVSLLVGFSAGQVQLIDPIKKETSKLFNEERLIDKSRVTCVKWVPGSESLFLVAHSSGNMYLYNVEHTCGTTAPHYQLLKQGESFAVHTCKSKSTRNPLLKWTVGEGALNEFAFSPDGKFLACVSQDGFLRVFNFDSVELHGTMKSYFGGLLCVCWSPDGKYIVTGGEDDLVTVWSFVDCRVIARGHGHKSWVSVVAFDPYTTSVEEGDPMEFSGSDEDFQDLLHFGRDRANSTQSRLSKRNSTDSRPVSVTYRFGSVGQDTQLCLWDLTEDILFPHQPLSRARTHTNVMNATSPPAGSNGNSVTTPGNSVPPPLPRSNSLPHSAVSNAGSKSSVMDGAIASGVSKFATLSLHDRKERHHEKDHKRNHSMGHISSKSSDKLNLVTKTKTDPAKTLGTPLCPRMEDVPLLEPLICKKIAHERLTVLIFLEDCIVTACQEGFICTWGRPGKVVSFNP

SEQ ID NO: 97277 - protein, 612 aa, Homo sapiens
  Payload ID: 19406
  Gene Name: WD repeat domain 20
  ENSP ID: ENSP00000395793
MATEGGGKEMNEIKTQFTTREGLYKLLPHSEYSRPNRVPFNSQGSNPVRVSFVNLNDQSGNGDRLCFNVGRELYFYIYKGVRKAADLSKPIDKRIYKGTQPTCHDFNHLTATAESVSLLVGFSAGQVQLIDPIKKETSKLFNEENSCQHLWKVDWNEERQNEGSKTSEEALVTVQRLIDKSRVTCVKWVPGSESLFLVAHSSGNMYLYNVEHTCGTTAPHYQLLKQGESFAVHTCKSKSTRNPLLKWTVGEGALNEFAFSPDGKFLACVSQDGFLRVFNFDSVELHGTMKSYFGGLLCVCWSPDGKYIVTGGEDDLVTVWSFVDCRVIARGHGHKSWVSVVAFDPYTTSVEEGDPMEFSGSDEDFQDLLHFGRDRANSTQSRLSKRNSTDSRPVSVTYRFGSVGQDTQLCLWDLTEDILFPHQPLSRARTHTNVMNATSPPAGSNGNSVTTPGNSVPPPLPRSNSLPHSAVSNAGSKSSVMDGAIASGVSKFATLSLHDRKERHHEKDHKRNHSMGHISSKSSDKLNLVTKTKTDPAKTLGTPLCPRMEDVPLLEPLICKKIAHERLTVLIFLEDCIVTACQEGFICTWGRPGKVGSLSSPSQASSPGGTVV

SEQ ID NO: 97278 - protein, 600 aa, Homo sapiens
  Payload ID: 19406
  Gene Name: WD repeat domain 20
  Uniprot ID: Q8TBZ3
  ENSP ID: ENSP00000406084
MATEGGGKEMNEIKTQFTTREGLYKLLPHSEYSRPNRVPFNSQGSNPVRVSFVNLNDQSGNGDRLCFNVGRELYFYIYKGVRKAADLSKPIDKRIYKGTQPTCHDFNHLTATAESVSLLVGFSAGQVQLIDPIKKETSKLFNEENSCQHLWKVDWNEERQNEGSKTSEEALVTVQRLIDKSRVTCVKWVPGSESLFLVAHSSGNMYLYNVEHTCGTTAPHYQLLKQGESFAVHTCKSKSTRNPLLKWTVGEGALNEFAFSPDGKFLACVSQDGFLRVFNFDSVELHGTMKSYFGGLLCVCWSPDGKYIVTGGEDDLVTVWSFVDCRVIARGHGHKSWVSVVAFDPYTTSVEEGDPMEFSGSDEDFQDLLHFGRDRANSTQSRLSKRNSTDSRPVSVTYRFGSVGQDTQLCLWDLTEDILFPHQPLSRARTHTNVMNATSPPAGSNGNSVTTPGNSVPPPLPRSNSLPHSAVSNAGSKSSVMDGAIASGVSKFATLSLHDRKERHHEKDHKRNHSMGHISSKSSDKLNLVTKTKTDPAKTLGTPLCPRMEDVPLLEPLICKKIAHERLTVLIFLEDCIVTACQEGFICTWGRPGKVVSFNP

SEQ ID NO: 97279 - protein, 520 aa, Homo sapiens
  Payload ID: 19406
  Gene Name: WD repeat domain 20
  Uniprot ID: Q8TBZ3
  ENSP ID: ENSP00000450636
MATEGGGKEMNEIKTQFTTREGLYKLLPHSEYSRPNRVPFNSQGSNPVRVSFVNLNDQSGNGDRLCFNVGRELYFYIYKGVRKRLIDKSRVTCVKWVPGSESLFLVAHSSGNMYLYNVEHTCGTTAPHYQLLKQGESFAVHTCKSKSTRNPLLKWTVGEGALNEFAFSPDGKFLACVSQDGFLRVFNFDSVELHGTMKSYFGGLLCVCWSPDGKYIVTGGEDDLVTVWSFVDCRVIARGHGHKSWVSVVAFDPYTTSVEEGDPMEFSGSDEDFQDLLHFGRDRANSTQSRLSKRNSTDSRPVSVTYRFGSVGQDTQLCLWDLTEDILFPHQPLSRARTHTNVMNATSPPAGSNGNSVTTPGNSVPPPLPRSNSLPHSAVSNAGSKSSVMDGAIASGVSKFATLSLHDRKERHHEKDHKRNHSMGHISSKSSDKLNLVTKTKTDPAKTLGTPLCPRMEDVPLLEPLICKKIAHERLTVLIFLEDCIVTACQEGFICTWGRPGKVGSLSSPSQASSPGGTVV

SEQ ID NO: 97280 - protein, 508 aa, Homo sapiens
  Payload ID: 19406
  Gene Name: WD repeat domain 20
  Uniprot ID: Q8TBZ3
  ENSP ID: ENSP00000451633
MATEGGGKEMNEIKTQFTTREGLYKLLPHSEYSRPNRVPFNSQGSNPVRVSFVNLNDQSGNGDRLCFNVGRELYFYIYKGVRKRLIDKSRVTCVKWVPGSESLFLVAHSSGNMYLYNVEHTCGTTAPHYQLLKQGESFAVHTCKSKSTRNPLLKWTVGEGALNEFAFSPDGKFLACVSQDGFLRVFNFDSVELHGTMKSYFGGLLCVCWSPDGKYIVTGGEDDLVTVWSFVDCRVIARGHGHKSWVSVVAFDPYTTSVEEGDPMEFSGSDEDFQDLLHFGRDRANSTQSRLSKRNSTDSRPVSVTYRFGSVGQDTQLCLWDLTEDILFPHQPLSRARTHTNVMNATSPPAGSNGNSVTTPGNSVPPPLPRSNSLPHSAVSNAGSKSSVMDGAIASGVSKFATLSLHDRKERHHEKDHKRNHSMGHISSKSSDKLNLVTKTKTDPAKTLGTPLCPRMEDVPLLEPLICKKIAHERLTVLIFLEDCIVTACQEGFICTWGRPGKVVSFNP

SEQ ID NO: 97281 - protein, 86 aa, Homo sapiens; identical to SEQ ID NO: 97273
  Payload ID: 19406
  Gene Name: WD repeat domain 20
  Uniprot ID: Q8TBZ3
  ENSP ID: ENSP00000452470

SEQ ID NO: 97282 - protein, 23 aa, Homo sapiens
  Payload ID: 19406
  Gene Name: WD repeat domain 20
  ENSP ID: ENSP00000452539
MATEGGGKEMNEIKTQFTTREGC

SEQ ID NO: 97283 - protein, 72 aa, Homo sapiens
  Payload ID: 19406
  Gene Name: WD repeat domain 20
  ENSP ID: ENSP00000452638
  MOD_RES (1)..(1): Any amino acid
XLSKPIDKRIYKGTQPTCHDFNHLTATAESVSLLVGFSAGQVQLIDPIKKETSKLFNEEAFEGRYATFSPFV

SEQ ID NO: 97284 - protein, 176 aa, Homo sapiens
  Payload ID: 19406
  Gene Name: WD repeat domain 20
  ENSP ID: ENSP00000452774
MATEGGGKEMNEIKTQFTTREGLYKLLPHSEYSRPNRVPFNSQGSNPVRVSFVNLNDQSGNGDRLCFNVGRELYFYIYKGVRKAADLSKPIDKRIYKGTQPTCHDFNHLTATAESVSLLVGFSAGQVQLIDPIKKETSKLFNEERRDFTMLARLVWNSWLQVIHPPQLPKVLELQA

SEQ ID NO: 97285 - protein, 66 aa, Homo sapiens
  Payload ID: 19406
  Gene Name: WD repeat domain 20
  ENSP ID: ENSP00000454151
MYLYNVEHTCGTTAPHYQLLKQGESFAVHTCKSKSTRNPLLKWTVGEGALNEFAFSPDGKFLACVS

SEQ ID NO: 97286 - protein, 920 aa, Homo sapiens
  Payload ID: 19407
  Gene Name: WD repeat domain 24
  Uniprot ID: Q96S15
  ENSP ID: ENSP00000248142
MGKKRTTSGEGRERQRLPARRFRTTSPAALRADSVDGGSLLAPLLGLTDRAFSDCPDLADGAMEKMSRVTTALGGSVLTGRTMHCHLDAPANAISVCRDAAQVVVAGRSIFKIYAIEEEQFVEKLNLRVGRKPSLNLSCADVVWHQMDENLLATAATNGVVVTWNLGRPSRNKQDQLFTEHKRTVNKVCFHPTEAHVLLSGSQDGFMKCFDLRRKDSVSTFSGEATEAGPREWAMAGCVPILPVLSCRILRLHHSFAHGPMQDAESTANDARESWGCPLYPLGLCSGPQAGQSESVRDVQFSIRDYFTFASTFENGNVQLWDIRRPDRCERMFTAHNGPVFCCDWHPEDRGWLATGGRDKMVKVWDMTTHRAKEMHCVQTIASVARVKWRPECRHHLATCSMMVDHNIYVWDVRRPFVPAAMFEEHRDVTTGIAWRHPHDPSFLLSGSKDSSLCQHLFRDASQPVERANPEGLCYGLFGDLAFAAKESLVAAESGRKPYTGDRRHPIFFKRKLDPAEPFAGLASSALSVFETEPGGGGMRWFVDTAERYALAGRPLAELCDHNAKVARELGRNQVAQTWTMLRIIYCSPGLVPTANLNHSVGKGGSCGLPLMNSFNLKDMAPGLGSETRLDRSKGDARSDTVLLDSSATLITNEDNEETEGSDVPADYLLGDVEGEEDELYLLDPEHAHPEDPECVLPQEAFPLRHEIVDTPPGPEHLQDKADSPHVSGSEADVASLAPVDSSFSLLSVSHALYDSRLPPDFFGVLVRDMLHFYAEQGDVQMAVSVLIVLGERVRKDIDEQTQEHWYTSYIDLLQRFRLWNVSNEVVKLSTSRAVSCLNQASTTLHVNCSHCKRPMSSRGWVCDRCHRCASMCAVCHHVVKGLFVWCQGCSHGGHLQHIMKWLEGSSHCPAGCGHLCEYS

SEQ ID NO: 97287 - protein, 790 aa, Homo sapiens
  Payload ID: 19407
  Gene Name: WD repeat domain 24
  Uniprot ID: Q96S15
  ENSP ID: ENSP00000293883
MEKMSRVTTALGGSVLTGRTMHCHLDAPANAISVCRDAAQVVVAGRSIFKIYAIEEEQFVEKLNLRVGRKPSLNLSCADVVWHQMDENLLATAATNGVVVTWNLGRPSRNKQDQLFTEHKRTVNKVCFHPTEAHVLLSGSQDGFMKCFDLRRKDSVSTFSGQSESVRDVQFSIRDYFTFASTFENGNVQLWDIRRPDRCERMFTAHNGPVFCCDWHPEDRGWLATGGRDKMVKVWDMTTHRAKEMHCVQTIASVARVKWRPECRHHLATCSMMVDHNIYVWDVRRPFVPAAMFEEHRDVTTGIAWRHPHDPSFLLSGSKDSSLCQHLFRDASQPVERANPEGLCYGLFGDLAFAAKESLVAAESGRKPYTGDRRHPIFFKRKLDPAEPFAGLASSALSVFETEPGGGGMRWFVDTAERYALAGRPLAELCDHNAKVARELGRNQVAQTWTMLRIIYCSPGLVPTANLNHSVGKGGSCGLPLMNSFNLKDMAPGLGSETRLDRSKGDARSDTVLLDSSATLITNEDNEETEGSDVPADYLLGDVEGEEDELYLLDPEHAHPEDPECVLPQEAFPLRHEIVDTPPGPEHLQDKADSPHVSGSEADVASLAPVDSSFSLLSVSHALYDSRLPPDFFGVLVRDMLHFYAEQGDVQMAVSVLIVLGERVRKDIDEQTQEHWYTSYIDLLQRFRLWNVSNEVVKLSTSRAVSCLNQASTTLHVNCSHCKRPMSSRGWVCDRCHRCASMCAVCHHVVKGLFVWCQGCSHGGHLQHIMKWLEGSSHCPAGCGHLCEYS

SEQ ID NO: 97288 - protein, 544 aa, Homo sapiens
  Payload ID: 19408
  Gene Name: WD repeat domain 25
  Uniprot ID: Q64LD2
  ENSP ID: ENSP00000334148
MTARTLSLMASLVAYDDSDSEAETEHAGSFNATGQQKDTSGVARPPGQDFASGTLDVPKAGAQPTKHGSCEDPGGYRLPLAQLGRSDWGSCPSQRLQWPGKEPQVTFPIKEPSCSSLWTSHVPASHMPLAAARFKQVKLSRNFPKSSFHAQSESETVGKNGSSFQKKKCEDCVVPYTPRRLRQRQALSTETGKGKDVEPQGPPAGRAPAPLYVGPGVSEFIQPYLNSHYKETTVPRKVLFHLRGHRGPVNTIQWCPVLSKSHMLLSTSMDKTFKVWNAVDSGHCLQTYSLHTEAVRAARWAPCGRRILSGGFDFALHLTDLETGTQLFSGRSDFRITTLKFHPKDHNIFLCGGFSSEMKAWDIRTGKVMRSYKATIQQTLDILFLREGSEFLSSTDASTRDSADRTIIAWDFRTSAKISNQIFHERFTCPSLALHPREPVFLAQTNGNYLALFSTVWPYRMSRRRRYEGHKVEGYSVGCECSPGGDLLVTGSADGRVLMYSFRTASRACTLQGHTQACVGTTYHPVLPSVLATCSWGGDMKIWH

SEQ ID NO: 97289 - protein, 544 aa, Homo sapiens; identical to SEQ ID NO: 97288
  Payload ID: 19408
  Gene Name: WD repeat domain 25
  Uniprot ID: Q64LD2
  ENSP ID: ENSP00000385540

SEQ ID NO: 97290 - protein, 287 aa, Homo sapiens
  Payload ID: 19408
  Gene Name: WD repeat domain 25
  Uniprot ID: Q64LD2
  ENSP ID: ENSP00000441903
MPALCLVLCWFQGLLGEVWNAVDSGHCLQTYSLHTEAVRAARWAPCGRRILSGGFDFALHLTDLETGTQLFSGRSDFRITTLKFHPKDHNIFLCGGFSSEMKAWDIRTGKVMRSYKATIQQTLDILFLREGSEFLSSTDASTRDSADRTIIAWDFRTSAKISNQIFHERFTCPSLALHPREPVFLAQTNGNYLALFSTVWPYRMSRRRRYEGHKVEGYSVGCECSPGGDLLVTGSADGRVLMYSFRTASRACTLQGHTQACVGTTYHPVLPSVLATCSWGGDMKIWH

SEQ ID NO: 97291 - protein, 544 aa, Homo sapiens; identical to SEQ ID NO: 97288
  Payload ID: 19408
  Gene Name: WD repeat domain 25
  Uniprot ID: Q64LD2
  ENSP ID: ENSP00000450661

SEQ ID NO: 97292 - protein, 274 aa, Homo sapiens
  Payload ID: 19408
  Gene Name: WD repeat domain 25
  ENSP ID: ENSP00000450727
MTARTLSLMASLVAYDDSDSEAETEHAGSFNATGQQKDTSGVARPPGQDFASGTLDVPKAGAQPTKHGSCEDPGGYRLPLAQLGRSDWGSCPSQRLQWPGKEPQVTFPIKEPSCSSLWTSHVPASHMPLAAARFKQVKLSRNFPKSSFHAQSESETVGKNGSSFQKKKCEDCVVPYTPRRLRQRQALSTETGKGKDVEPQGPPAGRAPAPLYVGPGVSEFIQPYLNSHYKETTVPRKVLFHLRGHRGPVNTIQWCPVLSKSHMLLSTSMDKTFK

SEQ ID NO: 97293 - protein, 289 aa, Homo sapiens
  Payload ID: 19408
  Gene Name: WD repeat domain 25
  ENSP ID: ENSP00000451070
MTARTLSLMASLVAYDDSDSEAETEHAGSFNATGQQKDTSGVARPPGQDFASGTLDVPKAGAQPTKHGSCEDPGGYRLPLAQLGRSDWGSCPSQRLQWPGKEPQVTFPIKEPSCSSLWTSHVPASHMPLAAARFKQVKLSRNFPKSSFHAQSESETVGKNGSSFQKKKCEDCVVPYTPRRLRQRQALSTETGKGKDVEPQGPPAGRAPAPLYVGPGVSEFIQPYLNSHYKETTVPRKVLFHLRGHRGPVNTIQWCPVLSKSHMLLSTSMDKTFKEPSYLVVEVTLESLP

SEQ ID NO: 97294 - protein, 121 aa, Homo sapiens
  Payload ID: 19408
  Gene Name: WD repeat domain 25
  ENSP ID: ENSP00000452235
  MOD_RES (1)..(1): Any amino acid
XSTDASTRDSADRTIIAWDFRTSAKISNQIFHERFTCPSLALHPREPVFLAQTNGNYLALFSTVWPYRMSRRRRYEGHKVLLSLSPRRMLSPSPKPPGSPGHGPWGAWSLCLGGSCFLFPG

SEQ ID NO: 97295 - protein, 125 aa, Homo sapiens
  Payload ID: 19409
  Gene Name: WD repeat domain 26
  ENSP ID: ENSP00000403597
MQESGCRLEHPSATKFRNHVMEGDWDKAENDLNELKPLVHSPHAIVVRGALEISQTLLGIIVRMKFLLLQQKYLEYLEDGKVLEALQVLRCELTPLKYNTERIHVLSGYLMCSHAEDLRAKAEWE

SEQ ID NO: 97296 - protein, 661 aa, Homo sapiens
  Payload ID: 19409
  Gene Name: WD repeat domain 26
  Uniprot ID: Q9H7D7
  ENSP ID: ENSP00000408108
MQANGAGGGGGGGGGGGGGGGGGGGQGQTPELACLSAQNGESSPSSSSSAGDLAHANGLLPSAPSAASNNSNSLNVNNGVPGGAAAASSATVAAASATTAASSSLATPELGSSLKKKKRLSQSDEDVIRLIGQHLNGLGLNQTVDLLMQESGCRLEHPSATKFRNHVMEGDWDKAENDLNELKPLVHSPHAIVVRGALEISQTLLGIIVRMKFLLLQQKYLEYLEDGKVLEALQVLRCELTPLKYNTERIHVLSGYLMCSHAEDLRAKAEWEGKGTASRSKLLDKLQTYLPPSVMLPPRRLQTLLRQAVELQRDRCLYHNTKLDNNLDSVSLLIDHVCSRRQFPCYTQQILTEHCNEVWFCKFSNDGTKLATGSKDTTVIIWQVDPDTHLLKLLKTLEGHAYGVSYIAWSPDDNYLVACGPDDCSELWLWNVQTGELRTKMSQSHEDSLTSVAWNPDGKRFVTGGQRGQFYQCDLDGNLLDSWEGVRVQCLWCLSDGKTVLASDTHQRIRGYNFEDLTDRNIVQEDHPIMSFTISKNGRLALLNVATQGVHLWDLQDRVLVRKYQGVTQGFYTIHSCFGGHNEDFIASGSEDHKVYIWHKRSELPIAELTGHTRTVNCVSWNPQIPSMMASASDDGTVRIWGPAPFIDHQNIEEECSSMDS

SEQ ID NO: 97297 - protein, 208 aa, Homo sapiens
  Payload ID: 19409
  Gene Name: WD repeat domain 26
  ENSP ID: ENSP00000422758
GGGGGGGGGGGGGGGGGQGQTPELACLSAQNGESSPSSSSSAGDLAHANGLLPSAPSAASNNSNSLNVNNGVPGGAAAASSATVAAASATTAASSSLATPELGSSLKKKKRLSQSDEDVIRLIGQHLNGLGLNQTVDLLMQESGCRLEHPSATKFRNHVMEGDWDKAENDLNELKPLVHSPHAIVAQTFSETSINFFPLTAAFCHVRG

SEQ ID NO: 97298 - protein, 295 aa, Homo sapiens
  Payload ID: 19409
  Gene Name: WD repeat domain 26
  ENSP ID: ENSP00000424784
  MOD_RES (1)..(1): Any amino acid
XTKLATGSKDTTVIIWQVDPDTHLLKLLKTLEGHAYGVSYIAWSPDDNYLVACGPDDCSELWLWNVQTGELRTKMSQSHEDSLTSVAWNPDGKRFVTGGQRGQFYQCDLDGNLLDSWEGVRVQCLWCLSDGKTVLASDTHQRIRGYNFEDLTDRNIVQEDHPIMSFTISKNGRLALLNVATQGVHLWDLQDRVLVRKYQGVTQGFYTIHSCFGGHNEDFIASGSEDHKVYIWHKRSELPIAELTGHTRTVNCVSWNPQIPSMMASASDDGTVRIWGPAPFIDHQNIEEECSSMDS

SEQ ID NO: 97299 - protein, 730 aa, Homo sapiens
  Payload ID: 19410
  Gene Name: WD repeat domain 27
  Uniprot ID: A2RRH5
  ENSP ID: ENSP00000397869
MENPQDIFSSNGGCLSDIVIEKYLVESKESVSHVQLACSMQDCAFPLDGTELCIWNTKDPSHQLLILRGHHQPITAMAFGNKVNPLLICSASLDYVIMWNLDECREKVLQAYPLLSLFIDAESRQLVTGCADGQLWIFSLMDGHHYRRVARVDLRKKTETFSTRRVKSGLCSQPEESQLPSTSALGKGEQVEVTFPVLRLAPCDLSLIPNSACGCLSSENTRCVWIGSSVGLFVFNLANLEVEAALYYKDFQSLSILLAGSCALRNRTADQKVLCLLASLFGGKIAVLEINPAALVRAQQCPSMGQSLSVPASSCVLPTSPLYLGIAKEKSTKAASEQRRAARNVMKDQRLVFHSKVRSSGYASAPHVTMFSPKTNIKSEGKGSSRSRSSCAREAYPVECAVPTKPGPQVAAAPTCTRVCCIQYSGDGQWLACGLANHLLLVFDASLTGTPAVFSGHDGAVNAVCWSQDRRWLLSAARDGTLRMWSARGAELALLLGKDMFSKPIQSAQFYYIDAFILLSSGPEFQLLRYHIDTCKDEIKRYKQKSKSKLICRLSTTGAVDMTSLSAVNDFYSHIVLAAGRNRTVEVFDLNAGCSAAVIAEAHSRPVHQICQNKGSSFTTQQPQAYNLFLTTAIGDGMRLWDLRTLRCERHFEGHPTRGYPCGIAFSPCGRFAACGAEDRHAYVYEMGSSTFSHRLAGHTDTVTGVAFNPSAPQLATATLDGKLQLFLAE

SEQ ID NO: 97300 - protein, 195 aa, Homo sapiens
  Payload ID: 19410
  Gene Name: WD repeat domain 27
  ENSP ID: ENSP00000411915
  MOD_RES (1)..(1): Any amino acid
XEVEAALYYKDFQSLSILLAGSCALRNRTADQKVLCLLASLFGGKIAVLEINPAALVRAQQCPSMGQSLSVPASSCVLPTSPLYLGIAKEKSTKAASEQRRAARNVMKDQRLVFHSKVRSSGYASAPHVTMFSPKTNIKSEGKGSSRSRSSCAREAYPVECAVPTKPGPQVAAAPTCTRVCCIQYSGAPRPAGAG

SEQ ID NO: 97301 - protein, 895 aa, Homo sapiens
  Payload ID: 19410
  Gene Name: WD repeat domain 27
  Uniprot ID: A2RRH5
  ENSP ID: ENSP00000416289
MENPQDIFSSNGGCLSDIVIEKYLVESKESVSHVQLACSMQDCAFPLDGTELCIWNTKDPSHQLLILRGHHQPITAMAFGNKVNPLLICSASLDYVIMWNLDECREKVLQGLVPRGTVMGSLLGKVLCLQLSLDDHVVAVCAGNKIFMLDIEQRFSVTYIERPDVNNRHKVPPPTFLHTFSQTQAVRAELQGHLGPVTAVEFCPWRAGTLISASEDRGFKVWDHCTGSLIYSSSVLSAYPLLSLFIDAESRQLVTGCADGQLWIFSLMDGHHYRRVARVDLRKKTETFSTRRVKSGLCSQPEESQLPSTSALGKGEQVEVTFPVLRLAPCDLSLIPNSACGCLSSENTRCVWIGSSVGLFVFNLANLEVEAALYYKDFQSLSILLAGSCALRNRTADQKVLCLLASLFGGKIAVLEINPAALVRAQQCPSMGQSLSVPASSCVLPTSPLYLGIAKEKSTKAASEQRRAARNVMKDQRLVFHSKVRSSGYASAPHVTMFSPKTNIKSEGKGSSRSRSSCAREAYPVECAVPTKPGPQVAAAPTCTRVCCIQYSGDGQWLACGLANHLLLVFDASLTGTPAVFSGHDGAVNAVCWSQDRRWLLSAARDGTLRMWSARGAELALLLGKDMFSKPIQSAQFYYIDAFILLSSGPEFQLLRYHIDTCKDEIKRYKQKSKSKLICRLSTTGAVDMTSLSAVNDFYSHIVLAAGRNRTVEVFDLNAGCSAAVIAEAHSRPVHQICQNKGSSFTTQQPQAYNLFLTTAIGDGMRLWDLRTLRCERHFEGHPTRGYPCGIAFSPCGRFAACGAEDRHAYVYEMGSSTFSHRLAGHTDTVTGVAFNPSAPQMESRSVAHAGVQWHDLGSLQPPPSRFKQFFCLSLPSSWDYSLPQLPWMVNSSSF

SEQ ID NO: 97302 - protein, 88 aa, Homo sapiens
  Payload ID: 19410
  Gene Name: WD repeat domain 27
  ENSP ID: ENSP00000449696
MENPQDIFSSNGGCLSDIVIEKYLVESKESVSHVQLACSMQDCAFPLDGTELCIWNTKDPSHQLLILRGHHQPITAMAFGNKVNPLLI

SEQ ID NO: 97303 - protein, 943 aa, Homo sapiens
  Payload ID: 19411
  Gene Name: WD repeat domain 3
  Uniprot ID: Q9UNX4
  ENSP ID: ENSP00000308179
MGLTKQYLRYVASAVFGVIGSQKGNIVFVTLRGEKGRYVAVPACEHVFIWDLRKGEKILILQGLKQEVTCLCPSPDGLHLAVGYEDGSIRIFSLLSGEGNVTFNGHKAAITTLKYDQLGGRLASGSKDTDIIVWDVINESGLYRLKGHKDAITQALFLREKNLLVTSGKDTMVKWWDLDTQHCFKTMVGHRTEVWGLVLLSEEKRLITGASDSELRVWDIAYLQEIEDPEEPDPKKIKGSSPGIQDTLEAEDGAFETDEAPEDRILSCRKAGSIMREGRDRVVNLAVDKTGRILACHGTDSVLELFCILSKKEIQKKMDKKMKKARKKAKLHSSKGEEEDPEVNVEMSLQDEIQRVTNIKTSAKIKSFDLIHSPHGELKAVFLLQNNLVELYSLNPSLPTPQPVRTSRITIGGHRSDVRTLSFSSDNIAVLSAAADSIKIWNRSTLQCIRTMTCEYALCSFFVPGDRQVVIGTKTGKLQLYDLASGNLLETIDAHDGALWSMSLSPDQRGFVTGGADKSVKFWDFELVKDENSTQKRLSVKQTRTLQLDEDVLCVSYSPNQKLLAVSLLDCTVKIFYVDTLKFFLSLYGHKLPVICMDISHDGALIATGSADRNVKIWGLDFGDCHKSLFAHDDSVMYLQFVPKSHLFFTAGKDHKIKQWDADKFEHIQTLEGHHQEIWCLAVSPSGDYVVSSSHDKSLRLWERTREPLILEEEREMEREAEYEESVAKEDQPAVPGETQGDSYFTGKKTIETVKAAERIMEAIELYREETAKMKEHKAICKAAGKEVPLPSNPILMAYGSISPSAYVLEIFKGIKSSELEESLLVLPFSYVPDILKLFNEFIQLGSDVELICRCLFFLLRIHFGQITSNQMLVPVIEKLRETTISKVSQVRDVIGFNMAGLDYLKRECEAKSEVMFFADATSHLEEKKRKRKKREKLILTLT

SEQ ID NO: 97304 - protein, 40 aa, Homo sapiens
  Payload ID: 19411
  Gene Name: WD repeat domain 3
  ENSP ID: ENSP00000358449
MGLTKQYLRYVASAVFGVIGSQKGLASQASSSFVFFATEF

SEQ ID NO: 97305 - protein, 366 aa, Homo sapiens
  Payload ID: 19412
  Gene Name: WD repeat domain 31
  Uniprot ID: Q8NA23
  ENSP ID: ENSP00000345027
MLLLRCQLKQAPPQKVSFRFCVVMGKQQSKLKHSTYKYGPDEIIEERIQTKAFQEYSPAHMDTVSVVAALNSDLCVSGGKDKTVVAYNWKTGNVVKRFKGHEHEITKVACIPKSSQFFSASRDRMVMMWDLHGSSQPRQQLCGHAMVVTGLAVSPDSSQLCTGSRDNTLLLWDVVTGQSVERASVSRNVVTHLCWVPREPYILQTSEDKTLRLWDSRGLQVAHMFPAKQHIQTYCEVSVDGHKCISCSNGFGGEGCEATLWDLRQTRNRICEYKGHFQTVASCVFLPRALALMPLIATSSHDCKVKIWNQDTGACLFTLSLDGSGPLTSLAVGDAISLLCASFNRGIHLLRMDHSQGLELQEVAAF

SEQ ID NO: 97306 - protein, 367 aa, Homo sapiens
  Payload ID: 19412
  Gene Name: WD repeat domain 31
  Uniprot ID: Q8NA23
  ENSP ID: ENSP00000363308
MLLLRCQLKQAPPQKVSFRFCVVMGKQQSKLKHSTYKYGRPDEIIEERIQTKAFQEYSPAHMDTVSVVAALNSDLCVSGGKDKTVVAYNWKTGNVVKRFKGHEHEITKVACIPKSSQFFSASRDRMVMMWDLHGSSQPRQQLCGHAMVVTGLAVSPDSSQLCTGSRDNTLLLWDVVTGQSVERASVSRNVVTHLCWVPREPYILQTSEDKTLRLWDSRGLQVAHMFPAKQHIQTYCEVSVDGHKCISCSNGFGGEGCEATLWDLRQTRNRICEYKGHFQTVASCVFLPRALALMPLIATSSHDCKVKIWNQDTGACLFTLSLDGSGPLTSLAVGDAISLLCASFNRGIHLLRMDHSQGLELQEVAAF

SEQ ID NO: 97307 - protein, 366 aa, Homo sapiens; identical to SEQ ID NO: 97305
  Payload ID: 19412
  Gene Name: WD repeat domain 31
  Uniprot ID: Q8NA23
  ENSP ID: ENSP00000363310

SEQ ID NO: 97308 - protein, 141 aa, Homo sapiens
  Payload ID: 19412
  Gene Name: WD repeat domain 31
  ENSP ID: ENSP00000419246
MLLLRCQLKQAPPQKTVVAYNWKTGNVVKRFKGHEHEITKVACIPKSSQFFSASRDRMVMMWDLHGSSQPRQQLCGHAMVVTGLAVSPDSSQLCTGSRDNTLLLWDVVTGQSVERASVSRNVVTHLCWVPREPYILQTSED

SEQ ID NO: 97309 - protein, 51 aa, Homo sapiens
  Payload ID: 19412
  Gene Name: WD repeat domain 31
  ENSP ID: ENSP00000420074
MLLLRCQLKQAPPQKVSFRFCVVMGKQQSKLKHSTYKYGQLWPIIGKLEMW

SEQ ID NO: 97310 - protein, 1336 aa, Homo sapiens
  Payload ID: 19413
  Gene Name: WD repeat domain 33
  Uniprot ID: Q9C0J8
  ENSP ID: ENSP00000325377
MATEIGSPPRFFHMPRFQHQAPRQLFYKRPDFAQQQAMQQLTFDGKRMRKAVNRKTIDYNPSVIKYLENRIWQRDQRDMRAIQPDAGYYNDLVPPIGMLNNPMNAVTTKFVRTSTNKVKCPVFVVRWTPEGRRLVTGASSGEFTLWNGLTFNFETILQAHDSPVRAMTWSHNDMWMLTADHGGYVKYWQSNMNNVKMFQAHKEAIREASFSPTDNKFATCSDDGTVRIWDFLRCHEERILRGHGADVKCVDWHPTKGLVVSGSKDSQQPIKFWDPKTGQSLATLHAHKNTVMEVKLNLNGNWLLTASRDHLCKLFDIRNLKEELQVFRGHKKEATAVAWHPVHEGLFASGGSDGSLLFWHVGVEKEVGGMEMAHEGMIWSLAWHPLGHILCSGSNDHTSKFWTRNRPGDKMRDRYNLNLLPGMSEDGVEYDDLEPNSLAVIPGMGIPEQLKLAMEQEQMGKDESNEIEMTIPGLDWGMEEVMQKDQKKVPQKKVPYAKPIPAQFQQAWMQNKVPIPAPNEVLNDRKEDIKLEEKKKTQAEIEQEMATLQYTNPQLLEQLKIERLAQKQVEQIQPPPSSGTPLLGPQPFPGQGPMSQIPQGFQQPHPSQQMPMNMAQMGPPGPQGQFRPPGPQGQMGPQGPPLHQGGGGPQGFMGPQGPQGPPQGLPRPQDMHGPQGMQRHPGPHGPLGPQGPPGPQGSSGPQGHMGPQGPPGPQGHIGPQGPPGPQGHLGPQGPPGTQGMQGPPGPRGMQGPPHPHGIQGGPGSQGIQGPVSQGPLMGLNPRGMQGPPGPRENQGPAPQGMIMGHPPQEMRGPHPPGGLLGHGPQEMRGPQEIRGMQGPPPQGSMLGPPQELRGPPGSQSQQGPPQGSLGPPPQGGMQGPPGPQGQQNPARGPHPSQGPIPFQQQKTPLLGDGPRAPFNQEGQSTGPPPLIPGLGQQGAQGRIPPLNPGQGPGPNKGDSRGPPNHHMGPMSERRHEQSGGPEHGPERGPFRGGQDCRGPPDRRGPHPDFPDDFSRPDDFHPDKRFGHRLREFEGRGGPLPQEEKWRRGGPGPPFPPDHREFSEGDGRGAARGPPGAWEGRRPGDERFPRDPEDPRFRGRREESFRRGAPPRHEGRAPPRGRDGFPGPEDFGPEENFDASEEAARGRDLRGRGRGTPRGGRKGLLPTPDEFPRFEGGRKPDSWDGNREPGPGHEHFRDTPRPDHPPHDGHSPASRERSSSLQGMDMASLPPRKRPWHDGPGTSEHREMEAPGGPSEDRGGKGRGGPGPAQRVPKSGRSSSLDGEHHDGYHRDEPFGGPPGSGTPSRGGRSGSNWGRGSNMNSGPPRRGASRGGGRGR

SEQ ID NO: 97311 - protein, 257 aa, Homo sapiens
  Payload ID: 19413
  Gene Name: WD repeat domain 33
  Uniprot ID: Q9C0J8
  ENSP ID: ENSP00000376730
MATEIGSPPRFFHMPRFQHQAPRQLFYKRPDFAQQQAMQQLTFDGKRMRKAVNRKTIDYNPSVIKYLENRIWQRDQRDMRAIQPDAGYYNDLVPPIGMLNNPMNAVTTKFVRTSTNKVKCPVFVVRWTPEGRRLVTGASSGEFTLWNGLTFNFETILQAHDSPVRAMTWSHNDMWMLTADHGGYVKYWQSNMNNVKMFQAHKEAIREASFSPTDNKFATCSDDGTVRIWDFLRCHEERILRDTCFHHCRCYFLSVKR

SEQ ID NO: 97312 - protein, 118 aa, Homo sapiens
  Payload ID: 19413
  Gene Name: WD repeat domain 33
  ENSP ID: ENSP00000386861
MATEIGSPPRFFHMPRFQHQAPRQLFYKRPDFAQQQAMQQLTFDGKRMRKAVNRKTIDYNPSVIKYLENRIWQRDQRDMRAIQPDAGYYNDLVPPIGMLNNPMNAVTTKFVRTSTNKV

SEQ ID NO: 97313 - protein, 326 aa, Homo sapiens
  Payload ID: 19413
  Gene Name: WD repeat domain 33
  Uniprot ID: Q9C0J8
  ENSP ID: ENSP00000387186
MATEIGSPPRFFHMPRFQHQAPRQLFYKRPDFAQQQAMQQLTFDGKRMRKAVNRKTIDYNPSVIKYLENRIWQRDQRDMRAIQPDAGYYNDLVPPIGMLNNPMNAVTTKFVRTSTNKVKCPVFVVRWTPEGRRLVTGASSGEFTLWNGLTFNFETILQAHDSPVRAMTWSHNDMWMLTADHGGYVKYWQSNMNNVKMFQAHKEAIREARFIHNIPFSVVPIVMVKLFSKCILGAEMHGLCQFLGNFLHPINTIFFFVFTHSPFCWHLSEVVLSRYQPLQYVRDVLSAAFCTGFLFSFMINNVYTLFLFIIYCVRQEYFIPNKEFSL

SEQ ID NO: 97314 - protein, 205 aa, Homo sapiens
  Payload ID: 19413
  Gene Name: WD repeat domain 33
  ENSP ID: ENSP00000397547
MRAIQPDAGYYNDLVPPIGMLNNPMNAVTTKFVRTSTNKVKCPVFVVRWTPEGRRLVTGASSGEFTLWNGLTFNFETILQAHDSPVRAMTWSHNDMWMLTADHGGYVKYWQSNMNNVKMFQAHKEAIREASFSPTDNKFATCSDDGTVRIWDFLRCHEERILRGHGADVKCVDWHPTKGLVVSGSKDSQQPIKFWDPKTGQSLAT

SEQ ID NO: 97315 - protein, 536 aa, Homo sapiens
  Payload ID: 19414
  Gene Name: WD repeat domain 34
  Uniprot ID: Q96EX3
  ENSP ID: ENSP00000361800
MATRAQPGPLSQAGSAGVAALATVGVASGPGPGRPGPLQDETLGVASVPSQWRAVQGIRWETKSCQTASIATASASAQARNHVDAQVQTEAPVPVSVQPPSQYDIPRLAAFLRRVEAMVIRELNKNWQSHAFDGFEVNWTEQQQMVSCLYTLGYPPAQAQGLHVTSISWNSTGSVVACAYGRLDHGDWSTLKSFVCAWNLDRRDLRPQQPSAVVEVPSAVLCLAFHPTQPSHVAGGLYSGEVLVWDLSRLEDPLLWRTGLTDDTHTDPVSQVVWLPEPGHSHRFQVLSVATDGKVLLWQGIGVGQLQLTEGFALVMQQLPRSTKLKKHPRGETEVGATAVAFSSFDPRLFILGTEGGFPLKCSLAAGEAALTRMPSSVPLRAPAQFTFSPHGGPIYSVSCSPFHRNLFLSAGTDGHVHLYSMLQAPPLTSLQLSLKYLFAVRWSPVRPLVFAAASGKGDVQLFDLQKSSQKPTVLIKQTQDESPVYCLEFNSQQTQLLAAGDAQGTVKVWQLSTEFTEQGPREAEDLDCLAAEVAA

SEQ ID NO: 97316 - protein, 272 aa, Homo sapiens
  Payload ID: 19414
  Gene Name: WD repeat domain 34
  ENSP ID: ENSP00000411370
LSQAGSAGVAALATVGVASGPGPGRPGPLQDETLGVASVPSQWRAVQGIRWETKSCQTASIATASASAQARNHVDAQVQTEAPVPVSVQPPSQYDIPRLAAFLRRVEAMVIRELNKNWQSHAFDGFEVNWTEQQQMVSCLYTLGYPPAQAQGLHVTSISWNSTGSVVACAYGRLDHGDWSTLKSFVCAWNLDRRDLRPQQPSAVVEVPSAVLCLAFHPTQPSHVAGELPAVSASSPLRTQLPALQRAQGSFPWALWPGDRKAGPDPLSLEPR

SEQ ID NO: 97317 - protein, 139 aa, Homo sapiens
  Payload ID: 19414
  Gene Name: WD repeat domain 34
  ENSP ID: ENSP00000415421
AGVAALATVGVASGPGPGRPGPLQDETLGVASVPSQWRAVQGIRWETKSCQTASIATASASAQARNHVDAQVQTEAPVPVSVQPPSQYDIPRLAAFLRRVEAMVIRELNKNWQSHAFDGFEVNWTEQQQMAGPWGLEHA

SEQ ID NO: 97318 - protein, 1170 aa, Homo sapiens
  Payload ID: 19415
  Gene Name: WD repeat domain 35
  Uniprot ID: Q9P2L0
  ENSP ID: ENSP00000281405
MFFYLSKKISIPNNVKLQCVSWNKEQGFIACGGEDGLLKVLKLETQTDDAKLRGLAAPSNLSMNQTLEGHSGSVQVVTWNEQYQKLTTSDENGLIIVWMLYKGSWIEEMINNRNKSVVRSMSWNADGQKICIVYEDGAVIVGSVDGNRIWGKDLKGIQLSHVTWSADSKVLLFGMANGEIHIYDNQGNFMIKMKLSCLVNVTGAISIAGIHWYHGTEGYVEPDCPCLAVCFDNGRCQIMRHENDQNPVLIDTGMYVVGIQWNHMGSVLAVAGFQKAAMQDKDVNIVQFYTPFGEHLGTLKVPGKEISALSWEGGGLKIALAVDSFIYFANIRPNYKWGYCSNTVVYAYTRPDRPEYCVVFWDTKNNEKYVKYVKGLISITTCGDFCILATKADENHPQFVLVLCNSIGTPLDPKYIDIVPLFVAMTKTHVIAASKEAFYTWQYRVAKKLTALEINQITRSRKEGRERIYHVDDTPSGSMDGVLDYSKTIQGTRDPICAITASDKILIVGRESGTIQRYSLPNVGLIQKYSLNCRAYQLSLNCNSSRLAIIDISGVLTFFDLDARVTDSTGQQVVGELLKLERRDVWDMKWAKDNPDLFAMMEKTRMYVFRNLDPEEPIQTSGYICNFEDLEIKSVLLDEILKDPEHPNKDYLINFEIRSLRDSRALIEKVGIKDASQFIEDNPHPRLWRLLAEAALQKLDLYTAEQAFVRCKDYQGIKFVKRLGKLLSESMKQAEVVGYFGRFEEAERTYLEMDRRDLAIGLRLKLGDWFRVLQLLKTGSGDADDSLLEQANNAIGDYFADRQKWLNAVQYYVQGRNQERLAECYYMLEDYEGLENLAISLPENHKLLPEIAQMFVRVGMCEQAVTAFLKCSQPKAAVDTCVHLNQWNKAVELAKNHSMKEIGSLLARYASHLLEKNKTLDAIELYRKANYFFDAAKLMFKIADEEAKKGSKPLRVKKLYVLSALLIEQYHEQMKNAQRGKVKGKSSEATSALAGLLEEEVLSTTDRFTDNAWRGAEAYHFFILAQRQLYEGCVDTALKTALHLKDYEDIIPPVEIYSLLALCACASRAFGTCSKAFIKLKSLETLSSEQKQQYEDLALEIFTKHTSKDNRKPELDSLMEGGEGKLPTCVATGSPITEYQFWMCSVCKHGVLAQEISHYSFCPLCHSPVG

SEQ ID NO: 97319 - protein, 1181 aa, Homo sapiens
  Payload ID: 19415
  Gene Name: WD repeat domain 35
  Uniprot ID: Q9P2L0
  ENSP ID: ENSP00000314444
MFFYLSKKISIPNNVKLQCVSWNKEQGFIACGGEDGLLKVLKLETQTDDAKLRGLAAPSNLSMNQTLEGHSGSVQVVTWNEQYQKLTTSDENGLIIVWMLYKGSWIEEMINNRNKSVVRSMSWNADGQKICIVYEDGAVIVGSVDGNRIWGKDLKGIQLSHVTWSADSKVLLFGMANGEIHIYDNQGNFMIKMKLSCLVNVTGAISIAGIHWYHGTEGYVEPDCPCLAVCFDNGRCQIMRHENDQNPVLIDTGMYVVGIQWNHMGSVLAVAGFQKAAMQDKDVNIVQFYTPFGEHLGTLKVPGKEISALSWEGGGLKIALAVDSFIYFANIRPNYKWGYCSNTVVYAYTRPDRPEYCVVFWDTKNNEKYVKYVKGLISITTCGDFCILATKADENHPQEENEMETFGATFVLVLCNSIGTPLDPKYIDIVPLFVAMTKTHVIAASKEAFYTWQYRVAKKLTALEINQITRSRKEGRERIYHVDDTPSGSMDGVLDYSKTIQGTRDPICAITASDKILIVGRESGTIQRYSLPNVGLIQKYSLNCRAYQLSLNCNSSRLAIIDISGVLTFFDLDARVTDSTGQQVVGELLKLERRDVWDMKWAKDNPDLFAMMEKTRMYVFRNLDPEEPIQTSGYICNFEDLEIKSVLLDEILKDPEHPNKDYLINFEIRSLRDSRALIEKVGIKDASQFIEDNPHPRLWRLLAEAALQKLDLYTAEQAFVRCKDYQGIKFVKRLGKLLSESMKQAEVVGYFGRFEEAERTYLEMDRRDLAIGLRLKLGDWFRVLQLLKTGSGDADDSLLEQANNAIGDYFADRQKWLNAVQYYVQGRNQERLAECYYMLEDYEGLENLAISLPENHKLLPEIAQMFVRVGMCEQAVTAFLKCSQPKAAVDTCVHLNQWNKAVELAKNHSMKEIGSLLARYASHLLEKNKTLDAIELYRKANYFFDAAKLMFKIADEEAKKGSKPLRVKKLYVLSALLIEQYHEQMKNAQRGKVKGKSSEATSALAGLLEEEVLSTTDRFTDNAWRGAEAYHFFILAQRQLYEGCVDTALKTALHLKDYEDIIPPVEIYSLLALCACASRAFGTCSKAFIKLKSLETLSSEQKQQYEDLALEIFTKHTSKDNRKPELDSLMEGGEGKLPTCVATGSPITEYQFWMCSVCKHGVLAQEISHYSFCPLCHSPVG

SEQ ID NO: 97320 - protein, 250 aa, Homo sapiens
  Payload ID: 19415
  Gene Name: WD repeat domain 35
  ENSP ID: ENSP00000390105
  MOD_RES (1)..(1): Any amino acid
XGIQLSHVTWSADSKVLLFGMANGEIHIYDNQGNFMIKMKLSCLVNVTGAISIAGIHWYHGTEGYVEPDCPCLAVCFDNGRCQIMRHENDQNPVLIDTGMYVVGIQWNHMGSVLAVAGFQKAAMQDKDVNIVQFYTPFGEHLGTLKVPGKEISALSWEGGGLKIALAVDSFIYFANIRPNYKWGYCSNTVVYAYTRPDRPEYCVVFWDTKNNEKYVKYVKGLISITTCGDFCILATKADENHPQYHCLLQ

SEQ ID NO: 97321 - protein, 873 aa, Homo sapiens
  Payload ID: 19415
  Gene Name: WD repeat domain 35
  ENSP ID: ENSP00000390802
MFFYLSKKISIPNNVKLQCVSWNKEQGFIACGGEDGLLKVLKLETQTDDAKLRGLAAPSNLSMNQTLEGHSGSVQVVTWNEQYQKLTTSDENGLIIVWMLYKGSWIEEMINNRNKSVVRSMSWNADGQKICIVYEDGAVIVGSVDGNRIWGKDLKGIQLSHVTWSADSKVLLFGMANGEIHIYDNQGNFMIKMKLSCLVNVTGAISIAGIHWYHGTEGYVEPDCPCLAVCFDNGRCQIMRHENDQNPVLIDTGMYVVGIQWNHMGSVLAVAGFQKAAMQDKDVNIVQFYTPFGEHLGTLKVPGKEISALSWEGGGLKIALAVDSFIYFANIRPNYKWGYCSNTVVYAYTRPDRPEYCVVFWDTKNNEKYVKYVKGLISITTCGDFCILATKADENHPQEENEMETFGATFVLVLCNSIGTPLDPKYIDIVPLFVAMTKTHVIAASKEAFYTWQYRVAKKLTALEINQITRSRKEGRERIYHVDDTPSGSMDGVLDYSKTIQGTRDPICAITASDKILIVGRESGTIQRYSLPNVGLIQKYSLNCRAYQLSLNCNSSRLAIIDISGVLTFFDLDARVTDSTGQQVVGELLKLERRDVWDMKWAKDNPDLFAMMEKTRMYVFRNLDPEEPIQTSGYICNFEDLEIKSVLLDEILKDPEHPNKDYLINFEIRSLRDSRALIEKVGIKDASQFIEDNPHPRLWRLLAEAALQKLDLYTAEQAFVRCKDYQGIKFVKRLGKLLSESMKQAEVVGYFGRFEEAERTYLEMDRRDLAIGLRLKLGDWFRVLQLLKTGSGDADDSLLEQANNAIGDYFADRQKWLNAVQYYVQGRNQERLAECYYMLEDYEGLENLAISLPENHKLLPVGNSTNVCQSWNV

SEQ ID NO: 97322 - protein, 406 aa, Homo sapiens
  Payload ID: 19415
  Gene Name: WD repeat domain 35
  ENSP ID: ENSP00000404409
NQITRSRKEGRERIYHVDDTPSGSMDGVLDYSKTIQGTRDPICAITASDKILIVGRESGTIQRYSLPNVGLIQKYSLNCRAYQLSLNCNSSRLAIIDISGVLTFFDLDARVTDSTGQQVVGELLKLERRDVWDMKWAKDNPDLFAMMEKTRMYVFRNLDPEEPIQTSGYICNFEDLEIKSVLLDEILKDPEHPNKDYLINFEIRSLRDSRALIEKVGIKDASQFIEDNPHPRLWRLLAEAALQKLDLYTAEQAFVRCKDYQGIKFVKRLGKLLSESMKQAEVVGYFGRFEEAERTYLEMDRRDLAIGLRLKLGDWFRVLQLLKTGSGDADDSLLEQANNAIGDYFADRQKWLNAVQYYVQGRNQERLAECYYMLEDYEGLENLAISLPENHKLLPVGIANFSFWNC

SEQ ID NO: 97323 - protein, 951 aa, Homo sapiens
  Payload ID: 19416
  Gene Name: WD repeat domain 36
  Uniprot ID: Q8NI36
  ENSP ID: ENSP00000423067
MCCTEGSLRKRDSQRAPEAVLCLQLWQRTVPLDTLKGLGTCFPSGPELRGAGIAAAMERASERRTASALFAGFRALGLFSNDIPHVVRFSALKRRFYVTTCVGKSFHTYDVQKLSLVAVSNSVPQDICCMAADGRLVFAAYGNVFSAFARNKEIVHTFKGHKAEIHFLQPFGDHIISVDTDGILIIWHIYSEEEYLQLTFDKSVFKISAILHPSTYLNKILLGSEQGSLQLWNVKSNKLLYTFPGWKVGVTALQQAPAVDVVAIGLMSGQVIIHNIKFNETLMKFRQDWGPITSISFRTDGHPVMAAGSPCGHIGLWDLEDKKLINQMRNAHSTAIAGLTFLHREPLLVTNGADNALRIWIFDGPTGEGRLLRFRMGHSAPLTNIRYYGQNGQQILSASQDGTLQSFSTVHEKFNKSLGHGLINKKRVKRKGLQNTMSVRLPPITKFAAEEARESDWDGIIACHQGKLSCSTWNYQKSTIGAYFLKPKELKKDDITATAVDITSCGNFAVIGLSSGTVDVYNMQSGIHRGSFGKDQAHKGSVRGVAVDGLNQLTVTTGSEGLLKFWNFKNKILIHSVSLSSSPNIMLLHRDSGILGLALDDFSISVLDIETRKIVREFSGHQGQINDMAFSPDGRWLISAAMDCSIRTWDLPSGCLIDCFLLDSAPLNVSMSPTGDFLATSHVDHLGIYLWSNISLYSVVSLRPLPADYVPSIVMLPGTCQTQDVEVSEETVEPSDELIEYDSPEQLNEQLVTLSLLPESRWKNLLNLDVIKKKNKPKEPPKVPKSAPFFIPTIPGLVPRYAAPEQNNDPQQSKVVNLGVLAQKSDFCLKLEEGLVNNKYDTALNLLKESGPSGIETELRSLSPDCGGSIEVMQSFLKMIGMMLDRKRDFELAQAYLALFLKLHLKMLPSEPVLLEEITNLSSQVEENWTHLQSLFNQSMCILNYLKSALL

SEQ ID NO: 97324 - protein, 895 aa, Homo sapiens
  Payload ID: 19416
  Gene Name: WD repeat domain 36
  ENSP ID: ENSP00000424628
MERASERRTASALFAGFRALGLFSNDIPHVVRFSALKRRFYVTTCVGKSFHTYDVQKLSLVAVSNSVPQDICCMAADGRLVFAAYGNVFSAFARNKEIVHTFKGHKAEIHFLQPFGDHIISVDTDGILIIWHIYSEEEYLQLTFDKSVFKISAILHPSTYLNKILLGSEQGSLQLWNVKSNKLLYTFPGWKVGVTALQQAPAVDVVAIGLMSGQVIIHNIKFNETLMKFRQDWGPITSISFRTDGHPVMAAGSPCGHIGLWDLEDKKLINQMRNAHSTAIAGLTFLHREPLLVTNGADNALRIWIFDGPTGEGRLLRFRMGHSAPLTNIRYYGQNGQQILSASQDGTLQSFSTVHEKFNKSLGHGLINKKRVKRKGLQNTMSVRLPPITKFAAEEARESDWDGIIACHQGKLSCSTWNYQKSTIGAYFLKPKELKKDDITATAVDITSCGNFAVIGLSSGTVDVYNMQSGIHRGSFGKDQAHKGSVRGVAVDGLNQLTVTTGSEGLLKFWNFKNKILIHSVSLSSSPNIMLLHRDSGILGLALDDFSISVLDIETRKIVREFSGHQGQINDMAFSPDGRWLISAAMDCSIRTWDLPSGCLIDCFLLDSAPLNVSMSPTGDFLATSHVDHLGIYLWSNISLYSVVSLRPLPADYVPSIVMLPGTCQTQDVEVSEETVEPSDELIEYDSPEQLNEQLVTLSLLPESRWKNLLNLDVIKKKNKPKEPPKVPKSAPFFIPTIPGLVPRYAAPEQNNDPQQSKVVNLGVLAQKSDFCLKLEEGLVNNKYDTALNLLKESGPSGIETELRSLSPDCGGSIEVMQSFLKMIGMMLDRKRDFELAQAYLALFLKLHLKMLPSEPVLLEEITNLSSQVEENWTHLQSLFNQSMCILNYLKSALL

SEQ ID NO: 97325 - protein, 951 aa, Homo sapiens; identical to SEQ ID NO: 97323
  Payload ID: 19416
  Gene Name: WD repeat domain 36
  Uniprot ID: Q8NI36
  ENSP ID: ENSP00000479950

SEQ ID NO: 97326 - protein, 494 aa, Homo sapiens
  Payload ID: 19417
  Gene Name: WD repeat domain 37
  Uniprot ID: Q9Y2I8
  ENSP ID: ENSP00000263150
MPTESASCSTARQTKQKRKSHSLSIRRTNSSEQERTGLPRDMLEGQDSKLPSSVRSTLLELFGQIEREFENLYIENLELRREIDTLNERLAAEGQAIDGAELSKGQLKTKASHSTSQLSQKLKTTYKASTSKIVSSFKTTTSRAACQLVKEYIGHRDGIWDVSVAKTQPVVLGTASADHTALLWSIETGKCLVKYAGHVGSVNSIKFHPSEQLALTASGDQTAHIWRYAVQLPTPQPVADTSISGEDEVECSDKDEPDLDGDVSSDCPTIRVPLTSLKSHQGVVIASDWLVGGKQAVTASWDRTANLYDVETSELVHSLTGHDQELTHCCTHPTQRLVVTSSRDTTFRLWDFRDPSIHSVNVFQGHTDTVTSAVFTVGDNVVSGSDDRTVKVWDLKNMRSPIATIRTDSAINRINVCVGQKIIALPHDNRQVRLFDMSGVRLARLPRSSRQGHRRMVCCSAWSEDHPVCNLFTCGFDRQAIGWNINIPALLQEK

SEQ ID NO: 97327 - protein, 494 aa, Homo sapiens; identical to SEQ ID NO: 97326
  Payload ID: 19417
  Gene Name: WD repeat domain 37
  Uniprot ID: Q9Y2I8
  ENSP ID: ENSP00000350954

SEQ ID NO: 97328 - protein, 249 aa, Homo sapiens
  Payload ID: 19417
  Gene Name: WD repeat domain 37
  ENSP ID: ENSP00000370730
MPTESASCSTARQTKQKRKSHSLSIRRTNSSEQERTGLPRDMLEGQDSKLPSSVRSTLLELFGQIEREFENLYIENLELRREIDTLNERLAAEGQAIDGAELSKGQLKTKASHSTSQLSQKLKTTYKASTSKIVSSFKTTTSRAACQLVKEYIGHRDGIWDVSVAKTQPVVLGTASADHTALLWSIETGKCLVKYAGHVGSVNSIKFHPSEQLALTASGDQTAHIWRYAVQLPTPQPVADTSVSTFPYL

SEQ ID NO: 97329 - protein, 209 aa, Homo sapiens
  Payload ID: 19417
  Gene Name: WD repeat domain 37
  ENSP ID: ENSP00000404346
MSSDSEWDRSACSDSKLPSSVRSTLLELFGQIEREFENLYIENLELRREIDTLNERLAAEGQAIDGAELSKGQLKTKASHSTSQLSQKLKTTYKASTSKIVSSFKTTTSRAACQLVKEYIGHRDGIWDVSVAKTQPVVLGTASADHTALLWSIETGKCLVKYAGHVGSVNSIKFHPSEQLALTASGDQTAHIWRYAVQLPTPQPVADTS

SEQ ID NO: 97330 - protein, 263 aa, Homo sapiens
  Payload ID: 19417
  Gene Name: WD repeat domain 37
  ENSP ID: ENSP00000478057
MPTESASCSTARQTKQKRKSHSLSIRRTNSSEQERTGLPRDMLEGQDSKLPSSVRSTLLELFGQIEREFENLYIENLELRREIDTLNERLAAEGQAIDGAELSKGQLKTKASHSTSQLSQKLKTTYKASTSKIVSSFKTTTSRAACQLVKEYIGHRDGIWDVSVAKTQPVVLGTASADHTALLWSIETGKCLVKYAGHVGSVNSIKFHPSEQLALTASGDQTAHIWRYAVQLPTPQPVADTSVSTFPYLMCRMLMSANLRIHL

SEQ ID NO: 97331 - protein, 314 aa, Homo sapiens
  Payload ID: 19418
  Gene Name: WD repeat domain 38
  Uniprot ID: Q5JTN6
  ENSP ID: ENSP00000362677
MNSGVPATLAVRRVKFFGQHGGEVNSSAFSPDGQMLLTGSEDGCVYGWETRSGQLLWRLGGHTGPVKFCRFSPDGHLFASASCDCTVRLWDVARAKCLRVLKGHQRSVETVSFSPDSRQLASGGWDKRVMLWDVQSGQMLRLLVGHRDSIQSSDFSPTVNCLATGSWDSTVHIWDLRMVTPAVSHQALEGHSANISCLCYSASGLLASGSWDKTIHIWKPTTSSLLIQLKGHVTWVKSIAFSPDELWLASAGYSRMVKVWDCNTGKCLETLKGVLDVAHTCAFTPDGKILVSGAADQTRRQISRTSKSPRDPQT

SEQ ID NO: 97332 - protein, 315 aa, Homo sapiens
  Payload ID: 19418
  Gene Name: WD repeat domain 38
  ENSP ID: ENSP00000483312
MNSGVPATLAVRRVKFFGQHGGEVNSSAFSPDGQMLLTGSEDGCVYGWETRSGQLLWRLGGHTGPVKFCRFSPDGHLFASASCDCTVRLWDVARAKCLRVLKGHQRSVETVSFSPDSRQLASGGWDKRVMLWDVQSGQMLRLLVGHRDSIQSSDFSPTVNCLATGSWDSTVHIWDLRMVTPAVSHQALEGHSANISCLCYSASGLLASGSWDKTIHIWKPTTSSLLIQLKGHVTWVKSIAFSPDELWLASAGYSRMVKVWDCNTGKCLETLKQGVLDVAHTCAFTPDGKILVSGAADQTRRQISRTSKSPRDPQT

SEQ ID NO: 97333 - protein, 266 aa, Homo sapiens
  Payload ID: 19418
  Gene Name: WD repeat domain 38
  ENSP ID: ENSP00000483432
MARCCSQAQKMAACMAGRPGVGSCCGGWVATQMVLCPVSRHLSTFPDPGLVPAGHQRSVETVSFSPDSRQLASGGWDKRVMLWDVQSGQMLRLLVGHRDSIQSSDFSPTVNCLATGSWDSTVHIWDLRMVTPAVSHQALEGHSANISCLCYSASGLLASGSWDKTIHIWKPTTSSLLIQLKGHVTWVKSIAFSPDELWLASAGYSRMVKVWDCNTGKCLETLKQGVLDVAHTCAFTPDGKILVSGAADQTRRQISRTSKSPRDPQT

SEQ ID NO: 97334 - protein, 412 aa, Homo sapiens
  Payload ID: 19419
  Gene Name: WD repeat domain 4
  Uniprot ID: P57081
  ENSP ID: ENSP00000328671
MAGSVGLALCGQTLVVRGGSRFLATSIASSDDDSLFIYDCSAAEKKSQENKGEDAPLDQGSGAILASTFSKSGSYFALTDDSKRLILFRTKPWQCLSVRTVARRCTALTFIASEEKVLVADKSGDVYSFSVLEPHGCGRLELGHLSMLLDVAVSPDDRFILTADRDEKIRVSWAAAPHSIESFCLGHTEFVSRISVVPTQPGLLLSSSGDGTLRLWEYRSGRQLHCCHLASLQELVDPQAPQKFAASRIAFWCQENCVALLCDGTPVVYIFQLDARRQQLVYRQQLAFQHQVWDVAFEETQGLWVLQDCQEAPLVLYRPVGDQWQSVPESTVLKKVSGVLRGNWAMLEGSAGADASFSSLYKATFDNVTSYLKKKEERLQQQLEKKQRRRSPPPGPDGHAKKMRPGEATLSC

SEQ ID NO: 97335 - protein, 412 aa, Homo sapiens; identical to SEQ ID NO: 97334
  Payload ID: 19419
  Gene Name: WD repeat domain 4
  Uniprot ID: P57081
  ENSP ID: ENSP00000381266

SEQ ID NO: 97336 - protein, 459 aa, Homo sapiens
  Payload ID: 19420
  Gene Name: WD repeat domain 41
  Uniprot ID: Q9HAD4
  ENSP ID: ENSP00000296679
MLRWLIGGGREPQGLAEKSPLQTIGEEQTQNPYTELLVLKAHHDIVRFLVQLDDYRFASAGDDGIVVVWNAQTGEKLLELNGHTQKITAIITFPSLESCEEKNQLILTASADRTVIVWDGDTTRQVQRISCFQSTVKCLTVLQRLDVWLSGGNDLCVWNRKLDLLCKTSHLSDTGISALVEIPKNCVVAAVGKELIIFRLVAPTEGSLEWDILEVKRLLDHQDNILSLINVNDLSFVTGSHVGELIIWDALDWTMQAYERNFWDPSPQLDTQQEIKLCQKSNDISIHHFTCDEENVFAAVGRGLYVYSLQMKRVIACQKTAHDSNVLHVARLPNRQLISCSEDGSVRIWELREKQQLAAEPVPTGFFNMWGFGRVSKQASQPVKKQQENATSCSLELIGDLIGHSSSVEMFLYFEDHGLVTCSADHLIILWKNGERESGLRSLRLFQKLEENGDLYLAV

SEQ ID NO: 97337 - protein, 194 aa, Homo sapiens
  Payload ID: 19420
  Gene Name: WD repeat domain 41
  ENSP ID: ENSP00000392931
MLRWLIGGGREPQGLAEKSPLQTIGEEQTQNPYTELLVLKAHHDIVRFLVQLDDYRFASAGDDGIVVVWNAQTGEKLLELNGHTQKITAIITFPSLESCEEKNQLILTASADRTVIVWDGDTTRQVQRISCFQSTVKCLTVLQRLDVWLSGGNDLCVWNRKLDLLCKTSHLSDTGISALVEIPKNCVWQQLAKN

SEQ ID NO: 97338 - protein, 27 aa, Homo sapiens
  Payload ID: 19420
  Gene Name: WD repeat domain 41
  ENSP ID: ENSP00000421166
MLRWLIGGGREPQGLAEVNPGNLLYRQ

SEQ ID NO: 97339 - protein, 179 aa, Homo sapiens
  Payload ID: 19420
  Gene Name: WD repeat domain 41
  ENSP ID: ENSP00000422510
MLRWLIGGGREPQGLAETIGEEQTQNPYTELLVLKAHHDIVRFLVQLDDYRFASAGDDGIVVVWNAQTGEKLLELNGHTQKITAIITFPSLESCEEKNQLILTASADRTVIVWDGDTTRQVQRISCFQSTVKCLTVLQRLDVWLSGGNDLCVWNRKLDLLCKTSHLSDTGISALVEIPK

SEQ ID NO: 97340 - protein, 150 aa, Homo sapiens
  Payload ID: 19420
  Gene Name: WD repeat domain 41
  ENSP ID: ENSP00000422922
MHEANCSSPGETGEKSPLQTIGEEQTQNPYTELLVLKAHHDIVRFLVQLDDYRFASAGDDGIVVVWNAQTGEKLLELNGHTQKITAIITFPSLESCEEKNQLILTASADRTVIVWDGDTTRQVQRISCFQSTVKCLTVLQRLDVWLSGGN

SEQ ID NO: 97341 - protein, 61 aa, Homo sapiens
  Payload ID: 19420
  Gene Name: WD repeat domain 41
  ENSP ID: ENSP00000423462
MLRWLIGGGREPQGLAEKSPLQTIGEEQTQNPYTELLVLKAHHDIVRFLVQLDDYRQGKNF

SEQ ID NO: 97342 - protein, 120 aa, Homo sapiens
  Payload ID: 19420
  Gene Name: WD repeat domain 41
  ENSP ID: ENSP00000423540
MLRWLIGGGREPQGLAEKSPLQTIDLSFVTGSHVGELIIWDALDWTMQAYERNFWDPSPQLDTQQEIKLCQKSNDISIHHFTCDEENVFAAVGRGLYVYSLQMKRVIACQKTAHDSNVLH

SEQ ID NO: 97343 - protein, 404 aa, Homo sapiens
  Payload ID: 19420
  Gene Name: WD repeat domain 41
  Uniprot ID: Q9HAD4
  ENSP ID: ENSP00000424287
MLRWLIGGGREPQGLAETGEKLLELNGHTQKITAIITFPSLESCEEKNQLILTASADRTVIVWDGDTTRQVQRISCFQSTVKCLTVLQRLDVWLSGGNDLCVWNRKLDLLCKTSHLSDTGISALVEIPKNCVVAAVGKELIIFRLVAPTEGSLEWDILEVKRLLDHQDNILSLINVNDLSFVTGSHVGELIIWDALDWTMQAYERNFWDPSPQLDTQQEIKLCQKSNDISIHHFTCDEENVFAAVGRGLYVYSLQMKRVIACQKTAHDSNVLHVARLPNRQLISCSEDGSVRIWELREKQQLAAEPVPTGFFNMWGFGRVSKQASQPVKKQQENATSCSLELIGDLIGHSSSVEMFLYFEDHGLVTCSADHLIILWKNGERESGLRSLRLFQKLEENGDLYLAV

SEQ ID NO: 97344 - protein, 151 aa, Homo sapiens
  Payload ID: 19420
  Gene Name: WD repeat domain 41
  ENSP ID: ENSP00000424327
MLRWLIGGGREPQGLAEKSPLQTIGEEQTQNPYTELLVLKAHHDIVRFLVQLDDYRFASAGDDGIVVVWNAQTGEKLLELNGHTQKITAIITFPSLESCEEKNQLILTASADRTVIVWDGDTTRQVQRISCFQSTVKVGSTHRRITRMGYS

SEQ ID NO: 97345 - protein, 157 aa, Homo sapiens
  Payload ID: 19420
  Gene Name: WD repeat domain 41
  ENSP ID: ENSP00000425249
MLRWLIGGGREPQGLAEKSPLQTIGEEQTQNPYTELLVLKAHHDIVRFLVQLDDYRFASAGDDGIVVVWNAQTGEKLLELNGHTQKITAIITFPSLESCEEKNQLILTASADRTVIVWDGDTTRQVQRISCFQSTVKVLVLWLKYLRTVLWQQLAKN

SEQ ID NO: 97346 - protein, 163 aa, Homo sapiens
  Payload ID: 19420
  Gene Name: WD repeat domain 41
  ENSP ID: ENSP00000425563
  MOD_RES (1)..(1): Any amino acid
XISALVEIPKNCVVAAVGKELIIFRLVAPTEGSLEWDILEVKRLLDHQDNILSLINVNDLSFVTGSHVGELIIWDALDWTMQAYERNFWDPSPQLDTQQEIKLCQKSNDISIHHFTCDEENVFAAVGRGLYVYSLQMKRVIACQKTAHDSNVLHVARLPNRFF

SEQ ID NO: 97347 - protein, 66 aa, Homo sapiens
  Payload ID: 19420
  Gene Name: WD repeat domain 41
  ENSP ID: ENSP00000425813
MLRWLIGGGREPQGLAEKSPLQTIGEEQTQNPYTELLVLKAHHDIVRFLVQLDDYSLSSTCCFLTF

SEQ ID NO: 97348 - protein, 150 aa, Homo sapiens
  Payload ID: 19420
  Gene Name: WD repeat domain 41
  ENSP ID: ENSP00000426141
MSQEKDFYKKSPLQTIGEEQTQNPYTELLVLKAHHDIVRFLVQLDDYRFASAGDDGIVVVWNAQTGEKLLELNGHTQKITAIITFPSLESCEEKNQLILTASADRTVIVWDGDTTRQVQRISCFQSTVKCLTVLQRLDVWLSGGNDLCVW

SEQ ID NO: 97349 - protein, 394 aa, Homo sapiens
  Payload ID: 19420
  Gene Name: WD repeat domain 41
  ENSP ID: ENSP00000426499
GGREPQGLAEKSPLQTIGEEQTQNPYTELLVLKAHHDIVRFLVQLDDYRFASAGDDGIVVVWNAQTGEKLLELNGHTQKITAIITFPSLESCEEKNQLILTASADRTVIVWDGDTTRQVQRISCFQSTVKCLTVLQRLDVWLSGGNDLCVWNRKLDLLCKTSHLSDTDLSFVTGSHVGELIIWDALDWTMQAYERNFWDPSPQLDTQQEIKLCQKSNDISIHHFTCDEENVFAAVGRGLYVYSLQMKRVIACQKTAHDSNVLHVARLPNRQLISCSEDGSVRIWELREKQQLAAEPVPTGFFNMWGFGRVSKQASQPVKKQQENATSCSLELIGDLIGHSSSVEMFLYFEDHGLVTCSADHLIILWKNGERESGLRSLRLFQKLEENGDLYLAV

SEQ ID NO: 97350 - protein, 189 aa, Homo sapiens
  Payload ID: 19420
  Gene Name: WD repeat domain 41
  ENSP ID: ENSP00000426937
MLRWLIGGGREPQGLAEKSPLQTIGEEQTQNPYTELLVLKAHHDIVRFLVQLDDYRFASAGDDGIVVVWNAQTGEKLLELNGHTQKITAIITFPSLESCEEKNQLILTASADRTVIVWDGDTTRQVQRISCFQSTVKRLDVWLSGGNDLCVWNRKLDLLCKTSHLSDTGISALVEIPKNCVVAAVGKEL

SEQ ID NO: 97351 - protein, 60 aa, Homo sapiens
  Payload ID: 19420
  Gene Name: WD repeat domain 41
  ENSP ID: ENSP00000427219
  MOD_RES (1)..(1): Any amino acid
XRWLIGGGREPQGLAEKSPLQTIGEEQTQNPYTELLVLKAHHDIVRFLVQLDDYRQGKNF

SEQ ID NO: 97352 - protein, 140 aa, Homo sapiens
  Payload ID: 19420
  Gene Name: WD repeat domain 41
  ENSP ID: ENSP00000427291
MTTDLSFVTGSHVGELIIWDALDWTMQAYERNFWDPSPQLDTQQEIKLCQKSNDISIHHFTCDEENVFAAVGRGLYVYSLQMKRVIACQKTAHDSNVLHVARLPNRQLISCSEDGSVRIWELREKQQLAAEPVPTGFFNM

SEQ ID NO: 97353 - protein, 176 aa, Homo sapiens
  Payload ID: 19420
  Gene Name: WD repeat domain 41
  ENSP ID: ENSP00000427652
MLRWLIGGGREPQGLAEKSPLQTIGEEQTQNPYTELLVLKAHHDIVRFLVQLDDYRFASAGDDGIVVVWNAQTGEKLLELNGHTQKITAIITFPSLESCEEKNQLILTASADRTVIVWDGDTTRQVQRISCFQSTVKCLTVLQRLDVWLSGGNDLCVWNRKLDLLCKTSHLSDTGW

SEQ ID NO: 97354 - protein, 187 aa, Homo sapiens
  Payload ID: 19421
  Gene Name: WD repeat domain 43
  ENSP ID: ENSP00000296126
MLLSAGRTIKLWVLETKEVYRHFTGHATPVSSLMFTTIRPPNESQPFDGITGLYFLSGAVHDRLLNVWQVRSENKEKSAVMSFTVTDEPVYIDLTLSENKEEPVKLAVVCRDGQVHLFEHILNGYCKKPLTSNCTIQIATPGKGKKSTPKPIPILAAGFCSDKMSLLLVYGSWFQPTIERVALNSRE

SEQ ID NO: 97355 - protein, 677 aa, Homo sapiens
  Payload ID: 19421
  Gene Name: WD repeat domain 43
  Uniprot ID: Q15061
  ENSP ID: ENSP00000384302
MAAGGGGSCDPLAPAGVPCAFSPHSQAYFALASTDGHLRVWETANNRLHQEYVPSAHLSGTCTCLAWAPARLQAKESPQRKKRKSEAVGMSNQTDLLALGTAVGSILLYSTVKGELHSKLISGGHDNRVNCIQWHQDSGCLYSCSDDKHIVEWNVQTCKVKCKWKGDNSSVSSLCISPDGKMLLSAGRTIKLWVLETKEVYRHFTGHATPVSSLMFTTIRPPNESQPFDGITGLYFLSGAVHDRLLNVWQVRSENKEKSAVMSFTVTDEPVYIDLTLSENKEEPVKLAVVCRDGQVHLFEHILNGYCKKPLTSNCTIQIATPGKGKKSTPKPIPILAAGFCSDKMSLLLVYGSWFQPTIERVALNSREPHMCLVRDISNCWAPKVETAITKVRTPVMNSEAKVLVPGIPGHHAAIKPAPPQTEQVESKRKSGGNEVSIEERLGAMDIDTHKKGKEDLQTNSFPVLLTQGLESNDFEMLNKVLQTRNVNLIKKTVLRMPLHTIIPLLQELTKRLQGHPNSAVLMVQWLKCVLTVHASYLSTLPDLVPQLGTLYQLMESRVKTFQKLSHLHGKLILLITQVTASEKTKGATSPGQKAKLVYEEESSEEESDDEIADKDSEDNWDEDEEESESEKDEDVEEEDEDAEGKDEENGEDRDTASEKELNGDSDLDPENESEEE

SEQ ID NO: 97356 - protein, 25 aa, Homo sapiens
  Payload ID: 19421
  Gene Name: WD repeat domain 43
  ENSP ID: ENSP00000390363
MSNQTDLLALGTAVGSILLYSTVKG

SEQ ID NO: 97357 - protein, 147 aa, Homo sapiens
  Payload ID: 19421
  Gene Name: WD repeat domain 43
  ENSP ID: ENSP00000415355
MSNQTDLLALGTAVGSILLYSTVKGELHSKLISGGHDNRVNCIQWHQDSGCLYSCSDDKHIVEWNVQTCKVKCKWKGDNSSVSSLCISPDGKMLLSAGRTIKLWVLETKEVYRHFTGHATPVSSLMFTTIRPPNESQPFDGITGLYF

SEQ ID NO: 97358 - protein, 913 aa, Homo sapiens
  Payload ID: 19422
  Gene Name: WD repeat domain 44
  Uniprot ID: Q5JSH3
  ENSP ID: ENSP00000254029
MASESDTEEFYDAPEDVHLGGGYPVGSPGKVGLSTFKETENTAYKVGNESPVQELKQDVSKKIIESIIEESQKVLQLEDDSLDSKGKELSDQATASPIVARTDLSNIPGLLAIDQVLPEESQKAESQNTFEETELELKKCFPSDETCEKPVDETTKLTQTSSTEQLNVLETETEVLNKEAVEVKGGGDVLEPVSSDSLSTKDFAAVEEVAPAKPPRHLTPEPDIVASTKKPVPARPPPPTNFPPPRPPPPSRPAPPPRKRKSELEFETLKTPDIDVPKENITSDSLLTASMASESTVKDSQPSLDLASATSGDKIVTAQENGKAPDGQTVAGEVMGPQRPRSNSGRELTDEEILASVMIKNLDTGEEIPLSLAEEKLPTGINPLTLHIMRRTKEYVSNDAAQSDDEEKLQSQPTDTDGGRLKQKTTQLKKFLGKSVKRAKHLAEEYGERAINKVKSVRDEVFHTDQDDPSSSDDEGMPYTRPVKFKAAHGFKGPYDFDQIKVVQDLSGEHMGAVWTMKFSHCGRLLASAGQDNVVRIWALKNAFDYFNNMRMKYNTEGRVSPSPSQESLSSSKSDTDTGVCSGTDEDPDDKNAPFRQRPFCKYKGHTADLLDLSWSKNYFLLSSSMDKTVRLWHISRRECLCCFQHIDFVTAIAFHPRDDRYFLSGSLDGKLRLWNIPDKKVALWNEVDGQTKLITAANFCQNGKYAVIGTYDGRCIFYDTEHLKYHTQIHVRSTRGRNKVGRKITGIEPLPGENKILVTSNDSRIRLYDLRDLSLSMKYKGYVNSSSQIKASFSHDFTYLVSGSEDKYVYIWSTYHDLSKFTSVRRDRNDFWEGIKAHNAVVTSAIFAPNPSLMLSLDVQSEKSEGNEKSEDAEVLDATPSGIMKTDNTEVLLSADFTGAIKVFVNKRKNVS

SEQ ID NO: 97359 - protein, 824 aa, Homo sapiens
  Payload ID: 19422
  Gene Name: WD repeat domain 44
  Uniprot ID: Q5JSH3
  ENSP ID: ENSP00000360887
MASESDTEEFYDAPEDVHLGGGYPVGSPGKVGLSTFKIIESIIEESQKVLQLEDDSLDSKGKELSDQATASPIVARTDLSNIPGLLAIDQVLPEESQKAESQNTFEETELELKKCFPSDETCEKPVDETTKLTQTSSTEQLNVLETETEVLNKEAVEVKGGGDVLEPVSSDSLSTKDFAAVEEVAPAKPPRHLTPEPDIVASTKKPVPARPPPPTNFPPPRPPPPSRPAPPPRKRKSELEFETLKTPDIDVPKENITSDSLLTASMASESTVKDSQPSLDLASATSGDKIVTAQENGKAPDGQTVAGEVMGPQRPRSNSGRELTDEEILASVMIKNLDTGEEIPLSLAEEKLPTGINPLTLHIMRRTKEYVSNDAAQSDDEEKLQSQPTDTDGGRLKQKTTQLKKFLGKSVKRAKHLAEEYGERAINKVKSVRDEVFHTDQDDPSSSDDEGMPYTRPVKFKAAHGFKGPYDFDQIKVVQDLSGEHMGAVWTMKFSHCGRLLASAGQDNVVRIWALKNAFDYFNNMRMKYNTEGRVSPSPSQESLSSSKSDTDTGVCSGTDEDPDDKNAPFRQRPFCKYKGHTADLLDLSWSKNYFLLSSSMDKTVRLWHISRRECLCCFQHIDFVTAIAFHPRHLKYHTQIHVRSTRGRNKVGRKITGIEPLPGENKILVTSNDSRIRLYDLRDLSLSMKYKGYVNSSSQIKASFSHDFTYLVSGSEDKYVYIWSTYHDLSKFTSVRRDRNDFWEGIKAHNAVVTSAIFAPNPSLMLSLDVQSEKSEGNEKSEDAEVLDATPSGIMKTDNTEVLLSADFTGAIKVFVNKRKNVS

SEQ ID NO: 97360 - protein, 905 aa, Homo sapiens
  Payload ID: 19422
  Gene Name: WD repeat domain 44
  Uniprot ID: Q5JSH3
  ENSP ID: ENSP00000360890
MASESDTEEFYDAPEDVHLGGGYPVGSPGKVGLSTFKETENTAYKVGNESPVQELKQDVSKKIIESIIEESQKVLQLEDDSLDSKGKELSDQATASPIVARTDLSNIPGLLAIDQVLPEESQKAESQNTFEETELELKKCFPSDETCEKPVDETTKLTQTSSTEQLNVLETETEVLNKEAVEVKGGGDVLEPVSSDSLSTKDFAAVEEVAPAKPPRHLTPEPDIVASTKKPVPARPPPPTNFPPPRPPPPSRPAPPPRKRKSELEFETLKTPDIDVPKENITSDSLLTASMASESTVKDSQPSLDLASATSGDKIVTAQENGKAPDGQTVAGEVMGPQRPRSNSGRELTDEEILASVMIKNLDTGEEIPLSLAEEKLPTGINPLTLHIMRRTKEYVSNDAAQSDDEEKLQSQPTDTDGGRLKQKTTQLKKFLGKSVKRAKHLAEEYGERAINKVKSVRDEVFHTDQDDPSSSDDEGMPYTRPVKFKAAHGFKGPYDFDQIKVVQDLSGEHMGAVWTMKFSHCGRLLASAGQDNVVRIWALKNAFDYFNNMRMKYNTEGRVSPSPSQESLSSSKSDTDTGVCSGTDEDPDDKNAPFRQRPFCKYKGHTADLLDLSWSKNYFLLSSSMDKTVRLWHISRRECLCCFQHIDFVTAIAFHPRDDRYFLSGSLDGKLRLWNIPDKKVALWNEVDGQTKLITAANFCQNGKYAVIGTYDGRCIFYDTEHLKYHTQIHVRSTRGRNKVGRKITGIEPLPGENKILVTSNDSRIRLYDLRDLSLSMKYKGYVNSSSQIKASFSGSEDKYVYIWSTYHDLSKFTSVRRDRNDFWEGIKAHNAVVTSAIFAPNPSLMLSLDVQSEKSEGNEKSEDAEVLDATPSGIMKTDNTEVLLSADFTGAIKVFVNKRKNVS

SEQ ID NO: 97361 - protein, 806 aa, Homo sapiens
  Payload ID: 19422
  Gene Name: WD repeat domain 44
  ENSP ID: ENSP00000360914
  MOD_RES (1)..(1): Any amino acid
XTDLSNIPGLLAIDQVLPEESQKAESQNTFEETELELKKCFPSDETCEKPVDETTKLTQTSSTEQLNVLETETEVLNKEAVEVKGGGDVLEPVSSDSLSTKDFAAVEEVAPAKPPRHLTPEPDIVASTKKPVPARPPPPTNFPPPRPPPPSRPAPPPRKRKSELEFETLKTPDIDVPKENITSDSLLTASMASESTVKDSQPSLDLASATSGDKIVTAQENGKAPDGQTVAGEVMGPQRPRSNSGRELTDEEILASVMIKNLDTGEEIPLSLAEEKLPTGINPLTLHIMRRTKEYVSNDAAQSDDEEKLQSQPTDTDGGRLKQKTTQLKKFLGKSVKRAKHLAEEYGERAINKVKSVRDEVFHTDQDDPSSSDDEGMPYTRPVKFKAAHGFKGPYDFDQIKVVQDLSGEHMGAVWTMKFSHCGRLLASAGQDNVVRIWALKNAFDYFNNMRMKYNTEGRVSPSPSQESLSSSKSDTDTGVCSGTDEDPDDKNAPFRQRPFCKYKGHTADLLDLSWSKNYFLLSSSMDKTVRLWHISRRECLCCFQHIDFVTAIAFHPRDDRYFLSGSLDGKLRLWNIPDKKVALWNEVDGQTKLITAANFCQNGKYAVIGTYDGRCIFYDTEHLKYHTQIHVRSTRGRNKVGRKITGIEPLPGENKILVTSNDSRIRLYDLRDLSLSMKYKGYVNSSSQIKASFSHDFTYLVSGSEDKYVYIWSTYHDLSKFTSVRRDRNDFWEGIKAHNAVVTSAIFAPNPSLMLSLDVQSEKSEGNEKSEDAEVLDATPSAMSSRYVAQAGLELLASKRYYEDR

SEQ ID NO: 97362 - protein, 361 aa, Homo sapiens
  Payload ID: 19423
  Gene Name: WD repeat domain 45
  Uniprot ID: Q9Y484
  ENSP ID: ENSP00000348848
MTQQPLRGVTSLRFNQDQSCFCCAMETGVRIYNVEPLMEKGHLDHEQVGSMGLVEMLHRSNLLALVGGGSSPKFSEISAVLIWDDAREGKDSKEKLVLEFTFTKPVLSVRMRHDKIVIVLKNRIYVYSFPDNPRKLFEFDTRDNPKGLCDLCPSLEKQLLVFPGHKCGSLQLVDLASTKPGTSSAPFTINAHQSDIACVSLNQPGTVVASASQKGTLIRLFDTQSKEKLVELRRGTDPATLYCINFSHDSSFLCASSDKGTVHIFALKDTRLNRRSALARVGKVGPMIGQYVDSQWSLASFTVPAESACICAFGRNTSKNVNSVIAICVDGTFHKYVFTPDGNCNREAFDVYLDICDDDDF

SEQ ID NO: 97363 - protein, 287 aa, Homo sapiens
  Payload ID: 19423
  Gene Name: WD repeat domain 45
  ENSP ID: ENSP00000356345
  MOD_RES (1)..(1): Any amino acid
XHEQVGSMGLVEMLHRSNLLALVGGGSSPKFSEISVLIWDDAREGKDSKEKLVLEFTFTKPVLSVRMRHDKIVIVLKNRIYVYSFPDNPRKLFEFDTRDNPKGLCDLCPSLEKQLLVFPGHKCGSLQLVPGTVVASASQKGTLIRLFDTQSKEKLVELRRGTDPATLYCINFSHDSSFLCASSDKGTVHIFALKDTRLNRRSALARVGKVGPMIGQYVDSQWSLASFTVPAESACICAFGRNTSKNVNSVIAICVDGTFHKYVFTPDGNCNREAFDVYLDICDDDDF

SEQ ID NO: 97364 - protein, 292 aa, Homo sapiens
  Payload ID: 19423
  Gene Name: WD repeat domain 45
  ENSP ID: ENSP00000365536
MTQQPLRGVTSLRFNQDQSCFCCAMETGVRIYNVEPLMEKGHLGLCDLCPSLEKQLLVFPGHKCGSLQLVDLASTKPGTSSAPFTINAHQSDIACVSLNQPGTVVASASQKGTLIRLFDTQSKEKLVELRRGTDPATLYCINFSHDSSFLCASSDKGTVHIFALKDTRLNRRSAYVRPLHTLLSALVVAVALGVLVWAAETRAAVRRCRRSHPAACLAAVLAVGLLVLWVAGGACTFLFSIAGPVLLILVHASLRLRNLKNKIENKIESIGLKRTPMGLLLEALGQEQEAGS

SEQ ID NO: 97365 - protein, 371 aa, Homo sapiens
  Payload ID: 19423
  Gene Name: WD repeat domain 45
  Uniprot ID: Q9Y484
  ENSP ID: ENSP00000365543
MTQQPLRGVTSLRFNQDQSCFCCAMETGVRIYNVEPLMEKGHLDHEQVGSMGLVEMLHRSNLLALVGGGSSPKFSEISVLIWDDAREGKDSKEKLVLEFTFTKPVLSVRMRHDKIVIVLKNRIYVYSFPDNPRKLFEFDTRDNPKAAHPTPHLHTLGLCDLCPSLEKQLLVFPGHKCGSLQLVDLASTKPGTSSAPFTINAHQSDIACVSLNQPGTVVASASQKGTLIRLFDTQSKEKLVELRRGTDPATLYCINFSHDSSFLCASSDKGTVHIFALKDTRLNRRSALARVGKVGPMIGQYVDSQWSLASFTVPAESACICAFGRNTSKNVNSVIAICVDGTFHKYVFTPDGNCNREAFDVYLDICDDDDF

SEQ ID NO: 97366 - protein, 361 aa, Homo sapiens; identical to SEQ ID NO: 97362
  Payload ID: 19423
  Gene Name: WD repeat domain 45
  Uniprot ID: Q9Y484
  ENSP ID: ENSP00000365546

SEQ ID NO: 97367 - protein, 360 aa, Homo sapiens
  Payload ID: 19423
  Gene Name: WD repeat domain 45
  Uniprot ID: Q9Y484
  ENSP ID: ENSP00000365551
MTQQPLRGVTSLRFNQDQSCFCCAMETGVRIYNVEPLMEKGHLDHEQVGSMGLVEMLHRSNLLALVGGGSSPKFSEISVLIWDDAREGKDSKEKLVLEFTFTKPVLSVRMRHDKIVIVLKNRIYVYSFPDNPRKLFEFDTRDNPKGLCDLCPSLEKQLLVFPGHKCGSLQLVDLASTKPGTSSAPFTINAHQSDIACVSLNQPGTVVASASQKGTLIRLFDTQSKEKLVELRRGTDPATLYCINFSHDSSFLCASSDKGTVHIFALKDTRLNRRSALARVGKVGPMIGQYVDSQWSLASFTVPAESACICAFGRNTSKNVNSVIAICVDGTFHKYVFTPDGNCNREAFDVYLDICDDDDF

SEQ ID NO: 97368 - protein, 321 aa, Homo sapiens
  Payload ID: 19423
  Gene Name: WD repeat domain 45
  ENSP ID: ENSP00000379913
MTQQPLRGVTSLRFNQDQSCFCCAMETGVRIYNVEPLMEKGHLVLIWDDAREGKDSKEKLVLEFTFTKPVLSVRMRHDKIVIVLKNRIYVYSFPDNPRKLFEFDTRDNPKGLCDLCPSLEKQLLVFPGHKCGSLQLVDLASTKPGTSSAPFTINAHQSDIACVSLNQPGTVVASASQKGTLIRLFDTQSKEKLVELRRGTDPATLYCHDSSFLCASSDKGTVHIFALKDTRLNRRSALARVGKVGPMIGQYVDSQWSLASFTVPAESACICAFGRNTSKNVNSVIAICVDGTFHKYVFTPDGNCNREAFDVYLDICDDDDF

SEQ ID NO: 97369 - protein, 208 aa, Homo sapiens
  Payload ID: 19423
  Gene Name: WD repeat domain 45
  ENSP ID: ENSP00000393640
MTQQPLRGVTSLRFNQDQSCFCCAMETGVRIYNVEPLMEKGHLDHEQVGSMGLVEMLHRSNLLALVGGGSSPKFSEISVLIWDDAREGKDSKEKLVLEFTFTKPVLSVRMRHDKIVIVLKNRIYVYSFPDNPRKLFEFDTRDNPKGERAQIHRWLCDLCPSLEKQLLVFPGHKCGSLQLVDLASTKPGTSSAPFTINAHQSDIACVSL

SEQ ID NO: 97370 - protein, 194 aa, Homo sapiens
  Payload ID: 19423
  Gene Name: WD repeat domain 45
  ENSP ID: ENSP00000397657
MTQQPLRGVTSLRFNQDQSCFCCAMETGVRIYNVEPLMEKGHLDHEQVGSMGLVEMLHRSNLLALVGGGSSPKFSEISGLPLTLNLGPDNPPTCPAVLIWDDAREGKDSKEKLVLEFTFTKPVLSVRMRHDKIVIVLKNRIYVYSFPDNPRKLFEFDTRDNPKGLCDLCPSLEKQLLVFPGHKCGSLQLVDLAS

SEQ ID NO: 97371 - protein, 256 aa, Homo sapiens
  Payload ID: 19423
  Gene Name: WD repeat domain 45
  ENSP ID: ENSP00000417211
MTQQPLRGVTSLRFNQDQSCFCCAMETGVRIYNVEPLMEKGHLDHEQVGSMGLVEMLHRSNLLALVGGGSSPKFSEISVLIWDDAREGKDSKEKLVLEFTFTKPVLSVRMRHDKIVIVLKNRIYVYSFPDNPRKLFEFDTRDNPKGLCDLCPSLEKQLLVFPGHKCGSLQLVDLASTKPGTSSAPFTINAHQSDIACVSLNQPGTVVASASQKGTLIRLFDTQSKEKLVELRRGTDPATLYCHLRRWDLPQICLHS

SEQ ID NO: 97372 - protein, 122 aa, Homo sapiens
  Payload ID: 19423
  Gene Name: WD repeat domain 45
  ENSP ID: ENSP00000417754
LQLVDLASTKPGTSSAPFTINAHQSDIACVSLNQPGTVVASASQKGTLIRLFDTQSKEKLVELRRGTDPATLYCINFSHDSSFLCASSDKGTVHIFALKDTRLNRRSAHLRRWDLPQICLHS

SEQ ID NO: 97373 - protein, 175 aa, Homo sapiens
  Payload ID: 19423
  Gene Name: WD repeat domain 45
  ENSP ID: ENSP00000418466
MTQQPLRGVTSLRFNQDQSCFCCAMETGVRIYNVEPLMEKGHLDHEQVGSMGLVEMLHRSNLLALVGGGSSPKFSEISVLIWDDAREGKDSKEKLVLEFTFTKPVLSVRMRHDKIVIVLKNRIYVYSFPDNPRKLFEFDTRDNPKGLCDLCPSLEKQLLVFPGHKCGSLQLVDLA

SEQ ID NO: 97374 - protein, 241 aa, Homo sapiens
  Payload ID: 19423
  Gene Name: WD repeat domain 45
  ENSP ID: ENSP00000418919
MTQQPLRGVTSLRFNQDQSCFCCAMETGVRIYNVEPLMEKGHLAVLIWDDAREGKDSKEKLVLEFTFTKPVLSVRMRHDKIVIVLKNRIYVYSFPDNPRKLFEFDTRDNPKGLCDLCPSLEKQLLVFPGHKCGSLQLVDLASTKPGTSSAPFTINAHQSDIACVSLNQPGTVVASASQKGTLIRLFDTQSKEKLVELRRGTDPATLYCINFSHDSSFLCASSDKGTVHIFALKDTRLNRRS

SEQ ID NO: 97375 - protein, 138 aa, Homo sapiens
  Payload ID: 19423
  Gene Name: WD repeat domain 45
  ENSP ID: ENSP00000419324
MTQQPLRGVTSLRFNQDQSCFCCAMETGVRIYNVEPLMEKGHLVLIWDDAREGKDSKEKLVLEFTFTKPVLSVRMRHDKIVIVLKNRIYVYSFPDNPRKLFEFDTRDNPKAAHPTPHLHTLGLCDLCPSLEKQLLVFP

SEQ ID NO: 97376 - protein, 86 aa, Homo sapiens
  Payload ID: 19423
  Gene Name: WD repeat domain 45
  ENSP ID: ENSP00000419453
  MOD_RES (1)..(1): Any amino acid
XNRRSALARVGKVGPMIGQYVDSQWSLASFTVPAESACICAFGRNTSKNVNSVIDGTFHKYVFTPDGNCNREAFDVYLDICDDDDF

SEQ ID NO: 97377 - protein, 325 aa, Homo sapiens
  Payload ID: 19423
  Gene Name: WD repeat domain 45
  ENSP ID: ENSP00000419897
MTQQPLRGVTSLRFNQDQSCFCCAMETGVRIYNVEPLMEKGHLVLIWDDAREGKDSKEKLVLEFTFTKPVLSVRMRHDKIVIVLKNRIYVYSFPDNPRKLFEFDTRDNPKGLCDLCPSLEKQLLVFPGHKCGSLQLVDLASTKPGTSSAPFTINAHQSDIACVSLNQPGTVVASASQKGTLIRLFDTQSKEKLVELRRGTDPATLYCINFSHDSSFLCASSDKGTVHIFALKDTRLNRRSALARVGKVGPMIGQYVDSQWSLASFTVPAESACICAFGRNTSKNVNSVIAICVDGTFHKYVFTPDGNCNREAFDVYLDICDDDDF

SEQ ID NO: 97378 - protein, 158 aa, Homo sapiens
  Payload ID: 19423
  Gene Name: WD repeat domain 45
  ENSP ID: ENSP00000420534
MTQQPLRGVTSLRFNQDQSCFCCAMETGVRIYNVEPLMEKGHLDHEQVGSMGLVEMLHRSNLLALVGGGSSPKFSEISVLIWDDAREGKDSKEKLVLEFTFTKPVLSVRMRHDKIVIVLKNRIYVYSFPDNPRKLFEFDTRDNPKAAHPTPHLHTLGL

SEQ ID NO: 97379 - protein, 213 aa, Homo sapiens
  Payload ID: 19423
  Gene Name: WD repeat domain 45
  ENSP ID: ENSP00000420728
MTQQPLRGVTSLRFNQDQSCFCCAMETGVRIYNVEPLMEKGHLDHEQVGSMGLVEMLHRSNLLALVGGGSSPKFSEISGVDPVSPGLPLTLNLGPDNPPTCPAVLIWDDAREGKDSKEKLVLEFTFTKPVLSVRMRHDKIVIVLKNRIYVYSFPDNPRKLFEFDTRDNPKGLCDLCPSLEKQLLVFPGHKCGSLQLVDLASTKPGTSSAPFTI

SEQ ID NO: 97380 - protein, 360 aa, Homo sapiens; identical to SEQ ID NO: 97367
  Payload ID: 19423
  Gene Name: WD repeat domain 45
  ENSP ID: ENSP00000488972

SEQ ID NO: 97381 - protein, 289 aa, Homo sapiens
  Payload ID: 19423
  Gene Name: WD repeat domain 45
  ENSP ID: ENSP00000488986
MTQQPLRGVTSLRFNQDQSCFCCAMETGVRIYNVEPLMEKGHLDHEQVGSMGLVEMLHRSNLLALVGGGSSPKFSEISGLCDLCPSLEKQLLVFPGHKCGSLQLVDLASTKPGTSSAPFTINAHQSDIACVSLNQPGTVVASASQKGTLIRLFDTQSKEKLVELRRGTDPATLYCHDSSFLCASSDKGTVHIFALKDTRLNRRSALARVGKVGPMIGQYVDSQWSLASFTVPAESACICAFGRNTSKNVNSVIAICVDGTFHKYVFTPDGNCNREAFDVYLDICDDDDF

SEQ ID NO: 97382 - protein, 59 aa, Homo sapiens
  Payload ID: 19423
  Gene Name: WD repeat domain 45
  ENSP ID: ENSP00000489040
MTQQPLRGVTSLRFNQDQSCFCCAMETDHEQVGSMGLVEMLHRSNLLALVGGGSSPKFS

SEQ ID NO: 97383 - protein, 293 aa, Homo sapiens
  Payload ID: 19423
  Gene Name: WD repeat domain 45
  ENSP ID: ENSP00000489080
MTQQPLRGVTSLRFNQDQSCFCCAMETGVRIYNVEPLMEKGHLDHEQVGSMGLVEMLHRSNLLALVGGGSSPKFSEISGLCDLCPSLEKQLLVFPGHKCGSLQLVDLASTKPGTSSAPFTINAHQSDIACVSLNQPGTVVASASQKGTLIRLFDTQSKEKLVELRRGTDPATLYCINFSHDSSFLCASSDKGTVHIFALKDTRLNRRSALARVGKVGPMIGQYVDSQWSLASFTVPAESACICAFGRNTSKNVNSVIAICVDGTFHKYVFTPDGNCNREAFDVYLDICDDDDF

SEQ ID NO: 97384 - protein, 276 aa, Homo sapiens
  Payload ID: 19423
  Gene Name: WD repeat domain 45
  ENSP ID: ENSP00000489128
METGVRIYNVEPLMEKGHLDHEQVGSMGLVEMLHRSNLLALVGGGSSPKFSEISVLIWDDAREGKDSKEKLVLEFTFTKPVLSVRMRHDKIVIVLKNRIYVYSFPDNPRKLFEFDTRDNPKGLCDLCPSLEKQLLVFPGHKCGSLQLVDLASTKPGTSSAPFTINAHQSDIACVSLNQPGTVVASASQKGTLIRLFDTQSKEKLVELRRGTDPATLYCINFSHDSSFLCASSDKGTVHIFALKDTRLNRRSAAACRLARVGKVGPMIGQYVDSQWS

SEQ ID NO: 97385 - protein, 162 aa, Homo sapiens
  Payload ID: 19423
  Gene Name: WD repeat domain 45
  ENSP ID: ENSP00000489150
MGQDGCVDTSYLIHIIEEQSCTMTQQPLRGVTSLRFNQDQSCFCCAMETGVRIYNVEPLMEKGHLDHEQVGSMGLVEMLHRSNLLALVGGGSSPKFSEISAVLIWDDAREGKDSKEKLVLEFTFTKPVLSVRMRHDKIVIVLKNRIYVYSFPDNPRKLFEFD

SEQ ID NO: 97386 - protein, 346 aa, Homo sapiens
  Payload ID: 19423
  Gene Name: WD repeat domain 45
  ENSP ID: ENSP00000489268
MTQQPLRGVTSLRFNQDQSCFCCAMETGVRIYNVEPLMEKGHLDHEQVGSMGLVEMLHRSNLLALVGGGSSPKFSEISVLIWDDAREGKDSKEKLVLEFTFTKPVLSVRMRHDKIVIVLKNRIYVYSFPDNPRKLFEFDTRDNPKGLCDLCPSLEKQLLVFPGHKCGSLQLVDLASTKPGTSSAPFTINAHQSDIACVSLNQPGTVVASASQKGTLIRLFDTQSKEKLVELRRGTDPATLYCDKGTVHIFALKDTRLNRRSALARVGKVGPMIGQYVDSQWSLASFTVPAESACICAFGRNTSKNVNSVIAICVDGTFHKYVFTPDGNCNREAFDVYLDICDDDDF

SEQ ID NO: 97387 - protein, 80 aa, Homo sapiens
  Payload ID: 19423
  Gene Name: WD repeat domain 45
  ENSP ID: ENSP00000489330
MTQQPLRGVTSLRFNQDQSCFCCAMETGVRIYNVEPLMEKGHLDHEQVGSMGLVEMLHRSNLLALVGGGSSPKFSEISGS

SEQ ID NO: 97388 - protein, 45 aa, Homo sapiens
  Payload ID: 19423
  Gene Name: WD repeat domain 45
  ENSP ID: ENSP00000489553
MTQQPLRGVTSLRFNQDQSCFCCAMETGVRIYNVEPLMEKGHLGS

SEQ ID NO: 97389 - protein, 196 aa, Homo sapiens
  Payload ID: 19423
  Gene Name: WD repeat domain 45
  ENSP ID: ENSP00000489561
MTQQPLRGVTSLRFNQDQSCFCCAMETGVRIYNVEPLMEKGHLGLCDLCPSLEKQLLVFPGHKCGSLQLVDLASTKPGTSSAPFTINAHQSDIACVSLNQPGTVVASASQKGTLIRLFDTQSKEKLVELRRGTDPATLYCINFSHDSSFLCASSDKGTVHIFALKDTRLNRRSALARVGKVGPMIGQYVDSQWSLA

SEQ ID NO: 97390 - protein, 344 aa, Homo sapiens
  Payload ID: 19424
  Gene Name: WD repeat domain 45B
  Uniprot ID: Q5MNZ6
  ENSP ID: ENSP00000376139
MNLLPCNPHGNGLLYAGFNQDHGCFACGMENGFRVYNTDPLKEKEKQEFLEGGVGHVEMLFRCNYLALVGGGKKPKYPPNKVMIWDDLKKKTVIEIEFSTEVKAVKLRRDRIVVVLDSMIKVFTFTHNPHQLHVFETCYNPKGLCVLCPNSNNSLLAFPGTHTGHVQLVDLASTEKPPVDIPAHEGVLSCIALNLQGTRIATASEKGTLIRIFDTSSGHLIQELRRGSQAANIYCINFNQDASLICVSSDHGTVHIFAAEDPKRNKQSSLASASFLPKYFSSKWSFSKFQVPSGSPCICAFGTEPNAVIAICADGSYYKFLFNPKGECIRDVYAQFLEMTDDKL

SEQ ID NO: 97391 - protein, 174 aa, Homo sapiens
  Payload ID: 19424
  Gene Name: WD repeat domain 45B
  ENSP ID: ENSP00000458738
MNLLPCNPHGNGLLYAGFNQDHGCFACGMENGFRVYNTDPLKEKEKQVMIWDDLKKKTVIEIEFSTEVKAVKLRRDRIVVVLDSMIKVFTFTHNPHQLHVFETCYNPKGLCVLCPNSNNSLLAFPGTHTGHVQLVDLASTEKPPVDIPAHEGVLSCIALNLQGTRIATASEKGI

SEQ ID NO: 97392 - protein, 124 aa, Homo sapiens
  Payload ID: 19424
  Gene Name: WD repeat domain 45B
  ENSP ID: ENSP00000460297
  MOD_RES (1)..(1): Any amino acid
XQELRRGSQAANIYCINFNQDASLICVSSDHGTVHIFAAEDPKRNKQSSLASASFLPKYFSSKWSFSKFQVPSGSPCICAFGTEPNAVIAICADGSYYKFLFNPKGECIRDVYAQFLEMTDDKL

SEQ ID NO: 97393 - protein, 85 aa, Homo sapiens
  Payload ID: 19424
  Gene Name: WD repeat domain 45B
  ENSP ID: ENSP00000461355
MNLLPCNPHGNGLLYAGFNQDHGCFACGMENGFRVYNTDPLKEKEKQEFLEGGVGHVEMLFRCNYLALVGGGKKPKYPPNKGTEK

SEQ ID NO: 97394 - protein, 201 aa, Homo sapiens
  Payload ID: 19424
  Gene Name: WD repeat domain 45B
  ENSP ID: ENSP00000461488
  MOD_RES (1)..(1): Any amino acid
XHGNGLLYAGFNQDHGCFACGMENGFRVYNTDPLKEKEKQEFLEGGVGHVEMLFRCNYLALVGGGKKPKYPPNKVMIWDDLKKKTVIEIEFSTEVKAVKLRRDRIVVVLDSMIKVFTFTHNPHQLHVFETCYNPKGLCVLCPNSNNSLLAFPGTHTGHVQLVDLASTEKPPVDIPAHEGVLSCIALNLQGTRIATASEKGI

SEQ ID NO: 97395 - protein, 610 aa, Homo sapiens
  Payload ID: 19425
  Gene Name: WD repeat domain 46
  Uniprot ID: O15213
  ENSP ID: ENSP00000363746
METAPKPGKDVPPKKDKLQTKRKKPRRYWEEETVPTTAGASPGPPRNKKNRELRPQRPKNAYILKKSRISKKPQVPKKPREWKNPESQRGLSGTQDPFPGPAPVPVEVVQKFCRIDKSRKLPHSKAKTRSRLEVAEAEEEETSIKAARSELLLAEEPGFLEGEDGEDTAKICQADIVEAVDIASAAKHFDLNLRQFGPYRLNYSRTGRHLAFGGRRGHVAALDWVTKKLMCEINVMEAVRDIRFLHSEALLAVAQNRWLHIYDNQGIELHCIRRCDRVTRLEFLPFHFLLATASETGFLTYLDVSVGKIVAALNARAGRLDVMSQNPYNAVIHLGHSNGTVSLWSPAMKEPLAKILCHRGGVRAVAVDSTGTYMATSGLDHQLKIFDLRGTYQPLSTRTLPHGAGHLAFSQRGLLVAGMGDVVNIWAGQGKASPPSLEQPYLTHRLSGPVHGLQFCPFEDVLGVGHTGGITSMLVPGAGEPNFDGLESNPYRSRKQRQEWEVKALLEKVPAELICLDPRALAEVDVISLEQGKKEQIERLGYDPQAKAPFQPKPKQKGRSSTASLVKRKRKVMDEEHRDKVRQSLQQQHHKEAKAKPTGARPSALDRFVR

SEQ ID NO: 97396 - protein, 610 aa, Homo sapiens [sequence omitted]

SEQ ID NO: 97397 - protein, 610 aa, Homo sapiens
  Payload ID: 19425
  Gene Name: WD repeat domain 46
  Uniprot ID: O15213
  ENSP ID: ENSP00000399454
METAPKPGKDVPPKKDKLQTKRKKPRRYWEEETVPTTAGASPGPPRNKKNRELRPQRPKNAYILKKSRISKKPQVPKKPREWKNPESQRGLSGAQDPFPGPAPVPVEVVQKFCRIDKSRKLPHSKAKTRSRLEVAEAEEEETSIKAARSELLLAEEPGFLEGEDGEDTAKICQADIVEAVDIASAAKHFDLNLRQFGPYRLNYSRTGRHLAFGGRRGHVAALDWVTKKLMCEINVMEAVRDIRFLHSEALLAVAQNRWLHIYDNQGIELHCIRRCDRVTRLEFLPFHFLLATASETGFLTYLDVSVGKIVAALNARAGRLDVMSQNPYNAVIHLGHSNGTVSLWSPAMKEPLAKILCHRGGVRAVAVDSTGTYMATSGLDHQLKIFDLRGTYQPLSTRTLPHGAGHLAFSQRGLLVAGMGDVVNIWAGQGKASPPSLEQPYLTHRLSGPVHGLQFCPFEDVLGVGHTGGITSMLVPGAGEPNFDGLESNPYRSRKQRQEWEVKALLEKVPAELICLDPRALAEVDVISLEQGKKEQIERLGYDPQAKAPFQPKPKQKGRSSTASLVKRKRKVMDEEHRDKVRQSLQQQHHKEAKAKPTGARPSALDRFVR

SEQ ID NO: 97398 - protein, 610 aa, Homo sapiens; identical to SEQ ID NO: 97397
  Payload ID: 19425
  Gene Name: WD repeat domain 46
  Uniprot ID: O15213
  ENSP ID: ENSP00000402869

SEQ ID NO: 97399 - protein, 322 aa, Homo sapiens
  Payload ID: 19425
  Gene Name: WD repeat domain 46
  ENSP ID: ENSP00000405568
KSRISKKPQVPKKPREWKNPESQRGLSGTQDPFPGPAPVPVEVVQKFCRIDKSRKLPHSKAKTRSRLEVAEAEEEETSIKAARSELLLAEEPGFLEGEDGEDTAKICQADIVEAVDIASAAKFGPYRLNYSRTGRHLAFGGRRGHVAALDWVTKKLMCEINVMEAVRDIRFLHSEALLAVAQNRWLHIYDNQGIELHCIRRCDRVTRLEFLPFHFLLATASETGFLTYLDVSVGKIVAALNARAGRLDVMSQNPYNAVIHLGHSNGTVSLWSPAMKEPLAKILCHRGGVRAVAVDSTGTYMATSGLDHQLKIFDLRGTYQPL

SEQ ID NO: 97400 - protein, 610 aa, Homo sapiens; identical to SEQ ID NO: 97397
  Payload ID: 19425
  Gene Name: WD repeat domain 46
  Uniprot ID: O15213
  ENSP ID: ENSP00000405614

SEQ ID NO: 97401 - protein, 322 aa, Homo sapiens
  Payload ID: 19425
  Gene Name: WD repeat domain 46
  ENSP ID: ENSP00000406835
KSRISKKPQVPKKPREWKNPESQRGLSGAQDPFPGPAPVPVEVVQKFCRIDKSRKLPHSKAKTRSRLEVAEAEEEETSIKAARSELLLAEEPGFLEGEDGEDTAKICQADIVEAVDIASAAKFGPYRLNYSRTGRHLAFGGRRGHVAALDWVTKKLMCEINVMEAVRDIRFLHSEALLAVAQNRWLHIYDNQGIELHCIRRCDRVTRLEFLPFHFLLATASETGFLTYLDVSVGKIVAALNARAGRLDVMSQNPYNAVIHLGHSNGTASLWSPAMKEPLAKILCHRGGVRAVAVDSTGTYMATSGLDHQLKIFDLRGTYQPL

SEQ ID NO: 97402 - protein, 322 aa, Homo sapiens
  Payload ID: 19425
  Gene Name: WD repeat domain 46
  ENSP ID: ENSP00000407066
KSRISKKPQVPKKPREWKNPESQRGLSGAQDPFPGPAPVPVEVVQKFCRIDKSRKLPHSKAKTRSRLEVAEAEEEETSIKAARSELLLAEEPGFLEGEDGEDTAKICQADIVEAVDIASAAKFGPYRLNYSRTGRHLAFGGRRGHVAALDWVTKKLMCEINVMEAVRDIRFLHSEALLAVAQNRWLHIYDNQGIELHCIRRCDRVTRLEFLPFHFLLATASETGFLTYLDVSVGKIVAALNARAGRLDVMSQNPYNAVIHLGHSNGTVSLWSPAMKEPLAKILCHRGGVRAVAVDSTGTYMATSGLDHQLKIFDLRGTYQPL

SEQ ID NO: 97403 - protein, 322 aa, Homo sapiens; identical to SEQ ID NO: 97402
  Payload ID: 19425
  Gene Name: WD repeat domain 46
  ENSP ID: ENSP00000408651

SEQ ID NO: 97404 - protein, 322 aa, Homo sapiens; identical to SEQ ID NO: 97402
  Payload ID: 19425
  Gene Name: WD repeat domain 46
  ENSP ID: ENSP00000412069

SEQ ID NO: 97405 - protein, 893 aa, Homo sapiens
  Payload ID: 19426
  Gene Name: WD repeat domain 47
  ENSP ID: ENSP00000350301
MTAEETVNVKEVEIIKLILDFLNSKKLHISMLALEKESGVINGLFSDDMLFLRFRYIILKQKFLEALCVNNAMSAEDEPQHLEFTMQEAVQCLHALEEYCPSKDDYSKLCLLLTLPRLTNHAEFKDWNPSTARVHCFEEACVMVAEFIPADRKLSEAGFKASNNRLFQLVMKGLLYECCVEFCQSKATGEEITESEVLLGIDLLCGNGCDDLDLSLLSWLQNLPSSVFSCAFEQKMLNIHVDKLLKPTKAAYADLLTPLISKLSPYPSSPMRRPQSADAYMTRSLNPALDGLTCGLTSHDKRISDLGNKTSPMSHSFANFHYPGVQNLSRSLMLENTECHSIYEESPERDTPVDAQRPIGSEILGQSSVSEKEPANGAQNPGPAKQEKNELRDSTEQFQEYYRQRLRYQQHLEQKEQQRQIYQQMLLEGGVNQEDGPDQQQNLTEQFLNRSIQKLGELNIGMDGLGNEVSALNQQCNGSKGNGSNGSSVTSFTTPPQDSSQRLTHDASNIHTSTPRNPGSTNHIPFLEESPCGSQISSEHSVIKPPLGDSPGSLSRSKGEEDDKSKKQFVCINILEDTQAVRAVAFHPAGGLYAVGSNSKTLRVCAYPDVIDPSAHETPKQPVVRFKRNKHHKGSIYCVAWSPCGQLLATGSNDKYVKVLPFNAETCNATVSGPDLEFSMHDGTIRDLAFMEGPESGGAILISAGAGDCNIYTTDCQRGQGLHALSGHTGHILALYTWSGWMIASGSQDKTVRFWDLRVPSCVRVVGTTFHGTGSAVASVAVDPSGRLLATGQEDSSCMLYDIRGGRMVQSYHPHSSDVRSVRFSPGAHYLLTGSYDMKIKVTDLQGDLTKQLPIMVVGEHKDKVIQCRWHTQDLSFLSSSADRTVTLWTYNG

SEQ ID NO: 97406 - protein, 891 aa, Homo sapiens
  Payload ID: 19426
  Gene Name: WD repeat domain 47
  Uniprot ID: O94967
  ENSP ID: ENSP00000354339
MTAEETVNVKEVEIIKLILDFLNSKKLHISMLALEKESGVINGLFSDDMLFLRFRYIILKQKFLEALCVNNAMSAEDEPQHLEFTMQEAVQCLHALEEYCPSKDDYSKLCLLLTLPRLTNHAEFKDWNPSTARVHCFEEACVMVAEFIPADRKLSEAGFKASNNRLFQLVMKGLLYECCVEFCQSKATGEEITESEVLLGIDLLCGNGCDDLDLSLLSWLQNLPSSVFSCAFEQKMLNIHVDKLLKPTKAAYADLLTPLISKLSPYPSSPMRRPQSADAYMTRSLNPALDGLTCGLTSHDKRISDLGNKTSPMSHSFANFHYPGVQNLSRSLMLENTECHSIYEESPERDTPVDAQRPIGSEILGQSSVSEKEPANGAQNPGPAKQEKNELRDSTEQFQEYYRQRLRYQQHLEQKEQQRQIYQQMLLEGGVNQEDGPDQQQNLTEQFLNRSIQKLGELNIGMDGLGNEVSALNQQCNGSKGNGSNGSSVTSFTTPPQDSSQRLTHDASNIHTSTPRNPGSTNHIPFLEESPCGSQISSEHSVIKPPLGDSPGSLSRSKGEEDDKSKKQFVCINILEDTQAVRAVAFHPAGGLYAVGSNSKTLRVCAYPDVIDPSAHETPKQPVVRFKRNKHHKGSIYCVAWSPCGQLLATGSNDKYVKVLPFNAETCNATGPDLEFSMHDGTIRDLAFMEGPESGGAILISAGAGDCNIYTTDCQRGQGLHALSGHTGHILALYTWSGWMIASGSQDKTVRFWDLRVPSCVRVVGTTFHGTGSAVASVAVDPSGRLLATGQEDSSCMLYDIRGGRMVQSYHPHSSDVRSVRFSPGAHYLLTGSYDMKIKVTDLQGDLTKQLPIMVVGEHKDKVIQCRWHTQDLSFLSSSADRTVTLWTYNG

SEQ ID NO: 97407 - protein, 919 aa, Homo sapiens
  Payload ID: 19426
  Gene Name: WD repeat domain 47
  Uniprot ID: O94967
  ENSP ID: ENSP00000358979
MTAEETVNVKEVEIIKLILDFLNSKKLHISMLALEKESGVINGLFSDDMLFLRQLILDGQWDEVLQFIQPLECMEKFDKKRFRYIILKQKFLEALCVNNAMSAEDEPQHLEFTMQEAVQCLHALEEYCPSKDDYSKLCLLLTLPRLTNHAEFKDWNPSTARVHCFEEACVMVAEFIPADRKLSEAGFKASNNRLFQLVMKGLLYECCVEFCQSKATGEEITESEVLLGIDLLCGNGCDDLDLSLLSWLQNLPSSVFSCAFEQKMLNIHVDKLLKPTKAAYADLLTPLISKLSPYPSSPMRRPQSADAYMTRSLNPALDGLTCGLTSHDKRISDLGNKTSPMSHSFANFHYPGVQNLSRSLMLENTECHSIYEESPERDTPVDAQRPIGSEILGQSSVSEKEPANGAQNPGPAKQEKNELRDSTEQFQEYYRQRLRYQQHLEQKEQQRQIYQQMLLEGGVNQEDGPDQQQNLTEQFLNRSIQKLGELNIGMDGLGNEVSALNQQCNGSKGNGSNGSSVTSFTTPPQDSSQRLTHDASNIHTSTPRNPGSTNHIPFLEESPCGSQISSEHSVIKPPLGDSPGSLSRSKGEEDDKSKKQFVCINILEDTQAVRAVAFHPAGGLYAVGSNSKTLRVCAYPDVIDPSAHETPKQPVVRFKRNKHHKGSIYCVAWSPCGQLLATGSNDKYVKVLPFNAETCNATGPDLEFSMHDGTIRDLAFMEGPESGGAILISAGAGDCNIYTTDCQRGQGLHALSGHTGHILALYTWSGWMIASGSQDKTVRFWDLRVPSCVRVVGTTFHGTGSAVASVAVDPSGRLLATGQEDSSCMLYDIRGGRMVQSYHPHSSDVRSVRFSPGAHYLLTGSYDMKIKVTDLQGDLTKQLPIMVVGEHKDKVIQCRWHTQDLSFLSSSADRTVTLWTYNG

SEQ ID NO: 97408 - protein, 920 aa, Homo sapiens
  Payload ID: 19426
  Gene Name: WD repeat domain 47
  Uniprot ID: O94967
  ENSP ID: ENSP00000358982
MTAEETVNVKEVEIIKLILDFLNSKKLHISMLALEKESGVINGLFSDDMLFLRQLILDGQWDEVLQFIQPLECMEKFDKKRFRYIILKQKFLEALCVNNAMSAEDEPQHLEFTMQEAVQCLHALEEYCPSKDDYSKLCLLLTLPRLTNHAEFKDWNPSTARVHCFEEACVMVAEFIPADRKLSEAGFKASNNRLFQLVMKGLLYECCVEFCQSKATGEEITESEVLLGIDLLCGNGCDDLDLSLLSWLQNLPSSVFSCAFEQKMLNIHVDKLLKPTKAAYADLLTPLISKLSPYPSSPMRRPQSADAYMTRSLNPALDGLTCGLTSHDKRISDLGNKTSPMSHSFANFHYPGVQNLSRSLMLENTECHSIYEESPERSDTPVDAQRPIGSEILGQSSVSEKEPANGAQNPGPAKQEKNELRDSTEQFQEYYRQRLRYQQHLEQKEQQRQIYQQMLLEGGVNQEDGPDQQQNLTEQFLNRSIQKLGELNIGMDGLGNEVSALNQQCNGSKGNGSNGSSVTSFTTPPQDSSQRLTHDASNIHTSTPRNPGSTNHIPFLEESPCGSQISSEHSVIKPPLGDSPGSLSRSKGEEDDKSKKQFVCINILEDTQAVRAVAFHPAGGLYAVGSNSKTLRVCAYPDVIDPSAHETPKQPVVRFKRNKHHKGSIYCVAWSPCGQLLATGSNDKYVKVLPFNAETCNATGPDLEFSMHDGTIRDLAFMEGPESGGAILISAGAGDCNIYTTDCQRGQGLHALSGHTGHILALYTWSGWMIASGSQDKTVRFWDLRVPSCVRVVGTTFHGTGSAVASVAVDPSGRLLATGQEDSSCMLYDIRGGRMVQSYHPHSSDVRSVRFSPGAHYLLTGSYDMKIKVTDLQGDLTKQLPIMVVGEHKDKVIQCRWHTQDLSFLSSSADRTVTLWTYNG

SEQ ID NO: 97409 - protein, 927 aa, Homo sapiens
  Payload ID: 19426
  Gene Name: WD repeat domain 47
  Uniprot ID: O94967
  ENSP ID: ENSP00000383599
MTAEETVNVKEVEIIKLILDFLNSKKLHISMLALEKESGVINGLFSDDMLFLRQLILDGQWDEVLQFIQPLECMEKFDKKRFRYIILKQKFLEALCVNNAMSAEDEPQHVRFLFLKLEFTMQEAVQCLHALEEYCPSKDDYSKLCLLLTLPRLTNHAEFKDWNPSTARVHCFEEACVMVAEFIPADRKLSEAGFKASNNRLFQLVMKGLLYECCVEFCQSKATGEEITESEVLLGIDLLCGNGCDDLDLSLLSWLQNLPSSVFSCAFEQKMLNIHVDKLLKPTKAAYADLLTPLISKLSPYPSSPMRRPQSADAYMTRSLNPALDGLTCGLTSHDKRISDLGNKTSPMSHSFANFHYPGVQNLSRSLMLENTECHSIYEESPERSDTPVDAQRPIGSEILGQSSVSEKEPANGAQNPGPAKQEKNELRDSTEQFQEYYRQRLRYQQHLEQKEQQRQIYQQMLLEGGVNQEDGPDQQQNLTEQFLNRSIQKLGELNIGMDGLGNEVSALNQQCNGSKGNGSNGSSVTSFTTPPQDSSQRLTHDASNIHTSTPRNPGSTNHIPFLEESPCGSQISSEHSVIKPPLGDSPGSLSRSKGEEDDKSKKQFVCINILEDTQAVRAVAFHPAGGLYAVGSNSKTLRVCAYPDVIDPSAHETPKQPVVRFKRNKHHKGSIYCVAWSPCGQLLATGSNDKYVKVLPFNAETCNATGPDLEFSMHDGTIRDLAFMEGPESGGAILISAGAGDCNIYTTDCQRGQGLHALSGHTGHILALYTWSGWMIASGSQDKTVRFWDLRVPSCVRVVGTTFHGTGSAVASVAVDPSGRLLATGQEDSSCMLYDIRGGRMVQSYHPHSSDVRSVRFSPGAHYLLTGSYDMKIKVTDLQGDLTKQLPIMVVGEHKDKVIQCRWHTQDLSFLSSSADRTVTLWTYNG

SEQ ID NO: 97410 - protein, 106 aa, Homo sapiens
  Payload ID: 19426
  Gene Name: WD repeat domain 47
  ENSP ID: ENSP00000433452
MTAEETVNVKEVEIIKLILDFLNSKKLHISMLALEKESGVINGLFSDDMLFLRQLILDGQWDEVLQFIQPLECMEKFDKKRFRYIILKQKFLEALCVNNAMSAEDE

SEQ ID NO: 97411 - protein, 173 aa, Homo sapiens
  Payload ID: 19426
  Gene Name: WD repeat domain 47
  ENSP ID: ENSP00000434289
MTAEETVNVKEVEIIKLILDFLNSKKLHISMLALEKESGVINGLFSDDMLFLRQLILDGQWDEVLQFIQPLECMEKFDKKRFRYIILKQKFLEALCVNNAMSAEDEPQHLEFTMQEAVQCLHALEEYCPSKDDYSKLCLLLTLPRLTNHAEFKDWNPSTARVHCFEEACVMVA

SEQ ID NO: 97412 - protein, 56 aa, Homo sapiens
  Payload ID: 19426
  Gene Name: WD repeat domain 47
  ENSP ID: ENSP00000434868
MSAEDEPQHLEFTMQEAVQCLHALEEYCPSKDDYSKLCLLLTLPRLTNHAEFKDWN

SEQ ID NO: 97413 - protein, 93 aa, Homo sapiens
  Payload ID: 19426
  Gene Name: WD repeat domain 47
  ENSP ID: ENSP00000437171
MEKFDKKRFRYIILKQKFLEALCVNNAMSAEDEPQHLEFTMQEAVQCLHALEEYCPSKDDYSKLCLLLTLPRLTNHAEFKDWNPSTARVHCFE

SEQ ID NO: 97414 - protein, 677 aa, Homo sapiens
  Payload ID: 19427
  Gene Name: WD repeat domain 48
  Uniprot ID: Q8TAF3
  ENSP ID: ENSP00000307491
MAAHHRQNTAGRRKVQVSYVIRDEVEKYNRNGVNALQLDPALNRLFTAGRDSIIRIWSVNQHKQDPYIASMEHHTDWVNDIVLCCNGKTLISASSDTTVKVWNAHKGFCMSTLRTHKDYVKALAYAKDKELVASAGLDRQIFLWDVNTLTALTASNNTVTTSSLSGNKDSIYSLAMNQLGTIIVSGSTEKVLRVWDPRTCAKLMKLKGHTDNVKALLLNRDGTQCLSGSSDGTIRLWSLGQQRCIATYRVHDEGVWALQVNDAFTHVYSGGRDRKIYCTDLRNPDIRVLICEEKAPVLKMELDRSADPPPAIWVATTKSTVNKWTLKGIHNFRASGDYDNDCTNPITPLCTQPDQVIKGGASIIQCHILNDKRHILTKDTNNNVAYWDVLKACKVEDLGKVDFEDEIKKRFKMVYVPNWFSVDLKTGMLTITLDESDCFAAWVSAKDAGFSSPDGSDPKLNLGGLLLQALLEYWPRTHVNPMDEEENEVNHVNGEQENRVQKGNGYFQVPPHTPVIFGEAGGRTLFRLLCRDSGGETESMLLNETVPQWVIDITVDKNMPKFNKIPFYLQPHASSGAKTLKKDRLSASDMLQVRKVMEHVYEKIINLDNESQTTSSSNNEKPGEQEKEEDIAVLAEEKIELLCQDQVLDPNMDLRTVKHFIWKSGGDLTLHYRQKST

SEQ ID NO: 97415 - protein, 63 aa, Homo sapiens
  Payload ID: 19427
  Gene Name: WD repeat domain 48
  ENSP ID: ENSP00000388720
MAAHHRQNTAGRRKVQVSYVIRDEVEKYNRNGVNALQLDPALNRLFTAGRDSIIRIWSVNQHK

SEQ ID NO: 97416 - protein, 134 aa, Homo sapiens
  Payload ID: 19427
  Gene Name: WD repeat domain 48
  ENSP ID: ENSP00000401421
MAAHHRQNTAGRRKVQVSYVIRDEVEKYNRNGVNALQLDPALNRLFTAGRDSIIRIWSVNQHKQDPYIASMEHHTDWVNDIVLCCNGKTLISASSDTTVKVWNAHKGFCMSTLRTHKYVCSITGLRKGLSICQG

SEQ ID NO: 97417 - protein, 74 aa, Homo sapiens
  Payload ID: 19427
  Gene Name: WD repeat domain 48
  ENSP ID: ENSP00000406025
MAAHHRQNTAGRRKVQVSYVIRDEVEKYNRNGVNALQLDPALNRLFTAGRDSIIRIWSVNQHKDFSFNFSKIHI

SEQ ID NO: 97418 - protein, 120 aa, Homo sapiens
  Payload ID: 19427
  Gene Name: WD repeat domain 48
  ENSP ID: ENSP00000415963
MAAHHRQNTAGRRKVQVSYVIRDEVEKYNRNGVNALQLDPALNRLFTAGRDSIIRIWSVNQHKQDPYIASMEHHTDWVNDIVLCCNGKTLISASSDTTVKVWNAHKGFCMSTLRTHKLLL

SEQ ID NO: 97419 - protein, 162 aa, Homo sapiens
  Payload ID: 19427
  Gene Name: WD repeat domain 48
  ENSP ID: ENSP00000416900
MEHHTDWVNDIVLCCNGKTLISASSDTTVKVWNAHKGFCMSTLRTHKDYVKALAYAKDKELVASAGLDRQIFLWDVNTLTALTASNNTVTTSSLSGNKDSIYSLAMNQLGTIIVSGSTEKVLRVWDPRTCAKLMKLKGHTDNVKALLLNRDGTQCLSGSSDG

SEQ ID NO: 97420 - protein, 697 aa, Homo sapiens
  Payload ID: 19428
  Gene Name: WD repeat domain 49
  Uniprot ID: Q8IV35
  ENSP ID: ENSP00000311343
MAWREKSKKRLNMTSFNIAQGIHAFDYHSRLNLIATAGINNKVCLWNPYVVSKPVGVLWGHSASVIAVQFFVERKQLFSFSKDKVLRLWDIQHQLSIQRIACSFPKSQDFRCLFHFDEAHGRLFISFNNQLALLAMKSEASKRVKSHEKAVTCVLYNSILKQVISSDTGSTVSFWMIDTGQKIKQFTGCHGNAEISTMALDANETRLLTGSTDGTVKIWDFNGYCHHTLNVGQDGAVDISQILILKKKILVTGWERAITVFRPQNFNQFFIQPEEWKGGIQHHDDILCAAFLPPQTLVTGSYDGEIVLWNNSTENAHHVLHPDYQRLLKSKLDTKPQKLLSAGRSQPSHPMADHSTTGVRNFEIDTEGKNAVMRLCFLKARKNTAVTGGANLVSCGGSGYVRFWDIYKKQLLAEFLAHSGVGSIIMSTDKMNRYLTTGDLDGWLKIWNIEEYCLNSSKNKITKAPTLIRSFQPHEDRISSLEMCEPGGQLLIISSSADCSICVTGVCNAPVWIFGQAKHWHIENCLFLPKRDTNLVESEIQKEISLFSKEESCLDPTEHSLLNKKNKDDSTYNVRPSEDINLDIKYKERSTCMKETQKPYYGEVIKKSFSTFRSLNIGALEELPEVNKPAFLLDPEKYFRKEPEEERPQILEAPSLFKTLKAVFDEKNLFPKEILHHERKAKQLCQEKSCEVKKNKK

SEQ ID NO: 97421 - protein, 61 aa, Homo sapiens
  Payload ID: 19428
  Gene Name: WD repeat domain 49
  ENSP ID: ENSP00000417090
MSCQKAVLELNIGSQLGPKSPERTEGVTAFEDYGTGLLENQLSVGDFVKIQKAFELLTMHL

SEQ ID NO: 97422 - protein, 139 aa, Homo sapiens
  Payload ID: 19428
  Gene Name: WD repeat domain 49
  ENSP ID: ENSP00000418539
  MOD_RES (1)..(1): Any amino acid
XIDTEGKNAVMRLCFLKARKNTAVTGGANLVSCGGSGYVRFWDIYKKQLLAEFLAHSGVGSIIMSTDKMNRYLTTGDLDGWLKIWNIEAKHWHIENCLFLPKRDTNLVESEIQKEISLFSKEESCLDPTEHSLLNKKNK

SEQ ID NO: 97423 - protein, 118 aa, Homo sapiens
  Payload ID: 19428
  Gene Name: WD repeat domain 49
  ENSP ID: ENSP00000418718
MSCQKAVLELNIGSQLGPKSPERTEGVTAFEDYGTGLLENQLSVGDFVKIQKAFEVISSDTGSTVSFWMIDTGQKIKQFTGCHGNAEISTMALDANETRLLTGSTDGTVKIWDFNGYC

SEQ ID NO: 97424 - protein, 674 aa, Homo sapiens
  Payload ID: 19428
  Gene Name: WD repeat domain 49
  ENSP ID: ENSP00000419130
  MOD_RES (1)..(1): Any amino acid
XPASACEDGEATMTINWAELLSGCHKCCHILEHKLHQGDWVRQVTYNASLDAIISSTTSNTNSVVMAWREKSKKRLNMTSFNIAQGIHAFDYHSRLNLIATAGINNKVCLWNPYVVSKPVGVLWGHSASVIAVQFFVERKQLFSFSKDKVLRLWDIQHQLSIQRIACSFPKSQDFRCLFHFDEAHGRLFISFNNQLALLAMKSEASKRVKSHEKAVTCVLYNSILKQVISSDTGSTVSFWMIDTGQKIKQFTGCHGNAEISTMALDANETRLLTGSTDGTVKIWDFNGYCHHTLNVGQDGAVDISQILILKKKILVTGWERYDYASWKTIGRAITVFRPQNFNQFFIQPEEWKGGIQHHDDILCAAFLPPQTLVTGSYDGEIVLWNNSTENAHHVLHPDYQRLLKSKLDTKPQKLLSAGRSQPSHPMADHSTTGVRNFEIDTEGKNAVMRLCFLKARKNTAVTGGANLVSCGGSGYVRFWDIYKKQLLAEFLAHSGVGSIIMSTDKMNRYLTTGDLDGWLKIWNIEEESCLDPTEHSLLNKKNKDDSTYNVRPSEDINLDIKYKERSTCMKETQKPYYGEVIKKSFSTFRSLNIGALEELPEVNKPAFLLDPEKYFRKEPEEERPQILEAPSLFKTLKAVFDEKNLFPKEILHHERKAKQLCQEKSCEVKKNKK

SEQ ID NO: 97425 - protein, 518 aa, Homo sapiens
  Payload ID: 19428
  Gene Name: WD repeat domain 49
  ENSP ID: ENSP00000419749
MSCQKAVLELNIGSQLGPKSPERTEGVTAFEDYGTGLLENQLSVGDFVKIQKAFESPQPRKIICMSREDFTQKMTEIVGWGTKEEYGELFDKVDVAQDGFINWDKLTSFILLELYEQDERAKATVVPQWKDLEFLPVKHKDTIQKVIFLKNSSHYLTISKEGLLAIWGEHLKLQETFPITSDATKLKHLWVTSLVSLENVNKIAVAFTSKEVCFYDLLSKEEFACQYKLQGLKGTPICMDYWYDPLDANESILSFGDITGKVQAIAFTAALISLFERPASACEDGEATMTINWAELLSGCHKCCHILEHKLHQGDWVRQVTYNASLDAIISSTTSNTNSVVMAWREKSKKRLNMTSFNIAQGIHAFDYHSRLNLIATAGINNKVCLWNPYVVSKPVGVLWGHSASVIAVQFFVERKQLFSFSKDKVLRLWDIQHQLSIQRIACSFPKSQDFRCLFHFDEAHGRLFISFNNQLALLAMKSEASKRVKSHEKAVTCVLYNSILKQPSQCEDDTNEDPYDN

SEQ ID NO: 97426 - protein, 113 aa, Homo sapiens
  Payload ID: 19428
  Gene Name: WD repeat domain 49
  ENSP ID: ENSP00000419917
MSCQKAVLELNIGSQLGPKSPERTEGVTAFEDYGTGLLENQLSVGDFVKIQKAFEIAVAFTSKEVCFYDLLSKEEFACQYKLQGLKGTPICMDYWYDPLDANESILSFGDITG

SEQ ID NO: 97427 - protein, 334 aa, Homo sapiens
  Payload ID: 19429
  Gene Name: WD repeat domain 5
  Uniprot ID: P61964
  ENSP ID: ENSP00000351446
MATEEKKPETEAARAQPTPSSSATQSKPTPVKPNYALKFTLAGHTKAVSSVKFSPNGEWLASSSADKLIKIWGAYDGKFEKTISGHKLGISDVAWSSDSNLLVSASDDKTLKIWDVSSGKCLKTLKGHSNYVFCCNFNPQSNLIVSGSFDESVRIWDVKTGKCLKTLPAHSDPVSAVHFNRDGSLIVSSSYDGLCRIWDTASGQCLKTLIDDDNPPVSFVKFSPNGKYILAATLDNTLKLWDYSKGKCLKTYTGHKNEKYCIFANFSVTGGKWIVSGSEDNLVYIWNLQTKEIVQKLQGHTDVVISTACHPTENIIASAALENDKTIKLWKSDC

SEQ ID NO: 97428 - protein, 56 aa, Homo sapiens
  Payload ID: 19429
  Gene Name: WD repeat domain 5
  ENSP ID: ENSP00000477000
MATEEKKPETEAARAQPTPSSSATQSKPTPVKPNYALKFTLAGHTKAVSSVKFSPN

SEQ ID NO: 97429 - protein, 96 aa, Homo sapiens
  Payload ID: 19429
  Gene Name: WD repeat domain 5
  ENSP ID: ENSP00000477449
MATEEKKPETEAARAQPTPSSSATQSKPTPVKPNYALKFTLAGHTKAVSSVKFSPNGEWLASSSADKLIKIWGAYDGKFEKTISGHKLGISDVAWS

SEQ ID NO: 97430 - protein, 358 aa, Homo sapiens
  Payload ID: 19430
  Gene Name: WD repeat domain 53
  Uniprot ID: Q7Z5U6
  ENSP ID: ENSP00000328079
MAVKWTGGHSSPVLCLNASKEGLLASGAEGGDLTAWGEDGTPLGHTRFQGADDVTSVLFSPSCPTKLYASHGETISVLDVRSLKDSLDHFHVNEEEINCLSLNQTENLLASADDSGAIKILDLENKKVIRSLKRHSNICSSVAFRPQRPQSLVSCGLDMQVMLWSLQKARPLWITNLQEDETEEMEGPQSPGQLLNPALAHSISVASCGNIFSCGAEDGKVRIFRVMGVKCEQELGFKGHTSGVSQVCFLPESYLLLTGGNDGKITLWDANSEVEKKQKSPTKRTHRKKPKRGTCTKQGGNTNASVTDEEEHGNILPKLNIEHGEKVNWLLGTKIKGHQNILVADQTSCISVYPLNEF

SEQ ID NO: 97431 - protein, 154 aa, Homo sapiens
  Payload ID: 19430
  Gene Name: WD repeat domain 53
  ENSP ID: ENSP00000396248
MAVKWTGGHSSPVLCLNASKEGLLASGAEGGDLTAWGEDGTPLGHTRFQGADDVTSVLFSPSCPTKLYASHGETISVLDVRSLKDSLDHFHVNEEEINCLSLNQTENLLASADDSGAIKILDLENKKVIRSLKRHSNICSSVAFRPQRPQSLVS

SEQ ID NO: 97432 - protein, 197 aa, Homo sapiens
  Payload ID: 19430
  Gene Name: WD repeat domain 53
  ENSP ID: ENSP00000396668
MLWSLQKARPLWITNLQEDETEEMEGPQSPGQLLNPALAHSISVASCGNIFSCGAEDGKVRIFRVMGVKCEQELGFKGHTSGVSQVCFLPESYLLLTGGNDGKITLWDANSEVEKKQKSPTKRTHRKKPKRGTCTKQGGNTNASVTDEEEHGNILPKLNIEHGEKVNWLLGTKIKGHQNILVADQTSCISVYPLNEF

SEQ ID NO: 97433 - protein, 160 aa, Homo sapiens
  Payload ID: 19430
  Gene Name: WD repeat domain 53
  ENSP ID: ENSP00000408087
MAVKWTGGHSSPVLCLNASKEGLLASGAEGGDLTAWGEDGTPLGHTRFQGADDVTSVLFSPSCPTKLYASHGETISVLDVRSLKDSLDHFHVNEEEINCLSLNQTENLLASADDSGAIKILDLENKKVIRSLKRHSNICSSVAFRPQRPQSLVSCGLDMQ

SEQ ID NO: 97434 - protein, 199 aa, Homo sapiens
  Payload ID: 19430
  Gene Name: WD repeat domain 53
  ENSP ID: ENSP00000410677
MVMLWSLQKARPLWITNLQEDETEEMEGPQSPGQLLNPALAHSISVASCGNIFSCGAEDGKVRIFRVMGVKCEQELGFKGHTSGVSQVCFLPESYLLLTGGNDGKITLWDANSEVEKKQKSPTKRTHRKKPKRGTCTKQGGNTNASVTDEEEHGNILPKLNIEHGEKVNWLLGTKIKGHQNILVADQTSCISVYPLNEF

SEQ ID NO: 97435 - protein, 334 aa, Homo sapiens
  Payload ID: 19431
  Gene Name: WD repeat domain 54
  Uniprot ID: Q9H977
  ENSP ID: ENSP00000006526
MFRWERSIPLRGSAAALCNNLSVLQLPARNLTYFGVVHGPSAQLLSAAPEGVPLAQRQLHAKEGAGVSPPLITQVHWCVLPFRVLLVLTSHRGIQMYESNGYTMVYWHALDSGDASPVQAVFARGIAASGHFICVGTWSGRVLVFDIPAKGPNIVLSEELAGHQMPITDIATEPAQGQDCVADMVTADDSGLLCVWRSGPEFTLLTRIPGFGVPCPSVQLWQGIIAAGYGNGQVHLYEATTGNLHVQINAHARAICALDLASEVGKLLSAGEDTFVHIWKLSRNPESGYIEVEHCHGECVADTQLCGARFCDSSGNSFAVTGYDLAEIRRFSSV

SEQ ID NO: 97436 - protein, 244 aa, Homo sapiens
  Payload ID: 19431
  Gene Name: WD repeat domain 54
  ENSP ID: ENSP00000387236
MVAADLEGPYEPGVRRADLGLQVHWCVLPFRVLLVLTSHRGIQMYESNGYTMVYWHALDSGDASPVQAVFARGIAASGHFICVGTWSGRVLVFDIPAKGPNIVLSEELAGHQMPITDIATEPAQGQDCVADMVTADDSGLLCVWRSGPEFTLLTRIPGFGVPCPSVQLWQGIIAAGYGNGQVHLYEATTGNLHVQINAHARAICALDLASEVGKLLSAGEDTFVHIWKLSRNPESGYIEATPLL

SEQ ID NO: 97437 - protein, 162 aa, Homo sapiens
  Payload ID: 19431
  Gene Name: WD repeat domain 54
  ENSP ID: ENSP00000406606
MFRWERSIPLRGSAAALCNNLSVLQLPARNLTYFGVVHGPSAQLLSAAPEGVPLAQRQLHAKEGAGVSPPLITQVHWCVLPFRVLLVLTSHRGIQMYESNGYTMVYWHALDSGDASPGTWSGRVLVFDIPAKGPNIVLSEELAGHQMPITDIATEPAQGQVS

SEQ ID NO: 97438 - protein, 383 aa, Homo sapiens
  Payload ID: 19432
  Gene Name: WD repeat domain 55
  Uniprot ID: Q9H6Y2
  ENSP ID: ENSP00000351100
MDRTCEERPAEDGSDEEDPDSMEAPTRIRDTPEDIVLEAPASGLAFHPARDLLAAGDVDGDVFVFSYSCQEGETKELWSSGHHLKACRAVAFSEDGQKLITVSKDKAIHVLDVEQGQLERRVSKAHGAPINSLLLVDENVLATGDDTGGICLWDQRKEGPLMDMRQHEEYIADMALDPAKKLLLTASGDGCLGIFNIKRRRFELLSEPQSGDLTSVTLMKWGKKVACGSSEGTIYLFNWNGFGATSDRFALRAESIDCMVPVTESLLCTGSTDGVIRAVNILPNRVVGSVGQHTGEPVEELALSHCGRFLASSGHDQRLKFWDMAQLRAVVVDDYRRRKKKGGPLRALSSKTWSTDDFFAGLREEGEDSMAQEEKEETGDDSD

SEQ ID NO: 97439 - protein, 137 aa, Homo sapiens
  Payload ID: 19432
  Gene Name: WD repeat domain 55
  ENSP ID: ENSP00000426304
MDRTCEERPAEDGSDEEDPDSMEAPTRIRDTPEDIVLEAPASGLAFHPARDLLAAGDVDGDVFVFSYSCQEGETKELWSSGHHLKACRAVAFSEDGQSEYWGRQPAMWWKGAVSSTMTWAPFPQSSLLSPRTKPSMF

SEQ ID NO: 97440 - protein, 222 aa, Homo sapiens
  Payload ID: 19432
  Gene Name: WD repeat domain 55
  ENSP ID: ENSP00000439719
MDMRQHEEYIADMALDPAKKLLLTASGDGCLGIFNIKRRRFELLSEPQSGDLTSVTLMKWGKKVACGSSEGTIYLFNWNGFGATSDRFALRAESIDCMVPVTESLLCTGSTDGVIRAVNILPNRVVGSVGQHTGEPVEELALSHCGRFLASSGHDQRLKFWDMAQLRAVVVDDYRRRKKKGGPLRALSSKTWSTDDFFAGLREEGEDSMAQEEKEETGDDSD

SEQ ID NO: 97441 - protein, 974 aa, Homo sapiens
  Payload ID: 19433
  Gene Name: WD repeat domain 59
  Uniprot ID: Q6PJI9
  ENSP ID: ENSP00000262144
MAARWSSENVVVEFRDSQATAMSVDCLGQHAVLSGRRFLYIVNLDAPFEGHRKISRQSKWDIGAVQWNPHDSFAHYFAASSNQRVDLYKWKDGSGEVGTTLQGHTRVISDLDWAVFEPDLLVTSSVDTYIYIWDIKDTRKPTVALSAVAGASQVKWNKKNANCLATSHDGDVRIWDKRKPSTAVEYLAAHLSKIHGLDWHPDSEHILATSSQDNSVKFWDYRQPRKYLNILPCQVPVWKARYTPFSNGLVTVMVPQLRRENSLLLWNVFDLNTPVHTFVGHDDVVLEFQWRKQKEGSKDYQLVTWSRDQTLRMWRVDSQMQRLCANDILDGVDEFIESISLLPEPEKTLHTEDTDHQHTASHGEEEALKEDPPRNLLEERKSDQLGLPQTLQQEFSLINVQIRNVNVEMDAADRSCTVSVHCSNHRVKMLVKFPAQYPNNAAPSFQFINPTTITSTMKAKLLKILKDTALQKVKRGQSCLEPCLRQLVSCLESFVNQEDSASSNPFALPNSVTPPLPTFARVTTAYGSYQDANIPFPRTSGARFCGAGYLVYFTRPMTMHRAVSPTEPTPRSLSALSAYHTGLIAPMKIRTEAPGNLRLYSGSPTRSEKEQVSISSFYYKERKSRRWKSKREGSDSGNRQIKAAGKVIIQDIACLLPVHKSLGELYILNVNDIQETCQKNAASALLVGRKDLVQVWSLATVATDLCLGPKSDPDLETPWARHPFGRQLLESLLAHYCRLRDVQTLAMLCSVFEAQSRPQGLPNPFGPFPNRSSNLVVSHSRYPSFTSSGSCSSMSDPGLNTGGWNIAGREAEHLSSPWGESSPEELRFGSLTYSDPRERERDQHDKNKRLLDPANTQQFDDFKKCYGEILYRWGLREKRAEVLKFVSCPPDPHKGIEFGVYCSHCRSEVRGTQCAICKGFTFQCAICHVAVRGSSNFCLTCGHGGHTSHMMEWFRTQEVCPTGCGCHCLLESTF

SEQ ID NO: 97442 - protein, 300 aa, Homo sapiens
  Payload ID: 19433
  Gene Name: WD repeat domain 59
  ENSP ID: ENSP00000454382
  MOD_RES (1)..(1): Any amino acid
XTITSTMKAKLLKILKDTALQKVKRGQSCLEPCLRQLVSCLESFVNQEDSASSNPFALPNSVTPPLPTFARVTTAYGSYQDANIPFPRTSGARFCGAGYLVYFTRPMTMHRAVSPTEPTPRSLSALSAYHTGLIAPMKIRTEAPGNLRLYSGSPTRSEKEQVSISSFYYKERMSPRSARRRWSIQAINDFPKSRRWKSKREGSDSGNRQIKAAGKVIIQDIACLLPVHKSLGELYILNVNDIQETCQKNAASALLVGRKDLVQVWSLATVATDLCLGPKSDPDLETPWARHPFGRQLLES

SEQ ID NO: 97443 - protein, 217 aa, Homo sapiens
  Payload ID: 19433
  Gene Name: WD repeat domain 59
  ENSP ID: ENSP00000455060
  MOD_RES (1)..(1): Any amino acid
XLYSGSPTRSEKEQVSISSFYYKERKSRRWKSKREGSDSGNRQIKAAGKVIIQDIACLLPVHKSLGELYILNVNDIQETCQKNAASALLVGRKDLVQPSFTSSGSCSSMSDPGLNTGGWNIAGREAEHLSSPWGESSPEELRFGSLTYSDPRERERDQHDKNKRLLDPANTQQFDDFKKCYGEILYRWGLREKRAEVLKFVSCPPDPHKGIEFGVYC

SEQ ID NO: 97444 - protein, 156 aa, Homo sapiens
  Payload ID: 19433
  Gene Name: WD repeat domain 59
  ENSP ID: ENSP00000456139
MSVDCLGQHAVLSGRRFLYIVNLDAPFEGHRKISRQSKWDIGAVQWNPHDSFAHYFAASSNQRVDLYKWKDGSGEVGTTLQGHTRVISDLDWAVFEPDLLVTSSVDTYIYIWDIKDTRKPTVALSAVAGASQVKWNKKNANCLATSHDGDVRIWDK

SEQ ID NO: 97445 - protein, 35 aa, Homo sapiens
  Payload ID: 19433
  Gene Name: WD repeat domain 59
  ENSP ID: ENSP00000457605
MAARWSSENVVVEFRDSQATAMSVDCLGQHAVLSG

SEQ ID NO: 97446 - protein, 47 aa, Homo sapiens
  Payload ID: 19433
  Gene Name: WD repeat domain 59
  ENSP ID: ENSP00000457978
TPPLPTFARVTTAYGSYQDANIPFPRTSGARFCGADLSQPCLLITLA

SEQ ID NO: 97447 - protein, 458 aa, Homo sapiens
  Payload ID: 19433
  Gene Name: WD repeat domain 59
  ENSP ID: ENSP00000481730
MSVDCLGQHAVLSGRRFLYIVNLDAPFEGHRKISRQSKWDIGAVQWNPHDSFAHYFAASSNQRVDLYKWKDGSGEVGTTLQGHTRVISDLDWAVFEPDLLVTSSVDTYIYIWDIKDTRKPTVALSAVAGASQVKWNKKNANCLATSHDGDVRIWDKRKPSTAVEYLAAHLSKIHGLDWHPDSEHILATSSQDNSVKFWDYRQPRKYLNILPCQVPVWKARYTPFSNGLVTVMVPQLRRENSLLLWNVFDLNTPVHTFVGHDDVVLEFQWRKQKEGSKDYQLVTWSRDQTLRMWRVDSQMQRLCANDILDGVDEFIESISLLPEPEKTLHTEDTDHQHTASHGEEEALKEDPPRNLLEERKSDQLGLPQTLQQEFSLINVQIRNVNVEMDAADRSCTVSVHCSNHRVKMLVKFPAQYPNNAAPSFQFINPTTITSTMKAKLLKVGVWVPKFSLLFCIIV

SEQ ID NO: 97448 - protein, 571 aa, Homo sapiens
  Payload ID: 19433
  Gene Name: WD repeat domain 59
  Uniprot ID: Q6PJI9
  ENSP ID: ENSP00000482446
MAARWSSENVVVEFRDSQATAMSVDCLGQHAVLSGRRFLYIVNLDAPFEGHRKISRQSKWDIGAVQWNPHDSFAHYFAASSNQRVDLYKWKDGSGEVGTTLQGHTRVISDLDWAVFEPDLLVTSSVDTYIYIWDIKDTRKPTVALSAVAGASQVKWNKKNANCLATSHDGDVRIWDKRKPSTAVEYLAAHLSKIHGLDWHPDSEHILATSSQDNSVKFWDYRQPRKYLNILPCQVPVWKARYTPFSNGLVTVMVPQLRRENSLLLWNVFDLNTPVHTFVGHDDVVLEFQWRKQKEGSKDYQLVTWSRDQTLRMWRVDSQMQRLCANDILDGVDEFIESISLLPEPEKTLHTEDTDHQHTASHGEEEALKEDPPRNLLEERKSDQLGLPQTLQQEFSLINVQIRNVNVEMDAADRSCTVSVHCSNHRVKMLVKFPAQYPNNAAPSFQFINPTTITSTMKAKLLKILKDTALQKVKRGQSCLEPCLRQLVSCLESFVNQEDSASSNPFALPNSVTPPLPTFARVTTAYGSYQDANIPFPRTSGARFCGAGYLVYFTRPMTMHRAVSPTEPTPR

SEQ ID NO: 97449 - protein, 330 aa, Homo sapiens
  Payload ID: 19434
  Gene Name: WD repeat domain 5B
  Uniprot ID: Q86VZ2
  ENSP ID: ENSP00000330381
MATKESRDAKAQLALSSSANQSKEVPENPNYALKCTLVGHTEAVSSVKFSPNGEWLASSSADRLIIIWGAYDGKYEKTLYGHNLEISDVAWSSDSSRLVSASDDKTLKLWDVRSGKCLKTLKGHSNYVFCCNFNPPSNLIISGSFDETVKIWEVKTGKCLKTLSAHSDPVSAVHFNCSGSLIVSGSYDGLCRIWDAASGQCLKTLVDDDNPPVSFVKFSPNGKYILTATLDNTLKLWDYSRGRCLKTYTGHKNEKYCIFANFSVTGGKWIVSGSEDNLVYIWNLQTKEIVQKLQGHTDVVISAACHPTENLIASAALENDKTIKLWMSNH

SEQ ID NO: 97450 - protein, 1151 aa, Homo sapiens
  Payload ID: 19435
  Gene Name: WD repeat domain 6
  ENSP ID: ENSP00000378857
MGSAARWEGSFSREFSSLLSRGCLSTSRIDMDALEDYVWPRATSELILLPVTGLECVGDRLLAGEGPDVLVYSLDFGGHLRMIKRVQNLLGHYLIHGFRVRPEPNGDLDLEAMVAVFGSKGLRVVKISWGQGHFWELWRSGLWNMSDWIWDARWLEGNIALALGHNSVVLYDPVVGCILQEVPCTDRCTLSSACLIGDAWKELTIVAGAVSNQLLVWYPATALADNKPVAPDRRISGHVGIIFSMSYLESKGLLATASEDRSVRIWKVGDLRVPGGRVQNIGHCFGHSARVWQVKLLENYLISAGEDCVCLVWSHEGEILQAFRGHQGRGIRAIAAHERQAWVITGGDDSGIRLWHLVGRGYRGLGVSALCFKSRSRPGTLKAVTLAGSWRLLAVTDTGALYLYDVEVKCWEQLLEDKHFQSYCLLEAAPGPEGFGLCAMANGEGRVKVVPINTPTAAVDQTLFPGKVHSLSWALRGYEELLLLASGPGGVVACLEISAAPSGKAIFVKERCRYLLPPSKQRWHTCSAFLPPGDFLVCGDRRGSVLLFPSRPGLLKDPGVGGKARAGAGAPVVGSGSSGGGNAFTGLGPVSTLPSLHGKQGVTSVTCHGGYVYTTGRDGAYYQLFVRDGQLQPVLRQKSCRGMNWLAGLRIVPDGSMVILGFHANEFVVWNPRSHEKLHIVNCGGGHRSWAFSDTEAAMAFAYLKDGDVMLYRALGGCTRPHVILREGLHGREITCVKRVGTITLGPEYGVPSFMQPDDLEPGSEGPDLTDIVITCSEDTTVCVLALPTTTGSAHALTAVCNHISSVRAVAVWGIGTPGGPQDPQPGLTAHVVSAGGRAEMHCFSIMVTPDPSTPSRLACHVMHLSSHRLDEYWDRQRNRHRMVKVDPETRYMSLAVCELDQPGLGPLVAAACSDGAVRLFLLQDSGRILQLLAETFHHKRCVLKVHSFTHEAPNQRRRLLLCSAATDGSLAFWDLTTMLDHDSTVLEPPVDPGLPYRLGTPSLTLQAHSCGINSLHTLPTREGHHLVASGSEDGSLHVFVLAVEMLQLEEAVGEAGLVPQLRVLEEYSVPCAHAAHVTGLKILSPSIMVSASIDQRLTFWRLGHGEPTFMNSTVFHVPDVADMDCWPVSPEFGHRCALGGQGLEVYNWYD

SEQ ID NO: 97451 - protein, 271 aa, Homo sapiens
  Payload ID: 19435
  Gene Name: WD repeat domain 6
  ENSP ID: ENSP00000387692
MDALEDYVWPRATSELILLPVTGLECVGDRLLAESGFGFPKCPDYRREPPHPAETKDFLRFKLQDCEGPDVLVYSLDFGGHLRMIKRVQNLLGHYLIHGFRVRPEPNGDLDLEAMVAVFGSKGLRVVKISWGQGHFWELWRSGLWNMSDWIWDARWLEGNIALALGHNSVVLYDPVVGCILQEVPCTDRCTLSSACLIGDAWKELTIVAGAVSNQLLVWYPATALADNKPVAPDRRISGHVGIIFSMSYLESKGLLATASEDRSVRIWKVG

SEQ ID NO: 97452 - protein, 99 aa, Homo sapiens
  Payload ID: 19435
  Gene Name: WD repeat domain 6
  ENSP ID: ENSP00000390740
MALCLYLGEGPDVLVYSLDFGGHLRMIKRVQNLLGHYLIHGFRVRPEPNGDLDLEAMVAVFGSKGLRVVKISWGQGHFWELWRSGLWNMSDWIWDARWL

SEQ ID NO: 97453 - protein, 61 aa, Homo sapiens
  Payload ID: 19435
  Gene Name: WD repeat domain 6
  ENSP ID: ENSP00000395993
MDALEDYVWPRATSELILLPVTGLECVGDRLLAGWSAVARSRLPATSASQVQVILLPQPPE

SEQ ID NO: 97454 - protein, 569 aa, Homo sapiens
  Payload ID: 19435
  Gene Name: WD repeat domain 6
  ENSP ID: ENSP00000412195
MDALEDYVWPRATSELILLPVTGLECVGDRLLAGRDGAYYQLFVRDGQLQPVLRQKSCRGMNWLAGLRIVPDGSMVILGFHANEFVVWNPRSHEKLHIVNCGGGHRSWAFSDTEAAMAFAYLKDGDVMLYRALGGCTRPHVILREGLHGREITCVKRVGTITLGPEYGVPSFMQPDDLEPGSEGPDLTDIVITCSEDTTVCVLALPTTTGSAHALTAVCNHISSVRAVAVWGIGTPGGPQDPQPGLTAHVVSAGGRAEMHCFSIMVTPDPSTPSRLACHVMHLSSHRLDEYWDRQRNRHRMVKVDPETRYMSLAVCELDQPGLGPLVAAACSDGAVRLFLLQDSGRILQLLAETFHHKRCVLKVHSFTHEAPNQRRRLLLCSAATDGSLAFWDLTTMLDHDSTVLEPPVDPGLPYRLGTPSLTLQAHSCGINSLHTLPTREGHHLVASGSEDGSLHVFVLAVEMLQLEEAVGEAGLVPQLRVLEEYSVPCAHAAHVTGLKILSPSIMVSASIDQRLTFWRLGHGEPTFMNSTVFHVPDVADMDCWPVSPEFGHRCALGGQGLEVYNWYD

SEQ ID NO: 97455 - protein, 1070 aa, Homo sapiens
  Payload ID: 19435
  Gene Name: WD repeat domain 6
  ENSP ID: ENSP00000413432
MIKRVQNLLGHYLIHGFRVRPEPNGDLDLEAMVAVFGSKGLRVVKISWGQGHFWELWRSGLWNMSDWIWDARWLEGNIALALGHNSVVLYDPVVGCILQEVPCTDRCTLSSACLIGDAWKELTIVAGAVSNQLLVWYPATALADNKPVAPDRRISGHVGIIFSMSYLESKGLLATASEDRSVRIWKVGDLRVPGGRVQNIGHCFGHSARVWQVKLLENYLISAGEDCVCLVWSHEGEILQAFRGHQGRGIRAIAAHERQAWVITGGDDSGIRLWHLVGRGYRGLGVSALCFKSRSRPGTLKAVTLAGSWRLLAVTDTGALYLYDVEVKCWEQLLEDKHFQSYCLLEAAPGPEGFGLCAMANGEGRVKVVPINTPTAAVDQTLFPGKVHSLSWALRGYEELLLLASGPGGVVACLEISAAPSGKAIFVKERCRYLLPPSKQRWHTCSAFLPPGDFLVCGDRRGSVLLFPSRPGLLKDPGVGGKARAGAGAPVVGSGSSGGGNAFTGLGPVSTLPSLHGKQGVTSVTCHGGYVYTTGRDGAYYQLFVRDGQLQPVLRQKSCRGMNWLAGLRIVPDGSMVILGFHANEFVVWNPRSHEKLHIVNCGGGHRSWAFSDTEAAMAFAYLKDGDVMLYRALGGCTRPHVILREGLHGREITCVKRVGTITLGPEYGVPSFMQPDDLEPGSEGPDLTDIVITCSEDTTVCVLALPTTTGSAHALTAVCNHISSVRAVAVWGIGTPGGPQDPQPGLTAHVVSAGGRAEMHCFSIMVTPDPSTPSRLACHVMHLSSHRLDEYWDRQRNRHRMVKVDPETRYMSLAVCELDQPGLGPLVAAACSDGAVRLFLLQDSGRILQLLAETFHHKRCVLKVHSFTHEAPNQRRRLLLCSAATDGSLAFWDLTTMLDHDSTVLEPPVDPGLPYRLGTPSLTLQAHSCGINSLHTLPTREGHHLVASGSEDGSLHVFVLAVEMLQLEEAVGEAGLVPQLRVLEEYSVPCAHAAHVTGLKILSPSIMVSASIDQRLTFWRLGHGEPTFMNSTVFHVPDVADMDCWPVSPEFGHRCALGGQGLEVYNWYD

SEQ ID NO: 97456 - protein, 68 aa, Homo sapiens
  Payload ID: 19435
  Gene Name: WD repeat domain 6
  ENSP ID: ENSP00000414157
MDALEDYVWPRATSELILLPVTGLECVGDRLLAESGFGFPKCPDYRREPPHPAETKDFLRFKLQDCVS

SEQ ID NO: 97457 - protein, 125 aa, Homo sapiens
  Payload ID: 19435
  Gene Name: WD repeat domain 6
  ENSP ID: ENSP00000477087
MIKRVQNLLGHYLIHGFRVRPEPNGDLDLEAMVAVFGSKGLRVVKISWGQGHFWELWRSGLWNMSDWIWDARWLEGNIALALGHNSVVLYDPVVGCILQEVPCTDRCTLSSACLIGDAWKELTIV

SEQ ID NO: 97458 - protein, 1121 aa, Homo sapiens
  Payload ID: 19435
  Gene Name: WD repeat domain 6
  Uniprot ID: Q9NNW5
  ENSP ID: ENSP00000477389
MDALEDYVWPRATSELILLPVTGLECVGDRLLAGEGPDVLVYSLDFGGHLRMIKRVQNLLGHYLIHGFRVRPEPNGDLDLEAMVAVFGSKGLRVVKISWGQGHFWELWRSGLWNMSDWIWDARWLEGNIALALGHNSVVLYDPVVGCILQEVPCTDRCTLSSACLIGDAWKELTIVAGAVSNQLLVWYPATALADNKPVAPDRRISGHVGIIFSMSYLESKGLLATASEDRSVRIWKVGDLRVPGGRVQNIGHCFGHSARVWQVKLLENYLISAGEDCVCLVWSHEGEILQAFRGHQGRGIRAIAAHERQAWVITGGDDSGIRLWHLVGRGYRGLGVSALCFKSRSRPGTLKAVTLAGSWRLLAVTDTGALYLYDVEVKCWEQLLEDKHFQSYCLLEAAPGPEGFGLCAMANGEGRVKVVPINTPTAAVDQTLFPGKVHSLSWALRGYEELLLLASGPGGVVACLEISAAPSGKAIFVKERCRYLLPPSKQRWHTCSAFLPPGDFLVCGDRRGSVLLFPSRPGLLKDPGVGGKARAGAGAPVVGSGSSGGGNAFTGLGPVSTLPSLHGKQGVTSVTCHGGYVYTTGRDGAYYQLFVRDGQLQPVLRQKSCRGMNWLAGLRIVPDGSMVILGFHANEFVVWNPRSHEKLHIVNCGGGHRSWAFSDTEAAMAFAYLKDGDVMLYRALGGCTRPHVILREGLHGREITCVKRVGTITLGPEYGVPSFMQPDDLEPGSEGPDLTDIVITCSEDTTVCVLALPTTTGSAHALTAVCNHISSVRAVAVWGIGTPGGPQDPQPGLTAHVVSAGGRAEMHCFSIMVTPDPSTPSRLACHVMHLSSHRLDEYWDRQRNRHRMVKVDPETRYMSLAVCELDQPGLGPLVAAACSDGAVRLFLLQDSGRILQLLAETFHHKRCVLKVHSFTHEAPNQRRRLLLCSAATDGSLAFWDLTTMLDHDSTVLEPPVDPGLPYRLGTPSLTLQAHSCGINSLHTLPTREGHHLVASGSEDGSLHVFVLAVEMLQLEEAVGEAGLVPQLRVLEEYSVPCAHAAHVTGLKILSPSIMVSASIDQRLTFWRLGHGEPTFMNSTVFHVPDVADMDCWPVSPEFGHRCALGGQGLEVYNWYD

SEQ ID NO: 97459 - protein, 31 aa, Homo sapiens
  Payload ID: 19435
  Gene Name: WD repeat domain 6
  ENSP ID: ENSP00000477418
MALCLYLGEGPDVLVYSLDFGGHLRMIKRVQ

SEQ ID NO: 97460 - protein, 35 aa, Homo sapiens
  Payload ID: 19435
  Gene Name: WD repeat domain 6
  ENSP ID: ENSP00000477463
MIKRVQNLLGHYLIHGFRVRPEPNGDLDLEAMVAV

SEQ ID NO: 97461 - protein, 289 aa, Homo sapiens
  Payload ID: 19435
  Gene Name: WD repeat domain 6
  ENSP ID: ENSP00000482289
MHLSSHRLDEYWDRQRNRHRMVKVDPETRYMSLAVCELDQPGLGPLVAAACSDGAVRLFLLQDSGRILQLLAETFHHKRCVLKVHSFTHEAPNQRRRLLLCSAATDGSLAFWDLTTMLDHDSTVLEPPVDPGLPYRLGTPSLTLQAHSCGINSLHTLPTREGHHLVASGSEDGSLHVFVLAVEMLQLEEAVGEAGLVPQLRVLEEYSVPCAHAAHVTGLKILSPSIMVSASIDQRLTFWRLGHGEPTFMNSTVFHVPDVADMDCWPVSPEFGHRCALGGQGLEVYNWYD

SEQ ID NO: 97462 - protein, 1151 aa, Homo sapiens; identical to SEQ ID NO: 97450
  Payload ID: 19435
  Gene Name: WD repeat domain 6
  ENSP ID: ENSP00000484799

SEQ ID NO: 97463 - protein, 68 aa, Homo sapiens; identical to SEQ ID NO: 97456
  Payload ID: 19435
  Gene Name: WD repeat domain 6
  ENSP ID: ENSP00000487056

SEQ ID NO: 97464 - protein, 96 aa, Homo sapiens
  Payload ID: 19436
  Gene Name: WD repeat domain 60
  ENSP ID: ENSP00000380330
MDLPEHKEPRCRDPDQDARSRDRVAEVHTAKESPRGERDRDRQRERRRDAKDREKEKLKEKHREAEKSHSRGKDREKEKDRRARKEELRQTVAHHN

SEQ ID NO: 97465 - protein, 1066 aa, Homo sapiens
  Payload ID: 19436
  Gene Name: WD repeat domain 60
  Uniprot ID: Q8WVS4
  ENSP ID: ENSP00000384290
MEPGKRRTKDDTWKADDLRKHLWAIQSGGSKEERKHREKKLRKESEMDLPEHKEPRCRDPDQDARSRDRVAEVHTAKESPRGERDRDRQRERRRDAKDREKEKLKEKHREAEKSHSRGKDREKEKDRRARKEELRQTVAHHNLLGQETRDRQLLERAERKGRSVSKVRSEEKDEDSERGDEDRERRYRERKLQYGDSKDNPLKYWLYKEEGERRHRKPREPDRDNKHREKSSTREKREKYSKEKSNSFSDKGEERHKEKRHKEGFHFDDERHQSNVDRKEKSAKDEPRKRESQNGEHRNRGASSKRDGTSSQHAENLVRNHGKDKDSRRKHGHEEGSSVWWKLDQRPGGEETVEIEKEETDLENARADAYTASCEDDFEDYEDDFEVCDGDDDESSNEPESREKLEELPLAQKKEIQEIQRAINAENERIGELSLKLFQKRGRTEFEKEPRTDTNSSPSRASVCGIFVDFASASHRQKSRTQALKQKMRSTKLLRLIDLDFSFTFSLLDLPPVNEYDMYIRNFGKKNTKQAYVQCNEDNVERDIQTEEIETREVWTQHPGESTVVSGGSEQRDTSDAVVMPKIDTPRLCSFLRAACQVMAVLLEEDRLAAEPSWNLRAQDRALYFSDSSSQLNTSLPFLQNRKVSSLHTSRVQRQMVVSVHDLPEKSFVPLLDSKYVLCVWDIWQPSGPQKVLICESQVTCCCLSPLKAFLLFAGTAHGSVVVWDLREDSRLHYSVTLSDGFWTFRTATFSTDGILTSVNHRSPLQAVEPISTSVHKKQSFVLSPFSTQEEMSGLSFHIASLDESGVLNVWVVVELPKADIAGSISDLGLMPGGRVKLVHSALIQLGDSLSHKGNEFWGTTQTLNVKFLPSDPNHFIIGTDMGLISHGTRQDLRVAPKLFKPQQHGIRPVKVNVIDFSPFGEPIFLAGCSDGSIRLHQLSSAFPLLQWDSSTDSHAVTGLQWSPTRPAVFLVQDDTSNIYIWDLLQSDLGPVAKQQVSPNRLVAMAAVGEPEKAGGSFLALVLARASGSIDIQHLKRRWAAPEVDECNRLRLLLQEALWPEGKLHK

SEQ ID NO: 97466 - protein, 522 aa, Homo sapiens
  Payload ID: 19436
  Gene Name: WD repeat domain 60
  ENSP ID: ENSP00000392608
DNKHREKSSTREKREKYSKEKSNSFSDKGEERHKEKRHKEGFHFDDERHQSNVDRKEKSAKDEPRKRESQNGEHRNRGASSKRDGTSSQHAENLVRNHGKDKDSRRKHGHEEGSSVWWKLDQRPGGEETVEIEKEETDLENARADAYTASCEDDFEDYEDDFEVCDGDDDESSNEPESREKLEELPLAQKKEIQEIQRAINAENERIGELSLKLFQKRGRTEFEKEPRTDTNSSPSRASVCGIFVDFASASHRQKSRTQALKQKMRSTKLLRLIDLDFSFTFSLLDLPPVNEYDMYIRNFGKKNTKQAYVQCNEDNVERDIQTEEIETREVWTQHPGESTVVSGGSEQRDTSDAVVMPKIDTPRLCSFLRAACQVMAVLLEEDRLAAEPSWNLRAQDRALYFSDSSSQLNTSLPFLQSHVLLLEPFESIFTVCRNSARLSCRLGFERRLKAALLCDAERWLLDVPDRHVFHRWNPYLSKPPKPSSSSRTYLNVRPQKAELCAFTLFYSRRNVRFVLPHRFLG

SEQ ID NO: 97467 - protein, 196 aa, Homo sapiens
  Payload ID: 19436
  Gene Name: WD repeat domain 60
  ENSP ID: ENSP00000399971
SDPNHFIIGTDMGLISHGTRQDLRVAPKLFKPQQHGIRPVKVNVIDFSPFGEPIFLAGCSDGSIRLHQLSSAFPLLQWDSSTDSHAVTGLQWSPTRPAVFLVQDDTSNIYIWDLLQSDLGPVAKQQVSPNRLVAMAAVGEPEKAGGSFLALVLARASGSIDIQHLKRRWAAPEVDECNRLRLLLQEALWPEGKLHK

SEQ ID NO: 97468 - protein, 305 aa, Homo sapiens
  Payload ID: 19437
  Gene Name: WD repeat domain 61
  Uniprot ID: Q9GZS3
  ENSP ID: ENSP00000267973
MTNQYGILFKQEQAHDDAIWSVAWGTNKKENSETVVTGSLDDLVKVWKWRDERLDLQWSLEGHQLGVVSVDISHTLPIAASSSLDAHIRLWDLENGKQIKSIDAGPVDAWTLAFSPDSQYLATGTHVGKVNIFGVESGKKEYSLDTRGKFILSIAYSPDGKYLASGAIDGIINIFDIATGKLLHTLEGHAMPIRSLTFSPDSQLLVTASDDGYIKIYDVQHANLAGTLSGHASWVLNVAFCPDDTHFVSSSSDKSVKVWDVGTRTCVHTFFDHQDQVWGVKYNGNGSKIVSVGDDQEIHIYDCPI

SEQ ID NO: 97469 - protein, 212 aa, Homo sapiens
  Payload ID: 19437
  Gene Name: WD repeat domain 61
  ENSP ID: ENSP00000453024
MTNQYGILFKQEQVDAWTLAFSPDSQYLATGTHVGKVNIFGVESGKKEYSLDTRGKFILSIAYSPDGKYLASGAIDGIINIFDIATGKLLHTLEGHAMPIRSLTFSPDSQLLVTASDDGYIKIYDVQHANLAGTLSGHASWVLNVAFCPDDTHFVSSSSDKSVKVWDVGTRTCVHTFFDHQDQVWGVKYNGNGSKIVSVGDDQEIHIYDCPI

SEQ ID NO: 97470 - protein, 72 aa, Homo sapiens
  Payload ID: 19437
  Gene Name: WD repeat domain 61
  ENSP ID: ENSP00000453118
LLHTLEGHAMPIRSLTFSPDSQLLVTASDDGYIKIYDVCRFLLLSSPTPHASASSLLGAGKLTKHGKLQQCS

SEQ ID NO: 97471 - protein, 48 aa, Homo sapiens
  Payload ID: 19437
  Gene Name: WD repeat domain 61
  ENSP ID: ENSP00000453493
MTNQYGILFKQEQAHDDAIWSVAWGTNKKENSETVVTGSLDDLVKVWK

SEQ ID NO: 97472 - protein, 189 aa, Homo sapiens
  Payload ID: 19437
  Gene Name: WD repeat domain 61
  ENSP ID: ENSP00000453589
MTNQYGILFKQEQAHDDAIWSVAWGTNKKENSETVVTGSLDDLVKVWKWRDERLDLQWSLEGHQLGVVSVDISHTLPIAASSSLDAHIRLWDLENGKQIKSIDAGPVDAWTLAFSPDSQYLATGTHVGKVNIFGVESGKKEYSLDTRGKFILSIAYSPDGKYLASGAIDGIINIFDIATGKLLHTLEGG

SEQ ID NO: 97473 - protein, 305 aa, Homo sapiens; identical to SEQ ID NO: 97468
  Payload ID: 19437
  Gene Name: WD repeat domain 61
  Uniprot ID: Q9GZS3
  ENSP ID: ENSP00000453801

SEQ ID NO: 97474 - protein, 294 aa, Homo sapiens
  Payload ID: 19437
  Gene Name: WD repeat domain 61
  ENSP ID: ENSP00000453902
MTNQYGILFKQEQAHDDAIWSVAWGTNKKENSETVVTGSLDDLVKVWKWRDERLDLQWSLEGHQLGVVSVDISHTLPIAASSSLDAHIRLWDLENGKQIKSIDAGPVDAWTLAFSPDSQYLATGTHVGKVNIFGVESGKKEYSLDTRGKFILSIAYSPDGKYLASGAIDGIINIFDIATGKLLHTLEGHAMPIRSLTFSPDSQLLVTASDDGYIKIYDVQHANLAGTLSGHASWVLNVAFCPDDTHFVSSSSDKSVKVWDVGTRTCVHTFFDHQDQVWGVKYNGNGSKIVSVGD

SEQ ID NO: 97475 - protein, 163 aa, Homo sapiens
  Payload ID: 19437
  Gene Name: WD repeat domain 61
  ENSP ID: ENSP00000455689
  MOD_RES (1)..(1): Any amino acid
XNIFGVESGKKEYSLDTRGKFILSIAYSPDGKYLASGAIDGIINIFDIATGKLLHTLEGHAMPIRSLTFSPDSQLLVTASDDGYIKIYDVQHANLAGTLSGHASWVLNVAFCPDDTHFVSSSSDKSVKVWDVGTRTCVHTFFDHQDQVSLLAALKPYSPCFCF

SEQ ID NO: 97476 - protein, 1518 aa, Homo sapiens
  Payload ID: 19438
  Gene Name: WD repeat domain 62
  Uniprot ID: O43379
  ENSP ID: ENSP00000270301
MAAVGSGGYARNDAGEKLPSVMAGVPARRGQSSPPPAPPICLRRRTRLSTASEETVQNRVSLEKVLGITAQNSSGLTCDPGTGHVAYLAGCVVVILDPKENKQQHIFNTARKSLSALAFSPDGKYIVTGENGHRPAVRIWDVEEKNQVAEMLGHKYGVACVAFSPNMKHIVSMGYQHDMVLNVWDWKKDIVVASNKVSCRVIALSFSEDSSYFVTVGNRHVRFWFLEVSTETKVTSTVPLVGRSGILGELHNNIFCGVACGRGRMAGSTFCVSYSGLLCQFNEKRVLEKWINLKVSLSSCLCVSQELIFCGCTDGIVRIFQAHSLHYLANLPKPHYLGVDVAQGLEPSFLFHRKAEAVYPDTVALTFDPIHQWLSCVYKDHSIYIWDVKDINRVGKVWSELFHSSYVWNVEVYPEFEDQRACLPSGSFLTCSSDNTIRFWNLDSSPDSHWQKNIFSNTLLKVVYVENDIQHLQDMSHFPDRGSENGTPMDVKAGVRVMQVSPDGQHLASGDRSGNLRIHELHFMDELVKVEAHDAEVLCLEYSKPETGLTLLASASRDRLIHVLNVEKNYNLEQTLDDHSSSITAIKFAGNRDIQMISCGADKSIYFRSAQQGSDGLHFVRTHHVAEKTTLYDMDIDITQKYVAVACQDRNVRVYNTVNGKQKKCYKGSQGDEGSLLKVHVDPSGTFLATSCSDKSISVIDFYSGECIAKMFGHSEIITSMKFTYDCHHLITVSGDSCVFIWHLGPEITNCMKQHLLEIDHRQQQQHTNDKKRSGHPRQDTYVSTPSEIHSLSPGEQTEDDLEEECEPEEMLKTPSKDSLDPDPRCLLTNGKLPLWAKRLLGDDDVADGLAFHAKRSYQPHGRWAERAGQEPLKTILDAQDLDCYFTPMKPESLENSILDSLEPQSLASLLSESESPQEAGRGHPSFLPQQKESSEASELILYSLEAEVTVTGTDSQYCRKEVEAGPGDQQGDSYLRVSSDSPKDQSPPEDSGESEADLECSFAAIHSPAPPPDPAPRFATSLPHFPGCAGPTEDELSLPEGPSVPSSSLPQTPEQEKFLRHHFETLTESPCRALGDVEASEAEDHFFNPRLSISTQFLSSLQKASRFTHTFPPRATQCLVKSPEVKLMDRGGSQPRAGTGYASPDRTHVLAAGKAEETLEAWRPPPPCLTSLASCVPASSVLPTDRNLPTPTSAPTPGLAQGVHAPSTCSYMEATASSRARISRSISLGDSEGPIVATLAQPLRRPSSVGELASLGQELQAITTATTPSLDSEGQEPALRSWGNHEARANLRLTLSSACDGLLQPPVDTQPGVTVPAVSFPAPSPVEESALRLHGSAFRPSLPAPESPGLPAHPSNPQLPEARPGIPGGTASLLEPTSGALGLLQGSPARWSEPWVPVEALPPSPLELSRVGNILHRLQTTFQEALDLYRVLVSSGQVDTGQQQARTELVSTFLWIHSQLEAECLVGTSVAPAQALPSPGPPSPPTLYPLASPDLQALLEHYSELLVQAVRRKARGH

SEQ ID NO: 97477 - protein, 1523 aa, Homo sapiens
  Payload ID: 19438
  Gene Name: WD repeat domain 62
  Uniprot ID: O43379
  ENSP ID: ENSP00000384792
MAAVGSGGYARNDAGEKLPSVMAGVPARRGQSSPPPAPPICLRRRTRLSTASEETVQNRVSLEKVLGITAQNSSGLTCDPGTGHVAYLAGCVVVILDPKENKQQHIFNTARKSLSALAFSPDGKYIVTGENGHRPAVRIWDVEEKNQVAEMLGHKYGVACVAFSPNMKHIVSMGYQHDMVLNVWDWKKDIVVASNKVSCRVIALSFSEDSSYFVTVGNRHVRFWFLEVSTETKVTSTVPLVGRSGILGELHNNIFCGVACGRGRMAGSTFCVSYSGLLCQFNEKRVLEKWINLKVSLSSCLCVSQELIFCGCTDGIVRIFQAHSLHYLANLPKPHYLGVDVAQGLEPSFLFHRKAEAVYPDTVALTFDPIHQWLSCVYKDHSIYIWDVKDINRVGKVWSELFHSSYVWNVEVYPEFEDQRACLPSGSFLTCSSDNTIRFWNLDSSPDSHWQKNIFSNTLLKVVYVENDIQHLQDMSHFPDRGSENGTPMDVKAGVRVMQVSPDGQHLASGDRSGNLRIHELHFMDELVKVEAHDAEVLCLEYSKPETGLTLLASASRDRLIHVLNVEKNYNLEQTLDDHSSSITAIKFAGNRDIQMISCGADKSIYFRSAQQGSDGLHFVRTHHVAEKTTLYDMDIDITQKYVAVACQDRNVRVYNTVNGKQKKCYKGSQGDEGSLLKVHVDPSGTFLATSCSDKSISVIDFYSGECIAKMFGHSEIITSMKFTYDCHHLITVSGDSCVFIWHLGPEITNCMKQHLLEIDHRQQQQHTNDKKRSGHPRQDTYVSTPSEIHSLSPGEQTEDDLEEECEPEEMLKTPSKDSLDPDPRCLLTNGKLPLWAKRLLGDDDVADGLAFHAKRSYQPHGRWAERAGQEPLKTILDAQDLDCYFTPMKPESLENSILDSLEPQSLASLLSESESPQEAGRGHPSFLPQQKESSEASELILYSLEAEVTVTGTDSQYCRKEVEAGPGDQQGDSYLRVSSDSPKDQSPPEDSGESEADLECSFAAIHSPAPPPDPAPRFATSLPHFPGCAGPTEDELSLPEGPSVPSSSLPQTPEQEKFLRHHFETLTESPCRELFPAALGDVEASEAEDHFFNPRLSISTQFLSSLQKASRFTHTFPPRATQCLVKSPEVKLMDRGGSQPRAGTGYASPDRTHVLAAGKAEETLEAWRPPPPCLTSLASCVPASSVLPTDRNLPTPTSAPTPGLAQGVHAPSTCSYMEATASSRARISRSISLGDSEGPIVATLAQPLRRPSSVGELASLGQELQAITTATTPSLDSEGQEPALRSWGNHEARANLRLTLSSACDGLLQPPVDTQPGVTVPAVSFPAPSPVEESALRLHGSAFRPSLPAPESPGLPAHPSNPQLPEARPGIPGGTASLLEPTSGALGLLQGSPARWSEPWVPVEALPPSPLELSRVGNILHRLQTTFQEALDLYRVLVSSGQVDTGQQQARTELVSTFLWIHSQLEAECLVGTSVAPAQALPSPGPPSPPTLYPLASPDLQALLEHYSELLVQAVRRKARGH

SEQ ID NO: 97478 - protein, 318 aa, Homo sapiens
  Payload ID: 19438
  Gene Name: WD repeat domain 62
  ENSP ID: ENSP00000413475
GGYARNDAGEKLPSVMAGVPARRGQSSPPPAPPICLRRRTRLSTASEETVQNRVSLEKVLGITAQNSSGLTCDPGTGHVAYLAGMWRMGPASESCGEDSIAPSLSRTVPGMYCVVVILDPKENKQQHIFNTARKSLSALAFSPDGKYIVTGENGHRPAVRIWDVEEKNQVAEMLGHKYGVACVAFSPNMKHIVSMGYQHDMVLNVWDWKKDIVVASNKVSCRVIALSFSEDSSYFVTVGNRHVRFWFLEVSTETKVTSTVPLVGRSGILGELHNNIFCGVACGRGRMAGSTFCVSYSGLLCQFNEKRVLEKWINLKVS

SEQ ID NO: 97479 - protein, 483 aa, Homo sapiens
  Payload ID: 19438
  Gene Name: WD repeat domain 62
  Uniprot ID: O43379
  ENSP ID: ENSP00000465525
MAAVGSGGYARNDAGEKLPSVMAGVPARRGQSSPPPAPPICLRRRTRLSTASEETVQNRVSLEKVLGITAQNSSGLTCDPGTGHVAYLAGCVVVILDPKENKQQHIFNTARKSLSALAFSPDGKYIVTGENGHRPAVRIWDVEEKNQVAEMLGHKYGVACVAFSPNMKHIVSMGYQHDMVLNVWDWKKDIVVASNKVSCRVIALSFSEDSSYFVTVGNRHVRFWFLEVSTETKVTSTVPLVGRSGILGELHNNIFCGVACGRGRMAGSTFCVSYSGLLCQFNEKRVLEKWINLKVSLSSCLCVSQELIFCGCTDGIVRIFQAHSLHYLANLPKPHYLGVDVAQGLEPSFLFHRKAEAVYPDTVALTFDPIHQWLSCVYKDHSIYIWDVKDINRVGKVWSELFHSSYVWNVEVYPEFEDQRACLPSGSFLTCSSDNTIRFWNLDSSPDSHWQKNIFSNLAPALQMCGRGHSRQPNTPSPGEIAS

SEQ ID NO: 97480 - protein, 891 aa, Homo sapiens
  Payload ID: 19439
  Gene Name: WD repeat domain 63
  Uniprot ID: Q8IWG1
  ENSP ID: ENSP00000294664
MAPKQKKKTSRGKKRLKPVLAASEDMEPVNMESMGHPEIYPLVLTTKTQEIFNCRIDEDVTDEQPYKLINKEDIFEDLRNRAAVSDFHPVKKIVQEYPGNELLLVYDKDFKYGLNFYLIATEEGKENYLNPPEVPEEQEEYKEHIPEDVYIYKPPVSKPWVSLGSEKEIEEESVTESTKQITYMISRKRSEFGAPIKFSDQNASSVKDAYIECTAYPDKNFTLKQLEKDVGMQVIPQIKDISTQTKWTYPKNATTQYYPREFSEEEKETLKQSKPLVDFLNNASISVEIALQQNEIMNTFIDDWKYLAEEEGTFGDKTDTHLKEYQSFTDLHSPTEKMITCVSWHPTIYGLIAVSVAVRLSFEDRVHFSGKLLLQPSLILFWSFSDPIHPQLMLESPDDIFCFKFCPSDPNIIAGGCINGQIVMWDITAHADRIENIKAGGSRSKRATLKPMFLLEPESNKEAMYIRHCAVSSIENGHKKVITDIHWLSDTFEINRMGSVFENRSGICCQLVTCSADCTICFWDIRPQKPLTPQTTEKKKEESIEIPFDVPSTFLHLDLSWKPLTKVRLSKGETSLDHCPTKISLNEDHLLCKTQDKMLAQSKTEKAEEMNPYHNLESGMANLLKPIDDFCTKFFVGTEEGEVIYTDWKMEKDPETGRLMSKKPVSHHTIHDGTVHTIQRSPFYNDIILTVGGWNVAIWKEGVMTGPLLQSCCAPKRYTSGHWSLTRPGVFYIGREDGYIDIWDLLEKTHEPAQSQNICITMITYIKPWIFSSKQQFIATADYYGTLHILEIPWTLSRPSTNEMASVNHYFEREVKHLEYVEQRKKIREQEKKEMELEMAKKKVKTYQKSKEQMQAELKMDYESYLELEKTVLINLGLIKVTEKGSYMEVM

SEQ ID NO: 97481 - protein, 852 aa, Homo sapiens
  Payload ID: 19439
  Gene Name: WD repeat domain 63
  Uniprot ID: Q8IWG1
  ENSP ID: ENSP00000317463
MAPKQKKKTSRGKKRLKPVLAASEDMEPVNMESMGHPEIYPLVLTTKTQEIFNCRIDEDVTDEQPYKLINKEDIFEDLRNRAAVSDFHPVKKIVQEYPGNELLLVYDKDFKYGLNFYLIATEEGKENYLNPPEVPEEQEEYKEHIPEDVYIYKPPVSKPWVSLGSEKEIEEESVTESTKQITYMISRKRSEFGAPIKFSDQNASSVKDAYIECTAYPDKNFTLKQLEKDVGMQVIPQIKDISTQTKCVEIALQQNEIMNTFIDDWKYLAEEEGTFGDKTDTHLKEYQSFTDLHSPTEKMITCVSWHPTIYGLIAVSVAVRLSFEDRVHFSGKLLLQPSLILFWSFSDPIHPQLMLESPDDIFCFKFCPSDPNIIAGGCINGQIVMWDITAHADRIENIKAGGSRSKRATLKPMFLLEPESNKEAMYIRHCAVSSIENGHKKVITDIHWLSDTFEINRMGSVFENRSGICCQLVTCSADCTICFWDIRPQKPLTPQTTEKKKEESIEIPFDVPSTFLHLDLSWKPLTKVRLSKGETSLDHCPTKISLNEDHLLCKTQDKMLAQSKTEKAEEMNPYHNLESGMANLLKPIDDFCTKFFVGTEEGEVIYTDWKMEKDPETGRLMSKKPVSHHTIHDGTVHTIQRSPFYNDIILTVGGWNVAIWKEGVMTGPLLQSCCAPKRYTSGHWSLTRPGVFYIGREDGYIDIWDLLEKTHEPAQSQNICITMITYIKPWIFSSKQQFIATADYYGTLHILEIPWTLSRPSTNEMASVNHYFEREVKHLEYVEQRKKIREQEKKEMELEMAKKKVKTYQKSKEQMQAELKMDYESYLELEKTVLINLGLIKVTEKGSYMEVM

SEQ ID NO: 97482 - protein, 852 aa, Homo sapiens; identical to SEQ ID NO: 97481
  Payload ID: 19439
  Gene Name: WD repeat domain 63
  Uniprot ID: Q8IWG1
  ENSP ID: ENSP00000359628

SEQ ID NO: 97483 - protein, 368 aa, Homo sapiens
  Payload ID: 19439
  Gene Name: WD repeat domain 63
  ENSP ID: ENSP00000433294
MAPKQKKKTSRGKKRLKPVLAASEDMEPVNMESMGHPEIYPLVLTTKTQEIFNCRIDEDVTDEQPYKLINKEDIFEDLRNRAAVSDFHPVKKIVQEYPGNELLLVYDKDFKYGLNFYLIATEEGKENYLNPPEVPEEQEEYKEHIPEDVYIYKPPVSKPWVSLGSEKEIEEESVTESTKQITYMISRKRSEFGAPIKFSDQNASSVKDAYIECTAYPDKNFTLKQLEKDVGMQVIPQIKDISTQTKWTYPKNATTQYYPREFSEEEKETLKQSKPLVDFLNNASISVEIALQQNEIMNTFIDDWKYLAEEEGTFGDKTDTHLKEYQSFTDLHSPTEKMITCVSWHPTIYGTCHVLSTPSLSCVLPTTL

SEQ ID NO: 97484 - protein, 124 aa, Homo sapiens
  Payload ID: 19439
  Gene Name: WD repeat domain 63
  ENSP ID: ENSP00000435102
MAPKQKKKTSRGKKRLKPVLAGHPEIYPLVLTTKTQEIFNCRIDEDVTDEQPYKLINKEDIFEDLRNRAAVSDFHPVKKIVQEYPGNELLLVYDKDFKYGLNFYLIATEEGKENYLNPPEVPEE

SEQ ID NO: 97485 - protein, 128 aa, Homo sapiens
  Payload ID: 19439
  Gene Name: WD repeat domain 63
  ENSP ID: ENSP00000435544
TSGHWSLTRPGVFYIGREDGYIDIWDLLEKTHEPAQSQNICITMITYIKPWIFSSKQQFIATADYYGTLHILEIPWTLSRPSTNEMASVNHYFEREVKHLEYVEQRKKIREQEKKEMELEMAKKKVVS

SEQ ID NO: 97486 - protein, 1081 aa, Homo sapiens
  Payload ID: 19440
  Gene Name: WD repeat domain 64
  Uniprot ID: B1ANS9
  ENSP ID: ENSP00000355510
MDIRKEKRLNMALQMSNFKKALNRFEKLVEQTAAQKRDERAGLFIHKEDAIGYDKFYASVQKLFGPDVKNQDVKRFYRKLCNNTDASADWCEIFGYFSSEEDPIASQLDEENLVFFVSRKRRILISGSRRRDVIKSIVKIPHLDLLITATQKGLITVFNNQDTSWITGCDYLLQLKRIVATTERTIIVWDYKAQGSSQENYFVIKPMDHCLLCVCVVPLPDHLCRDDILLGDDGGFVNRFTVNSDDFGIKQAKSKRKLQNQVLDSKNFKSVKRKLHNDWVMKIRYISALNCFGSCSLDSNHSLVLESLKRLEDNLPVREFSMPRGANTFCYCVKANVIVTGGDDKVIRLWHPNISTKPVGKLVGHMFSIAEIVTNEKDQHVVSLSSAKVFRVWDIQTLSLLQVFHDSQGGPGDMQIYSMIYDANHGMLITGSSVMDMYPLTRMIQDTKQVPHTHEREINVMLYNKYFHQVLTICSESIIRVWELETGLQVYQILEPHGFNTEVTSAAVDESGFLFATGAYNGTVRIWDFGSGQEMKVLPEGKDWKEDEHCLRRLIFLKAQEKHQQLVLALERNGTIKMIQGKEDDIYLMVIWELPDVVPFLQDGKHAVHLRMSTRDRNMAIPFPDVELIVERNFSQPTDNPTMDLLRVNCIDLLQVEGYNLIAAGTLNGVIILWNFVTSTVKKVYRPEDCFTVNPDLHPKHFKINDILFLFRTPECARRSSQDSICSSSQCESSKGPQSSKGSKQSIHDSEVKGEQTDVMVGKQQPMDKKHPGIANLPEAQPPILVTAHEDGHLRLWTLEGRLLKDMLPFTKHSAISLTSLYTDSCTRILLAGNVEGHVILCNISSFLDPPHDEKKFKQLLSWRAHSLEIIQVIYVEEKQVVLTASIDGSVRLWHALNGHYCGYFGQRRLFELSQTRDFILPCDVTEYPIEIKEESKFTEKQKYEYPLIFDREKWRKMSSVSLLFKRTPPKAFEVEQDFKFFKSLSSPKIRRYPLEGFVTENREAGIVFGSLPIYSISSPTSLRFLPLIGVEAQKDSSDGITGKKKGGHVQREKAPRRRSLKKNLVPQINLASSFFPAIPK

SEQ ID NO: 97487 - protein, 634 aa, Homo sapiens
  Payload ID: 19440
  Gene Name: WD repeat domain 64
  ENSP ID: ENSP00000402446
MKIRYISALNCFGSCSLDSNHSLVLESLKRLEDNLPVREFSMPRGANTFCYCVKANVIVTGGDDKVIRLWHPNISTKPVGKLVGHMFSIAEIVTNEKDQHVVSLSSAKVFRVWDIQTLSLLQVFHDSQGGPGDMQIYSMIYDANHGMLITGSSVMDMYPLTRMIQDTKQVPHTHEREINVMLYNKYFHQVLTICSESIIRVWELETGLQVYQILEPHGFNTEVTSAAVDESGFLFATGAYNGTVRIWDFGSGQEMKVLPEGKDWKEDEHCLRRLIFLKAQEKHQQLVLALERNGTIKMIQGKEDDIYLMVIWELPDVVPFLQDGKHAVHLRMSTRDRNMAIPFPDVELIVERNFSQPTDNPTMDLLRVNCIDLLQVEGYNLIAAGTLNEGHVILCNISSFLDPPHDEKKFKQLLSWRAHSLEIIQVIYVEEKQVVLTASIDGSVRLWHALNGHYCGYFGQRRLFELSQTRDFILPCDVTEYPIEIKEESKFTEKQKYEYPLIFDREKWRKMSSVSLLFKRTPPKAFEVEQDFKFFKSLSSPKIRRYPLEGFVTENREAGIVFGSLPIYSISSPTSLRFLPLIGVEAQKDSSDGITGKKKGGHVQREKVTRRRSLKKNLVPQINLASSFFPAIPK

SEQ ID NO: 97488 - protein, 560 aa, Homo sapiens
  Payload ID: 19440
  Gene Name: WD repeat domain 64
  ENSP ID: ENSP00000406342
  MOD_RES (1)..(1): Any amino acid
XTVRIWDFGSGQEMKVLPEGKDWKEDEHCLRRLIFLKAQEKHQQLVLALERNGTIKMIQGKEDDIYLMVIWELPDVVPFLQDGKHAVHLRMSTRDRNMAIPFPDVELIVERNFSQPTDNPTMDLLRVNCIDLLQVEGYNLIAAGTLNGVIILWNFVTSTVKKVYRPEDCFTVNPDLHPKHFKINDILFLFRTPECARRSSQDSICSSSQCESSKGPQSSKGSKQSIHDSEVKGEQTDVMVGKQQPMDKKHPGIANLPEAQPPILVTAHEDGHLRLWTLEGRLLKDMLPFTKHSAISLTSLYTDSCTRILLAGNVEGHVILCNISSFLDPPHDEKKFKQLLSWRAHSLEIIQVIYVEEKQVVLTASIDGSVRLWHALNGHYCGYFGQRRLFELSQTRDFILPCDVTEYPIEIKEESKFTEKQKYEYPLIFDREKWRKMSSVSLLFKRTPPKAFEVEQDFKFFKSLSSPKIRRYPLEGFVTENREAGIVFGSLPIYSISSPTSLRFLPLIGVEAQKDSSDGITGKKKGGHVQREKAPRRRSLKKNLVPQINLASSFFPAIPK

SEQ ID NO: 97489 - protein, 685 aa, Homo sapiens
  Payload ID: 19440
  Gene Name: WD repeat domain 64
  ENSP ID: ENSP00000406656
LGDDGGFVNRFTVNSDDFGIKQAKSKRKLQNQVLDSKNFKSVKRKLHNDWVMKIRYISALNCFGSCSLDSNHSLVLESLKRLEDNLPVREFSMPRGANTFCYCVKANVIVTGGDDKVIRLWHPNISTKPVGKLVGHMFSIAEIVTNEKDQHVVSLSSAKVFRVWDIQTLSLLQVFHDSQGGPGDMQIYSMIYDANHGMLITGSSVMDMYPLTRMIQDTKQVPHTHEREINVMLYNKYFHQVLTICSESIIRVWELETGLQVYQILEPHGFNTEVTSAAVDESGFLFATGAYNGTVRIWDFGSGQEMKVLPEGKDWKEDEHCLRRLIFLKAQEKHQQLVLALERNGTIKMIQGKEDDIYLMVIWELPDVVPFLQDGKHAVHLRMSTRDRNMAIPFPDVELIVERNFSQPTDNPTMDLLRVNCIDLLQVEGYNLIAAGTLNEGHVILCNISSFLDPPHDEKKFKQLLSWRAHSLEIIQVIYVEEKQVVLTASIDGSVRLWHALNGHYCGYFGQRRLFELSQTRDFILPCDVTEYPIEIKEESKFTEKQKYEYPLIFDREKWRKMSSVSLLFKRTPPKAFEVEQDFKFFKSLSSPKIRRYPLEGFVTENREAGIVFGSLPIYSISSPTSLRFLPLIGVEAQKDSSDGITGKKKGGHVQREKAPRRRSLKKNLVPQINLASSFFPAIPK

SEQ ID NO: 97490 - protein, 522 aa, Homo sapiens
  Payload ID: 19440
  Gene Name: WD repeat domain 64
  ENSP ID: ENSP00000431729
RMIQDTKQVPHTHEREINVMLYNKYFHQVLTICSESIIRVWELETGLQVYQILEPHGFNTEVTSAAVDESGFLFATGAYNGTVRIWDFGSGQEMKVLPEGKDWKEDEHCLRRLIFLKAQEKHQQLVLALERNGTIKMIQGKEDDIYLMVIWELPDVVPFLQDGKHAVHLRMSTRDRNMAIPFPDVELIVERNFSQPTDNPTMDLLRVNCIDLLQVEGYNLIAAGTLNGVIILWNFVTSTVKKVYRPEDCFTVNPDLHPKHFKINDILFLFRTPECARRSSQDSICSSSQCESSKGPQSSKGSKQSIHDSEVKGEQTDVMVGKQQPMDKKHPGIANLPEAQPPILVTAHEDGHLRLWTLEGRLLKDMLPFTKHSAISLTSLYTDSCTRILLAGNVEGHVILCNISSFLDPPHDEKKFKQLLSWRAHSLEIIQVIYVEEKQVVLTASIDGSVRLWHALNGHYCGYFGQRRLFELSQTRDFILPCDVTEYPIEIKEESKFTEKQKYEYPLIFDREKFEDIPWKVS

SEQ ID NO: 97491 - protein, 1149 aa, Homo sapiens
  Payload ID: 19441
  Gene Name: WD repeat domain 66
  Uniprot ID: Q8TBY9
  ENSP ID: ENSP00000288912
MSDAAEAPREATGENGETEMKEEEEPNPNYKEVEDPQQESKDDTIAWRESQEEERKTGEEEGEEEGKEDKKIVMEETEEKAGEVQEKEASGIQEETTVEPQEVTASMIRLETQITDSQSITSGIFPKTQRGSKSKLSLQLEDAETDELLRDLSTQIEFLDLDQISPEEQQISSPERQPSGELEEKTDRMPQDELGQERRDLEPENREEGQERRVSDIQSKAGISRESLVSSTTEDILFQKDKSTPVYPLTMTWSFGWNSSLPVYYIREERQRVLLYVCAHTAIIYNVFRNNQYHLQGHANIISCLCVSEDRRWIATADKGPDCLVIIWDSFTGIPVHTIFDSCPEGNGIMAMAMTHDAKYLATISDAEVQKVCIWKWTLAVETPACTLELPTEYGVQNYVTFNPTNNKELVSNSKTRAIYYAWYEERDTLAHSAPLLTEKTFNKLVGKFSQSIFHLNLTQILSATMEGKLVVWDIHRPPSSASTFLGFPYIKPCKLVHLQKEGITVLTTIDSYIVTGDIKGNIKFYDHTLSIVNWYSHLKLGAIRTLSFSKTPATPPTEKSNYPPDCTLKGDLFVLRNFIIGTSDAAVYHLTTDGTKLEKLFVEPKDAICAISCHPYQPLIAIGSICGMIKVWNYENKQYLFSRVFEKGLGVQSLTYNPEGALLGAGFTEGTVYILDAMSLENESPEPFKYSRTSVTHISFSHDSQYMATADRSFTVAVYMLVVRNGQRVWEYLARLRSHRKSIRSLLFGVYLDSNEPRLLSLGTDRLLIEYDLLRSYKDHLEVLDIHHTDQGCYPTCMVWYPPLTRELFLLICNSGYKVKLFNATTKMCRKTLLGPAYGSPIEQTQVLPVRSMAELQKRYLVFINRDKVGLQILPVDGNPHKTSAIVCHPNGVAGMAVSYDGCYAFTAGGHDRSVVQWKITLSVLEAAVSLGGEDLTPFYGLLSGGREGKFYRELEDYFYYSQLRSQGIDTMETRKVSEHICLSELPFVMRAIGFYPSEEKIDDIFNEIKFGEYVDTGKLIDKINLPDFLKVYLNHKPPFGNTMSGIHKSFEVLGYTNSKGKKAIRREDFLRLLVTKGEHMTEEEMLDCFASLFGLNPEGWKSEPATCSVKGSEICLEEELPDEITAEIFATEILGLTISEDSGQDGQ

SEQ ID NO: 97492 - protein, 941 aa, Homo sapiens
  Payload ID: 19441
  Gene Name: WD repeat domain 66
  Uniprot ID: Q8TBY9
  ENSP ID: ENSP00000380595
MSDAAEAPREATGENGETEMKEEEEPNPNYKEVEDPQQESKDDTIAWRESQEEERKTGEEEGEEEGKEDKKIVMEETEEKAGEVQEKEASGIQEETTVEPQEVTASMIRLETQITDSQSITSGIFPKTQRGSKSKLSLQLEDAETDELLRDLSTQIEFLDLDQISPEEQQISSPERQPSGELEEKTDRMPQDELGQERRDLEPENREEGQERRVSDIQSKAGISRESLVSSTTEDILFQKDKSTPVYPLTMTWSFGWNSSLPVYYIREERQRVLLYVCAHTAIIYNVFRNNQYHLQGHANIISCLCVSEDRRWIATADKGPDCLVIIWDSFTGIPVHTIFDSCPEGNGIMAMAMTHDAKYLATISDAEVQKVCIWKWTLAVETPACTLELPTEYGVQNYVTFNPTNNKELVSNSKTRAIYYAWYEERDTLAHSAPLLTEKTFNKLVGKFSQSIFHLNLTQILSATMEGKLVVWDIHRPPSSASTFLGFPYIKPCKLVHLQKEGITVLTTIDSYIVTGDIKGNIKFYDHTLSIVNWYSHLKLGAIRTLSFSKTPATPPTEKSNYPPDCTLKGDLFVLRNFIIGTSDAAVYHLTTDGTKLEKLFVEPKDAICAISCHPYQPLIAIGSICGMIKVWNYENKQYLFSRVFEKGLGVQSLTYNPEGALLGAGFTEGTVYILDAMSLENESPEPFKYSRTSVTHISFSHDSQYMATADRSFTVAVYMLVVRNGQRVWEYLARLRSHRKSIRSLLFGVYLDSNEPRLLSLGTDRLLIEYDLLRSYKDHLEVLDIHHTDQGCYPTCMVWYPPLTRELFLLICNSGYKVKLFNATTKMCRKTLLGPAYGSPIEQTQVLPVRSMAELQKRYLVFINRDKVGLQILPVDGNPHKTSAIVCHPNGVAGMAVSYDGCYAFTAGGHDRSVVQWKITLSHPGSQAPILSPSDTSRS

SEQ ID NO: 97493 - protein, 1490 aa, Homo sapiens
  Payload ID: 19442
  Gene Name: WD repeat domain 7
  Uniprot ID: Q9Y4E6
  ENSP ID: ENSP00000254442
MAGNSLVLPIVLWGRKAPTHCISAVLLTDDGATIVTGCHDGQICLWDLSVELQINPRALLFGHTASITCLSKACASSDKQYIVSASESGEMCLWDVSDGRCIEFTKLACTHTGIQFYQFSVGNQREGRLLCHGHYPEILVVDATSLEVLYSLVSKISPDWISSMSIIRSHRTQEDTVVALSVTGILKVWIVTSEISDMQDTEPIFEEESKPIYCQNCQSISFCAFTQRSLLVVCSKYWRVFDAGDYSLLCSGPSENGQTWTGGDFVSSDKVIIWTENGQSYIYKLPASCLPASDSFRSDVGKAVENLIPPVQHILLDRKDKELLICPPVTRFFYGCREYFHKLLIQGDSSGRLNIWNISDTADKQGSEEGLAMTTSISLQEAFDKLNPCPAGIIDQLSVIPNSNEPLKVTASVYIPAHGRLVCGREDGSIVIVPATQTAIVQLLQGEHMLRRGWPPHRTLRGHRNKVTCLLYPHQVSARYDQRYLISGGVDFSVIIWDIFSGEMKHIFCVHGGEITQLLVPPENCSARVQHCICSVASDHSVGLLSLREKKCIMLASRHLFPIQVIKWRPSDDYLVVGCSDGSVYVWQMDTGALDRCVMGITAVEILNACDEAVPAAVDSLSHPAVNLKQAMTRRSLAALKNMAHHKLQTLATNLLASEASDKGNLPKYSHNSLMVQAIKTNLTDPDIHVLFFDVEALIIQLLTEEASRPNTALISPENLQKASGSSDKGGSFLTGKRAAVLFQQVKETIKENIKEHLLDDEEEDEEIMRQRREESDPEYRSSKSKPLTLLEYNLTMDTAKLFMSCLHAWGLNEVLDEVCLDRLGMLKPHCTVSFGLLSRGGHMSLMLPGYNQPACKLSHGKTEVGRKLPASEGVGKGTYGVSRAVTTQHLLSIISLANTLMSMTNATFIGDHMKKGPTRPPRPSTPDLSKARGSPPTSSNIVQGQIKQVAAPVVSARSDADHSGSDPPSAPALHTCFLVNEGWSQLAAMHCVMLPDLLGLDKFRPPLLEMLARRWQDRCLEVREAAQALLLAELRRIEQAGRKEAIDAWAPYLPQYIDHVISPGVTSEAAQTITTAPDASGPEAKVQEEEHDLVDDDITTGCLSSVPQMKKISTSYEERRKQATAIVLLGVIGAEFGAEIEPPKLLTRPRSSSQIPEGFGLTSGGSNYSLARHTCKALTFLLLQPPSPKLPPHSTIRRTAIDLIGRGFTVWEPYMDVSAVLMGLLELCADAEKQLANITMGLPLSPAADSARSARHALSLIATARPPAFITTIAKEVHRHTALAANTQSQQNMHTTTLARAKGEILRVIEILIEKMPTDVVDLLVEVMDIIMYCLEGSLVKKKGLQECFPAICRFYMVSYYERNHRIAVGARHGSVALYDIRTGKCQTIHGHKGPITAVAFAPDGRYLATYSNTDSHISFWQMNTSLLGSIGMLNSAPQLRCIKTYQVPPVQPASPGSHNALKLARLIWTSNRNVILMAHDGKEHRFMV

SEQ ID NO: 97494 - protein, 1457 aa, Homo sapiens
  Payload ID: 19442
  Gene Name: WD repeat domain 7
  Uniprot ID: Q9Y4E6
  ENSP ID: ENSP00000350187
MAGNSLVLPIVLWGRKAPTHCISAVLLTDDGATIVTGCHDGQICLWDLSVELQINPRALLFGHTASITCLSKACASSDKQYIVSASESGEMCLWDVSDGRCIEFTKLACTHTGIQFYQFSVGNQREGRLLCHGHYPEILVVDATSLEVLYSLVSKISPDWISSMSIIRSHRTQEDTVVALSVTGILKVWIVTSEISDMQDTEPIFEEESKPIYCQNCQSISFCAFTQRSLLVVCSKYWRVFDAGDYSLLCSGPSENGQTWTGGDFVSSDKVIIWTENGQSYIYKLPASCLPASDSFRSDVGKAVENLIPPVQHILLDRKDKELLICPPVTRFFYGCREYFHKLLIQGDSSGRLNIWNISDTADKQGSEEGLAMTTSISLQEAFDKLNPCPAGIIDQLSVIPNSNEPLKVTASVYIPAHGRLVCGREDGSIVIVPATQTAIVQLLQGEHMLRRGWPPHRTLRGHRNKVTCLLYPHQVSARYDQRYLISGGVDFSVIIWDIFSGEMKHIFCVHGGEITQLLVPPENCSARVQHCICSVASDHSVGLLSLREKKCIMLASRHLFPIQVIKWRPSDDYLVVGCSDGSVYVWQMDTGALDRCVMGITAVEILNACDEAVPAAVDSLSHPAVNLKQAMTRRSLAALKNMAHHKLQTLATNLLASEASDKGNLPKYSHNSLMVQAIKTNLTDPDIHVLFFDVEALIIQLLTEEASRPNTALISPENLQKASGSSDKGGSFLTGKRAAVLFQQVKETIKENIKEHLLDDEEEDEEIMRQRREESDPEYRSSKSKPLTLLEYNLTMDTAKLFMSCLHAWGLNEVLDEVCLDRLGMLKPHCTVSFGLLSRGGHMSLMLPGYNQPACKLSHGKTEVGRKLPASEGVGKGTYGVSRAVTTQHLLSIISLANTLMSMTNATFIGDHMKKGPTRPPRPSTPDLSKARGSPPTSSNIVQGQIKQGWSQLAAMHCVMLPDLLGLDKFRPPLLEMLARRWQDRCLEVREAAQALLLAELRRIEQAGRKEAIDAWAPYLPQYIDHVISPGVTSEAAQTITTAPDASGPEAKVQEEEHDLVDDDITTGCLSSVPQMKKISTSYEERRKQATAIVLLGVIGAEFGAEIEPPKLLTRPRSSSQIPEGFGLTSGGSNYSLARHTCKALTFLLLQPPSPKLPPHSTIRRTAIDLIGRGFTVWEPYMDVSAVLMGLLELCADAEKQLANITMGLPLSPAADSARSARHALSLIATARPPAFITTIAKEVHRHTALAANTQSQQNMHTTTLARAKGEILRVIEILIEKMPTDVVDLLVEVMDIIMYCLEGSLVKKKGLQECFPAICRFYMVSYYERNHRIAVGARHGSVALYDIRTGKCQTIHGHKGPITAVAFAPDGRYLATYSNTDSHISFWQMNTSLLGSIGMLNSAPQLRCIKTYQVPPVQPASPGSHNALKLARLIWTSNRNVILMAHDGKEHRFMV

SEQ ID NO: 97495 - protein, 169 aa, Homo sapiens
  Payload ID: 19442
  Gene Name: WD repeat domain 7
  ENSP ID: ENSP00000466438
MAGNSLVLPIVLWGRKAPTHCISAVLLTDDGATIVTGCHDGQICLWDLSVELQINPRALLFGHTASITCLSKACASSDKQYIVSASESGEMCLWDVSDGRCIEFTKLACTHTGIQFYQFSVGNQREGRLLCHGHYPEILVVDATSLEVLYSLVSKISPDWISSMSIIRS

SEQ ID NO: 97496 - protein, 40 aa, Homo sapiens
  Payload ID: 19442
  Gene Name: WD repeat domain 7
  ENSP ID: ENSP00000466480
  MOD_RES (1)..(1): Any amino acid
XMVSYYERNHRIAVGARHGSVALYDIRTGKCQALYQAKER

SEQ ID NO: 97497 - protein, 67 aa, Homo sapiens
  Payload ID: 19442
  Gene Name: WD repeat domain 7
  ENSP ID: ENSP00000467485
MNTSLLGSIGMLNSAPQLRCIKTYQVPPVQPASPGSHNALKLARLIWTSNRNVILMAHDGKEHRFMV

SEQ ID NO: 97498 - protein, 62 aa, Homo sapiens
  Payload ID: 19442
  Gene Name: WD repeat domain 7
  ENSP ID: ENSP00000467596
  MOD_RES (1)..(1): Any amino acid
XALSLIATARPPAFITTIAKEQAYENSNTLKVFTLFTCTQTYGSCSKYPITAEYAHNNSCTS

SEQ ID NO: 97499 - protein, 815 aa, Homo sapiens
  Payload ID: 19442
  Gene Name: WD repeat domain 7
  ENSP ID: ENSP00000481823
MAGNSLVLPIVLWGRKAPTHCISAVLLTDDGATIVTGCHDGQICLWDLSVELQINPRALLFGHTAVLFQQVKETIKENIKEHLLDDEEEDEEIMRQRREESDPEYRSSKSKPLTLLEYNLTMDTAKLFMSCLHAWGLNEVLDEVCLDRLGMLKPHCTVSFGLLSRGGHMSLMLPGYNQPACKLSHGKTEVGRKLPASEGVGKGTYGVSRAVTTQHLLSIISLANTLMSMTNATFIGDHMKKGPTRPPRPSTPDLSKARGSPPTSSNIVQGQIKQVAAPVVSARSDADHSGSDPPSAPALHTCFLVNEGWSQLAAMHCVMLPDLLGLDKFRPPLLEMLARRWQDRCLEVREAAQALLLAELRRIEQAGRKEAIDAWAPYLPQYIDHVISPGVTSEAAQTITTAPDASGPEAKVQEEEHDLVDDDITTGCLSSVPQMKKISTSYEERRKQATAIVLLGVIGAEFGAEIEPPKLLTRPRSSSQIPEGFGLTSGGSNYSLARHTCKALTFLLLQPPSPKLPPHSTIRRTAIDLIGRGFTVWEPYMDVSAVLMGLLELCADAEKQLANITMGLPLSPAADSARSARHALSLIATARPPAFITTIAKEVHRHTALAANTQSQQNMHTTTLARAKGEILRVIEILIEKMPTDVVDLLVEVMDIIMYCLEGSLVKKKGLQECFPAICRFYMVSYYERNHRIAVGARHGSVALYDIRTGKCQTIHGHKGPITAVAFAPDGRYLATYSNTDSHISFWQMNTSLLGSIGMLNSAPQLRCIKTYQVPPVQPASPGSHNALKLARLIWTSNRNVILMAHDGKEHRFMV

SEQ ID NO: 97500 - protein, 654 aa, Homo sapiens
  Payload ID: 19443
  Gene Name: WD repeat domain 70
  Uniprot ID: Q9NW82
  ENSP ID: ENSP00000265107
MERSGPSEVTGSDASGPDPQLAVTMGFTGFGKKARTFDLEAMFEQTRRTAVERSRKTLEAREKEEEMNREKELRRQNEDIEPTSSRSNVVRDCSKSSSRDTSSSESEQSSDSSDDELIGPPLPPKMVGKPVNFMEEDILGPLPPPLNEEEEEAEEEEEEEEEEENPVHKIPDSHEITLKHGTKTVSALGLDPSGARLVTGGYDYDVKFWDFAGMDASFKAFRSLQPCECHQIKSLQYSNTGDMILVVSGSSQAKVIDRDGFEVMECIKGDQYIVDMANTKGHTAMLHTGSWHPKIKGEFMTCSNDATVRTWEVENPKKQKSVFKPRTMQGKKVIPTTCTYSRDGNLIAAACQNGSIQIWDRNLTVHPKFHYKQAHDSGTDTSCVTFSYDGNVLASRGGDDSLKLWDIRQFNKPLFSASGLPTMFPMTDCCFSPDDKLIVTGTSIQRGCGSGKLVFFERRTFQRVYEIDITDASVVRCLWHPKLNQIMVGTGNGLAKVYYDPNKSQRGAKLCVVKTQRKAKQAETLTQDYIITPHALPMFREPRQRSTRKQLEKDRLDPLKSHKPEPPVAGPGRGGRVGTHGGTLSSYIVKNIALDKTDDSNPREAILRHAKAAEDSPYWVSPAYSKTQPKTMFAQVESDDEEAKNEPEWKKRKI

SEQ ID NO: 97501 - protein, 387 aa, Homo sapiens
  Payload ID: 19443
  Gene Name: WD repeat domain 70
  ENSP ID: ENSP00000425841
MERSGPSEVTGSDASGPDPQLAVTMGFTGFGKKARTFDLEAMFEQTRRTAVERSRKTLEAREKEEEMNREKELRRQNEDIEPTSSRSNVVRDCSKSSSRDTSSSESEQSSDSSDDELIGPPLPPKMVGKPVNFMEEDILGPLPPPLNEEEEEAEEEEEEEEEEENPVHKIPDSHEITLKHGTKTVSALGLDPSGARLVTGGYDYDVKFWDFAGMDASFKAFRSLQPCECHQIKSLQYSNTGDMILVVSGSSQAKVIDRDGFEVMECIKGDQYIVDMANTKGHTAMLHTGSWHPKIKGEFMTCSNDATVRTWEVENPKKQKSVFKPRTMQGKKVIPTTCTYSRDGNLIAAACQNGSIQIWDRNLTSNKLRLSYGTVCMLWAHTEVCVM

SEQ ID NO: 97502 - protein, 1102 aa, Homo sapiens
  Payload ID: 19444
  Gene Name: WD repeat domain 72
  Uniprot ID: Q3MJ13
  ENSP ID: ENSP00000353699
MRTSLQAVALWGQKAPPHSITAIMITDDQRTIVTGSQEGQLCLWNLSHELKISAKELLFGHSASVTCLARARDFSKQPYIVSAAENGEMCVWNVTNGQCMEKATLPYRHTAICYYHCSFRMTGEGWLLCCGEYQDVLIIDAKTLAVVHSFRSSQFPDWINCMCIVHSMRIQEDSLLVVSVAGELKVWDLSSSINSIQEKQDVYEKESKFLESLNCQTIRFCTYTERLLLVVFSKCWKVYDYCDFSLLLTEVSRNGQFFAGGEVIAAHRILIWTEDGHSYIYQLLNSGLSKSIYPADGRVLKETIYPHLLCSTSVQENKEQSRPFVMGYMNERKEPFYKVLFSGEVSGRITLWHIPDVPVSKFDGSPREIPVTATWTLQDNFDKHDTMSQSIIDYFSGLKDGAGTAVVTSSEYIPSLDKLICGCEDGTIIITQALNAAKARLLEGGSLVKDSPPHKVLKGHHQSVTSLLYPHGLSSKLDQSWMLSGDLDSCVILWDIFTEEILHKFFLEAGPVTSLLMSPEKFKLRGEQIICCVCGDHSVALLHLEGKSCLLHARKHLFPVRMIKWHPVENFLIVGCADDSVYIWEIETGTLERHETGERARIILNCCDDSQLVKSVLPIASETLKHKSIEQRSSSPYQLGPLPCPGLQVESSCKVTDAKFCPRPFNVLPVKTKWSNVGFHILLFDLENLVELLLPTPLSDVDSSSSFYGGEVLRRAKSTVEKKTLTLRKSKTACGPLSAEALAKPITESLAQGDNTIKFSEENDGIKRQKKMKISKKMQPKPSRKVDASLTIDTAKLFLSCLLPWGVDKDLDYLCIKHLNILKLQGPISLGISLNEDNFSLMLPGWDLCNSGMIKDYSGVNLFSRKVLDLSDKYTATLPNQVGIPRGLENNCDSLRESDTIVYLLSRLFLVNKLVNMPLELACRVGSSFRMESIHNKMRGAGNDILNMSSFYSCLRNGKNESHVPEADLSLLKLISCWRDQSVQVTEAIQAVLLAEVQQHMKSLGKIPVNSQPVSMAENGNCEMKQMLPKLEWTEELELQCVRNTLPLQTPVSPVKHDSNSNSANFQDVEDMPDRCALEESESPGEPRHHSWIAKVCPCKVS

SEQ ID NO: 97503 - protein, 1102 aa, Homo sapiens; identical to SEQ ID NO: 97502
  Payload ID: 19444
  Gene Name: WD repeat domain 72
  Uniprot ID: Q3MJ13
  ENSP ID: ENSP00000379619

SEQ ID NO: 97504 - protein, 1112 aa, Homo sapiens
  Payload ID: 19444
  Gene Name: WD repeat domain 72
  ENSP ID: ENSP00000452765
MRTSLQAVALWGQKAPPHSITAIMITDDQRTIVTGSQEGQLCLWNLSHELKISAKELLFGHSASVTCLARARDFSKQPYIVSAAENGEMCVWNVTNGQCMEKATLPYRHTAICYYHCSFRMTGEGWLLCCGEYQDVLIIDAKTLAVVHSFRSSQFPDWINCMCIVHSMRIQEDSLLVVSVAGELKVWDLSSSINSIQEKQDVYEKESKFLESLNCQTIRFCTYTERLLLVVFSKCWKVYDYCDFSLLLTEVSRNGQFFAGGEVIAAHRILIWTEDGHSYIYQLLNRWAQMGAAYKTFSGLSKSIYPADGRVLKETIYPHLLCSTSVQENKSRPFVMGYMNERKEPFYKVLFSGEVSGRITLWHIPDVPVSKFDGSPREIPVTATWTLQDNFDKHDTMSQSIIDYFSGLKDGAGTAVVTSSEYIPSLDKLICGCEDGTIIITQALNAAKARLLEGGSLVKDSPPHKVLKGHHQSVTSLLYPHGLSSKLDQSWMLSGDLDSCVILWDIFTEEILHKFFLEAGPVTSLLMSPEKFKLRGEQIICCVCGDHSVALLHLEGKSCLLHARKHLFPVRMIKWHPVENFLIVGCADDSVYIWEIETGTLERHETGERARIILNCCDDSQLVKSVLPIASETLKHKSIEQRSSSPYQLGPLPCPGLQVESSCKVTDAKFCPRPFNVLPVKTKWSNVGFHILLFDLENLVELLLPTPLSDVDSSSSFYGGEVLRRAKSTVEKKTLTLRKSKTACGPLSAEALAKPITESLAQGDNTIKFSEENDGIKRQKKMKISKKMQPKPSRKVDASLTIDTAKLFLSCLLPWGVDKDLDYLCIKHLNILKLQGPISLGISLNEDNFSLMLPGWDLCNSGMIKDYSGVNLFSRKVLDLSDKYTATLPNQVGIPRGLENNCDSLRESDTIVYLLSRLFLVNKLVNMPLELACRVGSSFRMESIHNKMRGAGNDILNMSSFYSCLRNGKNESHVPEADLSLLKLISCWRDQSVQVTEAIQAVLLAEVQQHMKSLGKIPVNSQPVSMAENGNCEMKQMLPKLEWTEELELQCVRNTLPLQTPVSPVKHDSNSNSANFQDVEDMPDRCALEESESPGEPRHHSWIAKVCPCKVS

SEQ ID NO: 97505 - protein, 1099 aa, Homo sapiens
  Payload ID: 19444
  Gene Name: WD repeat domain 72
  ENSP ID: ENSP00000453378
MRTSLQAVALWGQKAPPHSITAIMITDDQRTIVTGSQEGQLCLWNLSHELKISAKELLFGHSASVTCLARARDFSKQPYIVSAAENGEMCVWNVTNGQCMEKATLPYRHTAICYYHCSFRMTGEGWLLCCGEYQDVLIIDAKTLAVVHSFRSSQFPDWINCMCIVHSMRIQDSLLVVSVAGELKVWDLSSSINSIQEKQDVYEKESKFLESLNCQTIRFCTYTERLLLVVFSKCWKVYDYCDFSLLLTEVSRNGQFFAGGEVIAAHRILIWTEDGHSYIYQLLNSGLSKSIYPADGRVLKETIYPHLLCSTSVQENKSRPFVMGYMNERKEPFYKVLFSGEVSGRITLWHIPDVPVSKFDGSPREIPVTATWTLQDNFDKHDTMSQSIIDYFSGLKDGAGTAVVTSSEYIPSLDKLICGCEDGTIIITQALNAAKARLLEGGSLVKDSPPHKVLKGHHQSVTSLLYPHGLSSKLDQSWMLSGDLDSCVILWDIFTEEILHKFFLEAGPVTSLLMSPEKFKLRGEQIICCVCGDHSVALLHLEGKSCLLHARKHLFPVRMIKWHPVENFLIVGCADDSVYIWEIETGTLERHETGERARIILNCCDDSQLVKSVLPIASETLKHKSIEQRSSSPYQLGPLPCPGLQVESSCKVTDAKFCPRPFNVLPVKTKWSNVGFHILLFDLENLVELLLPTPLSDVDSSSSFYGGEVLRRAKSTVEKKTLTLRKSKTACGPLSAEALAKPITESLAQGDNTIKFSEENDGIKRQKKMKISKKMQPKPSRKVDASLTIDTAKLFLSCLLPWGVDKDLDYLCIKHLNILKLQGPISLGISLNEDNFSLMLPGWDLCNSGMIKDYSGVNLFSRKVLDLSDKYTATLPNQVGIPRGLENNCDSLRESDTIVYLLSRLFLVNKLVNMPLELACRVGSSFRMESIHNKMRGAGNDILNMSSFYSCLRNGKNESHVPEADLSLLKLISCWRDQSVQVTEAIQAVLLAEVQQHMKSLGKIPVNSQPVSMAENGNCEMKQMLPKLEWTEELELQCVRNTLPLQTPVSPVKHDSNSNSANFQDVEDMPDRCALEESESPGEPRHHSWIAKVCPCKVS

SEQ ID NO: 97506 - protein, 775 aa, Homo sapiens
  Payload ID: 19444
  Gene Name: WD repeat domain 72
  ENSP ID: ENSP00000453813
MRTSLQAVALWGQKAPPHSITAIMITDDQRTIVTGSQEGQLCLWNLSHELKISAKELLFGHSASVTCLARARDFSKQPYIVSAAENGEMCVWNVTNGQCMEKATLPYRHTAICYYHCSFRMTGEGWLLCCGEYQDVLIIDAKTLAVVHSFRSSQFPDWINCMCIVHSMRIQEDSLLVVSVAGELKVWDLSSSINSIQEKQDVYEKESKFLESLNCQTIRFCTYTERLLLVVFSKCWKVYDYCDFSLLLTEVSRNGQFFAGGEVIAAHRILIWTEDGHSYIYQLLNSGLSKSIYPADGRVLKETIYPHLLCSTSVQENKEQSRPFVMGYMNERKEPFYKVLFSGEVSGRITLWHIPDVPVSKFDGSPREIPVTATWTLQDNFDKHDTMSQSIIDYFSGLKDGAGTAVVTSSEYIPSLDKLICGCEDGTIIITQALNAAKARLLEGGSLVKDSPPHKVLKGHHQSVTSLLYPHGLSSKLDQSWMLSGDLDSCVILWDIFTEEILHKFFLEAGPVTSLLMSPEKFKLRGEQIICCVCGDHSVALLHLEGKSCLLHARKHLFPVRMIKWHPVENFLIVGCADDSVYIWEIETGTLERHETGERARIILNCCDDSQLVKSVLPIASETLKHKSIEQRSSSPYQLGPLPCPGLQVESSCKVTDAKFCPRPFNVLPVKTKWSNVGFHILLFDLENLVELLLPTPLSDVDSSSSFYGGEVLRRAKSTVEKKTLTLRKSKTACGPLSAEALAKPITESLAQGDNTIKFSEENDGIKRQKKMKIS

SEQ ID NO: 97507 - protein, 88 aa, Homo sapiens
  Payload ID: 19444
  Gene Name: WD repeat domain 72
  ENSP ID: ENSP00000477754
MAGVPPPAWLPPCSLISDCCASNQRDSVGVGPSEPAPVSPVKHDSNSNSANFQDVEDMPDRCALEESESPGEPRHHSWIAKVCPCKVS

SEQ ID NO: 97508 - protein, 378 aa, Homo sapiens
  Payload ID: 19445
  Gene Name: WD repeat domain 73
  Uniprot ID: Q6P4I2
  ENSP ID: ENSP00000387982
MDPGDDWLVESLRLYQDFYAFDLSGATRVLEWIDDKGVFVAGYESLKKNEILHLKLPLRLSVKENKGLFPERDFKVRHGGFSDRSIFDLKHVPHTRLLVTSGLPGCYLQVWQVAEDSDVIKAVSTIAVHEKEESLWPRVAVFSTLAPGVLHGARLRSLQVVDLESRKTTYTSDVSDSEELSSLQVLDADTFAFCCASGRLGLVDTRQKWAPLENRSPGPGSGGERWCAEVGSWGQGPGPSIASLGSDGRLCLLDPRDLCHPVSSVQCPVSVPSPDPELLRVTWAPGLKNCLAISGFDGTVQVYDATSWDGTRSQDGTRSQVEPLFTHRGHIFLDGNGMDPAPLVTTHTWHPCRPRTLLSATNDASLHVWDWVDLCAPR

SEQ ID NO: 97509 - protein, 131 aa, Homo sapiens
  Payload ID: 19445
  Gene Name: WD repeat domain 73
  ENSP ID: ENSP00000453204
  MOD_RES (1)..(1): Any amino acid
XWLVESLRLYQDFYAFDLSGATRVLEWIDDKGVFVAGYESLKKNEILHLKLPLRLSVKENKGLFPERDFKVRHGGFSDRSIFDLKHVPHTRLLVTSGLPGCYLQVWQVAEDSATQEAEAEEFLEPERRRLQ

SEQ ID NO: 97510 - protein, 178 aa, Homo sapiens
  Payload ID: 19445
  Gene Name: WD repeat domain 73
  ENSP ID: ENSP00000453732
  MOD_RES (1)..(1): Any amino acid
XDPGDDWLVESLRLYQDFYAFDLSGATRVLEWIDDKGVFVAGYESLKKNEILHLKLPLRLSVKENKGLFPERDFKVRHGGFSDRSIFDLKHVPHTRLLVTSGLPGCYLQVWQVAEDSDVIKAVSTIAVHEKEESLWPRVAVFSTLAPGVLHGARLRSLQVVDLESRKTTYTSGVGDTQ

SEQ ID NO: 97511 - protein, 85 aa, Homo sapiens
  Payload ID: 19445
  Gene Name: WD repeat domain 73
  ENSP ID: ENSP00000453779
  MOD_RES (1)..(1): Any amino acid
XGDDWLVESLRLYQDFYAFDLSGATRVLEWIDDKGVFVAGYESLKKNEILHLKLPLRLSVKENKIAGYQWPSRLLSAGVAGCRGQ

SEQ ID NO: 97512 - protein, 385 aa, Homo sapiens
  Payload ID: 19446
  Gene Name: WD repeat domain 74
  Uniprot ID: Q6RFH5
  ENSP ID: ENSP00000278856
MAAAAARWNHVWVGTETGILKGVNLQRKQAANFTAGGQPRREEAVSALCWGTGGETQMLVGCADRTVKHFSTEDGIFQGQRHCPGGEGMFRGLAQADGTLITCVDSGILRVWHDKDKDTSSDPLLELRVGPGVCRMRQDPAHPHVVATGGKENALKIWDLQGSEEPVFRAKNVRNDWLDLRVPIWDQDIQFLPGSQKLVTCTGYHQVRVYDPASPQRRPVLETTYGEYPLTAMTLTPGGNSVIVGNTHGQLAEIDLRQGRLLGCLKGLAGSVRGLQCHPSKPLLASCGLDRVLRIHRIQNPRGLEHKVYLKSQLNCLLLSGRDNWEDEPQEPQEPNKVPLEDTETDELWASLEAAAKRKLSGLEQPQGALQTRRRKKKRPGSTSP

SEQ ID NO: 97513 - protein, 366 aa, Homo sapiens
  Payload ID: 19446
  Gene Name: WD repeat domain 74
  Uniprot ID: Q6RFH5
  ENSP ID: ENSP00000308931
MAAAAARWNHVWVGTETGILKGVNLQRKQAANFTAGGQPRREEAVSALCWGTGGETQMLVGCADRTVKHFSTEDGIFQGQRHCPGGEGMFRGLAQADGTLITCVDSGILRVWHDKDKDTSSDPLLELRVGPGVCRMRQDPAHPHVVATGGKENALKIWDLQGSEEPVFRAKNVRNDWLDLRVPIWDQDIQFLPGSQKLVTCTGYHQVRVYDPASPQRRPVLETTYGEYPLTAMTLTPGGNSVIVGNTHGQLAEIDLRQGRLLGCLKGLAGSVRGLQCHPSKPLLASCGLDRVLRIHRIQNPRGLEHKDEPQEPQEPNKVPLEDTETDELWASLEAAAKRKLSGLEQPQGALQTRRRKKKRPGSTSP

SEQ ID NO: 97514 - protein, 328 aa, Homo sapiens
  Payload ID: 19446
  Gene Name: WD repeat domain 74
  ENSP ID: ENSP00000432113
MLVGCADRTVKHFSTEDGIFQGQRHCPGGEGMFRGLAQADGTLITCVDSGILRVWHDKDKDTSSDPLLELRVGPGVCRMRQDPAHPHVVATGGKENALKIWDLQGSEEPVFRAKNVRNDWLDLRVPIWDQDIQFLPGSQKLVTCTGYHQVRVYDPASPQRRPVLETTYGEYPLTAMTLTPGGNSVIVGNTHGQLAEIDLRQGRLLGCLKGLAGSVRGLQCHPSKPLLASCGLDRVLRIHRIQNPRGLEHKVYLKSQLNCLLLSGRDNWEDEPQEPQEPNKVPLEDTETDELWASLEAAAKRKLSGLEQPQGALQTRRRKKKRPGSTSP

SEQ ID NO: 97515 - protein, 385 aa, Homo sapiens; identical to SEQ ID NO: 97512
  Payload ID: 19446
  Gene Name: WD repeat domain 74
  Uniprot ID: Q6RFH5
  ENSP ID: ENSP00000432119

SEQ ID NO: 97516 - protein, 385 aa, Homo sapiens; identical to SEQ ID NO: 97512
  Payload ID: 19446
  Gene Name: WD repeat domain 74
  Uniprot ID: Q6RFH5
  ENSP ID: ENSP00000435726

SEQ ID NO: 97517 - protein, 41 aa, Homo sapiens
  Payload ID: 19446
  Gene Name: WD repeat domain 74
  ENSP ID: ENSP00000438700
MAAAAARWNHVWVGTETGILKGGWQARASGSAGVHSRPWRD

SEQ ID NO: 97518 - protein, 38 aa, Homo sapiens
  Payload ID: 19446
  Gene Name: WD repeat domain 74
  ENSP ID: ENSP00000439541
  MOD_RES (1)..(1): Any amino acid
XWASLEAAAKRKLSGLEQPQGALQTRRRKKKRPGSTSP

SEQ ID NO: 97519 - protein, 57 aa, Homo sapiens
  Payload ID: 19446
  Gene Name: WD repeat domain 74
  ENSP ID: ENSP00000440612
MAAAAARWNHVWVGTETGILKGVNLQRKQAANFTAGGQPRREEAVSALCWGTGGETQ

SEQ ID NO: 97520 - protein, 830 aa, Homo sapiens
  Payload ID: 19447
  Gene Name: WD repeat domain 75
  Uniprot ID: Q8IWA0
  ENSP ID: ENSP00000314193
MVEEENIRVVRCGGSELNFRRAVFSADSKYIFCVSGDFVKVYSTVTEECVHILHGHRNLVTGIQLNPNNHLQLYSCSLDGTIKLWDYIDGILIKTFIVGCKLHALFTLAQAEDSVFVIVNKEKPDIFQLVSVKLPKSSSQEVEAKELSFVLDYINQSPKCIAFGNEGVYVAAVREFYLSVYFFKKKTTSRFTLSSSRNKKHAKNNFTCVACHPTEDCIASGHMDGKIRLWRNFYDDKKYTYTCLHWHHDMVMDLAFSVTGTSLLSGGRESVLVEWRDATEKNKEFLPRLGATIEHISVSPAGDLFCTSHSDNKIIIIHRNLEASAVIQGLVKDRSIFTGLMIDPRTKALVLNGKPGHLQFYSLQSDKQLYNLDIIQQEYINDYGLIQIELTKAAFGCFGNWLATVEQRQEKETELELQMKLWMYNKKTQGFILNTKINMPHEDCITALCFCNAEKSEQPTLVTASKDGYFKVWILTDDSDIYKKAVGWTCDFVGSYHKYQATNCCFSEDGSLLAVSFEEIVTIWDSVTWELKCTFCQRAGKIRHLCFGRLTCSKYLLGATENGILCCWNLLSCALEWNAKLNVRVMEPDPNSENIAAISQSSVGSDLFVFKPSEPRPLYIQKGISREKVQWGVFVPRDVPESFTSEAYQWLNRSQFYFLTKSQSLLTFSTKSPEEKLTPTSKQLLAEESLPTTPFYFILGKHRQQQDEKLNETLENELVQLPLTENIPAISELLHTPAHVLPSAAFLCSMFVNSLLLSKETKSAKEIPEDVDMEEEKESEDSDEENDFTEKVQDTSNTGLGEDIIHQLSKSEEKELRKFRKIDYSWIAAL

SEQ ID NO: 97521 - protein, 97 aa, Homo sapiens
  Payload ID: 19447
  Gene Name: WD repeat domain 75
  ENSP ID: ENSP00000400728
MVEEENIRVVRCGGSELNFRRAVFSADSKYIFCVSGDFVKVYSTVTEECVHILHGHRNLVTGIQLNPNNHLQSQPTWKLLIKDGFALPFTFIPKEIK

SEQ ID NO: 97522 - protein, 89 aa, Homo sapiens
  Payload ID: 19447
  Gene Name: WD repeat domain 75
  ENSP ID: ENSP00000414226
MVEEENIRVVRCGGSELNFRRAVFSADSKYIFCVSGDFVKVYSTVTEECVHILHGHRNLVTGIQLNPNNHLQVPLHALRISKRAVFLFP

SEQ ID NO: 97523 - protein, 89 aa, Homo sapiens; identical to SEQ ID NO: 97522
  Payload ID: 19447
  Gene Name: WD repeat domain 75
  ENSP ID: ENSP00000486831

SEQ ID NO: 97524 - protein, 626 aa, Homo sapiens
  Payload ID: 19448
  Gene Name: WD repeat domain 76
  Uniprot ID: Q9H967
  ENSP ID: ENSP00000263795
MSRSGAAAEKADSRQRPQMKVNEYKENQNIAYVSLRPAQTTVLIKTAKVYLAPFSLSNYQLDQLMCPKSLSEKNSNNEVACKKTKIKKTCRRIIPPKMKNTSSKAESTLQNSSSAVHTESNKLQPKRTADAMNLSVDVESSQDGDSDEDTTPSLDFSGLSPYERKRLKNISENADFFASLQLSESAARLREMIEKRQPPKSKRKKPKRENGIGCRRSMRLLKVDPSGVSLPAAPTPPTLVADETPLLPPGPLEMTSENQEDNNERFKGFLHTWAGMSKPSSKNTEKGLSSIKSYKANLNGMVISEDTVYKVTTGPIFSMALHPSETRTLVAVGAKFGQVGLCDLTQQPKEDGVYVFHPHSQPVSCLYFSPANPAHILSLSYDGTLRCGDFSRAIFEEVYRNERSSFSSFDFLAEDASTLIVGHWDGNMSLVDRRTPGTSYEKLTSSSMGKIRTVHVHPVHRQYFITAGLRDTHIYDARRLNSRRSQPLISLTEHTKSIASAYFSPLTGNRVVTTCADCNLRIFDSSCISSKIPLLTTIRHNTFTGRWLTRFQAMWDPKQEDCVIVGSMAHPRRVEIFHETGKRVHSFGGEYLVSVCSINAMHPTRYILAGGNSSGKIHVFMNEKSC

SEQ ID NO: 97525 - protein, 562 aa, Homo sapiens
  Payload ID: 19448
  Gene Name: WD repeat domain 76
  ENSP ID: ENSP00000370645
MCPKSLSEKNSNNEVACKKTKIKKTCRRIIPPKMKNTSSKAESTLQNSSSAVHTESNKLQPKRTADAMNLSVDVESSQDGDSDEDTTPSLDFSGLSPYERKRLKNISENADFFASLQLSESAARLREMIEKRQPPKSKRKKPKRENGIGCRRSMRLLKVDPSGVSLPAAPTPPTLVADETPLLPPGPLEMTSENQEDNNERFKGFLHTWAGMSKPSSKNTEKGLSSIKSYKANLNGMVISEDTVYKVTTGPIFSMALHPSETRTLVAVGAKFGQVGLCDLTQQPKEDGVYVFHPHSQPVSCLYFSPANPAHILSLSYDGTLRCGDFSRAIFEEVYRNERSSFSSFDFLAEDASTLIVGHWDGNMSLVDRRTPGTSYEKLTSSSMGKIRTVHVHPVHRQYFITAGLRDTHIYDARRLNSRRSQPLISLTEHTKSIASAYFSPLTGNRVVTTCADCNLRIFDSSCISSKIPLLTTIRHNTFTGRWLTRFQAMWDPKQEDCVIVGSMAHPRRVEIFHETGKRVHSFGGEYLVSVCSINAMHPTRYILAGGNSSGKIHVFMNEKSC

SEQ ID NO: 97526 - protein, 228 aa, Homo sapiens
  Payload ID: 19448
  Gene Name: WD repeat domain 76
  ENSP ID: ENSP00000404665
MCPKSLSEKNSNNEVACKKTKIKKTCRRIIPPKMKNTSSKAESTLQNSSSAVHTESNKLQPKRTADAMNLSVDVESSQDGDSDEDTTPSLDFSGLSPYERKRLKNISENADFFASLQLSESAARLREMIEKRQPPKSKRKKPKRENGIGCRRSMRLLKVDPSGVSLPAAPTPPTLVADETPLLPPGPLEMTSENQEDNNERFKGFLHTWAGMSKPSSKNTEKGLSSIK

SEQ ID NO: 97527 - protein, 342 aa, Homo sapiens
  Payload ID: 19449
  Gene Name: WD repeat domain 77
  Uniprot ID: Q9BQA1
  ENSP ID: ENSP00000235090
MRKETPPPLVPPAAREWNLPPNAPACMERQLEAARYRSDGALLLGASSLSGRCWAGSLWLFKDPCAAPNEGFCSAGVQTEAGVADLTWVGERGILVASDSGAVELWELDENETLIVSKFCKYEHDDIVSTVSVLSSGTQAVSGSKDICIKVWDLAQQVVLSSYRAHAAQVTCVAASPHKDSVFLSCSEDNRILLWDTRCPKPASQIGCSAPGYLPTSLAWHPQQSEVFVFGDENGTVSLVDTKSTSCVLSSAVHSQCVTGLVFSPHSVPFLASLSEDCSLAVLDSSLSELFRSQAHRDFVRDATWSPLNHSLLTTVGWDHQVVHHVVPTEPLPAPGPASVTE

SEQ ID NO: 97528 - protein, 291 aa, Homo sapiens
  Payload ID: 19449
  Gene Name: WD repeat domain 77
  ENSP ID: ENSP00000409300
  MOD_RES (1)..(1): Any amino acid
XCAAPNEGFCSAGVQTEAGVADLTWVGERGILVASDSGAVELWELDENETLIVSKFCKYEHDDIVSTVSVLSSGTQAVSGSKDICIKVWDLAQQVVLSSYRAHAAQVTCVAASPHKDSVFLSCSEDNRILLWDTRCPKPASQIGCSAPGYLPTSLAWHPQQSEVFVFGDENGTVSLVDTKSTSCVLSSAVHSQCVTGLVFSPHRLDLSQPSPPSDSVPFLASLSEDCSLAVLDSSLSELFRSQAHRDFVRDATWSPLNHSLLTTVGWDHQVVHHVVPTEPLPAPGPASVTE

SEQ ID NO: 97529 - protein, 320 aa, Homo sapiens
  Payload ID: 19450
  Gene Name: WD repeat domain 78
  ENSP ID: ENSP00000360061
MTPGKHSGASARAANGGAWGYRDFRGGQKKGWCTTPQLVATMPVSPAGSHKQQNFGLNNATQPKKSISFFATMKATSVKGYTGANQSRMAVSKTVLIPPELKTVEKPNPNIKTTQVFDINGTDVTPRPLYHPDPLTGTAKPSKLLTSQEGSLGSEFISSYSLYQNTINPSTLGQFTRSVLGSSTVSKSSVSASESIAEDLEEPSYKRERLTSFTDLQVIRAAPEKIVTKEDLEKNIEIILTETETLRFFDLPTVMVSVESEEAEKVTQRNKNYEVLCRNRLGNDLYVERMMQTFNGAPKNKDVQCDKIIMEDKGNFYHSA

SEQ ID NO: 97530 - protein, 545 aa, Homo sapiens
  Payload ID: 19450
  Gene Name: WD repeat domain 78
  Uniprot ID: Q5VTH9
  ENSP ID: ENSP00000360062
MTPGKHSGASARAANGGAWGYRDFRGGQKKGWCTTPQLVATMPVSPAGSHKQQNFGLNNATQPKKSISFFATMKATSVKGYTGANQSRMAVSKTVLIPPELKTVEKPNPNIKTTQVFDINGTDVTPRPLYHPDPLTGTAKPSKLLTSQEGSLGSEFISSYSLYQNTINPSTLGQFTRSVLGSSTVSKSSVSASESIAEDLEEPSYKRERLTSFTDLQVIRAAPEKIVTKEDLEKNIEIILTETETLRFFDLPTVMVSVESEEAEKVTQRNKNYEVLCRNRLGNDLYVERMMQTFNGAPKNKDVQCDKIIMEDKGIMSTAWDLYDSYNAMELVSLSVKQSVVESSSKANVLPKDQDQRLPGSTTEKNSETSSLMDIENVILAKIHEDEEDHSDAILKSDKFHQDLFFMERVLMENIFQPKLAAYRQLPVLKEPEPEEPEDVLESAKHEEVEEESKKEEEEEIHAEESTIPANLERLWSFSCDLTKGLNVSSLAWNKTNPDLLAVGYGHFGFKEQKRGLACCWSIKNPMVTQTRIRSIFIWLLTKFS

SEQ ID NO: 97531 - protein, 848 aa, Homo sapiens
  Payload ID: 19450
  Gene Name: WD repeat domain 78
  Uniprot ID: Q5VTH9
  ENSP ID: ENSP00000360065
MTPGKHSGASARAANGGAWGYRDFRGGQKKGWCTTPQLVATMPVSPAGSHKQQNFGLNNATQPKKSISFFATMKATSVKGYTGANQSRMAVSKTVLIPPELKTVEKPNPNIKTTQVFDINGTDVTPRPLYHPDPLTGTAKPSKLLTSQEGSLGSEFISSYSLYQNTINPSTLGQFTRSVLGSSTVSKSSVSASESIAEDLEEPSYKRERLTSFTDLQVIRAAPEKIVTKEDLEKNIEIILTETETLRFFDLPTVMVSVESEEAEKVTQRNKNYEVLCRNRLGNDLYVERMMQTFNGAPKNKDVQCDKIIMEDKGIMSTAWDLYDSYNAMELVSLSVKQSVVESSSKANVLPKDQDQRLPGSTTEKNSETSSLMDIENVILAKIHEDEEDHSDAILKSDKFHQDLFFMERVLMENIFQPKLAAYRQLPVLKEPEPEEPEDVLESAKHEEVEEESKKEEEEEIHAEESTIPANLERLWSFSCDLTKGLNVSSLAWNKTNPDLLAVGYGHFGFKEQKRGLACCWSIKNPMWPERIYQSPYGVTAVDFSIGAPNLLAVGYHNGTIAIYNVRSNSNVPVLDSSESPQKHLGPVWQLQWIEQDRGTTGDGKREILVSISADGRISKWVIRKGLDCYDLMRLKRTTAASNKKGGEKEKKDEALISRQAPGMCFAFHPKDTNIYLAGTEEGHIHKCSCSYNEQYLDTYRGHKGPVYKVTWNPFCHDVFLSCSADWGVIIWQQENVKPSLSFYPATSVVYDVAWSPKSSYIFAAANENRVEIWDLHISTLDPLIVNTANPGIKFTTILFAKQTDCLLVGDSDGQVSVYELRNMPTVLETGRGDIMDTLLGSKSNQSA

SEQ ID NO: 97532 - protein, 55 aa, Homo sapiens
  Payload ID: 19450
  Gene Name: WD repeat domain 78
  ENSP ID: ENSP00000432461
KHSGASARAANGGAWGYRDFRGGQKKGWCTTPQLVATMPVSPAGSHKQQNFGLEA

SEQ ID NO: 97533 - protein, 122 aa, Homo sapiens
  Payload ID: 19450
  Gene Name: WD repeat domain 78
  ENSP ID: ENSP00000432979
  MOD_RES (1)..(1): Any amino acid
XQRNKNYEVLCRNRLGNDLYVERMMQTFNGAPKNKDVQCDKIIMEDKGIMSTAWDLYDSYNAMELVSLSVKQSVVESSSKANVLPKDQDQRLPGSTTEKTVVWERDVMTEEGQRECNQCCCL

SEQ ID NO: 97534 - protein, 167 aa, Homo sapiens
  Payload ID: 19450
  Gene Name: WD repeat domain 78
  ENSP ID: ENSP00000433037
GIMSTAWDLYDSYNAMELVSLSVKQSVVESSSKANVLPKDQDQRLPGSTTEKKPEPEEPEDVLESAKHEEVEEESKKEEEEEIHAEESTIPANLERLWSFSCDLTKGLNVSSLAWNKTNPDLLAVGYGHFGFKEQKRGLACCWSIKNPMVTQTRIRSIFIWLLTKFS

SEQ ID NO: 97535 - protein, 581 aa, Homo sapiens
  Payload ID: 19450
  Gene Name: WD repeat domain 78
  ENSP ID: ENSP00000433682
NIEIILTETETLRFFDLPTVMVSVESEEAEKVTQRNKNYEVLCRNRLGNDLYVERMMQTFNGAPKNKDVQCDKIIMEDKGIMSTAWDLYDSYNAMELVSLSVKQSVVESSSKANVLPKDQDQRLPGSTTEKNSETSSLMDIENVILAKIHEDEEDHSDAILKSDKFHQDLFFMERVLMENIFQPKLAAYRQLPVLKEPEPEEPEDVLESAKHEEVEEESKKEEEEEIHAEESTIPANLERLWSFSCDLTKGLNVSSLAWNKTNPDLLAVGYGHFGFKEQKRGLACCWSIKNPMWPERIYQSPYGVTAVDFSIGAPNLLAVGYHNGTIAIYNVRSNSNVPVLDSSESPQKHLGPVWQLQWIEQDRGTTGDGKREILVSISADGRISKWVIRKGLDCYDLMRLKRTTAASNKKGGEKEKKDEALISRQAPGMCFAFHPKGPVYKVTWNPFCHDVFLSCSADWGVIIWQQENVKPSLSFYPATSVVYDVAWSPKSSYIFAAANENRVEIWDLHISTLDPLIVNTANPGIKFTTILFAKQTDCLLVGDSDGQVSVYELRNMPTVLETGRGDIMDTLLGSKSNQSA

SEQ ID NO: 97536 - protein, 49 aa, Homo sapiens
  Payload ID: 19450
  Gene Name: WD repeat domain 78
  ENSP ID: ENSP00000434351
MKATSVKGYTGANQSRMAVSKTVLIPPELKTVEKPNPNIKTTQVIFLEF

SEQ ID NO: 97537 - protein, 159 aa, Homo sapiens
  Payload ID: 19450
  Gene Name: WD repeat domain 78
  ENSP ID: ENSP00000435836
  MOD_RES (1)..(1): Any amino acid
XTGANQSRMAVSKTVLIPPELKTVEKPNPNIKTTQVFDINGTDVTPRPLYHPDPLTGTAKPSKLLTSQEGSLGSEFISSYSLYQNTINPSTLGQFTRSVLGSSTVSKSSVSASESIAEDLEEPSYKRERLTSFTGNENILVYFSNSPLFSQYAYYWLDT

SEQ ID NO: 97538 - protein, 62 aa, Homo sapiens
  Payload ID: 19450
  Gene Name: WD repeat domain 78
  ENSP ID: ENSP00000436463
KHSGASARAANGGAWGYRDFRGGQKKGWCTTPQLVATMPVSPAGSHKQQNFGLSTYWYSKTK

SEQ ID NO: 97539 - protein, 890 aa, Homo sapiens
  Payload ID: 19451
  Gene Name: WD repeat domain 81
  Uniprot ID: Q562E7
  ENSP ID: ENSP00000312074
MDGEPPASSGLGLPDYTSGVSFHDQADLPETEDFQAGLYVTESPQPQEAEAVSLGRLSDKSSTSETSLGEERAPDEGGAPVDKSSLRSGDSSQDLKQSEGSEEEEEEEDSCVVLEEEEGEQEEVTGASELTLSDTVLSMETVVAGGSGGDGEEEEEALPEQSEGKEQKILLDTACKMVRWLSAKLGPTVASRHVARNLLRLLTSCYVGPTRQQFTVSSGESPPLSAGNIYQKRPVLGDIVSGPVLSCLLHIARLYGEPVLTYQYLPYISYLVAPGSASGPSRLNSRKEAGLLAAVTLTQKIIVYLSDTTLMDILPRISHEVLLPVLSFLTSLVTGFPSGAQARTILCVKTISLIALICLRIGQEMVQQHLSEPVATFFQVFSQLHELRQQDLKLDPAGRGEGQLPQVVFSDGQQRPVDPALLDELQKVFTLEMAYTIYVPFSCLLGDIIRKIIPNHELVGELAALYLESISPSSRNPASVEPTMPGTGPEWDPHGGGCPQDDGHSGTFGSVLVGNRIQIPNDSRPENPGPLGPISGVGGGGLGSGSDDNALKQELPRSVHGLSGNWLAYWQYEIGVSQQDAHFHFHQIRLQSFPGHSGAVKCVAPLSSEDFFLSGSKDRTVRLWPLYNYGDGTSETAPRLVYTQHRKSVFFVGQLEAPQHVVSCDGAVHVWDPFTGKTLRTVEPLDSRVPLTAVAVMPAPHTSITMASSDSTLRFVDCRKPGLQHEFRLGGGLNPGLVRALAISPSGRSVVAGFSSGFMVLLDTRTGLVLRGWPAHEGDILQIKAVEGSVLVSSSSDHSLTVWKELEQKPTHHYKSASDPIHTFDLYGSEVVTGTVSNKIGVCSLLEPPSQATTKLSSENFRGTLTSLALLPTKRHLLLGSDNGVIRLLA

SEQ ID NO: 97540 - protein, 1941 aa, Homo sapiens
  Payload ID: 19451
  Gene Name: WD repeat domain 81
  Uniprot ID: Q562E7
  ENSP ID: ENSP00000386609
MAQGSGGREGALRTPAGGWHSPPSPDMQELLRSVERDLSIDPRQLAPAPGGTHVVALVPARWLASLRDRRLPLGPCPRAEGLGEAEVRTLLQRSVQRLPAGWTRVEVHGLRKRRLSYPLGGGLPFEDGSCGPETLTRFMQEVAAQNYRNLWRHAYHTYGQPYSHSPAPSAVPALDSVRQALQRVYGCSFLPVGETTQCPSYAREGPCPPRGSPACPSLLRAEALLESPEMLYVVHPYVQFSLHDVVTFSPAKLTNSQAKVLFILFRVLRAMDACHRQGLACGALSLYHIAVDEKLCSELRLDLSAYERPEEDENEEAPVARDEAGIVSQEEQGGQPGQPTGQEELRSLVLDWVHGRISNFHYLMQLNRLAGRRQGDPNYHPVLPWVVDFTTPHGRFRDLRKSKFRLNKGDKQLDFTYEMTRQAFVAGGAGGGEPPHVPHHISDVLSDITYYVYKARRTPRSVLCGHVRAQWEPHEYPASMERMQNWTPDECIPEFYTDPSIFRSIHPDMPDLDVPAWCSSSQEFVAAHRALLESREVSRDLHHWIDLTFGYKLQGKEAVKEKNVCLHLVDAHTHLASYGVVQLFDQPHPQRLAGAPALAPEPPLIPKLLVQTIQETTGREDFTENPGQLPNGVGRPVLEATPCEASWTRDRPVAGEDDLEQATEALDSISLAGKAGDQLGSSSQASPGLLSFSVASASRPGRRNKAAGADPGEGEEGRILLPEGFNPMQALEELEKTGNFLAKGLGGLLEVPEQPRVQPAVPLQCLLHRDMQALGVLLAEMVFATRVRTLQPDAPLWVRFQAVRGLCTRHPKEVPVSLQPVLDTLLQMSGPEVPMGAERGKLDQLFEYRPVSQGLPPPCPSQLLSPFSSVVPFPPYFPALHRFILLYQARRVEDEAQGRELVFALWQQLGAVLKDITPEGLEILLPFVLSLMSEEHTAVYTAWYLFEPVAKALGPKNANKYLLKPLIGAYESPCQLHGRFYLYTDCFVAQLMVRLGLQAFLTHLLPHVLQVLAGAEASQEESKDLAGAAEEEESGLPGAGPGSCAFGEEIPMDGEPPASSGLGLPDYTSGVSFHDQADLPETEDFQAGLYVTESPQPQEAEAVSLGRLSDKSSTSETSLGEERAPDEGGAPVDKSSLRSGDSSQDLKQSEGSEEEEEEEDSCVVLEEEEGEQEEVTGASELTLSDTVLSMETVVAGGSGGDGEEEEEALPEQSEGKEQKILLDTACKMVRWLSAKLGPTVASRHVARNLLRLLTSCYVGPTRQQFTVSSGESPPLSAGNIYQKRPVLGDIVSGPVLSCLLHIARLYGEPVLTYQYLPYISYLVAPGSASGPSRLNSRKEAGLLAAVTLTQKIIVYLSDTTLMDILPRISHEVLLPVLSFLTSLVTGFPSGAQARTILCVKTISLIALICLRIGQEMVQQHLSEPVATFFQVFSQLHELRQQDLKLDPAGRGEGQLPQVVFSDGQQRPVDPALLDELQKVFTLEMAYTIYVPFSCLLGDIIRKIIPNHELVGELAALYLESISPSSRNPASVEPTMPGTGPEWDPHGGGCPQDDGHSGTFGSVLVGNRIQIPNDSRPENPGPLGPISGVGGGGLGSGSDDNALKQELPRSVHGLSGNWLAYWQYEIGVSQQDAHFHFHQIRLQSFPGHSGAVKCVAPLSSEDFFLSGSKDRTVRLWPLYNYGDGTSETAPRLVYTQHRKSVFFVGQLEAPQHVVSCDGAVHVWDPFTGKTLRTVEPLDSRVPLTAVAVMPAPHTSITMASSDSTLRFVDCRKPGLQHEFRLGGGLNPGLVRALAISPSGRSVVAGFSSGFMVLLDTRTGLVLRGWPAHEGDILQIKAVEGSVLVSSSSDHSLTVWKELEQKPTHHYKSASDPIHTFDLYGSEVVTGTVSNKIGVCSLLEPPSQATTKLSSENFRGTLTSLALLPTKRHLLLGSDNGVIRLLA

SEQ ID NO: 97541 - protein, 738 aa, Homo sapiens
  Payload ID: 19451
  Gene Name: WD repeat domain 81
  Uniprot ID: Q562E7
  ENSP ID: ENSP00000391074
MLVRVVLSLTPSFPEPSALYTACKMVRWLSAKLGPTVASRHVARNLLRLLTSCYVGPTRQQFTVSSGESPPLSAGNIYQKRPVLGDIVSGPVLSCLLHIARLYGEPVLTYQYLPYISYLVAPGSASGPSRLNSRKEAGLLAAVTLTQKIIVYLSDTTLMDILPRISHEVLLPVLSFLTSLVTGFPSGAQARTILCVKTISLIALICLRIGQEMVQQHLSEPVATFFQVFSQLHELRQQDLKLDPAGRGEGQLPQVVFSDGQQRPVDPALLDELQKVFTLEMAYTIYVPFSCLLGDIIRKIIPNHELVGELAALYLESISPSSRNPASVEPTMPGTGPEWDPHGGGCPQDDGHSGTFGSVLVGNRIQIPNDSRPENPGPLGPISGVGGGGLGSGSDDNALKQELPRSVHGLSGNWLAYWQYEIGVSQQDAHFHFHQIRLQSFPGHSGAVKCVAPLSSEDFFLSGSKDRTVRLWPLYNYGDGTSETAPRLVYTQHRKSVFFVGQLEAPQHVVSCDGAVHVWDPFTGKTLRTVEPLDSRVPLTAVAVMPAPHTSITMASSDSTLRFVDCRKPGLQHEFRLGGGLNPGLVRALAISPSGRSVVAGFSSGFMVLLDTRTGLVLRGWPAHEGDILQIKAVEGSVLVSSSSDHSLTVWKELEQKPTHHYKSASDPIHTFDLYGSEVVTGTVSNKIGVCSLLEPPSQATTKLSSENFRGTLTSLALLPTKRHLLLGSDNGVIRLLA

SEQ ID NO: 97542 - protein, 132 aa, Homo sapiens
  Payload ID: 19451
  Gene Name: WD repeat domain 81
  ENSP ID: ENSP00000395198
MVQQHLSEPVATFFQVFSQLHELRQQDLKLDPAGRGEGQLPQVVFSDGQQRPVDPALLDELQKVFTLEMAYTIYVPFSCLLGDIIRKIIPNHELVGELAALYLESISPSSRNPASVEPTMPGTGPEWDPHGG

SEQ ID NO: 97543 - protein, 172 aa, Homo sapiens
  Payload ID: 19451
  Gene Name: WD repeat domain 81
  ENSP ID: ENSP00000395226
MLVRVVLSLTPSFPEPSALYTACKMVRWLSAKLGPTVASRHVARNLLRLLTSCYVGPTRQQFTVSSGESPPLSAGNIYQKRPVLGDIVSGPVLSCLLHIARLYGEPVLTYQYLPYISYLVAPGSASGPSRLNSRKEAGLLAAVTLTQKIIVYLSDTTLMDILPRISHEVLLP

SEQ ID NO: 97544 - protein, 580 aa, Homo sapiens
  Payload ID: 19451
  Gene Name: WD repeat domain 81
  ENSP ID: ENSP00000401560
MDILPRISHEVLLPVLSFLTSLVTGFPSGAQARTILCVKTISLIALICLRIGQEMVQQHLSEPVATFFQVFSQLHELRQQDLKLDPAGRGEGQLPQVVFSDGQQRPVDPALLDELQKVFTLEMAYTIYVPFSCLLGDIIRKIIPNHELVGELAALYLESISPSSRNPASVEPTMPGTGPEWDPHGGGCPQDDGHSGTFGSVLVGNRIQIPNDSRPENPGPLGPISGVGGGGLGSGSDDNALKQELPRSVHGLSGNWLAYWQYEIGVSQQDAHFHFHQIRLQSFPGHSGAVKCVAPLSSEDFFLSGSKDRTVRLWPLYNYGDGTSETAPRLVYTQHRKSVFFVGQLEAPQHVVSCDGAVHVWDPFTGKTLRTVEPLDSRVPLTAVAVMPAPHTSITMASSDSTLRFVDCRKPGLQHEFRLGGGLNPGLVRALAISPSGRSVVAGFSSGFMVLLDTRTGLVLRGWPAHEGDILQIKAVEGSVLVSSSSDHSLTVWKELEQKPTHHYKSASDPIHTFDLYGSEVVTGTVSNKIGVCSLLEPPSQATTKLSSENFRGTLTSLALLPTKRHLLLGSDNGVIRLLA

SEQ ID NO: 97545 - protein, 714 aa, Homo sapiens
  Payload ID: 19451
  Gene Name: WD repeat domain 81
  Uniprot ID: Q562E7
  ENSP ID: ENSP00000407845
MVRWLSAKLGPTVASRHVARNLLRLLTSCYVGPTRQQFTVSSGESPPLSAGNIYQKRPVLGDIVSGPVLSCLLHIARLYGEPVLTYQYLPYISYLVAPGSASGPSRLNSRKEAGLLAAVTLTQKIIVYLSDTTLMDILPRISHEVLLPVLSFLTSLVTGFPSGAQARTILCVKTISLIALICLRIGQEMVQQHLSEPVATFFQVFSQLHELRQQDLKLDPAGRGEGQLPQVVFSDGQQRPVDPALLDELQKVFTLEMAYTIYVPFSCLLGDIIRKIIPNHELVGELAALYLESISPSSRNPASVEPTMPGTGPEWDPHGGGCPQDDGHSGTFGSVLVGNRIQIPNDSRPENPGPLGPISGVGGGGLGSGSDDNALKQELPRSVHGLSGNWLAYWQYEIGVSQQDAHFHFHQIRLQSFPGHSGAVKCVAPLSSEDFFLSGSKDRTVRLWPLYNYGDGTSETAPRLVYTQHRKSVFFVGQLEAPQHVVSCDGAVHVWDPFTGKTLRTVEPLDSRVPLTAVAVMPAPHTSITMASSDSTLRFVDCRKPGLQHEFRLGGGLNPGLVRALAISPSGRSVVAGFSSGFMVLLDTRTGLVLRGWPAHEGDILQIKAVEGSVLVSSSSDHSLTVWKELEQKPTHHYKSASDPIHTFDLYGSEVVTGTVSNKIGVCSLLEPPSQATTKLSSENFRGTLTSLALLPTKRHLLLGSDNGVIRLLA

SEQ ID NO: 97546 - protein, 197 aa, Homo sapiens
  Payload ID: 19451
  Gene Name: WD repeat domain 81
  ENSP ID: ENSP00000458811
  MOD_RES (1)..(1): Any amino acid
XFQAGLYVTESPQPQEAEAVSLGRLSDKSSTSETSLGEERAPDEGGAPVDKSSLRSGDSSQDLKQSEGSEEEEEEEDSCVVLEEEEGEQEEVTGASELTLSDTVLSMETVVAGGSGGDGEEEEEALPEQSEGKEQKILLGPTRQQFTVSSGESPPLSAGNIYQKRPVLGDIVSGPVLSCLLHIARLYGEPVLTYQYL

SEQ ID NO: 97547 - protein, 171 aa, Homo sapiens
  Payload ID: 19451
  Gene Name: WD repeat domain 81
  ENSP ID: ENSP00000460742
MHAGPCSSQPDTVVPRTQRALFPSGAQARTILCVKTISLIALICLRIGQEMVQQHLSEPVATFFQVFSQLHELRQQDLKLDPAGRGEGQLPQVVFSDGQQRPVDPALLDELQKVFTLEMAYTIYVPFSCLLGDIIRKIIPNHELVGELAALYLESISPSSRNPASVEPTMP

SEQ ID NO: 97548 - protein, 123 aa, Homo sapiens
  Payload ID: 19451
  Gene Name: WD repeat domain 81
  ENSP ID: ENSP00000466240
  MOD_RES (1)..(1): Any amino acid
XRLLTSCYVGPTRQQFTVSSGESPPLSAGNIYQKRPVLGDIVSGPVLSCLLHIARLYGEPVLTYQYLPYISYLVPKWGPGSDHPVCENHQPHRPHLPAHWTGDGPAAPERARGHLFPGLLSAA

SEQ ID NO: 97549 - protein, 738 aa, Homo sapiens; identical to SEQ ID NO: 97541
  Payload ID: 19451
  Gene Name: WD repeat domain 81
  Uniprot ID: Q562E7
  ENSP ID: ENSP00000477991

SEQ ID NO: 97550 - protein, 714 aa, Homo sapiens; identical to SEQ ID NO: 97545
  Payload ID: 19451
  Gene Name: WD repeat domain 81
  Uniprot ID: Q562E7
  ENSP ID: ENSP00000480101

SEQ ID NO: 97551 - protein, 890 aa, Homo sapiens; identical to SEQ ID NO: 97539
  Payload ID: 19451
  Gene Name: WD repeat domain 81
  Uniprot ID: Q562E7
  ENSP ID: ENSP00000480442

SEQ ID NO: 97552 - protein, 580 aa, Homo sapiens; identical to SEQ ID NO: 97544
  Payload ID: 19451
  Gene Name: WD repeat domain 81
  ENSP ID: ENSP00000481723

SEQ ID NO: 97553 - protein, 132 aa, Homo sapiens; identical to SEQ ID NO: 97542
  Payload ID: 19451
  Gene Name: WD repeat domain 81
  ENSP ID: ENSP00000487826

SEQ ID NO: 97554 - protein, 123 aa, Homo sapiens; identical to SEQ ID NO: 97548
  Payload ID: 19451
  Gene Name: WD repeat domain 81
  ENSP ID: ENSP00000488235
  MOD_RES (1)..(1): Any amino acid

SEQ ID NO: 97555 - protein, 197 aa, Homo sapiens; identical to SEQ ID NO: 97546
  Payload ID: 19451
  Gene Name: WD repeat domain 81
  ENSP ID: ENSP00000488266
  MOD_RES (1)..(1): Any amino acid

SEQ ID NO: 97556 - protein, 1940 aa, Homo sapiens
  Payload ID: 19451
  Gene Name: WD repeat domain 81
  ENSP ID: ENSP00000488468
MAQGSGGREGALRTPAGGWHSPPSPDMQELLRSVERDLSIDPRQLAPAPGGTHVVALVPARWLASLRDRRLPLGPCPRAEGLGEAEVRTLLQRSVQRLPAGWTRVEVHGLRKRRLSYPLGGGLPFEDGSCGPETLTRFMQEVAAQNYRNLWRHAYHTYGQPYSHSPAPSAVPALDSVRQALQRVYGCSFLPVGETTQCPSYAREGPCPPRGSPACPSLLRAEALLESPEMLYVVHPYVQFSLHDVVTFSPAKLTNSQAKVLFILFRVLRAMDACHRQGLACGALSLYHIAVDEKLCSELRLDLSAYERPEEDENEEAPVARDEAGIVSQEEQGGQPGQPTGQEELRSLVLDWVHGRISNFHYLMQLNRLAGRRQGDPNYHPVLPWVVDFTTPHGRFRDLRKSKFRLNKGDKQLDFTYEMTRQAFVAGGAGGGEPPHVPHHISDVLSDITYYVYKARRTPRSVLCGHVRAQWEPHEYPASMERMQNWTPDECIPEFYTDPSIFRSIHPDMPDLDVPAWCSSSQEFVAAHRALLESREVSRDLHHWIDLTFGYKLQGKEAVKEKNVCLHLVDAHTHLASYGVVQLFDQPHPQRLAGAPALAPEPPLIPKLLVQTIQETTGREDFTENPGQLPNGVGRPVLEATPCEASWTRDRPVAGEDDLEQATEALDSISLAGKAGDQLGSSSQASPGLLSFSVASASRPGRRNKAAGADPGEGEEGRILLPEGFNPMQALEELEKTGNFLAKGLGGLLEVPEQPRVQPAVPLQCLLHRDMQALGVLLAEMVFATRVRTLQPDAPLWVRFQAVRGLCTRHPKEVPVSLQPVLDTLLQMSGPEVPMGAERGKLDQLFEYRPVSQGLPPPCPSQLLSPFSSVVPFPPYFPALHRFILLYQARRVEDEAQGRELVFALWQQLGAVLKDITPEGLEILLPFVLSLMSEEHTAVYTAWYLFEPVAKALGPKNANKYLLKPLIGAYESPCQLHGRFYLYTDCFVAQLMVRLGLQAFLTHLLPHVLQVLAGAEASQEESKDLAGAAEEESGLPGAGPGSCAFGEEIPMDGEPPASSGLGLPDYTSGVSFHDQADLPETEDFQAGLYVTESPQPQEAEAVSLGRLSDKSSTSETSLGEERAPDEGGAPVDKSSLRSGDSSQDLKQSEGSEEEEEEEDSCVVLEEEEGEQEEVTGASELTLSDTVLSMETVVAGGSGGDGEEEEEALPEQSEGKEQKILLDTACKMVRWLSAKLGPTVASRHVARNLLRLLTSCYVGPTRQQFTVSSGESPPLSAGNIYQKRPVLGDIVSGPVLSCLLHIARLYGEPVLTYQYLPYISYLVAPGSASGPSRLNSRKEAGLLAAVTLTQKIIVYLSDTTLMDILPRISHEVLLPVLSFLTSLVTGFPSGAQARTILCVKTISLIALICLRIGQEMVQQHLSEPVATFFQVFSQLHELRQQDLKLDPAGRGEGQLPQVVFSDGQQRPVDPALLDELQKVFTLEMAYTIYVPFSCLLGDIIRKIIPNHELVGELAALYLESISPSSRNPASVEPTMPGTGPEWDPHGGGCPQDDGHSGTFGSVLVGNRIQIPNDSRPENPGPLGPISGVGGGGLGSGSDDNALKQELPRSVHGLSGNWLAYWQYEIGVSQQDAHFHFHQIRLQSFPGHSGAVKCVAPLSSEDFFLSGSKDRTVRLWPLYNYGDGTSETAPRLVYTQHRKSVFFVGQLEAPQHVVSCDGAVHVWDPFTGKTLRTVEPLDSRVPLTAVAVMPAPHTSITMASSDSTLRFVDCRKPGLQHEFRLGGGLNPGLVRALAISPSGRSVVAGFSSGFMVLLDTRTGLVLRGWPAHEGDILQIKAVEGSVLVSSSSDHSLTVWKELEQKPTHHYKSASDPIHTFDLYGSEVVTGTVSNKIGVCSLLEPPSQATTKLSSENFRGTLTSLALLPTKRHLLLGSDNGVIRLLA

SEQ ID NO: 97557 - protein, 172 aa, Homo sapiens; identical to SEQ ID NO: 97543
  Payload ID: 19451
  Gene Name: WD repeat domain 81
  ENSP ID: ENSP00000488702

SEQ ID NO: 97558 - protein, 171 aa, Homo sapiens; identical to SEQ ID NO: 97547
  Payload ID: 19451
  Gene Name: WD repeat domain 81
  ENSP ID: ENSP00000488799

SEQ ID NO: 97559 - protein, 313 aa, Homo sapiens
  Payload ID: 19452
  Gene Name: WD repeat domain 82
  Uniprot ID: Q6UXN9
  ENSP ID: ENSP00000296490
MKLTDSVLRSFRVAKVFRENSDKINCFDFSPNGETVISSSDDDSIVLYDCQEGKPKRTLYSKKYGVDLIRYTHAANTVVYSSNKIDDTIRYLSLHDNKYIRYFPGHSKRVVALSMSPVDDTFISGSLDKTIRLWDLRSPNCQGLMHLQGKPVCSFDPEGLIFAAGVNSEMVKLYDLRSFDKGPFATFKMQYDRTCEWTGLKFSNDGKLILISTNGSFIRLIDAFKGVVMHTFGGYANSKAVTLEASFTPDSQFIMIGSEDGKIHVWNGESGIKVAVLDGKHTGPITCLQFNPKFMTFASACSNMAFWLPTIDD

SEQ ID NO: 97560 - protein, 47 aa, Homo sapiens
  Payload ID: 19452
  Gene Name: WD repeat domain 82
  ENSP ID: ENSP00000417313
MSPVDDTFISGSLDKTIRLWDLRSPNCQGLMHLQGKPVCSFDPEGLI

SEQ ID NO: 97561 - protein, 74 aa, Homo sapiens
  Payload ID: 19452
  Gene Name: WD repeat domain 82
  ENSP ID: ENSP00000420779
MSPVDDTFISGSLDKTIRLWDLRSPNCQGLMHLQGKPVCSFDPEGLIFAAGVNSEMVKLYDLRSFDKGPFATFK

SEQ ID NO: 97562 - protein, 74 aa, Homo sapiens
  Payload ID: 19453
  Gene Name: WD repeat domain 83
  ENSP ID: ENSP00000396530
DKTLKLWNPLRGTLLRTYSGHGYEVLDAAGSFDNSSLCSGGGDKAVVLWDVASGQVVRKFRGHAGLRGWPRETL

SEQ ID NO: 97563 - protein, 315 aa, Homo sapiens
  Payload ID: 19453
  Gene Name: WD repeat domain 83
  Uniprot ID: Q9BRX9
  ENSP ID: ENSP00000402653
MAFPEPKPRPPELPQKRLKTLDCGQGAVRAVRFNVDGNYCLTCGSDKTLKLWNPLRGTLLRTYSGHGYEVLDAAGSFDNSSLCSGGGDKAVVLWDVASGQVVRKFRGHAGKVNTVQFNEEATVILSGSIDSSIRCWDCRSRRPEPVQTLDEARDGVSSVKVSDHEILAGSVDGRVRRYDLRMGQLFSDYVGSPITCTCFSRDGQCTLVSSLDSTLRLLDKDTGELLGEYKGHKNQEYKLDCCLSERDTHVVSCSEDGKVFFWDLVEGALALALPVGSGVVQSLAYHPTEPCLLTAMGGSVQCWREEAYEAEDGAG

SEQ ID NO: 97564 - protein, 153 aa, Homo sapiens
  Payload ID: 19453
  Gene Name: WD repeat domain 83
  ENSP ID: ENSP00000448331
MAFPEPKPRPPELPQKRLKTLDCGQGAVRAVRFNVDGNYCLTCGSDKTLKLWNPLRGTLLRTYSGHGYEVLDAAGSFDNSSLCSGGGDKAVVLWDVASGQVVRKFRGHAGKVNTVQFNEEATVILSVSAVGIAAHGGLSQCRRWMRPEMACPV

SEQ ID NO: 97565 - protein, 71 aa, Homo sapiens
  Payload ID: 19453
  Gene Name: WD repeat domain 83
  ENSP ID: ENSP00000448722
MAFPEPKPRPPELPQKRLKTLDCGQGAVRAVRFNVDGNYCLTCGSDKTLKLWNPLRGTLLRTYSGHGYELL

SEQ ID NO: 97566 - protein, 211 aa, Homo sapiens
  Payload ID: 19453
  Gene Name: WD repeat domain 83
  ENSP ID: ENSP00000449257
  MOD_RES (1)..(1): Any amino acid
XGQVVRKFRGHAGKVNTVQFNEEATVILSGSIDSSIRCWDCRSRRPEPVQTLDEARDGVSSVKVSDHEILAGRAWWCMPVFPSTREAEEGESLEPGRQRFRSVDGRVRRYDLRMGQLFSDYVGSPITCTCFSRDGQCTLVSSLDSTLRLLDKDTGELLGEYKGHKNQEYKLDCCLSERDTHVVSCSEDGKVFFWDLVEGALALALPVGSGV

SEQ ID NO: 97567 - protein, 71 aa, Homo sapiens; identical to SEQ ID NO: 97565
  Payload ID: 19453
  Gene Name: WD repeat domain 83
  ENSP ID: ENSP00000450416

SEQ ID NO: 97568 - protein, 104 aa, Homo sapiens
  Payload ID: 19454
  Gene Name: WD repeat domain 83 opposite strand
  ENSP ID: ENSP00000222190
MSTNNMSDPRRPNKVLRYKPPPSECNPALDDPTPDYMNLLGMIFSMCGLMLKWCAWVAVYCSFISFANSRSSEDTKQMMSSFMLSISAVVMSYLQNPQPMTPPW

SEQ ID NO: 97569 - protein, 106 aa, Homo sapiens
  Payload ID: 19454
  Gene Name: WD repeat domain 83 opposite strand
  Uniprot ID: Q9Y284
  ENSP ID: ENSP00000468969
MSTNNMSDPRRPNKVLRYKPPPSECNPALDDPTPDYMNLLGMIFSMCGLMLKLKWCAWVAVYCSFISFANSRSSEDTKQMMSSFMLSISAVVMSYLQNPQPMTPPW

SEQ ID NO: 97570 - protein, 85 aa, Homo sapiens
  Payload ID: 19454
  Gene Name: WD repeat domain 83 opposite strand
  ENSP ID: ENSP00000471797
  MOD_RES (1)..(1): Any amino acid
XSTNNMSDPRRPNKVLRYKPPPSECNPALDDPTPDYMNLLGMIFSMCGLMLKLKWCAWVAVYCSFISFANSRSSEDTKQMMSSFM

SEQ ID NO: 97571 - protein, 376 aa, Homo sapiens
  Payload ID: 19455
  Gene Name: WD repeat domain 86
  Uniprot ID: Q86TI4
  ENSP ID: ENSP00000335522
MGGGGSALRVCADHRGGINWLSLSPDGQRLLTGSEDGTARLWSTADGQCCALLQGHESYVTFCQLEDEAAFTCSADCTIRRWDVLTGQCLQVYRGHTSIVNRILVANNQLFSSSYDRTARVWSVDKGQMSREFRGHRNCVLTLAYSAPWDLPSTPCAEEAAAGGLLVTGSTDGTAKVWQVASGCCHQTLRGHTGAVLCLVLDTPGHTAFTGSTDATIRAWDILSGEQLRVFREHRGSVICLELVNRLVYSGSADRTVKCWLADTGECVRTFTAHRRNVSALKYHAGTLFTGSGDACARAFDAQSGELRRVFRGHTFIINCIQVHGQVLYTASHDGALRLWDVRGLRGAPRPPPPMRSLSRLFSNKVGCAAAPLQPA

SEQ ID NO: 97572 - protein, 277 aa, Homo sapiens
  Payload ID: 19455
  Gene Name: WD repeat domain 86
  Uniprot ID: Q86TI4
  ENSP ID: ENSP00000417512
MSREFRGHRNCVLTLAYSAPWDLPSTPCAEEAAAGGLLVTGSTDGTAKVWQVASGCCHQTLRGHTGAVLCLVLDTPGHTAFTGSTDATIRAWDILSGEQLRVFREHRGSVICLECSRAAGTLAPGPSTRSLESCGGCSGATHSSSTASRCTARCSTPPRTTAPCASGTCAGSEVPRGPLRPCAASRGSSATRWAAPPRPCSRPDPAGPLQTPAQTPSGSQSAPPCYPRWWRPMAGEGRGARKPGREESPSQASGFSLVARRRWERECSPWGPPPFPF

SEQ ID NO: 97573 - protein, 482 aa, Homo sapiens
  Payload ID: 19455
  Gene Name: WD repeat domain 86
  Uniprot ID: Q86TI4
  ENSP ID: ENSP00000419162
MGGGGSALRVCADHRGGINWLSLSPDGQRLLTGSEDGTARLWSTADGQCCALLQGHESYVTFCQLEDEAAFTCSADCTIRRWDVLTGQCLQVYRGHTSIVNRILVANNQLFSSSYDRTARVWSVDKGQMSREFRGHRNCVLTLAYSAPWDLPSTPCAEEAAAGGLLVTGSTDGTAKVWQVASGCCHQTLRGHTGAVLCLVLDTPGHTAFTGSTDATIRAWDILSGEQLRVFREHRGSVICLERERSGGLQSCPSCRPSLLLLAAGEPTRVLWQRGQDRQVLAGRHRGVCAHVHGPQTQRERPQVPRGHLVHGQRGRLRPGLRRAVWRAAEGVPGPHIHHQLHPGARPGALHRLARRRPAPLGRARAPRCPAAPSAHAQPLAALQQQGGLRRRAPAAGLIPRGPCRRQPRHPAAPRAPRPATRGGGARWPARGEERGSPGGRRARRRRLVFLWWPGGAGSGSARPGDRPLFPFRVAPVLPPHP

SEQ ID NO: 97574 - protein, 248 aa, Homo sapiens
  Payload ID: 19455
  Gene Name: WD repeat domain 86
  ENSP ID: ENSP00000482209
MSREFRGHRNCVLTLAYSAPWDLPSTPCAEEAAAGGLLVTGSTDGTAKVWQVASGCCHQTLRGHTGAVLCLVLDTPGHTAFTGSTDATIRAWDILSGEQLRVFREHRGSVICLELVNRLVYSGSADRTVKCWLADTGECVRTFTAHRRNVSALKYHAGTLFTGSGDACARAFDAQSGELRRVFRGHTFIINCIQVHGQVLYTASHDGALRLWDVRGLRGAPRPPPPMRSLSRLFSNKVGCAAAPLQPA

SEQ ID NO: 97575 - protein, 277 aa, Homo sapiens; identical to SEQ ID NO: 97572
  Payload ID: 19455
  Gene Name: WD repeat domain 86
  Uniprot ID: Q86TI4
  ENSP ID: ENSP00000486705

SEQ ID NO: 97576 - protein, 2873 aa, Homo sapiens
  Payload ID: 19456
  Gene Name: WD repeat domain 87
  Uniprot ID: Q6ZQQ6
  ENSP ID: ENSP00000368025
MSSPRLIPLWKDLKLLLNDTINKSKQPSEDPKNCLIVLSDRSQAVAWMKSKTEDMVEKRTFSMTERLPPIQSMVHAGSFHILVVYCGDLILRLFGDHFRAFKPLGKVPCRFNISCLCYDPEMKMLLSGILGAVVTWVIELGGTGLQIAHMVSMPGDELVQDIVLNGPSGSLLALCETVVRVLMHQGKGQLGEVKRFTSTSSGSSITCCFTCFDQGFLYAGNQAGEIQVWSLQQGHPLHSFQAHQSGVICIRSRPEAHTLLTAGSDSLIKEWNLTSGSLLRRLELGEELYRLQFIDSITFFCQTAHSFSLHRLPCFYSLFNVCGSAPQQLRRVCCGNNWFRILCTTEDGLLRFVSPVTGDLLVITWPFSILDQAVDWAYDPGKEELFVATGSSEVLVFDTTRCPCPAKYLLGTSPNSQDFVQCLAYGHFNLGRGLEGLIFSGHQSGVIRVLSQHSCARLEKFMHFGAVLALSTLSGGIFGGQGNSLLCSYGMDDYVHLSEAVLDGVKVQLRPLASILSSCHLTHLILLPKSVGAITETNCLRLWKFHDFLSSGSQNGLKFIETLPLHLCAITSFDVCLSLSLFVTGSADGSVRIWDFHGRLIGILDSSLHFGPVCFANDRGDLLVTFNQSLYLVSCLKLLPPALLTRLSFMSISDEVLEVPKPFIPSFFFSFETMFVPKYIYPGQAQQKLVGLEKLVNNRAIAFDHSVPHVIEEDEEGSPVLLRSSMHYSLQDMEDWMQVSKRYQCHYVLPPQLQLTSWDGLNPYQILRYYFGHGREWLFAPDCYIPNSVIRARLWPEGTPIYLQCNLHAPQRELEWDRSQEFFFWHSRVRAISNTEYPKNKEEDEHFLEMRLSKDVTYSVLTDGANRSWLGRKMSEITINSMIETMLNIMVHASLLKYQCCVGALGQIFASYQVSPALRSETARRLLNDTTNSNPLIRELAWEGLKRLGMITHLFAMPLAQGLMDKDERVRIKTLSLMAEIGIHSRTSLLQLTQKQETFREMQQQMIGEEPLDHLLGMRATDLQILSTQVEQRLNENLTLSHRDEKPAFSLDVSMPSELKSSLKPPTVSEESEVAIKPSKGQRRGQAGVKKHSQKWLRGLKKTKERDSKQMSTEPGLLEDESGTEAAPIEMEEASVYSQWSSSTSVIKLSKDVDSQEKDISKDHIALTLKRLQKIRDKRDKKATAQKLKKKHKKKGKEAKVINEETTPPVMEQPVTKKVKIQGRGASGISGRRSTAGDGSSWRDDLCRLMALRISGSQTKMSENLNAELVTFAQEMLVDRHPSWELFQEICPLLKKESKVLLEDLDWDVVPPEKKPIFIQEGAIREDMIQGVTQEVIRHKEVMPREEEQAQKKARDMLGLEETQVILKKGKKVIFLEPGNVTMGKEISKKEEKKTFQKSPKQGRKAVQKERKVGKIKREMTKEERDMSEEVEEMATLEEKVVKQEGKLVMIERTPSWQDWKKAWDEWKQVHGETRKSWKAWKEEWEKRLLQEEEKLHQAGEKLSPEEEMLQEDKKLKWEEWKQVWENMLSSKSKEQQYKDEEEVTLEEEVSREGEEKEQQVTEEQRHIQEEHKWARIHRKRARAEKKRAQEERKLAQEEEKLAQEERQLAQEERKLAQAYVKITQDDREMAQAEGKFAQKEETLAQRGEKLSQEAEKLAQKRKKLAKKWEKVAREEEKLAKKGGKLAEVKNILAQKVEELPQREQNLDWQEKELAQELEELEWDMEELSWKEEELNQEEGKLVEEKKKLAEEEEALAWQREKLSEEETKLAQEEELLIQEKEKLAQHKEKMPEEEERLGRKREQLIEKKMKLAQKRERWINSMEELTKNKMILYQKKNLAQEKKNLAQEKEKLAQRKENLLYNKERLTHSKKQLVQVKNKLGMFNKILAQVEEKLTQEKETVIKKKEKLAETEKKLVQVEDSLAKKQEKLAQEKMKLALEKAMVQGKKRLRGELDIAKEEKALNLEMKRLAEEKMRLVEGKETLSKGETPETSRQRKMTQVEQELFERKLSLEEKILLHEDRILAMEESEIAKGKLEFTRGQRIFVQGQRKLAKASRKLIKKRESLSKEPAKLNKILKALQKLTRDERKLTQEEIKMTKMKRALFVKERRLSIEQSKLDIKEWDFSEKRSELTKDEKKLARKQRKLANKMRRMINKEEKMTEEESKLARKHSEVILDDEEEGGIEEEEVIPFLKRRWRKRKEAKRGDKPKEKFSSQVDEVESEEHFSEEMESLLDELEKQESLSSEEEEEREEEEEREEEEEREEEEERKEEEEGEEKQVEKEEEEKKKKKKEKKKEEVQEKEEVFEEKEEIMSEEETESLSDEEEEEESCSLEEEVDREKEILKKEKQFKLQEQRRKSLRGRERVLSILRGVPHGKGRAIRLGVLKSPLKKLMSTALEMKEKTPVPVPEKQISWEDKKATVVEIPRKFLGTMDKEREVMGKYEPIPPHVLGTVLESQAQDLKTPFMSHILRRTVEAEELQHKPLGAWWKWFLQHPPLMGQTEVQLPLSQIPAKEQHADVSLSDVEWIRHVLERMEAGEQLSRDGFHRLCQLLKDLASKGNLEWLHLAKHEAIVYRHRQALESQDTRISSRQSMSPKYLKVIPPIKAKEKESWPKPLAVPTQKSPLATKRIPDPRAKNWHLLGEPYRSERAQQISIAHKEMEMQYFYPATRDIFPSAHASVEKQTLALMFQKDFWDFKDKRRFPKLPKLEKKTQPISKKKEELPLWETFVALYHVLRMLQQRYPKDSTAWMEQFYQLMDLYQLKSPRIQKLLQELLMREEPQPQEIIYEEALKATELVPGERLFCCLFCGSSHTPRSPQEFQGAVPLPWQNCVRTILPVGIARYGILELAWKSLPEADLHLTKALTHTVAPTL

SEQ ID NO: 97577 - protein, 2912 aa, Homo sapiens
  Payload ID: 19456
  Gene Name: WD repeat domain 87
  ENSP ID: ENSP00000405012
MSSPRLIPLWKDLKLLLNDTINKSKQPSEDPKNCLIVLSDRSQVLFKESRYPQNMPCVCYYFSDAHFFASLSWVTSNTKEIQAVAWMKSKTEDMVEKRTFSMTERLPPIQSMVHAGSFHILVVYCGDLILRLFGDHFRAFKPLGKVPCRFNISCLCYDPEMKMLLSGILGAVVTWVIELGGTGLQIAHMVSMPGDELVQDIVLNGPSGSLLALCETVVRVLMHQGKGQLGEVKRFTSTSSGSSITCCFTCFDQGFLYAGNQAGEIQVWSLQQGHPLHSFQAHQSGVICIRSRPEAHTLLTAGSDSLIKEWNLTSGSLLRRLELGEELYRLQFIDSITFFCQTAHSFSLHRLPCFYSLFNVCGSAPQQLRRVCCGNNWFRILCTTEDGLLRFVSPVTGDLLVITWPFSILDQAVDWAYDPGKEELFVATGSSEVLVFDTTRCPCPAKYLLGTSPNSQDFVQCLAYGHFNLGRGLEGLIFSGHQSGVIRVLSQHSCARLEKFMHFGAVLALSTLSGGIFGGQGNSLLCSYGMDDYVHLSEAVLDGVKVQLRPLASILSSCHLTHLILLPKSVGAITETNCLRLWKFHDFLSSGSQNGLKFIETLPLHLCAITSFDVCLSLSLFVTGSADGSVRIWDFHGRLIGILDSSLHFGPVCFANDRGDLLVTFNQSLYLVSCLKLLPPALLTRLSFMSISDEVLEVPKPFIPSFFFSFETMFVPKYIYPGQAQQKLVGLEKLVNNRAIAFDHSVPHVIEEDEEGSPVLLRSSMHYSLQDMEDWMQVSKRYQCHYVLPPQLQLTSWDGLNPYQILRYYFGHGREWLFAPDCYIPNSVIRARLWPEGTPIYLQCNLHAPQRELEWDRSQEFFFWHSRVRAISNTEYPKNKEEDEHFLEMRLSKDVTYSVLTDGANRSWLGRKMSEITINSMIETMLNIMVHASLLKYQCCVGALGQIFASYQVSPALRSETARRLLNDTTNSNPLIRELAWEGLKRLGMITHLFAMPLAQGLMDKDERVRIKTLSLMAEIGIHSRTSLLQLTQKQETFREMQQQMIGEEPLDHLLGMRATDLQILSTQVEQRLNENLTLSHRDEKPAFSLDVSMPSELKSSLKPPTVSEESEVAIKPSKGQRRGQAGVKKHSQKWLRGLKKTKERDSKQMSTEPGLLEDESGTEAAPIEMEEASVYSQWSSSTSVIKLSKDVDSQEKDISKDHIALTLKRLQKIRDKRDKKATAQKLKKKHKKKGKEAKVINEETTPPVMEQPVTKKVKIQGRGASGISGRRSTAGDGSSWRDDLCRLMALRISGSQTKMSENLNAELVTFAQEMLVDRHPSWELFQEICPLLKKESKVLLEDLDWDVVPPEKKPIFIQEGAIREDMIQGVTQEVIRHKEVMPREEEQAQKKARDMLGLEETQVILKKGKKVIFLEPGNVTMGKEISKKEEKKTFQKSPKQGRKAVQKERKVGKIKREMTKEERDMSEEVEEMATLEEKVVKQEGKLVMIERTPSWQDWKKAWDEWKQVHGETRKSWKAWKEEWEKRLLQEEEKLHQAGEKLSPEEEMLQEDKKLKWEEWKQVWENMLSSKSKEQQYKDEEEVTLEEEVSREGEEKEQQVTEEQRHIQEEHKWARIHRKRARAEKKRAQEERKLAQEEEKLAQEERQLAQEERKLAQAYVKITQDDREMAQAEGKFAQKEETLAQRGEKLSQEAEKLAQKRKKLAKKWEKVAREEEKLAKKGGKLAEVKNILAQKVEELPQREQNLDWQEKELAQELEELEWDMEELSWKEEELNQEEGKLVEEKKKLAEEEEALAWQREKLSEEETKLAQEEELLIQEKEKLAQHKEKMPEEEERLGRKREQLIEKKMKLAQKRERWINSMEELTKNKMILYQKKNLAQEKKNLAQEKEKLAQRKENLLYNKERLTHSKKQLVQVKNKLGMFNKILAQVEEKLTQEKETVIKKKEKLAETEKKLVQVEDSLAKKQEKLAQEKMKLALEKAMVQGKKRLRGELDIAKEEKALNLEMKRLAEEKMRLVEGKETLSKGETPETSRQRKMTQVEQELFERKLSLEEKILLHEDRILAMEESEIAKGKLEFTRGQRIFVQGQRKLAKASRKLIKKRESLSKEPAKLNKILKALQKLTRDERKLTQEEIKMTKMKRALFVKERRLSIEQSKLDIKEWDFSEKRSELTKDEKKLARKQRKLANKMRRMINKEEKMTEEESKLARKHSEVILDDEEEGGIEEEEVIPFLKRRWRKRKEAKRGDKPKEKFSSQVDEVESEEHFSEEMESLLDELEKQESLSSEEEEEREEEEEREEEEEREEEEERKEEEEGEEKQVEKEEEEKKKKKKEKKKEEVQEKEEVFEEKEEIMSEEETESLSDEEEEEESCSLEEEVDREKEILKKEKQFKLQEQRRKSLRGRERVLSILRGVPHGKGRAIRLGVLKSPLKKLMSTALEMKEKTPVPVPEKQISWEDKKATVVEIPRKFLGTMDKEREVMGKYEPIPPHVLGTVLESQAQDLKTPFMSHILRRTVEAEELQHKPLGAWWKWFLQHPPLMGQTEVQLPLSQIPAKEQHADVSLSDVEWIRHVLERMEAGEQLSRDGFHRLCQLLKDLASKGNLEWLHLAKHEAIVYRHRQALESQDTRISSRQSMSPKYLKVIPPIKAKEKESWPKPLAVPTQKSPLATKRIPDPRAKNWHLLGEPYRSERAQQISIAHKEMEMQYFYPATRDIFPSAHASVEKQTLALMFQKDFWDFKDKRRFPKLPKLEKKTQPISKKKEELPLWETFVALYHVLRMLQQRYPKDSTAWMEQFYQLMDLYQLKSPRIQKLLQELLMREEPQPQEIIYEEALKATELVPGERLFCCLFCGSSHTPRSPQEFQGAVPLPWQNCVRTILPVGIARYGILELAWKSLPEADLHLTKALTHTVAPTL

SEQ ID NO: 97578 - protein, 679 aa, Homo sapiens
  Payload ID: 19456
  Gene Name: WD repeat domain 87
  ENSP ID: ENSP00000484308
MVSMPGDELVQDIVLNGPSGSLLALCETVVRVLMHQGKGQLGEVKRFTSTSSGSSITCCFTCFDQGFLYAGNQAGEIQVWSLQQGHPLHSFQAHQSGVICIRSRPEAHTLLTAGSDSLIKEWNLTSGSLLRRLELGEELYRLQFIDSITFFCQTAHSFSLHRLPCFYSLFNVCGSAPQQLRRVCCGNNWFRILCTTEDGLLRFVSPVTGDLLVITWPFSILDQAVDWAYDPGKEELFVATGSSEVLVFDTTRCPCPAKYLLGTSPNSQDFVQCLAYGHFNLGRGLEGLIFSGHQSGVIRVLSQHSCARLEKFMHFGAVLALSTLSGGIFGGQGNSLLCSYGMDDYVHLSEAVLDGVKVQLRPLASILSSCHLTHLILLPKSVGAITETNCLRLWKFHDFLSSGSQNGLKFIETLPLHLCAITSFDVCLSLSLFVTGSADGSVRIWDFHGRLIGILDSSLHFGPVCFANDRGDLLVTFNQSLYLVSCLKLLPPALLTRLSFMSISDEVLEVPKPFIPSFFFSFETMFVPKYIYPGQAQQKLVGLEKLVNNRAIAFDHSVPHVIEEDEEGSPVLLRSSMHYSLQDMEDWMQVSKRYQCHYVLPPQLQLTSWDGLNPYQILRYYFGHGREWLFAPDCYIPNSVIRARLWPEGTPIYLQCNLHAPQRELEWDRSQNSFSGTAG

SEQ ID NO: 97579 - protein, 472 aa, Homo sapiens
  Payload ID: 19457
  Gene Name: WD repeat domain 88
  Uniprot ID: Q6ZMY6
  ENSP ID: ENSP00000348129
MASPPRCSPTAHDRECKLPPPSAPASEYCPGKLSWGTMARALGRFKLSIPHTHLLATLDPLALDREPPPHLLPEKHQVPEKLIWGDQDPLSKIPFKILSGHEHAVSTCHFCVDDTKLLSGSYDCTVKLWDPVDGSVVRDFEHRPKAPVVECSITGDSSRVIAASYDKTVRAWDLETGKLLWKVRYDTFIVSCKFSPDGKYVVSGFDVDHGICIMDAENITTVSVIKDHHTRSITSCCFDPDSQRVASVSLDRCIKIWDVTSQATLLTITKAHSNAISNCCFTFSGHFLCTSSWDKNLKIWNVHTGEFRNCGACVTLMQGHEGSVSSCHFARDSSFLISGGFDRTVAIWDVAEGYRKLSLKGHNDWVMDVAISNNKKWILSASKDRTMRLWNIEEIDEIPLVIKYKKAVGLKLKQCERCDRPFSIFKSDTSSEMFTQCVFCRIDTRGLPADTSSSSSSSERENSPPPRGSKDD

SEQ ID NO: 97580 - protein, 426 aa, Homo sapiens
  Payload ID: 19457
  Gene Name: WD repeat domain 88
  Uniprot ID: Q6ZMY6
  ENSP ID: ENSP00000355148
MASPPRCSPTAHDRECKLPPPSAPASEYCPGKLSWGTMARALGRFKLSIPHTHLLATLDPLALDREPPPHLLPEKHQVPEKLIWGDQDPLSKIPFKILSGHEHAVSTCHFCVDDTKLLSGSYDCTVKLWDPVDGSVVRDFEHRPKAPVVECSITGDSSRVIAASYDKTVRAWDLETGKLLWKVRYDTFIVSCKFSPDGKYVVSGFDVDHGICIMDAENITTVSVIKDHHTRSITSCCFDPDSQRVASVSLDRCIKIWDVTSQATLLTITKAHSNAISNCCFTFSGHFLCTSSWDKNLKIWNVHTGEFRNCGACVTLMQGHEGSVSSCHFARDSSFLISGGFDRTVAIWDVAEGYRKLSLKGHNDWVMDVAISNNKKWILSASKDRTMRLWNIEEIDEIPLVIKYKKAVGLKLKQEKKEAYLKLKQG

SEQ ID NO: 97581 - protein, 164 aa, Homo sapiens
  Payload ID: 19457
  Gene Name: WD repeat domain 88
  ENSP ID: ENSP00000467383
MASPPRCSPTAHDRECKLPPPSAPASEYCPGKLSWGTMARALGRFKLSIPHTHLLATLDPLALDREPPPHLLPEKHQVPEKLIWGDQDPLSKIPFKILSGHEHAVSTCHFCVDDTKLLSGSYDCTVKLWDPVDGSVVRDFEHRPKAPVVECSITGDSSSHCRIL

SEQ ID NO: 97582 - protein, 387 aa, Homo sapiens
  Payload ID: 19458
  Gene Name: WD repeat domain 89
  Uniprot ID: Q96FK6
  ENSP ID: ENSP00000267522
MEKIEEQFANLHIVKCSLGTKEPTYLLGIDTSKTVQAGKENLVAVLCSNGSIRIYDKERLNVLREFSGYPGLLNGVRFANSCDSVYSACTDGTVKCWDARVAREKPVQLFKGYPSNIFISFDINCNDHIICAGTEKVDDDALLVFWDARMNSQNLSTTKDSLGAYSETHSDDVTQVRFHPSNPNMVVSGSSDGLVNVFDINIDNEEDALVTTCNSISSVSCIGWSGKGYKQIYCMTHDEGFYWWDLNHLDTDEPVTRLNIQDVREVVNMKEDALDYLIGGLYHEKTDTLHVIGGTNKGRIHLMNCSMSGLTHVTSLQGGHAATVRSFCWNVQDDSLLTGGEDAQLLLWKPGAIEKTFTKKESMKIASSVHQRVRVHSNDSYKRRKKQ

SEQ ID NO: 97583 - protein, 387 aa, Homo sapiens; identical to SEQ ID NO: 97582
  Payload ID: 19458
  Gene Name: WD repeat domain 89
  Uniprot ID: Q96FK6
  ENSP ID: ENSP00000378399

SEQ ID NO: 97584 - protein, 226 aa, Homo sapiens
  Payload ID: 19458
  Gene Name: WD repeat domain 89
  ENSP ID: ENSP00000451702
MEKIEEQFANLHIVKCSLGTKEPTYLLGIDTSKTVQAGKENLVAVLCSNGSIRIYDKERLNVLREFSGYPGLLNGVRFANSCDSVYSACTDGTVKCWDARVAREKPVQLFKGYPSNIFISFDINCNDHIICAGTEKVDDDALLVFWDARMNSQNLSTTKDSLGAYSETHSDDVTQVRFHPSNPNMVVSGSSDGLVNVFDINIDNEEDALVTTCNSISSVSCIGWSG

SEQ ID NO: 97585 - protein, 387 aa, Homo sapiens; identical to SEQ ID NO: 97582
  Payload ID: 19458
  Gene Name: WD repeat domain 89
  Uniprot ID: Q96FK6
  ENSP ID: ENSP00000480112

SEQ ID NO: 97586 - protein, 1748 aa, Homo sapiens
  Payload ID: 19459
  Gene Name: WD repeat domain 90
  Uniprot ID: Q96KV7
  ENSP ID: ENSP00000293879
MARAWQHPFLNVFRHFRVDEWKRSAKQGDVAVVTDKTLKGAVYRIRGSVSAANYIQLPKSSTQSLGLTGRYLYVLFRPLPSKHFVIHLDVSSKDNQVIRVSFSNLFKEFKSTATWLQFPLVLEARTPQRDLVGLAPSGARWTCLQLDLQDVLLVYLNRCYGHLKSIRLCASLLVRNLYTSDLCFEPAISGAQWAKLPVTPMPREMAFPVPKGESWHDRYIHVRFPSESLKVPSKPIEKSCSPPEAVLLGPGPQPLPCPVASSKPVRFSVSPVVQTPSPTASGRAALAPRPFPEVSLSQERSDASNADGPGFHSLEPWAQLEASDIHTAAAGTHVLTHESAEVPVARTGSCEGFLPDPVLRLKGVIGFGGHGTRQALWTPDGAAVVYPCHAVIVVLLVDTGEQRFFLGHTDKVSALALDGSSSLLASAQARAPSVMRLWDFQTGRCLCLFRSPMHVVCSLSFSDSGALLCGVGKDHHGRTMVVAWGTGQVGLGGEVVVLAKAHTDFDVQAFRVTFFDETRMASCGQGSVRLWRLRGGVLRSCPVDLGEHHALQFTDLAFKQARDGCPEPSAAMLFVCSRSGHILEIDCQRMVVRHARRLLPTRTPGGPHPQKQTFSSGPGIAISSLSVSPAMCAVGSEDGFLRLWPLDFSSVLLEAEHEGPVSSVCVSPDGLRVLSATSSGHLGFLDTLSRVYHMLARSHTAPVLALAMEQRRGQLATVSQDRTVRIWDLATLQQLYDFTSSEDAPCAVTFHPTRPTFFCGFSSGAVRSFSLEAAEVLVEHTCHRGAVTGLTATPDGRLLFSSCSQGSLAQYSCADPQWHVLRVAADMVCPDAPASPSALAVSRDGRLLAFVGPSRCTVTVMGSASLDELLRVDIGTLDLASSRLDSAMAVCFGPAALGHLLVSTSSNRVVVLDAVSGRIIRELPGVHPEPCPSLTLSEDARFLLIAAGRTIKVWDYATQASPGPQVYIGHSEPVQAVAFSPDQQQVLSAGDAVFLWDVLAPTESDQSFPGAPPACKTGPGAGPLEDAASRASELPRQQVPKPCQASPPRLGVCARPPEGGDGARDTRNSGAPRTTYLASCKAFTPARVSCSPHSAKGTCPPPASGGWLRLKAVVGYSGNGRANMVWRPDTGFFAYTCGRLVVVEDLHSGAQQHWSGHSAEISTLALSHSAQVLASASGRSSTTAHCQIRVWDVSGGLCQHLIFPHSTTVLALAFSPDDRLLVTLGDHDGRTLALWGTATYDLVSSTRLPEPVHGVAFNPWDAGELTCVGQGTVTFWLLQQRGADISLQVRREPVPEAVGAGELTSLCYGAPPLLYCGTSSGQVCVWDTRAGRCFLSWEADDGGIGLLLFSGSRLVSGSSTGRLRLWAVGAVSELRCKGSGASSVFMEHELVLDGAVVSASFDDSVDMGVVGTTAGTLWFVSWAEGTSTRLISGHRSKVNEVVFSPGESHCATCSEDGSVRVWALASMELVIQFQVLNQSCLCLAWSPPCCGRPEQQRLAAGYGDGSLRIFSVSRTAMELKMHPHPVALTTVAFSTDGQTVLSGDKDGLVAVSHPCTGTTFRVLSDHQGAPISTICVTCKECEDLGVEGTDLWLAASGDQRVSVWASDWLRNHCELVDWLSFPMPATTETQGHLPPSLAAFCPWDGALLMYVGPGVYKEVIIYNLCQKQVVEKIPLPFFAMSLSLSPGTHLLAVGFAECMLRLVDCAMGTAQDFAGHDNAVHLCRFTPSARLLFTAARNEILVWEVPGL

SEQ ID NO: 97587 - protein, 299 aa, Homo sapiens
  Payload ID: 19459
  Gene Name: WD repeat domain 90
  Uniprot ID: Q96KV7
  ENSP ID: ENSP00000322808
MLWFGQPGPGGWNRKCLRPFTLPRGQHPQPSYGFPQVNEVVFSPGESHCATCSEDGSVRVWALASMELVIQFQVLNQSCLCLAWSPPCCGRPEQQRLAAGYGDGSLRIFSVSRTAMELKMHPHPVALTTVAFSTDGQTVLSGDKDGLVAVSHPCTGTTFRVLSDHQGAPISTICVTCKETQGHLPPSLAAFCPWDGALLMYVGPGVYKEVIIYNLCQKQVVEKIPLPFFAMSLSLSPGTHLLAVGFAECMLRLVDCAMGTAQDFAGHDNAVHLCRFTPSARLLFTAARNEILVWEVPGL

SEQ ID NO: 97588 - protein, 133 aa, Homo sapiens
  Payload ID: 19459
  Gene Name: WD repeat domain 90
  ENSP ID: ENSP00000447435
  MOD_RES (1)..(1): Any amino acid
XPGAGPLEDAASRASELPRQQVPKPCQASPPRLGVCARPPEGGDGARDTRNSGAPRTTYLASCKAFTPARVSCSPHSAKALGHRWPCWAPAASGSPSSQGTCPPPASGGWLRLKAVVGYSGNGRANMVWRPDT

SEQ ID NO: 97589 - protein, 115 aa, Homo sapiens
  Payload ID: 19459
  Gene Name: WD repeat domain 90
  ENSP ID: ENSP00000447915
EKIPLPFFAMSLSLSPGTHLLAVGFAGLHRPPGCSSRPPATRSLCGRSPASEMQQGLWWWASRLVMPGTWTQAWQRRQVVNGLMLGQARIHVNRLEQAVVNLAPCEYFHTCCPFA

SEQ ID NO: 97590 - protein, 1750 aa, Homo sapiens
  Payload ID: 19459
  Gene Name: WD repeat domain 90
  ENSP ID: ENSP00000448122
MARAWQHPFLNVFRHFRVDEWKRSAKQGDVAVVTDKTLKGAVYRIRGSVSAANYIQLPKSSTQSLGLTGRYLYVLFRPLPSKHFVIHLDVSSKDNQVIRVSFSNLFKEFKSTATWLQFPLVLEARTPQRDLVGLAPSGARWTCLQLDLQDVLLVYLNRCYGHLKSIRLCASLLVRNLYTSDLCFEPAISGAQWAKLPVTPMPREMAFPVPKGESWHDRYIHVRFPSESLKVPSKPIEKSCSPPEAVLLGPGPQPLPCPVASSKPVRFSVSPVVQTPSPTASGRAALAPRPFPEVSLSQERSDASNADGPGFHSLEPWAQLEASDIHTAAAGTHVLTHESAEVPVARTGSCEGFLPDPVLRLKGVIGFGGHGTRQALWTPDGAAVVYPCHAVIVVLLVDTGEQRFFLGHTDKVSALALDGSSSLLASAQARAPSVMRLWDFQTGRCLCLFRSPMHVVCSLSFSDSGALLCGVGKDHHGRTMVVAWGTGQVGLGGEVVVLAKAHTDFDVQAFRVTFFDETRMASCGQGSVRLWRLRGGVLRSCPVDLGEHHALQFTDLAFKQARDGCPEPSAAMLFVCSRSGHILEIDCQRMVVRHARRLLPTRTPGGPHPQKQTFSSGPGIAISSLSVSPAMCAVGSEDGFLRLWPLDFSSVLLEAEHEGPVSSVCVSPDGLRVLSATSSGHLGFLDTLSRVYHMLARSHTAPVLALAMEQRRGQLATVSQDRTVRIWDLATLQQLYDFTSSEDAPCAVTFHPTRPTFFCGFSSGAVRSFSLEAAEVLVEHTCHRGAVTGLTATPDGRLLFSSCSQGSLAQYSCADPQWHVLRVAADMVCPDAPASPSALAVSRDGRLLAFVGPSRCTVTVMGSASLDELLRVDIGTLDLASSRLDSAMAVCFGPAALGHLLVSTSSNRVVVLDAVSGRIIRELPGVHPEPCPSLTLSEDARFLLIAAGRTIKVWDYATQASPGPQVYIGHSEPVQAVAFSPDQQQVLSAGDAVFLWDVLAPTESDQSFPGAPPACKTGPGAGPLEDAASRASELPRQQVPKPCQASPPRLGVCARPPEGGDGARDTRNSGAPRTTYLASCKAFTPARVSCSPHSAKGTCPPPASGGWLRLKAVVGYSGNGRANMVWRPDTGFFAYTCGRLVVVEDLHSGAQQHWSGHSAEISTLALSHSAQVLASASGRSSTTAHCQIRVWDVSGGLCQHLIFPHSTTVLALAFSPDDRLLVTLGDHDGRTLALWGTATYDLVSSTRLPEPVHGVAFNPWDAGELTCVGQGTVTFWLLQQRGADISLQVRREPVPEAVGAGELTSLCYGAPPLLYCGTSSGQVCVWDTRAGRCFLSWEADDGGIGLLLFSGSRLVSGSSTGRLRLWAVGAVSELRCKGSGARSSSVFMEHELVLDGAVVSASFDDSVDMGVVGTTAGTLWFVSWAEGTSTRLISGHRSKVNEVVFSPGESHCATCSEDGSVRVWALASMELVIQFQVLNQSCLCLAWSPPCCGRPEQQRLAAGYGDGSLRIFSVSRTAMELKMHPHPVALTTVAFSTDGQTVLSGDKDGLVAVSHPCTGTTFRVLSDHQGAPISTICVTCKECEDLGVEGTDLWLAASGDQRVSVWASDWLRNHCELVDWLSFPMPATTETQGHLPPSLAAFCPWDGALLMYVGPGVYKEVIIYNLCQKQVVEKIPLPFFAMSLSLSPGTHLLAVGFAECMLRLVDCAMGTAQDFAGHDNAVHLCRFTPSARLLFTAARNEILVWEVPGL

SEQ ID NO: 97591 - protein, 475 aa, Homo sapiens
  Payload ID: 19459
  Gene Name: WD repeat domain 90
  ENSP ID: ENSP00000448603
ARSHTAPVLALAMEQRRGQLATVSQDRTVRIWDLATLQQLYDFTSSEDAPCAVTFHPTRPTFFCGFSSGAVRSFSLEAAEVLVEHTCHRGAVTGLTATPDGRLLFSSCSQGSLAQYSCADPQWHVLRVAADMVCPDAPASPSALAVSRDGRLLAFVGPSRCTVTVMGSASLDELLRVDIGTLDLASSRLDSAMAVCFGPAALGHLLVSTSSNRVVVLDAVSGRIIRELPGVHPEPCPSLTLSEDARFLLIAAGRTIKVWDYATQASPGPQVYIGHSEPVQAVAFSPDQQQVLSAGDAVFLWDVLAPTESDQSFPGAPPACKTGPGAGPLEDAASRASELPRQQVPKPCQASPPRLGVCARPPEGGDGHLPASRQRWVAASEGCRRLQREWAGQHGLEAGHRLLCLHVRPPGGGGGPALWRPAALVRPLCGDLHAGPQPQCPGPGLCLGPKQHDRPLSDPRLGRVWRPLPASHFPP

SEQ ID NO: 97592 - protein, 347 aa, Homo sapiens
  Payload ID: 19459
  Gene Name: WD repeat domain 90
  ENSP ID: ENSP00000449576
MLWFGQPGPGGWNRKCLRPFTLPRGQHPQPSYGFPQVNEVVFSPGESHCATCSEDGSVRVWALASMELVIQFQVLNQSCLCLAWSPPCCGRPEQQRLAAGYGDGSLRIFSVSRTAMELKMHPHPVALTTVAFSTDGQTVLSGDKDGLVAVSHPCTGTTFRVLSDHQGAPISTICVTCKECEDLGVEGTDLWLAASGDQRVSVWASDWLRNHCELVDWLSFPMPATTETQGHLPPSLAAFCPWDGALLMYVGPGVYKEVIIYNLCQKQVVEKIPLPFFAMSLSLSPGTHLLAVGFAECMLRLVDCAMGTAQDFAGHDNAVHLCRFTPSARLLFTAARNEILVWEVPGL

SEQ ID NO: 97593 - protein, 78 aa, Homo sapiens
  Payload ID: 19459
  Gene Name: WD repeat domain 90
  ENSP ID: ENSP00000450308
  MOD_RES (1)..(1): Any amino acid
XASGDQRVSVWASDWLRNHCELVDWLSFPMPATTETQGHLPPSLAAFCPWDGALLMYVGPGVYKEVIIYNLCQKQSAC

SEQ ID NO: 97594 - protein, 728 aa, Homo sapiens
  Payload ID: 19459
  Gene Name: WD repeat domain 90
  ENSP ID: ENSP00000483098
MARAWQHPFLNVFRHFRVDEWKRSAKQGDVAVVTDKTLKGAVYRIRGSVSAANYIQLPKSSTQSLGLTGRYLYVLFRPLPSKHFVIHLDVSSKDNQVIRVSFSNLFKEFKSTATWLQFPLVLEARTPQRDLVGLAPSGARWTCLQLDLQDVLLVYLNRCYGHLKSIRLCASLLVRNLYTSDLCFEPAISGAQWAKLPVTPMPREMAFPVPKGESWHDRYIHVRFPSESLKVPSKPIEKSCSPPEAVLLGPGPQPLPCPVASSKPVRFSVSPVVQTPSPTASGRAALAPRPFPEVSLSQERSDASNADGPGFHSLEPWAQLEASDIHTAAAGTHVLTHESAEVPVARTGSCEGFLPDPVLRLKGVIGFGGHGTRQALWTPDGAAVVYPCHAVIVVLLVDTGEQRFFLGHTDKVSALALDGSSSLLASAQARAPSVMRLWDFQTGRCLCLFRSPMHVVCSLSFSDSGALLCGVGKDHHGRTMVVAWGTGQVGLGGEVVVLAKAHTDFDVQAFRVTFFDETRMASCGQGSVRLWRLRGGVLRSCPVDLGEHHALQFTDLAFKQARDGCPEPSAAMLFVCSRSGHILEIDCQRMVVRHARRLLPTRTPGGPHPQKQTFSSGPGIAISSLSVSPAMCAVGSEDGFLRLWPLDFSSVLLEAGDAVGTLSQLRESLAWMLGRGRPSPRGSAVSRPGSWLHRVPRPSGISRALGRLMPGRPAGQPHGRARWDVGSV

SEQ ID NO: 97595 - protein, 747 aa, Homo sapiens
  Payload ID: 19460
  Gene Name: WD repeat domain 91
  Uniprot ID: A4D1P6
  ENSP ID: ENSP00000346466
MAEAVERTDELVREYLLFRGFTHTLRQLDAEIKADKEKGFRVDKIVDQLQQLMQVYDLAALRDYWSYLERRLFSRLEDIYRPTIHKLKTSLFRFYLVYTIQTNRNDKAQEFFAKQATELQNQAEWKDWFVLPFLPSPDTNPTFATYFSRQWADTFIVSLHNFLSVLFQCMPVPVILNFDAECQRTNQVQEENEVLRQKLFALQAEIHRLKKEEQQPEEEEALVQHKLPPYVSNMDRLGDSELAMVCSQRNASLSQSPRVGFLSSLLPQSKKSPSRLSPAQGPPQPQSSAKKESFGGQGTKGKDPTSGAKDGKSLLSGLATGESGWSQHRQRRLQDHGKERKELFSTTTSQCAEKKPEASGPEAEPCPELHTEPVEPLTRASSAGPEGGGVRPEQPFIVLGQEEYGEHHSSIMHCRVDCSGRRVASLDVDGVIKVWSFNPIMQTKASSISKSPLLSLEWATKRDRLLLLGSGVGTVRLYDTEAKKNLCEININDNMPRILSLACSPNGASFVCSAAAPSLTSQVDFSAPDIGSKGMNQVPGRLLLWDTKTMKQQLQFSLDPEPIAINCTAFNHNGNLLVTGAADGVIRLFDMQQHECAMSWRAHYGEVYSVEFSYDENTVYSIGEDGKFIQWNIHKSGLKVSEYSLPSDATGPFVLSGYSGYKQVQVPRGRLFAFDSEGNYMLTCSATGGVIYKLGGDEKVLESCLSLGGHRAPVVTVDWSTAMDCGTCLTASMDGKIKLTTLLAHKA

SEQ ID NO: 97596 - protein, 712 aa, Homo sapiens
  Payload ID: 19460
  Gene Name: WD repeat domain 91
  ENSP ID: ENSP00000392555
MIFHCEVDKIVDQLQQLMQVYDLAALRDYWSYLERRLFSRLEDIYRPTIHKLKTSLFRFYLVYTIQTNRNDKAQEFFAKQATELQNQAEWKDWFVLPFLPSPDTNPTFATYFSRQWADTFIVSLHNFLSVLFQCMPVPVILNFDAECQRTNQVQEENEVLRQKLFALQAEIHRLKKEEQQPEEEEALVQHKLPPYVSNMDRLGDSELAMVCSQRNASLSQSPRVGFLSSLLPQSKKSPSRLSPAQGPPQPQSSAKKESFGGQGTKGKDPTSGAKDGKSLLSGLATGESGWSQHRQRRLQDHGKERKELFSTTTSQCAEKKPEASGPEAEPCPELHTEPVEPLTRASSAGPEGGGVRPEQPFIVLGQEEYGEHHSSIMHCRVDCSGRRVASLDVDGVIKVWSFNPIMQTKASSISKSPLLSLEWATKRDRLLLLGSGVGTVRLYDTEAKKNLCEININDNMPRILSLACSPNGASFVCSAAAPSLTSQVDFSAPDIGSKGMNQVPGRLLLWDTKTMKQQLQFSLDPEPIAINCTAFNHNGNLLVTGAADGVIRLFDMQQHECAMSWRAHYGEVYSVEFSYDENTVYSIGEDGKFIQWNIHKSGLKVSEYSLPSDATGPFVLSGYSGYKQVQVPRGRLFAFDSEGNYMLTCSATGGVIYKLGGDEKVLESCLSLGGHRAPVVTVDWSTAMDCGTCLTASMDGKIKLTTLLAHKA

SEQ ID NO: 97597 - protein, 357 aa, Homo sapiens
  Payload ID: 19461
  Gene Name: WD repeat domain 92
  Uniprot ID: Q96MX6
  ENSP ID: ENSP00000295121
MSAFEKPQIIAHIQKGFNYTVFDCKWVPCSAKFVTMGNFARGTGVIQLYEIQHGDLKLLREIEKAKPIKCGTFGATSLQQRYLATGDFGGNLHIWNLEAPEMPVYSVKGHKEIINAIDGIGGLGIGEGAPEIVTGSRDGTVKVWDPRQKDDPVANMEPVQGENKRDCWTVAFGNAYNQEERVVCAGYDNGDIKLFDLRNMALRWETNIKNGVCSLEFDRKDISMNKLVATSLEGKFHVFDMRTQHPTKGFASVSEKAHKSTVWQVRHLPQNRELFLTAGGAGGLHLWKYEYPIQRSKKDSEGIEMGVAGSVSLLQNVTLSTQPISSLDWSPDKRGLCVCSSFDQTVRVLIVTKLNKI

SEQ ID NO: 97598 - protein, 187 aa, Homo sapiens
  Payload ID: 19461
  Gene Name: WD repeat domain 92
  ENSP ID: ENSP00000384518
MPVYSVKGHKEIINAIDGIGGLGIGEGAPEIVTGSRDGTVKVWDPRQKDDPVANMEPVQGENKRDCWTVAFGNAYNQEERVVCAGYDNGDIKLFDLRNMALRWETNIKNGVCSLEFDRKDISMNKLVATSLEGKFHVFDMRTQHPTKGFASVSEKAHKSTVWQVRHLPQNRELFLTAGGAGGLHLWK

SEQ ID NO: 97599 - protein, 288 aa, Homo sapiens
  Payload ID: 19461
  Gene Name: WD repeat domain 92
  Uniprot ID: Q96MX6
  ENSP ID: ENSP00000386746
MSAFEKPQIIAHIQKGFNYTVFDCKWVPCSAKFVTMGNFARGTGVIQLYEIQHGDLKLLREIEKAKPIKCGTFGATSLQQRYLATGDFGGNLHIWNLEAPEMPVYSVKGHKEIINAIDGIGGLGIGEGAPEIVTGSRDGTVKVWDPRQKDDPVANMEPVQGENKRDCWTVAFGNAYNQEERVVCAGYDNGDIKLFDLRNMALRWETNIKNGVCSLEFDRKDISMNKLVATSLEGKFHVFDMRTQHPTKGFASVSEKAHKSTVWQVRHLPQNRELFLTAGGAGGLHLWK

SEQ ID NO: 97600 - protein, 92 aa, Homo sapiens
  Payload ID: 19461
  Gene Name: WD repeat domain 92
  ENSP ID: ENSP00000410301
  MOD_RES (1)..(1): Any amino acid
XRNMALRWETNIKNGVCSLEFDRKDISMNKLVATSLEGKFHVFDMRTQHPTKGFASVSEKAHKSTVWQVRHLPQNRELFLTAGGAGGLHLWK

SEQ ID NO: 97601 - protein, 686 aa, Homo sapiens
  Payload ID: 19462
  Gene Name: WD repeat domain 93
  Uniprot ID: Q6P2C0
  ENSP ID: ENSP00000268130
MSFPRGSQTQKIKHPIGTRKGPLEVPPPTEKDWPKDDEQDHVLVDPDEELDSLPQPYRMINKLVNLLFDQSWEIIEERNALREAESSQIQPTVYPPLGEIQLNKMPNCMAVSQDYVFIGGAKGFSIYNLYSAKQIYAWEKLKVDVTSIWATDLGNEILIAPVDEMGIIRLFYFYKEGLYLVKAINEVDDTSKQTTCIKMEISQGGDFAAFLLQGAGDIWLDVYKLPKETWLKKLEHPQLTSNPKKKVRQPQLNSLGPISADPLEMDANVSFKGDIKLSLPVYIMKIKPPKPVTGTTFKSPLEVFAKIKDCYGLGSGQNHFIKDSQWEQQAEIFNASYKKYLDREWEEEPLSTATFYFLLPSCLFAMPPEVKGPSGMACVLGIHWTRSHNFFLYSLNRTLKDKADPEGVWPCAAPIAVSQLSCSSSYLVLACEDGVLTLWDLAKGFPLGVAALPQGCFCQSIHFLKYFSVHKGQNMYPEGQVKSQMKCVVLCTDASLHLVEASGTQGPTISVLVERPVKHLDKTICAVAPVPALPGMVLIFSKNGSVCLMDVAKREIICAFAPPGAFPLEVPWKPVFAVSPDHPCFLLRGDYSHETASTDDAGIQYSVFYFNFEACPLLENISKNCTIPQRDLDNMAFPQALPLEKRCERFLQKSYRKLEKNPEKEEEHWARLQRYSLSLQRENFKK

SEQ ID NO: 97602 - protein, 173 aa, Homo sapiens
  Payload ID: 19462
  Gene Name: WD repeat domain 93
  ENSP ID: ENSP00000453022
MSFPRGSQTQKIKHPIGTRKGPLEVPPPTEKDWPKDDEQDHVLVDPDEELDSLPQPYRMINKLVNLLFDQSWEIIEERNALREAESSQIQPTVYPPLGEIQLNKMPNCMAVSQDYVFIGGAKGFSIYNLYSAKQIYAWEKLKVDVTSIWATDLGNEILIAPVDEMGIVLHLPF

SEQ ID NO: 97603 - protein, 658 aa, Homo sapiens
  Payload ID: 19462
  Gene Name: WD repeat domain 93
  Uniprot ID: Q6P2C0
  ENSP ID: ENSP00000453971
MSFPRGSQTQKIKHPIGTRKGPLEVPPPTEKDWPKDDEQDHVLVDPDEELDSLPQPYRMINKLVNLLFDQSWEIIEERNALREAESSQIQPTVYPPLGEIQLNKMPNCMAVSQDYVFIGGAKGFSIYNLYSAKQIYAWEKLKVDVTSIWATDLGNEILIAPVDEMGIIRLFYFYKEGLYLVKAINEVDDTSKQTTCIKMEISQGGDFAAFLLQGAGDIWLDVYKLPKETWLKKLEHPQLTSNPKKKVRQPQLNSLGPISADPLEMDANVSFKGDIKLSLPVYIMKIKPPKPVTGTTFKSPLEVFAKIKDCYGLGSGQNHFIKDSQWEQQAEIFNASYKKYLDREWEEEPLSTATFYFLLPSCLFAMPPEVKGPSGMACVLGIHWTRSHNFFLYSLNRTLKDKADPEGVWPCAAPIAVSQLSCSSSYLVLACEDGVLTLWDLAKGQNMYPEGQVKSQMKCVVLCTDASLHLVEASGTQGPTISVLVERPVKHLDKTICAVAPVPALPGMVLIFSKNGSVCLMDVAKREIICAFAPPGAFPLEVPWKPVFAVSPDHPCFLLRGDYSHETASTDDAGIQYSVFYFNFEACPLLENISKNCTIPQRDLDNMAFPQALPLEKRCERFLQKSYRKLEKNPEKEEEHWARLQRYSLSLQRENFKK

SEQ ID NO: 97604 - protein, 1622 aa, Homo sapiens
  Payload ID: 19463
  Gene Name: WD repeat domain 97
  Uniprot ID: A6NE52
  ENSP ID: ENSP00000320648
MEAEVWEAEGYNLVLDSDLYDADGYDVPDPGLLTEKNELTFTEPSQVLPFLTSSQQWQSLTPRARARRLWLLLRTSLHEVVEKEKRAELRAARLTHGLEPLRRLEVAAGLRSVAQDPVGGRFVVLDGAGRLHLHKEDGWAQETLLAPVRLTGLVTVLGPLGAVGRFVGWGPAGLAILRPNLSLLWLSEQGVGRAPGWAPTCCLPVPDLRLLLVAEMNSSLALWQFRSGGRRLVLRGSALHPPPSPTGRLMRLAVAPVPPHHVLRCFAAYGSAVLTFDLHAWTLVDVRRDLHKTTISDLAYCEEVEAMVTASRDSTVKVWEADWQIRMVFVGHTGPVTAMTVLPNTTLVLSASQDGTLRTWDLQAAAQVGEVALGFWGQDKLSRRVGRLLAPVRPGWPVLSLCASSMQLWRVRELYSPLAQLPAKVLHVQVAPALPAPAHQSLPTRLVCACADGSVYLLSAATGRIVSSLLLEPEDCAAAVAYCLPREALWLLTRAGHLVRANAARCPMSVLHRVCPPPPPAPQPCCLHLYSHLTDLEGAFSSWEIVRQHWGELRCSSVACAWKNKNRYLPVVGHTDGTLSVLEWLSSKTVFQTEAHSPGPVVAIASTWNSIVSSGGDLTVKMWRVFPYAEESLSLLRTFSCCYPAVALCALGRRVTAGFEDPDSATYGLVQFGLGDSPRLDHRPQDDPTDHITGLCCCPTLKLYACSSLDCTVRIWTAENRLLRLLQLNGAPQALAFCSNSGDLVLALGSRLCLVSHRLYLPTSYLVKKMCRKAPDVVDDPPLPLMSQESLTSAQLQRLTNLHGAASLSEALSLIHRRRATSQHLVPKEDLDAIVARDRDLQQLRLGLVVPAAQPPPSWQQRQEGFDNYLRLIYGSGLLGMQSGRGSQQWSAGTLRVERETRDVCAVPQAAHCLARAEVSTAAQTVPTALSPQDLGALGQHFSQSPRVTVPIPPTHRRVHSKASQLLARSSLSHYLGISLDLQLQLEQLRGRTTMALDLPSSHLQCRIPLLPKRWDKEPLSSLRGFFPATVQPHKHCLRPICFPGYVPNSAVLQQMWLNAEPGASQDALWLWRPRPSQTQWQRKLLQWMGEKPGEEGEEDKKEEEEEKEDEELDWALASLSPHSNQQLDSWELEDQSAVDWTQEPRRRSCKVARTHPHPWHRHGSLLLDEHYGHLPKFLHFFIYQTWFKKLFPIFSLQAYPEAGTIEGLASLLVALLEKTTWVDRVHILQVLLRLLPNMSSDLQGQLQGLLVHLLNLDQPPSLQDQTQKKFVILALQLLLACSLESRDVVLELMSYFLYSPVHCRPELKKLLHGLGLQDPEGFLFKEMMTWVQGPDLDSKAGLRTCCHQKLEDMIQELQETPSQTSVVSGAPTRASVIPSGTSWSASGIFGRLSQVSEVPLMVVSPAEPHSLAPELQAQRMLAPKRSWGTPQLRLRVLSETLKSFCLEPEARLHPAGPAQLPGEPPPLEETDWSHSQLLDLGPIDALNFFCEQLRAQQRSSLQEKAAHPHPPEPYTVAPVPDMVVPPPREHWYHPILRLQEAKPQRSARSAMRLRGPMRSRLCAGRTLDGPIRTLKLPLPRVEPQPFPLDWPMPPRPLPPRLLQPALQRYFLPADADPDTYS

SEQ ID NO: 97605 - protein, 837 aa, Homo sapiens
  Payload ID: 19463
  Gene Name: WD repeat domain 97
  ENSP ID: ENSP00000435391
MEAEVWEAEGYNLVLDSDLYDADGYDVPDPGLLTEKNELTFTEPSQVLPFLTSSQQWQSLTPRARARRLWLLLRTSLHEVVEKEKRAELRAARLTHGLEPLRRLEVAAGLRSVAQDPVGGRFVVLDGAGRLHLHKEDGWAQETLLAPVRLTGLVTVLGPLGAVGRFVGWGPAGLAILRPNLSLLWLSEQGVGRAPGWAPTCCLPVPDLRLLLVAEMNSSLALWQFRSGGRRLVLRGSALHPPPSPTGRLMRLAVAPVPPHHVLRCFAAYGSAVLTFDLHAWTLVDVRRDLHKTTISDLAYCEEVEAMVTASRDSTVKVWEADWQIRMVFVGHTGPVTAMTVLPNTTLVLSASQDGTLRTWDLQAAAQVGEVALGFWGQDKLSRRVGRLLAPVRPGWPVLSLCASSMQLWRVRELYSPLAQLPAKVLHVQVAPALPAPAHQSLPTRLVCACADGSVYLLSAATGRIVSSLLLEPEDCAAAVAYCLPREALWLLTRAGHLVRANAARCPMSVLHRVCPPPPPAPQPCCLHLYSHLTDLEGAFSSWEIVRQHWGELRCSSVACAWKNKNRYLPVVGHTDGTLSVLEWLSSKTVFQTEAHSPGPVVAIASTWNSIVSSGGDLTVKMWRVFPYAEESLSLLRTFSCCYPAVALCALGRRVTAGFEDPDSATYGLVQFGLGDSPRLDHRPQDDPTDHITGLCCCPTLKLYACSSLDCTVRIWTAENRLLRLLQLNGAPQALAFCSNSGDLVLALGSRLCLVSHRLYLPTSYLVKKMCRKAPDVVDDPPLPLMSQESLTSAQLQRLTNLHGAASLRSHAGLLSPPGGPPFPLWVGAWRCGALWS

SEQ ID NO: 97606 - protein, 446 aa, Homo sapiens
  Payload ID: 19464
  Gene Name: WD repeat domain, phosphoinositide interacting 1
  Uniprot ID: Q5MNZ9
  ENSP ID: ENSP00000262139
MEAEAADAPPGGVESALSCFSFNQDCTSLATGTKAGYKLFSLSSVEQLDQVHGSNEIPDVYIVERLFSSSLVVVVSHTKPRQMNVYHFKKGTEICNYSYSSNILSIRLNRQRLLVCLEESIYIHNIKDMKLLKTLLDIPANPTGLCALSINHSNSYLAYPGSLTSGEIVLYDGNSLKTVCTIAAHEGTLAAITFNASGSKLASASEKGTVIRVFSVPDGQKLYEFRRGMKRYVTISSLVFSMDSQFLCASSNTETVHIFKLEQVTNSRPEEPSTWSGYMGKMFMAATNYLPTQVSDMMHQDRAFATARLNFSGQRNICTLSTIQKLPRLLVASSSGHLYMYNLDPQDGGECVLIKTHSLLGSGTTEENKENDLRPSLPQSYAATVARPSASSASTVPGYSEDGGALRGEVIPEHEFATGPVCLDDENEFPPIILCRGNQKGKTKQS

SEQ ID NO: 97607 - protein, 364 aa, Homo sapiens
  Payload ID: 19464
  Gene Name: WD repeat domain, phosphoinositide interacting 1
  ENSP ID: ENSP00000437345
MNVYHFKKGTEICNYSYSSNILSIRLNRQRLLVCLEESIYIHNIKDMKLLKTLLDIPANPTGLCALSINHSNSYLAYPGSLTSGEIVLYDGNSLKTVCTIAAHEGTLAAITFNASGSKLASASEKGTVIRVFSVPDGQKLYEFRRGMKRYVTISSLVFSMDSQFLCASSNTETVHIFKLEQVTNSRPEEPSTWSGYMGKMFMAATNYLPTQVSDMMHQDRAFATARLNFSGQRNICTLSTIQKLPRLLVASSSGHLYMYNLDPQDGGECVLIKTHSLLGSGTTEENKENDLRPSLPQSYAATVARPSASSASTVPGYSEDGGALRGEVIPEHEFATGPVCLDDENEFPPIILCRGNQKGKTKQS

SEQ ID NO: 97608 - protein, 369 aa, Homo sapiens
  Payload ID: 19464
  Gene Name: WD repeat domain, phosphoinositide interacting 1
  ENSP ID: ENSP00000465470
MEAEAADAPPGGVESALSCFSFNQDCTSLATGTKAGYKLFSLSSVEQLDQVHGSNEIPDVYIVERLFSSSLVVVVSHTKPRQMNVYHFKKGTEICNYSYSSNILSIRLNRQRLLVCLEESIYIHNIKDMKLLKTLLDIPANPTGLCALSINHSNSYLAYPGSLTSGEIVLYDGNSLKTVCTIAAHEGTLAAITFNASGSKLASASEKGTVIRVFSVPDGQKLYEFRRGMKRYVTISSLVFSMDSQFLCASSNTETVHIFKLEQVTNRQSTRRAFDLEWLHGKDVYGCYQLPPYPGVRHDASGQGFCHCTLELLRTEEHLYPLNDPEVATAASCVIQWTPLYVQFGSSGWRRVCLNQNPQLAWLRNNRRE

SEQ ID NO: 97609 - protein, 54 aa, Homo sapiens
  Payload ID: 19464
  Gene Name: WD repeat domain, phosphoinositide interacting 1
  ENSP ID: ENSP00000465557
  MOD_RES (1)..(1): Any amino acid
XVARPSASSASTVPGYSEDGGALRGEVIPEHEFATGPVCLDDENEFPPVSIRNP

SEQ ID NO: 97610 - protein, 82 aa, Homo sapiens
  Payload ID: 19464
  Gene Name: WD repeat domain, phosphoinositide interacting 1
  ENSP ID: ENSP00000465695
  MOD_RES (1)..(1): Any amino acid
XEENKENDLRPSLPQSYAATVARPSASSASTVPGYSEDGGALRGEVIPEHEFATGPVCLDDENEFPPIILCRGNQKGKTKQS

SEQ ID NO: 97611 - protein, 205 aa, Homo sapiens
  Payload ID: 19464
  Gene Name: WD repeat domain, phosphoinositide interacting 1
  ENSP ID: ENSP00000466270
VTISSLVFSMDSQFLCASSNTETVHIFKLEQVTNSRPEEPSTWSGYMGKMFMAATNYLPTQVSDMMHQDRAFATARLNFSGQRNICTLSTIQKLPRLLVASSSGHLYMYNLDPQDGGECVLIKTHSLLGSGTTEENKENDLRPSLPQSYAATVARPSASSASTVPGYSEDGGALRGEVIPEHEFATGPVCLDDENEFPPVSIRNP

SEQ ID NO: 97612 - protein, 454 aa, Homo sapiens
  Payload ID: 19465
  Gene Name: WD repeat domain, phosphoinositide interacting 2
  Uniprot ID: Q9Y4P8
  ENSP ID: ENSP00000288828
MNLASQSGEAGAGQLLFANFNQDNTEVKGASRAAGLGRRAVVWSLAVGSKSGYKFFSLSSVDKLEQIYECTDTEDVCIVERLFSSSLVAIVSLKAPRKLKVCHFKKGTEICNYSYSNTILAVKLNRQRLIVCLEESLYIHNIRDMKVLHTIRETPPNPAGLCALSINNDNCYLAYPGSATIGEVQVFDTINLRAANMIPAHDSPLAALAFDASGTKLATASEKGTVIRVFSIPEGQKLFEFRRGVKRCVSICSLAFSMDGMFLSASSNTETVHIFKLETVKEKPPEEPTTWTGYFGKVLMASTSYLPSQVTEMFNQGRAFATVRLPFCGHKNICSLATIQKIPRLLVGAADGYLYMYNLDPQEGGECALMKQHRLDGSLETTNEILDSASHDCPLVTQTYGAAAGKGTYVPSSPTRLAYTDDLGAVGGACLEDEASALRLDEDSEHPPMILRTD

SEQ ID NO: 97613 - protein, 425 aa, Homo sapiens
  Payload ID: 19465
  Gene Name: WD repeat domain, phosphoinositide interacting 2
  Uniprot ID: Q9Y4P8
  ENSP ID: ENSP00000371821
MNLASQSGEAGAGQLLFANFNQDNTSLAVGSKSGYKFFSLSSVDKLEQIYECTDTEDVCIVERLFSSSLVAIVSLKAPRKLKVCHFKKGTEICNYSYSNTILAVKLNRQRLIVCLEESLYIHNIRDMKVLHTIRETPPNPAGLCALSINNDNCYLAYPGSATIGEVQVFDTINLRAANMIPAHDSPLAALAFDASGTKLATASEKGTVIRVFSIPEGQKLFEFRRGVKRCVSICSLAFSMDGMFLSASSNTETVHIFKLETVKEKPPEEPTTWTGYFGKVLMASTSYLPSQVTEMFNQGRAFATVRLPFCGHKNICSLATIQKIPRLLVGAADGYLYMYNLDPQEGGECALMKQHRLDGSLETTNEILDSASHDCPLVTQTYGAAAGKAYTDDLGAVGGACLEDEASALRLDEDSEHPPMILRTD

SEQ ID NO: 97614 - protein, 436 aa, Homo sapiens
  Payload ID: 19465
  Gene Name: WD repeat domain, phosphoinositide interacting 2
  Uniprot ID: Q9Y4P8
  ENSP ID: ENSP00000384945
MNLASQSGEAGAGQLLFANFNQDNTSLAVGSKSGYKFFSLSSVDKLEQIYECTDTEDVCIVERLFSSSLVAIVSLKAPRKLKVCHFKKGTEICNYSYSNTILAVKLNRQRLIVCLEESLYIHNIRDMKVLHTIRETPPNPAGLCALSINNDNCYLAYPGSATIGEVQVFDTINLRAANMIPAHDSPLAALAFDASGTKLATASEKGTVIRVFSIPEGQKLFEFRRGVKRCVSICSLAFSMDGMFLSASSNTETVHIFKLETVKEKPPEEPTTWTGYFGKVLMASTSYLPSQVTEMFNQGRAFATVRLPFCGHKNICSLATIQKIPRLLVGAADGYLYMYNLDPQEGGECALMKQHRLDGSLETTNEILDSASHDCPLVTQTYGAAAGKGTYVPSSPTRLAYTDDLGAVGGACLEDEASALRLDEDSEHPPMILRTD

SEQ ID NO: 97615 - protein, 443 aa, Homo sapiens
  Payload ID: 19465
  Gene Name: WD repeat domain, phosphoinositide interacting 2
  Uniprot ID: Q9Y4P8
  ENSP ID: ENSP00000385297
MNLASQSGEAGAGQLLFANFNQDNTEVKGASRAAGLGRRAVVWSLAVGSKSGYKFFSLSSVDKLEQIYECTDTEDVCIVERLFSSSLVAIVSLKAPRKLKVCHFKKGTEICNYSYSNTILAVKLNRQRLIVCLEESLYIHNIRDMKVLHTIRETPPNPAGLCALSINNDNCYLAYPGSATIGEVQVFDTINLRAANMIPAHDSPLAALAFDASGTKLATASEKGTVIRVFSIPEGQKLFEFRRGVKRCVSICSLAFSMDGMFLSASSNTETVHIFKLETVKEKPPEEPTTWTGYFGKVLMASTSYLPSQVTEMFNQGRAFATVRLPFCGHKNICSLATIQKIPRLLVGAADGYLYMYNLDPQEGGECALMKQHRLDGSLETTNEILDSASHDCPLVTQTYGAAAGKAYTDDLGAVGGACLEDEASALRLDEDSEHPPMILRTD

SEQ ID NO: 97616 - protein, 384 aa, Homo sapiens
  Payload ID: 19465
  Gene Name: WD repeat domain, phosphoinositide interacting 2
  Uniprot ID: Q9Y4P8
  ENSP ID: ENSP00000429654
MFTHVLPFVISADTEDVCIVERLFSSSLVAIVSLKAPRKLKVCHFKKGTEICNYSYSNTILAVKLNRQRLIVCLEESLYIHNIRDMKVLHTIRETPPNPAGLCALSINNDNCYLAYPGSATIGEVQVFDTINLRAANMIPAHDSPLAALAFDASGTKLATASEKGTVIRVFSIPEGQKLFEFRRGVKRCVSICSLAFSMDGMFLSASSNTETVHIFKLETVKEKPPEEPTTWTGYFGKVLMASTSYLPSQVTEMFNQGRAFATVRLPFCGHKNICSLATIQKIPRLLVGAADGYLYMYNLDPQEGGECALMKQHRLDGSLETTNEILDSASHDCPLVTQTYGAAAGKAYTDDLGAVGGACLEDEASALRLDEDSEHPPMILRTD

SEQ ID NO: 97617 - protein, 384 aa, Homo sapiens
  Payload ID: 19466
  Gene Name: WD repeat, sterile alpha motif and U-box domain containing 1
  Uniprot ID: Q8N9V3
  ENSP ID: ENSP00000350866
MVKLIHTLADHGDDVNCCAFSFSLLATCSLDKTIRLYSLRDFTELPHSPLKFHTYAVHCCCFSPSGHILASCSTDGTTVLWNTENGQMLAVMEQPSGSPVRVCQFSPDSTCLASGAADGTVVLWNAQSYKLYRCGSVKDGSLAACAFSPNGSFFVTGSSCGDLTVWDDKMRCLHSEKAHDLGITCCDFSSQPVSDGEQGLQFFRLASCGQDCQVKIWIVSFTHILARRTEHQLKQFTEDWSEEDVSTWLCAQDLKDLVGIFKMNNIDGKELLNLTKESLADDLKIESLGLRSKVLRKIEELRTKVKSLSSGIPDEFICPITRELMKDPVIASDGYSYEKEAMENWISKKKRTSPMTNLVLPSAVLTPNRTLKMAINRWLETHQK

SEQ ID NO: 97618 - protein, 476 aa, Homo sapiens
  Payload ID: 19466
  Gene Name: WD repeat, sterile alpha motif and U-box domain containing 1
  Uniprot ID: Q8N9V3
  ENSP ID: ENSP00000352820
MVKLIHTLADHGDDVNCCAFSFSLLATCSLDKTIRLYSLRDFTELPHSPLKFHTYAVHCCCFSPSGHILASCSTDGTTVLWNTENGQMLAVMEQPSGSPVRVCQFSPDSTCLASGAADGTVVLWNAQSYKLYRCGSVKDGSLAACAFSPNGSFFVTGSSCGDLTVWDDKMRCLHSEKAHDLGITCCDFSSQPVSDGEQGLQFFRLASCGQDCQVKIWIVSFTHILGFELKYKSTLSGHCAPVLACAFSHDGQMLVSGSVDKSVIVYDTNTENILHTLTQHTRYVTTCAFAPNTLLLATGSMDKTVNIWQFDLETLCQARRTEHQLKQFTEDWSEEDVSTWLCAQDLKDLVGIFKMNNIDGKELLNLTKESLADDLKIESLGLRSKVLRKIEELRTKVKSLSSGIPDEFICPITRELMKDPVIASDGYSYEKEAMENWISKKKRTSPMTNLVLPSAVLTPNRTLKMAINRWLETHQK

SEQ ID NO: 97619 - protein, 476 aa, Homo sapiens; identical to SEQ ID NO: 97618
  Payload ID: 19466
  Gene Name: WD repeat, sterile alpha motif and U-box domain containing 1
  Uniprot ID: Q8N9V3
  ENSP ID: ENSP00000376545

SEQ ID NO: 97620 - protein, 429 aa, Homo sapiens
  Payload ID: 19466
  Gene Name: WD repeat, sterile alpha motif and U-box domain containing 1
  ENSP ID: ENSP00000386891
MVKLIHTLADHGDDVNCCAFSFSLLATCSLDKTIRLYSLRDFTELPHSPLKFHTYAVHCCCFSPSGHILASCSTDGTTVLWNTENGQMLAVMEQPSGSPVRVCQFSPDSTCLASGAADGTVVLWNAQSYKLYRCGSVKDGSLAACAFSPNGSFFVTGSSCGDLTVWDDKMRCLHSEKAHDLGITCCDFSSQPVSDGEQGLQFFRLASCGQDCQVKIWIVSFTHILGFELKYKSTLSGHCAPVLACAFSHDGQMLVSGSVDKSVIVYDTNTENILHTLTQHTRYVTTCAFAPNTLLLATGSMDKTVNIWQFDLETLCQARRTEHQLKQFTEDWSEEDVSTWLCAQDLKDLVGIFKMNNIDGKELLNLTKESLADDLKIDGYSYEKEAMENWISKKKRTSPMTNLVLPSAVLTPNRTLKMAINRWLETHQK

SEQ ID NO: 97621 - protein, 476 aa, Homo sapiens; identical to SEQ ID NO: 97618
  Payload ID: 19466
  Gene Name: WD repeat, sterile alpha motif and U-box domain containing 1
  Uniprot ID: Q8N9V3
  ENSP ID: ENSP00000387078

SEQ ID NO: 97622 - protein, 1271 aa, Homo sapiens
  Payload ID: 19467
  Gene Name: WDFY family member 4
  ENSP ID: ENSP00000265453
  MOD_RES (1)..(1): Any amino acid
XRDFQSEVLLSAMELFHMTSGGDAAMFRDGKEPQPSAEAAAAPSLANISCFTQKLVEKLYSGMFSADPRHILLFILEHIMVVIETASSQRDTVLSTLYSSLNKVILYCLSKPQQSLSECLGLLSILGFLQEHWDVVFATYNSNISFLLCLMHCLLLLNERSYPEGFGLEPKPRMSTYHQVFLSPNEDVKEKREDLPSLSDVQHNIQKTVQTLWQQLVAQRQQTLEDAFKIDLSVKPGEREVKIEEVTPLWEETMLKAWQHYLASEKKSLASRSNVAHHSKVTLWSGSLSSAMKLMPGRQAKDPECKTEDFVSCIENYRRRGQELYASLYKDHVQRRKCGNIKAANAWARIQEQLFGELGLWSQGEETKPCSPWELDWREGPARMRKRIKRLSPLEALSSGRHKESQDKNDHISQTNAENQDELTLREAEGEPDEVGVDCTQLTFFPALHESLHSEDFLELCRERQVILQELLDKEKVTQKFSLVIVQGHLVSEGVLLFGHQHFYICENFTLSPTGDVYCTRHCLSNISDPFIFNLCSKDRSTDHYSCQCHSYADMRELRQARFLLQDIALEIFFHNGYSKFLVFYNNDRSKAFKSFCSFQPSLKGKATSEDTLSLRRYPGSDRIMLQKWQKRDISNFEYLMYLNTAAGRTCNDYMQYPVFPWVLADYTSETLNLANPKIFRDLSKPMGAQTKERKLKFIQRFKEVEKTEGDMTVQCHYYTHYSSAIIVASYLVRMPPFTQAFCALQGGSFDVADRMFHSVKSTWESASRENMSDVRELTPEFFYLPEFLTNCNGVEFGCMQDGTVLGDVQLPPWADGDPRKFISLHRKALESDFVSANLHHWIDLIFGYKQQGPAAVDAVNIFHPYFYGDRMDLSSITDPLIKSTILGFVSNFGQVPKQLFTKPHPARTAAGKPLPGKDVSTPVSLPGHPQPFFYSLQSLRPSQVTVKDMYLFSLGSESPKGAIGHIVSTEKTILAVERNKVLLPPLWNRTFSWGFDDFSCCLGSYGSDKVLMTFENLAAWGRCLCAVCPSPTTIVTSGTSTVVCVWELSMTKGRPRGLRLRQALYGHTQAVTCLAASVTFSLLVSGSQDCTCILWDLDHLTHVTRLPAHREGISAITISDVSGTIVSCAGAHLSLWNVNGQPLASITTAWGPEGAITCCCLMEGPAWDTSQIIITGSQDGMVRVWKTEDVKMSVPGRPAGEEPPAQPPSPRGHKWEKNLALSRELDVSIALTGKPSKTSPAVTALAVSRNHTKLLVGDERGRIFCWSADG

SEQ ID NO: 97623 - protein, 3184 aa, Homo sapiens
  Payload ID: 19467
  Gene Name: WDFY family member 4
  Uniprot ID: Q6ZS81
  ENSP ID: ENSP00000320563
MEAEDLSKAEDRNEDPGSKNEGQLAAVQPDVPHGGQSSSPTALWDMLERKFLEYQQLTHKSPIERQKSLLSLLPLFLKAWEHSVGIICFPSLQRLAEDVSDQLAQQLQKALVGKPAEQARLAAGQLLWWKGDVDQDGYLLLKSVYVLTGTDSETLGRVAESGLPALLLQCLYLFFVFPLDKDELLESDLQVQKMFVQMLLNICSDSQGLEGLLSGSELQSLLIATTCLREHSCCFWKEPTFCVLRAISKAQNLSIIQYLQATDCVRLSLQNLSRLTDTLPAPEVSEAVSLILGFVKDSYPVSSALFLEFENSEGYPLLLKVLLRYDGLTQSEVDPHLEELLGLVVWLTTCGRSELKVFDSITYPQLEGFKFHHEASGVTVKNLQAFQVLQNVFHKASDSVLCIQVLSVIRTMWAWNARNFFLLEWTLQPISQFVEIMPLKPAPVQEHFFQLLEALVFELHYVPHEILRKVQHLIKESPGPSCTLMALQSILSIAGGDPLFTDIFRDSGLLGLLLAQLRKQAKIMRKSGNKVSTPGVQDPERELTCVMLRIVVTLLKGSVRNAVVLKDHGMVPFIKIFLDDECYREASLSILEQLSAINAEEYMSIIVGALCSSTQGELQLKLDLLKSLLRILVTPKGRAAFRVSSGFNGLLSLLSDLEGSLQEPPLQAWGAVSPRQTLELVLYTLCAVSAALHWDPVNGYFFRRNGLFEKLAEDLCLLGCFGALEEEGNLLRSWVDTKARPFADLLGTAFSSSGSLPPRIQSCLQILGFLDSMASGTLHLRGDLKESLRTKQGPVVDVQKGETGSDPQRNFKQWPDLEERMDEGDAAIMHPGVVCIMVRLLPRLYHEDHPQLSEEIQCSLASHIQSLVKSEKNRQVMCEAGLLGTLMASCHRALVTSGSPLHSRLIRIFEKLASQAIEPDVLRQFLGLGIPSSLSATTKILDSSHTHRGNPGCSGSQTAQGLAEGPWPAAPDAGLHPGVTQAPQPLGESQDSTTALQTALSLISMTSPRNLQPQRAALAPSFVEFDMSVEGYGCLFIPTLSTVMGTSTEYSVSGGIGTGATRPFPPPGGLTFSCWFLISRHGAATEGHPLRFLTLVRHLARTEQPFVCFSVSLCPDDLSLVVSTEEKEFQPLDVMEPEDDSEPSAGCQLQVRCGQLLACGQWHHLAVVVTKEMKRHCTVSTCLDGQVIGSAKMLYIQALPGPFLSMDPSAFVDVYGYIATPRVWKQKSSLIWRLGPTYLFEEAISMETLEVINKLGPRYCGNFQAVHVQGEDLDSEATPFVAEERVSFGLHIASSSITSVADIRNAYNEVDSRLIAKEMNISSRDNAMPVFLLRNCAGHLSGSLRTIGAVAVGQLGVRVFHSSPAASSLDFIGGPAILLGLISLATDDHTMYAAVKVLHSVLTSNAMCDFLMQHICGYQIMAFLLRKKASLLNHRIFQLILSVAGTVELGFRSSAITNTGVFQHILCNFELWMNTADNLELSLFSHLLEILQSPREGPRNAEAAHQAQLIPKLIFLFNEPSLIPSKISTIIGILACQLRGHFSTQDLLRIGLFVVYTLKPSSVNERQICMDGALDPSLPAGSQTSGKTIWLRNQLLEMLLSVISSPQLHLSSESKEEMFLKLGPDWFLLLLQGHLHASTTVLALKLLLYFLASPSLRTRFRDGLCAGSWVERSTEGVDIVMDNLKSQSPLPEQSPCLLPGFRVLNDFLAHHVHIPEVYLIVSTFFLQTPLTELMDGPKDSLDAMLQWLLQRHHQEEVLQAGLCTEGALLLLEMLKATMSQPLAGSEDGAWAQTFPASVLQFLSLVHRTYPQDPAWRAPEFLQTLAIAAFPLGAQKGVGAESTRNTSSPEAAAEGDSTVEGLQAPTKAHPARRKLREFTQLLLRELLLGASSPKQWLPLEVLLEASPDHATSQQKRDFQSEVLLSAMELFHMTSGGDAAMFRDGKEPQPSAEAAAAPSLANISCFTQKLVEKLYSGMFSADPRHILLFILEHIMVVIETASSQRDTVLSTLYSSLNKVILYCLSKPQQSLSECLGLLSILGFLQEHWDVVFATYNSNISFLLCLMHCLLLLNERSYPEGFGLEPKPRMSTYHQVFLSPNEDVKEKREDLPSLSDVQHNIQKTVQTLWQQLVAQRQQTLEDAFKIDLSVKPGEREVKIEEVTPLWEETMLKAWQHYLASEKKSLASRSNVAHHSKVTLWSGSLSSAMKLMPGRQAKDPECKTEDFVSCIENYRRRGQELYASLYKDHVQRRKCGNIKAANAWARIQEQLFGELGLWSQGEETKPCSPWELDWREGPARMRKRIKRLSPLEALSSGRHKESQDKNDHISQTNAENQDELTLREAEGEPDEVGVDCTQLTFFPALHESLHSEDFLELCRERQVILQELLDKEKVTQKFSLVIVQGHLVSEGVLLFGHQHFYICENFTLSPTGDVYCTRHCLSNISDPFIFNLCSKDRSTDHYSCQCHSYADMRELRQARFLLQDIALEIFFHNGYSKFLVFYNNDRSKAFKSFCSFQPSLKGKATSEDTLSLRRYPGSDRIMLQKWQKRDISNFEYLMYLNTAAGRTCNDYMQYPVFPWVLADYTSETLNLANPKIFRDLSKPMGAQTKERKLKFIQRFKEVEKTEGDMTVQCHYYTHYSSAIIVASYLVRMPPFTQAFCALQGGSFDVADRMFHSVKSTWESASRENMSDVRELTPEFFYLPEFLTNCNGVEFGCMQDGTVLGDVQLPPWADGDPRKFISLHRKALESDFVSANLHHWIDLIFGYKQQGPAAVDAVNIFHPYFYGDRMDLSSITDPLIKSTILGFVSNFGQVPKQLFTKPHPARTAAGKPLPGKDVSTPVSLPGHPQPFFYSLQSLRPSQVTVKDMYLFSLGSESPKGAIGHIVSTEKTILAVERNKVLLPPLWNRTFSWGFDDFSCCLGSYGSDKVLMTFENLAAWGRCLCAVCPSPTTIVTSGTSTVVCVWELSMTKGRPRGLRLRQALYGHTQAVTCLAASVTFSLLVSGSQDCTCILWDLDHLTHVTRLPAHREGISAITISDVSGTIVSCAGAHLSLWNVNGQPLASITTAWGPEGAITCCCLMEGPAWDTSQIIITGSQDGMVRVWKTEDVKMSVPGRPAGEEPPAQPPSPRGHKWEKNLALSRELDVSIALTGKPSKTSPAVTALAVSRNHTKLLVGDERGRIFCWSADG

SEQ ID NO: 97624 - protein, 654 aa, Homo sapiens
  Payload ID: 19467
  Gene Name: WDFY family member 4
  Uniprot ID: Q6ZS81
  ENSP ID: ENSP00000354141
MEAEDLSKAEDRNEDPGSKNEGQLAAVQPDVPHGGQSSSPTALWDMLERKFLEYQQLTHKSPIERQKSLLSLLPLFLKAWEHSVGIICFPSLQRLAEDVSDQLAQQLQKALVGKPAEQARLAAGQLLWWKGDVDQDGYLLLKSVYVLTGTDSETLGRVAESGLPALLLQCLYLFFVFPLDKDELLESDLQVQKMFVQMLLNICSDSQGLEGLLSGSELQSLLIATTCLREHSCCFWKEPTFCVLRAISKAQNLSIIQYLQATDCVRLSLQNLSRLTDTLPAPEVSEAVSLILGFVKDSYPVSSALFLEFENSEGYPLLLKVLLRYDGLTQSEVDPHLEELLGLVVWLTTCGRSELKVFDSITYPQLEGFKFHHEASGVTVKNLQAFQVLQNVFHKASDSVLCIQVLSVIRTMWAWNARNFFLLEWTLQPISQFVEIMPLKPAPVQEHFFQLLEALVFELHYVPHEILRKVQHLIKESPGPSCTLMALQSILSIAGGDPLFTDIFRDSGLLGLLLAQLRKQAKIMRKSGNKVSTPGVQDPERELTCVMLRIVVTLLKGSVRNAVVLKDHGMVPFIKIFLDDECYREASLSILEQLSAINAEEYMSIIVGALCSSTQGELQLKLDLLKVISSPPLRLASLWICTKRSTFAQAFVFM

SEQ ID NO: 97625 - protein, 552 aa, Homo sapiens
  Payload ID: 19467
  Gene Name: WDFY family member 4
  ENSP ID: ENSP00000363276
  MOD_RES (1)..(1): Any amino acid
XDDTVVWAEECVACANWLWMNTADNLELSLFSHLLEILQSPREGPRNAEAAHQAQLIPKLIFLFNEPSLIPSKISTIIGILACQLRGHFSTQDLLRIGLFVVYTLKPSSVNERQICMDGALDPSLPAGSQTSGKTIWLRNQLLEMLLSVISSPQLHLSSESKEEMFLKLGPDWFLLLLQGHLHASTTVLALKLLLYFLASPSLRTRFRDGLCAGSWVERSTEGVDIVMDNLKSQSPLPEQSPCLLPGFRVLNDFLAHHVHIPEVYLIVSTFFLQTPLTELMDGPKDSLDAMLQWLLQRHHQEEVLQAGLCTEGALLLLEMLKATMSQPLAGSEDGAWAQTFPASVLQFLSLVHRTYPQDPAWRAPEFLQTLAIAAFPLGAQKGVGAESTRNTSSPEAAAEGDSTVEGLQAPTKAHPARRKLREFTQLLLRELLLGASSPKQWLPLEVLLEASPDHATSQQKRDFQSEVLLSAMELFHMTSGGDAAMFRDGKEPQPSAEAAAAPSLANISCFTQKLVEKLYSGMFSADPRHILLFILEHIMVISAPLQARDFS

SEQ ID NO: 97626 - protein, 205 aa, Homo sapiens
  Payload ID: 19468
  Gene Name: WDYHV motif containing 1
  Uniprot ID: Q96HA8
  ENSP ID: ENSP00000287387
MEGNGPAAVHYQPASPPRDACVYSSCYCEENIWKLCEYIKNHDQYPLEECYAVFISNERKMIPIWKQQARPGDGPVIWDYHVVLLHVSSGGQNFIYDLDTVLPFPCLFDTYVEDAFKSDDDIHPQFRRKFRVIRADSYLKNFASDRSHMKDSSGNWREPPPPYPCIETGDSKMNLNDFISMDPKVGWGAVYTLSEFTHRFGSKNC

SEQ ID NO: 97627 - protein, 196 aa, Homo sapiens
  Payload ID: 19468
  Gene Name: WDYHV motif containing 1
  ENSP ID: ENSP00000428615
MEGNGPAAVHYQPASPPRDACVYSSCYCEENIWKLCEYIKNHDQYPLEECYAVFISNERKMIPIWKQQARPGDGPVIWDYHVVLLHVSSGGQNFIYDLDTVLPFPCLFDTYVEDAFKSDDDIHPQFRRKFRVIRADSYLKNFASDRSHMKDSSGNWREPPPPYPCIETGGINPVDNFLTFKKIKGPSPYYYCLAFI

SEQ ID NO: 97628 - protein, 57 aa, Homo sapiens
  Payload ID: 19468
  Gene Name: WDYHV motif containing 1
  ENSP ID: ENSP00000429258
MKDSSGNWREPPPPYPCIETGDSKMNLNDFISMDPKVGWGAVYTLSEFTHRFGSKNC

SEQ ID NO: 97629 - protein, 63 aa, Homo sapiens
  Payload ID: 19468
  Gene Name: WDYHV motif containing 1
  ENSP ID: ENSP00000430390
  MOD_RES (1)..(1): Any amino acid
XSSRSSSGPGPGPASRPWKVMAPLLSTTSRPAPRGTPASTAAATVKKIFGSSVNTSKTMTSIL

SEQ ID NO: 97630 - protein, 145 aa, Homo sapiens
  Payload ID: 19468
  Gene Name: WDYHV motif containing 1
  Uniprot ID: Q96HA8
  ENSP ID: ENSP00000430427
MIPIWKQQARPGDGPVIWDYHVVLLHVSSGGQNFIYDLDTVLPFPCLFDTYVEDAFKSDDDIHPQFRRKFRVIRADSYLKNFASDRSHMKDSSGNWREPPPPYPCIETGDSKMNLNDFISMDPKVGWGAVYTLSEFTHRFGSKNC

SEQ ID NO: 97631 - protein, 87 aa, Homo sapiens
  Payload ID: 19468
  Gene Name: WDYHV motif containing 1
  ENSP ID: ENSP00000434252
MEGNGPAAVHYQPASPPRDACVYSSCYCEENIWKLCEYIKNHDQYPLEECYAVFISNERKMIPIWKQQARPGDGPVIWVRQLIQRVL

SEQ ID NO: 97632 - protein, 432 aa, Homo sapiens
  Payload ID: 19469
  Gene Name: WEE1 G2 checkpoint kinase
  Uniprot ID: P30291
  ENSP ID: ENSP00000299613
MDTEKSGKREFDVRQTPQVNINPFTPDSLLLHSSGQCRRRKRTYWNDSCGEDMEASDYELEDETRPAKRITITESNMKSRYTTEFHELEKIGSGEFGSVFKCVKRLDGCIYAIKRSKKPLAGSVDEQNALREVYAHAVLGQHSHVVRYFSAWAEDDHMLIQNEYCNGGSLADAISENYRIMSYFKEAELKDLLLQVGRGLRYIHSMSLVHMDIKPSNIFISRTSIPNAASEEGDEDDWASNKVMFKIGDLGHVTRISSPQVEEGDSRFLANEVLQENYTHLPKADIFALALTVVCAAGAEPLPRNGDQWHEIRQGRLPRIPQVLSQEFTELLKVMIHPDPERRPSAMALVKHSVLLSASRKSAEQLRIELNAEKFKNSLLQKELKKAQMAKAAAEERALFTDRMATRSTTQSNRTSRLIGKKMNRSVSLTIY

SEQ ID NO: 97633 - protein, 646 aa, Homo sapiens
  Payload ID: 19469
  Gene Name: WEE1 G2 checkpoint kinase
  Uniprot ID: P30291
  ENSP ID: ENSP00000402084
MSFLSRQQPPPPRRAGAACTLRQKLIFSPCSDCEEEEEEEEEEGSGHSTGEDSAFQEPDSPLPPARSPTEPGPERRRSPGPAPGSPGELEEDLLLPGACPGADEAGGGAEGDSWEEEGFGSSSPVKSPAAPYFLGSSFSPVRCGGPGDASPRGCGARRAGEGRRSPRPDHPGTPPHKTFRKLRLFDTPHTPKSLLSKARGIDSSSVKLRGSSLFMDTEKSGKREFDVRQTPQVNINPFTPDSLLLHSSGQCRRRKRTYWNDSCGEDMEASDYELEDETRPAKRITITESNMKSRYTTEFHELEKIGSGEFGSVFKCVKRLDGCIYAIKRSKKPLAGSVDEQNALREVYAHAVLGQHSHVVRYFSAWAEDDHMLIQNEYCNGGSLADAISENYRIMSYFKEAELKDLLLQVGRGLRYIHSMSLVHMDIKPSNIFISRTSIPNAASEEGDEDDWASNKVMFKIGDLGHVTRISSPQVEEGDSRFLANEVLQENYTHLPKADIFALALTVVCAAGAEPLPRNGDQWHEIRQGRLPRIPQVLSQEFTELLKVMIHPDPERRPSAMALVKHSVLLSASRKSAEQLRIELNAEKFKNSLLQKELKKAQMAKAAAEERALFTDRMATRSTTQSNRTSRLIGKKMNRSVSLTIY

SEQ ID NO: 97634 - protein, 99 aa, Homo sapiens
  Payload ID: 19469
  Gene Name: WEE1 G2 checkpoint kinase
  ENSP ID: ENSP00000432284
MIHPDPERRPSAMALVKHSVLLSASRKSAEQLRIELNAEKFKNSLLQKELKKAQMAKAAAEERALFTDRMATRSTTQNDPNFQCKFKGLWSKEKYLCMP

SEQ ID NO: 97635 - protein, 214 aa, Homo sapiens
  Payload ID: 19469
  Gene Name: WEE1 G2 checkpoint kinase
  ENSP ID: ENSP00000434148
MSYFKEAELKDLLLQVGRGLRYIHSMSLVHMDIKPSNIFISRTSIPNAASEEGDEDDWASNKVMFKIGDLGHVTRISSPQVEEGDSRFLANEVLQENYTHLPKADIFALALTVVCAAGAEPLPRNGDQWHEIRQGRLPRIPQVLSQEFTELLKVMIHPDPERRPSAMALVKHSVLLSASRKSAEQLRIELNAEKFKNSLLQKELKKAQMAKAAA

SEQ ID NO: 97636 - protein, 162 aa, Homo sapiens
  Payload ID: 19469
  Gene Name: WEE1 G2 checkpoint kinase
  ENSP ID: ENSP00000434446
MSCIAFSFGGSLADAISENYRIMSYFKEAELKDLLLQVGRGLRYIHSMSLVHMDIKPSNIFISRTSIPNAASEEGDEDDWASNKVMFKIGDLGHVTRISSPQVEEGDSRFLANEVLQENYTHLPKADIFALALTVVCAAGAEPLPRNGDQWHEIRQGRLPRI

SEQ ID NO: 97637 - protein, 145 aa, Homo sapiens
  Payload ID: 19469
  Gene Name: WEE1 G2 checkpoint kinase
  ENSP ID: ENSP00000435945
  MOD_RES (1)..(1): Any amino acid
XDAISENYRIMSYFKEAELKDLLLQVGRGLRYIHSMSLVHMDIKPSNIFISRTSIPNAASEEGDEDDWASNKVMFKIGDLGHVTRISSPQVEEGDSRFLANEVLQEWYVLLVLNLFREMEINGMKSDRVDYLGYHKCFPKNLQSC

SEQ ID NO: 97638 - protein, 567 aa, Homo sapiens
  Payload ID: 19470
  Gene Name: WEE1 homolog 2 (S. pombe)
  Uniprot ID: P0C1S8
  ENSP ID: ENSP00000380675
MDDKDIDKELRQKLNFSYCEETEIEGQKKVEESREASSQTPEKGEVQDSEAKGTPPWTPLSNVHELDTSSEKDKESPDQILRTPVSHPLKCPETPAQPDSRSKLLPSDSPSTPKTMLSRLVISPTGKLPSRGPKHLKLTPAPLKDEMTSLALVNINPFTPESYKKLFLQSGGKRKIRGDLEEAGPEEGKGGLPAKRCVLRETNMASRYEKEFLEVEKIGVGEFGTVYKCIKRLDGCVYAIKRSMKTFTELSNENSALHEVYAHAVLGHHPHVVRYYSSWAEDDHMIIQNEYCNGGSLQAAISENTKSGNHFEEPKLKDILLQISLGLNYIHNSSMVHLDIKPSNIFICHKMQSESSGVIEEVENEADWFLSANVMYKIGDLGHATSINKPKVEEGDSRFLANEILQEDYRHLPKADIFALGLTIAVAAGAESLPTNGAAWHHIRKGNFPDVPQELSESFSSLLKNMIQPDAEQRPSAAALARNTVLRPSLGKTEELQQQLNLEKFKTATLERELREAQQAQSPQGYTHHGDTGVSGTHTGSRSTKRLVGGKSARSSSFTSGEREPLH

SEQ ID NO: 97639 - protein, 203 aa, Homo sapiens
  Payload ID: 19470
  Gene Name: WEE1 homolog 2 (S. pombe)
  ENSP ID: ENSP00000420388
VYKCIKRLDGCVYAIKRSMKTFTELSNENSALHEVYAHAVLGHHPHVVRYYSSWAEDDHMIIQNEYCNGGSLQAAISENTKSGNHFEEPKLKDILLQISLGLNYIHNSSMVHLDIKPSNIFICHKMQSESSGVIEEVENEADWFLSANVMYKIGDLGHATSINKPKVEEGDSRFLANEILQENMIQPDAEQRPSAAALARNTV

SEQ ID NO: 97640 - protein, 203 aa, Homo sapiens; identical to SEQ ID NO: 97639
  Payload ID: 19470
  Gene Name: WEE1 homolog 2 (S. pombe)
  ENSP ID: ENSP00000458529

SEQ ID NO: 97641 - protein, 567 aa, Homo sapiens; identical to SEQ ID NO: 97638
  Payload ID: 19470
  Gene Name: WEE1 homolog 2 (S. pombe)
  Uniprot ID: P0C1S8
  ENSP ID: ENSP00000459392

SEQ ID NO: 97642 - protein, 281 aa, Homo sapiens
  Payload ID: 19471
  Gene Name: Werner helicase interacting protein 1
  Uniprot ID: Q96S55
  ENSP ID: ENSP00000370141
MVTILMRAINSLGIHVLDSSRPTDPLSHSSNSSSEPAMFIEDKAVDTLAYLSDGDARAGLNGLQLAVLARLSSRKMFCKKSGQSYSPSRVLITENDVKEGLQRSHILYDRAGEEHYNCISALHKSMRGSDQNASLYWLARMLEGGEDPLYVARRLVRFASEDIGLADPSALTQAVAAYQGCHFIGMPECEVLLAQCVVYFARAPKSIEVYSAYNNVKACLRNHQGPLPPVPLHLRNAPTRLMKDLGYGKGYKYNPMYSEPVDQEYLPEELRGVDFFKQRRC

SEQ ID NO: 97643 - protein, 445 aa, Homo sapiens
  Payload ID: 19471
  Gene Name: Werner helicase interacting protein 1
  Uniprot ID: Q96S55
  ENSP ID: ENSP00000370146
MLQGKPLADTMRPDTLQDYFGQSKAVGQDTLLRSLLETNEIPSLILWGPPGCGKTTLAHIIASNSKKHSIRFVTLSATNAKTNDVRDVIKQAQNEKSFFKRKTILFIDEIHRFNKSQQDTFLPHVECGTITLIGATTENPSFQVNAALLSRCRVIVLEKLPVEAMVTILMRAINSLGIHVLDSSRPTDPLSHSSNSSSEPAMFIEDKAVDTLAYLSDGDARAGLNGLQLAVLARLSSRKMFCKKSGQSYSPSRVLITENDVKEGLQRSHILYDRAGEEHYNCISALHKSMRGSDQNASLYWLARMLEGGEDPLYVARRLVRFASEDIGLADPSALTQAVAAYQGCHFIGMPECEVLLAQCVVYFARAPKSIEVYSAYNNVKACLRNHQGPLPPVPLHLRNAPTRLMKDLGYGKGYKYNPMYSEPVDQEYLPEELRGVDFFKQRRC

SEQ ID NO: 97644 - protein, 640 aa, Homo sapiens
  Payload ID: 19471
  Gene Name: Werner helicase interacting protein 1
  Uniprot ID: Q96S55
  ENSP ID: ENSP00000370148
MEVSGPEDDPFLSQLHQVQCPVCQQMMPAAHINSHLDRCLLLHPAGHAEPAAGSHRAGERAKGPSPPGAKRRRLSESSALKQPATPTAAESSEGEGEEGDDGGETESRESYDAPPTPSGARLIPDFPVARSSSPGRKGSGKRPAAAAAAGSASPRSWDEAEAQEEEEAVGDGDGDGDADADGEDDPGHWDADAAEAATAFGASGGGRPHPRALAAEEIRQMLQGKPLADTMRPDTLQDYFGQSKAVGQDTLLRSLLETNEIPSLILWGPPGCGKTTLAHIIASNSKKHSIRFVTLSATNAKTNDVRDVIKQAQNEKSFFKRKTILFIDEIHRFNKSQQVNAALLSRCRVIVLEKLPVEAMVTILMRAINSLGIHVLDSSRPTDPLSHSSNSSSEPAMFIEDKAVDTLAYLSDGDARAGLNGLQLAVLARLSSRKMFCKKSGQSYSPSRVLITENDVKEGLQRSHILYDRAGEEHYNCISALHKSMRGSDQNASLYWLARMLEGGEDPLYVARRLVRFASEDIGLADPSALTQAVAAYQGCHFIGMPECEVLLAQCVVYFARAPKSIEVYSAYNNVKACLRNHQGPLPPVPLHLRNAPTRLMKDLGYGKGYKYNPMYSEPVDQEYLPEELRGVDFFKQRRC

SEQ ID NO: 97645 - protein, 665 aa, Homo sapiens
  Payload ID: 19471
  Gene Name: Werner helicase interacting protein 1
  Uniprot ID: Q96S55
  ENSP ID: ENSP00000370150
MEVSGPEDDPFLSQLHQVQCPVCQQMMPAAHINSHLDRCLLLHPAGHAEPAAGSHRAGERAKGPSPPGAKRRRLSESSALKQPATPTAAESSEGEGEEGDDGGETESRESYDAPPTPSGARLIPDFPVARSSSPGRKGSGKRPAAAAAAGSASPRSWDEAEAQEEEEAVGDGDGDGDADADGEDDPGHWDADAAEAATAFGASGGGRPHPRALAAEEIRQMLQGKPLADTMRPDTLQDYFGQSKAVGQDTLLRSLLETNEIPSLILWGPPGCGKTTLAHIIASNSKKHSIRFVTLSATNAKTNDVRDVIKQAQNEKSFFKRKTILFIDEIHRFNKSQQDTFLPHVECGTITLIGATTENPSFQVNAALLSRCRVIVLEKLPVEAMVTILMRAINSLGIHVLDSSRPTDPLSHSSNSSSEPAMFIEDKAVDTLAYLSDGDARAGLNGLQLAVLARLSSRKMFCKKSGQSYSPSRVLITENDVKEGLQRSHILYDRAGEEHYNCISALHKSMRGSDQNASLYWLARMLEGGEDPLYVARRLVRFASEDIGLADPSALTQAVAAYQGCHFIGMPECEVLLAQCVVYFARAPKSIEVYSAYNNVKACLRNHQGPLPPVPLHLRNAPTRLMKDLGYGKGYKYNPMYSEPVDQEYLPEELRGVDFFKQRRC

SEQ ID NO: 97646 - protein, 665 aa, Homo sapiens; identical to SEQ ID NO: 97645
  Payload ID: 19471
  Gene Name: Werner helicase interacting protein 1
  Uniprot ID: Q96S55
  ENSP ID: ENSP00000477551

SEQ ID NO: 97647 - protein, 1432 aa, Homo sapiens
  Payload ID: 19472
  Gene Name: Werner syndrome, RecQ helicase-like
  Uniprot ID: Q14191
  ENSP ID: ENSP00000298139
MSEKKLETTAQQRKCPEWMNVQNKRCAVEERKACVRKSVFEDDLPFLEFTGSIVYSYDASDCSFLSEDISMSLSDGDVVGFDMEWPPLYNRGKLGKVALIQLCVSESKCYLFHVSSMSVFPQGLKMLLENKAVKKAGVGIEGDQWKLLRDFDIKLKNFVELTDVANKKLKCTETWSLNSLVKHLLGKQLLKDKSIRCSNWSKFPLTEDQKLYAATDAYAGFIIYRNLEILDDTVQRFAINKEEEILLSDMNKQLTSISEEVMDLAKHLPHAFSKLENPRRVSILLKDISENLYSLRRMIIGSTNIETELRPSNNLNLLSFEDSTTGGVQQKQIREHEVLIHVEDETWDPTLDHLAKHDGEDVLGNKVERKEDGFEDGVEDNKLKENMERACLMSLDITEHELQILEQQSQEEYLSDIAYKSTEHLSPNDNENDTSYVIESDEDLEMEMLKHLSPNDNENDTSYVIESDEDLEMEMLKSLENLNSGTVEPTHSKCLKMERNLGLPTKEEEEDDENEANEGEEDDDKDFLWPAPNEEQVTCLKMYFGHSSFKPVQWKVIHSVLEERRDNVAVMATGYGKSLCFQYPPVYVGKIGLVISPLISLMEDQVLQLKMSNIPACFLGSAQSENVLTDIKLGKYRIVYVTPEYCSGNMGLLQQLEADIGITLIAVDEAHCISEWGHDFRDSFRKLGSLKTALPMVPIVALTATASSSIREDIVRCLNLRNPQITCTGFDRPNLYLEVRRKTGNILQDLQPFLVKTSSHWEFEGPTIIYCPSRKMTQQVTGELRKLNLSCGTYHAGMSFSTRKDIHHRFVRDEIQCVIATIAFGMGINKADIRQVIHYGAPKDMESYYQEIGRAGRDGLQSSCHVLWAPADINLNRHLLTEIRNEKFRLYKLKMMAKMEKYLHSSRCRRQIILSHFEDKQVQKASLGIMGTEKCCDNCRSRLDHCYSMDDSEDTSWDFGPQAFKLLSAVDILGEKFGIGLPILFLRGSNSQRLADQYRRHSLFGTGKDQTESWWKAFSRQLITEGFLVEVSRYNKFMKICALTKKGRNWLHKANTESQSLILQANEELCPKKLLLPSSKTVSSGTKEHCYNQVPVELSTEKKSNLEKLYSYKPCDKISSGSNISKKSIMVQSPEKAYSSSQPVISAQEQETQIVLYGKLVEARQKHANKMDVPPAILATNKILVDMAKMRPTTVENVKRIDGVSEGKAAMLAPLLEVIKHFCQTNSVQTDLFSSTKPQEEQKTSLVAKNKICTLSQSMAITYSLFQEKKMPLKSIAESRILPLMTIGMHLSQAVKAGCPLDLERAGLTPEVQKIIADVIRNPPVNSDMSKISLIRMLVPENIDTYLIHMAIEILKHGPDSGLQPSCDVNKRRCFPGSEEICSSSKRSKEEVGINTETSSAERKRRLPVWFAKGSDTSKKLMDKTKRGGLFS

SEQ ID NO: 97648 - protein, 794 aa, Homo sapiens
  Payload ID: 19473
  Gene Name: widely interspaced zinc finger motifs
  Uniprot ID: O95785
  ENSP ID: ENSP00000263381
MEGSLAGSLAAPDRPQGPERLPGPAPRENIEGGAEAAEGEGGIFRSTRYLPVTKEGPRDILDGRGGISVANFDPGTFSLMRCDFCGAGFDTRAGLSSHARAHLRDFGITNWELTVSPINILQELLATSAAEQPPSPLGREPGGPPGSFLTSRRPRLPLTVPFPPTWAEDPGPAYGDASGPEPARDIRCEFCGEFFENRKGLSSHARSHLRQMGVTEWYVNGSPIDTLREILKRRTQSRPGGPPNPPGPSPKALAKMMGGAGPGSSLEARSPSDLHISPLAKKLPPPPGSPLGHSPTASPPPTARKMFPGLAAPSLPKKLKPEQIRVEIKREMLPGALHGELHPSEGPWGAPREDMTPLNLSSRAEPVRDIRCEFCGEFFENRKGLSSHARSHLRQMGVTEWSVNGSPIDTLREILKKKSKPCLIKKEPPAGDLAPALAEDGPPTVAPGPVQSPLPLSPLAGRPGKPGAGPAQVPRELSLTPITGAKPSATGYLGSVAAKRPLQEDRLLPAEVKAKTYIQTELPFKAKTLHEKTSHSSTEACCELCGLYFENRKALASHARAHLRQFGVTEWCVNGSPIETLSEWIKHRPQKVGAYRSYIQGGRPFTKKFRSAGHGRDSDKRPSLGLAPGGLAVVGRSAGGEPGPEAGRAADGGERPLAASPPGTVKAEEHQRQNINKFERRQARPPDASAARGGEDTNDLQQKLEEVRQPPPRVRPVPSLVPRPPQTSLVKFVGNIYTLKCRFCEVEFQGPLSIQEEWVRHLQRHILEMNFSKADPPPEESQAPQAQTAAAEAP

SEQ ID NO: 97649 - protein, 832 aa, Homo sapiens
  Payload ID: 19473
  Gene Name: widely interspaced zinc finger motifs
  ENSP ID: ENSP00000373933
MDLGSPSLPKKSLPVPGALEQVASRLSSKVAAEVPHGSKQELQDLKAQSLTTCEVCGACFETRKGLSSHARSHLRQLGVAESESSGAPIDLLYELVKQKGLPDAHLGLPPGLAKKSSSLKEVVAGAPRPGLLSLAKPLDAPAVNKAIKSPPGFSAKGLGHPPSSPLLKKTPLALAGSPTPKNPEDKSPQLSLSPRPASPKAQWPQSEDEGPLNLTSGPEPARDIRCEFCGEFFENRKGLSSHARSHLRQMGVTEWYVNGSPIDTLREILKRRTQSRPGGPPNPPGPSPKALAKMMGGAGPGSSLEARSPSDLHISPLAKKLPPPPGSPLGHSPTASPPPTARKMFPGLAAPSLPKKLKPEQIRVEIKREMLPGALHGELHPSEGPWGAPREDMTPLNLSSRAEPVRDIRCEFCGEFFENRKGLSSHARSHLRQMGVTEWSVNGSPIDTLREILKKKSKPCLIKKEPPAGDLAPALAEDGPPTVAPGPVQSPLPLSPLAGRPGKPGAGPAQVPRELSLTPITGAKPSATGYLGSVAAKRPLQEDRLLPAEVKAKTYIQTELPFKAKTLHEKTSHSSTEACCELCGLYFENRKALASHARAHLRQFGVTEWCVNGSPIETLSEWIKHRPQKVGAYRSYIQGGRPFTKKFRSAGHGRDSDKRPSLGLAPGGLAVVGRSAGGEPGPEAGRAADGGERPLAASPPGTVKAEEHQRQNINKFERRQARPPDASAARGGEDTNDLQQKLEEVRQPPPRVRPVPSLVPRPPQTSLVKFVGNIYTLKCRFCEVEFQGPLSIQEEWVRHLQRHILEMNFSKADPPPEESQAPQAQTAAAEAP

SEQ ID NO: 97650 - protein, 965 aa, Homo sapiens
  Payload ID: 19473
  Gene Name: widely interspaced zinc finger motifs
  Uniprot ID: O95785
  ENSP ID: ENSP00000445824
MDLGSPSLPKKSLPVPGALEQVASRLSSKVAAEVPHGSKQELQDLKAQSLTTCEVCGACFETRKGLSSHARSHLRQLGVAESESSGAPIDLLYELVKQKGLPDAHLGLPPGLAKKSSSLKEVVAGAPRPGLLSLAKPLDAPAVNKAIKSPPGFSAKGLGHPPSSPLLKKTPLALAGSPTPKNPEDKSPQLSLSPRPASPKAQWPQSEDEGPLNLTLDSDGGRELDCQLCGAWFETRKGLSSHARAHLRHLGVSDPDAKGSPIDVLHGLIRRDGVQIRLPPRRGALAHPGRPPPTSAALSLLPPPPPAKKAKLKAAGMASPWGKQDLSAAAAAGIFWASDVEPSPLNLSSGPEPARDIRCEFCGEFFENRKGLSSHARSHLRQMGVTEWYVNGSPIDTLREILKRRTQSRPGGPPNPPGPSPKALAKMMGGAGPGSSLEARSPSDLHISPLAKKLPPPPGSPLGHSPTASPPPTARKMFPGLAAPSLPKKLKPEQIRVEIKREMLPGALHGELHPSEGPWGAPREDMTPLNLSSRAEPVRDIRCEFCGEFFENRKGLSSHARSHLRQMGVTEWSVNGSPIDTLREILKKKSKPCLIKKEPPAGDLAPALAEDGPPTVAPGPVQSPLPLSPLAGRPGKPGAGPAQVPRELSLTPITGAKPSATGYLGSVAAKRPLQEDRLLPAEVKAKTYIQTELPFKAKTLHEKTSHSSTEACCELCGLYFENRKALASHARAHLRQFGVTEWCVNGSPIETLSEWIKHRPQKVGAYRSYIQGGRPFTKKFRSAGHGRDSDKRPSLGLAPGGLAVVGRSAGGEPGPEAGRAADGGERPLAASPPGTVKAEEHQRQNINKFERRQARPPDASAARGGEDTNDLQQKLEEVRQPPPRVRPVPSLVPRPPQTSLVKFVGNIYTLKCRFCEVEFQGPLSIQEEWVRHLQRHILEMNFSKADPPPEESQAPQAQTAAAEAP

SEQ ID NO: 97651 - protein, 968 aa, Homo sapiens
  Payload ID: 19473
  Gene Name: widely interspaced zinc finger motifs
  ENSP ID: ENSP00000469022
MVAMDLGSPSLPKKSLPVPGALEQVASRLSSKVAAEVPHGSKQELQDLKAQSLTTCEVCGACFETRKGLSSHARSHLRQLGVAESESSGAPIDLLYELVKQKGLPDAHLGLPPGLAKKSSSLKEVVAGAPRPGLLSLAKPLDAPAVNKAIKSPPGFSAKGLGHPPSSPLLKKTPLALAGSPTPKNPEDKSPQLSLSPRPASPKAQWPQSEDEGPLNLTLDSDGGRELDCQLCGAWFETRKGLSSHARAHLRHLGVSDPDAKGSPIDVLHGLIRRDGVQIRLPPRRGALAHPGRPPPTSAALSLLPPPPPAKKAKLKAAGMASPWGKQDLSAAAAAGIFWASDVEPSPLNLSSGPEPARDIRCEFCGEFFENRKGLSSHARSHLRQMGVTEWYVNGSPIDTLREILKRRTQSRPGGPPNPPGPSPKALAKMMGGAGPGSSLEARSPSDLHISPLAKKLPPPPGSPLGHSPTASPPPTARKMFPGLAAPSLPKKLKPEQIRVEIKREMLPGALHGELHPSEGPWGAPREDMTPLNLSSRAEPVRDIRCEFCGEFFENRKGLSSHARSHLRQMGVTEWSVNGSPIDTLREILKKKSKPCLIKKEPPAGDLAPALAEDGPPTVAPGPVQSPLPLSPLAGRPGKPGAGPAQVPRELSLTPITGAKPSATGYLGSVAAKRPLQEDRLLPAEVKAKTYIQTELPFKAKTLHEKTSHSSTEACCELCGLYFENRKALASHARAHLRQFGVTEWCVNGSPIETLSEWIKHRPQKVGAYRSYIQGGRPFTKKFRSAGHGRDSDKRPSLGLAPGGLAVVGRSAGGEPGPEAGRAADGGERPLAASPPGTVKAEEHQRQNINKFERRQARPPDASAARGGEDTNDLQQKLEEVRQPPPRVRPVPSLVPRPPQTSLVKFVGNIYTLKCRFCEVEFQGPLSIQEEWVRHLQRHILEMNFSKADPPPEESQAPQAQTAAAEAP

SEQ ID NO: 97652 - protein, 133 aa, Homo sapiens
  Payload ID: 19473
  Gene Name: widely interspaced zinc finger motifs
  ENSP ID: ENSP00000469138
MEGSLAGSLAAPDRPQGPERLPGPAPRENIEGGAEAAEGEGGIFRSTRYLPVTKEGPRDILDGRGGISVANFDPGTFSLMRCDFCGAGFDTRAGLSSHARAHLRDFGITNWELTVSPINILQELLATSAAEQP

SEQ ID NO: 97653 - protein, 835 aa, Homo sapiens
  Payload ID: 19473
  Gene Name: widely interspaced zinc finger motifs
  Uniprot ID: O95785
  ENSP ID: ENSP00000469534
MVAMDLGSPSLPKKSLPVPGALEQVASRLSSKVAAEVPHGSKQELQDLKAQSLTTCEVCGACFETRKGLSSHARSHLRQLGVAESESSGAPIDLLYELVKQKGLPDAHLGLPPGLAKKSSSLKEVVAGAPRPGLLSLAKPLDAPAVNKAIKSPPGFSAKGLGHPPSSPLLKKTPLALAGSPTPKNPEDKSPQLSLSPRPASPKAQWPQSEDEGPLNLTSGPEPARDIRCEFCGEFFENRKGLSSHARSHLRQMGVTEWYVNGSPIDTLREILKRRTQSRPGGPPNPPGPSPKALAKMMGGAGPGSSLEARSPSDLHISPLAKKLPPPPGSPLGHSPTASPPPTARKMFPGLAAPSLPKKLKPEQIRVEIKREMLPGALHGELHPSEGPWGAPREDMTPLNLSSRAEPVRDIRCEFCGEFFENRKGLSSHARSHLRQMGVTEWSVNGSPIDTLREILKKKSKPCLIKKEPPAGDLAPALAEDGPPTVAPGPVQSPLPLSPLAGRPGKPGAGPAQVPRELSLTPITGAKPSATGYLGSVAAKRPLQEDRLLPAEVKAKTYIQTELPFKAKTLHEKTSHSSTEACCELCGLYFENRKALASHARAHLRQFGVTEWCVNGSPIETLSEWIKHRPQKVGAYRSYIQGGRPFTKKFRSAGHGRDSDKRPSLGLAPGGLAVVGRSAGGEPGPEAGRAADGGERPLAASPPGTVKAEEHQRQNINKFERRQARPPDASAARGGEDTNDLQQKLEEVRQPPPRVRPVPSLVPRPPQTSLVKFVGNIYTLKCRFCEVEFQGPLSIQEEWVRHLQRHILEMNFSKADPPPEESQAPQAQTAAAEAP

SEQ ID NO: 97654 - protein, 281 aa, Homo sapiens
  Payload ID: 19474
  Gene Name: Williams Beuren syndrome chromosome region 22
  Uniprot ID: O43709
  ENSP ID: ENSP00000265758
MASRGRRPEHGGPPELFYDETEARKYVRNSRMIDIQTRMAGRALELLYLPENKPCYLLDIGCGTGLSGSYLSDEGHYWVGLDISPAMLDEAVDREIEGDLLLGDMGQGIPFKPGTFDGCISISAVQWLCNANKKSENPAKRLYCFFASLFSVLVRGSRAVLQLYPENSEQLELITTQATKAGFSGGMVVDYPNSAKAKKFYLCLFSGPSTFIPEGLSENQDEVEPRESVFTNERFPLRMSRRGMVRKSRAWVLEKKERHRRQGREVRPDTQYTGRKRKPRF

SEQ ID NO: 97655 - protein, 140 aa, Homo sapiens
  Payload ID: 19474
  Gene Name: Williams Beuren syndrome chromosome region 22
  ENSP ID: ENSP00000390048
MASRGRRPEHGGPPELFYDETEARKYVRNSRMIDIQTRMAGRALELLYLPENKPCYLLDIGCGTGLSGSYLSDEGHYWVGLDISPAMLDEAVDREIEGDLLLGDMGQGIPFKPGTFDGCIRSGDPELSCSCTLRTQSSWS

SEQ ID NO: 97656 - protein, 140 aa, Homo sapiens
  Payload ID: 19474
  Gene Name: Williams Beuren syndrome chromosome region 22
  ENSP ID: ENSP00000390136
MASRGRRPEHGGPPELFYDETEARKYVRNSRMIDIQTRMAGRALELLYLPENKPCYLLDIGCGTGLSGSYLSDEGHYWVGLDISPAMLAFLLCSGSVMLTRSLKTLPSACTAFLLLFFLFSSGDPELSCSCTLRTQSSWS

SEQ ID NO: 97657 - protein, 123 aa, Homo sapiens
  Payload ID: 19474
  Gene Name: Williams Beuren syndrome chromosome region 22
  ENSP ID: ENSP00000391410
MADPQSCFMTRQKPGNTFASEGSLNTAGRPGVGKRQVAPVAGVARKGRRIWGSRMIDIQTRMAGRALELLYLPENKPCYLLDIGCGTGLSGSYLSDEGHYWVGLDISPAMLGPGIPSCPAAVP

SEQ ID NO: 97658 - protein, 89 aa, Homo sapiens
  Payload ID: 19474
  Gene Name: Williams Beuren syndrome chromosome region 22
  ENSP ID: ENSP00000391761
MIDIQTRMAGRALELLYLPENKPCYLLDIGCGTGLSGSYLSDEGHYWVGLDISPAMLDEAVDREIEGDLLLGDMGQGIPFKPGTFDGCI

SEQ ID NO: 97659 - protein, 193 aa, Homo sapiens
  Payload ID: 19474
  Gene Name: Williams Beuren syndrome chromosome region 22
  ENSP ID: ENSP00000392039
MADPQSCFMTRQKPGNTFASEGSLNTAGRPGVGKRQVAPVAGVARKGRRIWGSRMIDIQTRMAGRALELLYLPENKPCYLLDIGCGTGLSGSYLSDEGHYWVGLDISPAMLDEAVDREIEGDLLLGDMGQGIPFKPGTFDGCISISAVQWLCNANKKSENPAKRLYCFFASLFSVLVRGSRAVLQLYPENSEQ

SEQ ID NO: 97660 - protein, 65 aa, Homo sapiens
  Payload ID: 19474
  Gene Name: Williams Beuren syndrome chromosome region 22
  ENSP ID: ENSP00000394852
  MOD_RES (1)..(1): Any amino acid
XSGDPELSCSCTLRTQSRFPLRMSRRGMVRKSRAWVLEKKERHRRQGREVRPDTQYTGRKRKPRF

SEQ ID NO: 97661 - protein, 67 aa, Homo sapiens
  Payload ID: 19474
  Gene Name: Williams Beuren syndrome chromosome region 22
  ENSP ID: ENSP00000398314
MADPQSCFMTRQKPGNTFASEGSLNTAGRPGVGKRQVAPVAGVARKGRRIWGCGKGRTRVGADFCLW

SEQ ID NO: 97662 - protein, 128 aa, Homo sapiens
  Payload ID: 19474
  Gene Name: Williams Beuren syndrome chromosome region 22
  ENSP ID: ENSP00000398732
  MOD_RES (1)..(1): Any amino acid
XISAVQWLCNANKKSENPAKRLYCFFASLFSVLVRGSRAVLQLYPENSEQLELITTQATKAGFSGGMVVDYPNSAKAKKFYLCLFSGPSTFIPEVPIKDVEAGNGEEESGMGAGEEGAAQAPGQGSQT

SEQ ID NO: 97663 - protein, 298 aa, Homo sapiens
  Payload ID: 19474
  Gene Name: Williams Beuren syndrome chromosome region 22
  Uniprot ID: O43709
  ENSP ID: ENSP00000401191
MASRGRRPEHGGPPELFYDETEARKYVRNSRMIDIQTRMAGRALELLYLPENKPCYLLDIGCGTGLSGSYLSDEGHYWVGLDISPAMLDEAVDREIEGDLLLGDMGQGIPFKPGTFDGCISISAVQWLCNANKKSENPAKRLYCFFASLFSVLVRGSRAVLQLYPENSEQLELITTQATKAGFSGGMVVDYPNSAKAKKFYLCLFSGPSTFIPEGLSENQDEVEPRESVFTNEREGGAFERRGIRGHQTRRFPLRMSRRGMVRKSRAWVLEKKERHRRQGREVRPDTQYTGRKRKPRF

SEQ ID NO: 97664 - protein, 100 aa, Homo sapiens
  Payload ID: 19474
  Gene Name: Williams Beuren syndrome chromosome region 22
  ENSP ID: ENSP00000404981
MASRGRRPEHGGPPELFYDETEARKYVRNSRMIDIQTRMAGRALELLYLPENKPCYLLDIGCGTGLSGSYLSDEGHYWVGLDISPAMLGPGIPSCPAAVP

SEQ ID NO: 97665 - protein, 39 aa, Homo sapiens
  Payload ID: 19474
  Gene Name: Williams Beuren syndrome chromosome region 22
  ENSP ID: ENSP00000415387
  MOD_RES (1)..(1): Any amino acid
XGTGLSGSYLSDEGHYWVGLDISPAMLGPGIPSCPAAVP

SEQ ID NO: 97666 - protein, 245 aa, Homo sapiens
  Payload ID: 19475
  Gene Name: Williams Beuren syndrome chromosome region 27
  Uniprot ID: Q8N6F8
  ENSP ID: ENSP00000297873
MAQEEGGSLPEVRARVRAAHGIPDLAQKLHFYDRWAPDYDQDVATLLYRAPRLAVDCLTQALPGPPHSALILDVACGTGLVAAELRAPGFLQLHGVDGSPGMLEQAQAPGLYQRLSLCTLGQEPLPSPEGTFDAVLIVGALSDGQVPCNAIPELHVTKPGGLVCLTTRTNSSNLQYKEALEATLDRLEQAGMWEGLVAWPVDRLWTAGSWLPPSWRWYPASLPRMASSPALSTCTESGRRPRLRK

SEQ ID NO: 97667 - protein, 90 aa, Homo sapiens
  Payload ID: 19475
  Gene Name: Williams Beuren syndrome chromosome region 27
  ENSP ID: ENSP00000398533
MAQEEGGSLPEVRARVRAAHGIPDLAQKLHFYDRWAPDYDQDVATLLYRAPRLAVDCLTQALPGPPHSALILDVACGTGLVAAEGPSTRC

SEQ ID NO: 97668 - protein, 153 aa, Homo sapiens
  Payload ID: 19476
  Gene Name: Williams-Beuren syndrome chromosome region 16
  ENSP ID: ENSP00000477558
MRRQQGIVHSSSLSLEDGLGRRGSRPERRRLQQGQISSAACGYGFTLLSSKTADVTKVWGMGLNKDSQLGFHRSRKDKTRGYEYVLEPSPVSLPLDRPQETRVLQVSCGRAHSLVLTDREGVFSMGNNSYGQCGRKVVENEIYSESHRVHRMQ

SEQ ID NO: 97669 - protein, 454 aa, Homo sapiens
  Payload ID: 19476
  Gene Name: Williams-Beuren syndrome chromosome region 16
  Uniprot ID: Q96I51
  ENSP ID: ENSP00000477659
MALVALVAGARLGRRLSGPGLGRGHWTAAGRSRSRREAAEAEAEVPVVQYVGERAARADRVFVWGFSFSGALGVPSFVVPSSGPGPRAGARPRRRIQPVPYRLELDQKISSAACGYGFTLLSSKTADVTKVWGMGLNKDSQLGFHRSRKDKTRGYEYVLEPSPVSLPLDRPQETRVLQVSCGRAHSLVLTDREGVFSMGNNSYGQCGRKVVENEIYSESHRVHRMQDFDGQVVQVACGQDHSLFLTDKGEVYSCGWGADGQTGLGHYNITSSPTKLGGDLAGVNVIQVATYGDCCLAVSADGGLFGWGNSEYLQLASVTDSTQVNVPRCLHFSGVGKVRQAACGGTGCAVLNGEGHVFVWGYGILGKGPNLVESAVPEMIPPTLFGLTEFNPEIQVSRIRCGLSHFAALTNKGELFVWGKNIRGCLGIGRLEDQYFPWRAPAPSASAKTTGPLL

SEQ ID NO: 97670 - protein, 464 aa, Homo sapiens
  Payload ID: 19476
  Gene Name: Williams-Beuren syndrome chromosome region 16
  Uniprot ID: Q96I51
  ENSP ID: ENSP00000480364
MALVALVAGARLGRRLSGPGLGRGHWTAAGRSRSRREAAEAEAEVPVVQYVGERAARADRVFVWGFSFSGALGVPSFVVPSSGPGPRAGARPRRRIQPVPYRLELDQKISSAACGYGFTLLSSKTADVTKVWGMGLNKDSQLGFHRSRKDKTRGYEYVLEPSPVSLPLDRPQETRVLQVSCGRAHSLVLTDREGVFSMGNNSYGQCGRKVVENEIYSESHRVHRMQDFDGQVVQVACGQDHSLFLTDKGEVYSCGWGADGQTGLGHYNITSSPTKLGGDLAGVNVIQVATYGDCCLAVSADGGLFGWGNSEYLQLASVTDSTQVNVPRCLHFSGVGKVRQAACGGTGCAVLNGEGHVFVWGYGILGKGPNLVESAVPEMIPPTLFGLTEFNPEIQVSRIRCGLSHFAALTNKGELFVWGKNIRGCLGIGRLEDQYFPWRVTMPGEPVDVACGVDHMVTLAKSFI

SEQ ID NO: 97671 - protein, 358 aa, Homo sapiens
  Payload ID: 19476
  Gene Name: Williams-Beuren syndrome chromosome region 16
  Uniprot ID: Q96I51
  ENSP ID: ENSP00000480781
MALVALVAGARLGRRLSGPGLGRGHWTAAGRSRSRREAAEAEAEVPVVQYVGERAARADRVFVWGFSFSGALGVPSFVVPSSGPGPRAGARPRRRIQPVPYRLELDQKISSAACGYGFTLLSSKTADVTKVWGMGLNKDSQLGFHRSRKDKTRGYEYVLEPSPVSLPLDRPQETRVLQVSCGRAHSLVLTDREGVFSMGNNSYGQCGRKVVENEIYSESHRVHRMQDFDGQVVQVACGQDHSLFLTDKGEVYSCGWGADGQTGLGHYNITSSPTKLGGDLAGVNVIQVATYGDCCLAVSADGGLFGWGNSEYLQLASVTDSTQVNVPRCLHFSGVGKVRQAACGGTGCAVLNDTWPQS

SEQ ID NO: 97672 - protein, 598 aa, Homo sapiens
  Payload ID: 19477
  Gene Name: Williams-Beuren syndrome chromosome region 17
  Uniprot ID: Q6IS24
  ENSP ID: ENSP00000329654
MASLRRVKVLLVLNLIAVAGFVLFLAKCRPIAVRSGDAFHEIRPRAEVANLSAHSASPIQDAVLKRLSLLEDIVYRQLNGLSKSLGLIEGYGGRGKGGLPATLSPAEEEKAKGPHEKYGYNSYLSEKISLDRSIPDYRPTKCKELKYSKDLPQISIIFIFVNEALSVILRSVHSAVNHTPTHLLKEIILVDDNSDEEELKVPLEEYVHKRYPGLVKVVRNQKREGLIRARIEGWKVATGQVTGFFDAHVEFTAGWAEPVLSRIQENRKRVILPSIDNIKQDNFEVQRYENSAHGYSWELWCMYISPPKDWWDAGDPSLPIRTPAMIGCSFVVNRKFFGEIGLLDPGMDVYGGENIELGIKVWLCGGSMEVLPCSRVAHIERKKKPYNSNIGFYTKRNALRVAEVWMDDYKSHVYIAWNLPLENPGIDIGDVSERRALRKSLKCKNFQWYLDHVYPEMRRYNNTVAYGELRNNKAKDVCLDQGPLENHTAILYPCHGWGPQLARYTKEGFLHLGALGTTTLLPDTRCLVDNSKSRLPQLLDCDKVKSSLYKRWNFIQNGAIMNKGTGRCLEVENRGLAGIDLILRSCTGQRWTIKNSIK

SEQ ID NO: 97673 - protein, 188 aa, Homo sapiens
  Payload ID: 19477
  Gene Name: Williams-Beuren syndrome chromosome region 17
  ENSP ID: ENSP00000392019
LLDFKTKTTPPLGVLADTERGLSVFPPVSLSATAEMADLFRITDWGMFMSLDRITNGGLSKSLGLIEGYGGRGKGGLPATLSPAEEEKAKGPHEKYGYNSYLSEKISLDRSIPDYRPTKCKELKYSKDLPQISIIFIFVNEALSVILRSVHSAVNHTPTHLLKEIILVDDNSDEEELKVPLEEYVHKR

SEQ ID NO: 97674 - protein, 519 aa, Homo sapiens
  Payload ID: 19477
  Gene Name: Williams-Beuren syndrome chromosome region 17
  ENSP ID: ENSP00000479090
GLSKSLGLIEGYGGRGKGGLPATLSPAEEEKAKGPHEKYGYNSYLSEKISLDRSIPDYRPTKCKELKYSKDLPQISIIFIFVNEALSVILRSVHSAVNHTPTHLLKEIILVDDNSDEEELKVPLEEYVHKRYPGLVKVVRNQKREGLIRARIEGWKVATGQVTGFFDAHVEFTAGWAEPVLSRIQENRKRVILPSIDNIKQDNFEVQRYENSAHGYSWELWCMYISPPKDWWDAGDPSLPIRTPAMIGCSFVVNRKFFGEIGLLDPGMDVYGGENIELGIKVWLCGGSMEVLPCSRVAHIERKKKPYNSNIGFYTKRNALRVAEVWMDDYKSHVYIAWNLPLENPGIDIGDVSERRALRKSLKCKNFQWYLDHVYPEMRRYNNTVAYGELRNNKAKDVCLDQGPLENHTAILYPCHGWGPQLARYTKEGFLHLGALGTTTLLPDTRCLVDNSKSRLPQLLDCDKVKSSLYKRWNFIQNGAIMNKGTGRCLEVENRGLAGIDLILRSCTGQRWTIKNSIK

SEQ ID NO: 97675 - protein, 265 aa, Homo sapiens
  Payload ID: 19478
  Gene Name: Williams-Beuren syndrome chromosome region 28
  Uniprot ID: Q6UE05
  ENSP ID: ENSP00000316775
MEALPPVRSSLLGILLQVTRLSVLLVQNRDHLYNFLLLKINLFNHWVSGLAQEARGSCNWQAHLPLGAAACPLGQALWAGLALIQVPVWLVLQGPRLMWAGMWGSTKGLGLALLSAWEQLGLSVAIWTDLFLSCLHGLMLVALLLVVVTWRVCQKSHCFRLGRQLSKALQVNCVVRKLLVQLRRLYWWVETMTALTSWHLAYLITWTTCLASHLLQAAFEHTTQLAEAQEVEPQEVSGSSLLPSLSASSDSESGTVLPEQETPRE

SEQ ID NO: 97676 - protein, 60 aa, Homo sapiens
  Payload ID: 19478
  Gene Name: Williams-Beuren syndrome chromosome region 28
  Uniprot ID: Q6UE05
  ENSP ID: ENSP00000403621
MEALPPVRSSLLGILLQVTRLSVLRQGLALSPSLERSGAGSARCSLQLPVSSNPPPSASK

SEQ ID NO: 97677 - protein, 517 aa, Homo sapiens
  Payload ID: 19479
  Gene Name: Wilms tumor 1
  ENSP ID: ENSP00000331327
LQDPASTCVPEPASQHTLRSGPGCLQQPEQQGVRDPGGIWAKLGAAEASAERLQGRRSRGASGSEPQQMGSDVRDLNALLPAVPSLGGGGGCALPVSGAAQWAPVLDFAPPGASAYGSLGGPAPPPAPPPPPPPPPHSFIKQEPSWGGAEPHEEQCLSAFTVHFSGQFTGTAGACRYGPFGPPPPSQASSGQARMFPNAPYLPSCLESQPAIRNQGYSTVTFDGTPSYGHTPSHHAAQFPNHSFKHEDPMGQQGSLGEQQYSVPPPVYGCHTPTDSCTGSQALLLRTPYSSDNLYQMTSQLECMTWNQMNLGATLKGVAAGSSSSVKWTEGQSNHSTGYESDNHTTPILCGAQYRIHTHGVFRGIQDVRRVPGVAPTLVRSASETSEKRPFMCAYPGCNKRYFKLSHLQMHSRKHTGEKPYQCDFKDCERRFSRSDQLKRHQRRHTGVKPFQCKTCQRKFSRSDHLKTHTRTHTGKTSEKPFSCRWPSCQKKFARSDELVRHHNMHQRNMTKLQLAL

SEQ ID NO: 97678 - protein, 317 aa, Homo sapiens
  Payload ID: 19479
  Gene Name: Wilms tumor 1
  ENSP ID: ENSP00000368368
LQDPASTCVPEPASQHTLRSGPGCLQQPEQQGVRDPGGIWAKLGAAEASAERLQGRRSRGASGSEPQQMGSDVRDLNALLPAVPSLGGGGGCALPVSGAAQWAPVLDFAPPGASAYGSLGGPAPPPAPPPPPPPPPHSFIKQEPSWGGAEPHEEQCLSAFTVHFSGQFTGTAGACRYGPFGPPPPSQASSGQARMFPNAPYLPSCLESQPAIRNQGYSTVTFDGTPSYGHTPSHHAAQFPNHSFKHEDPMGQQGSLGEQQYSVPPPVYGCHTPTDSCTGSQALLLRTPYSSDNLYQMTSQLECMTWNQMNLGATLKG

SEQ ID NO: 97679 - protein, 302 aa, Homo sapiens
  Payload ID: 19479
  Gene Name: Wilms tumor 1
  Uniprot ID: P19544
  ENSP ID: ENSP00000368370
MEKGYSTVTFDGTPSYGHTPSHHAAQFPNHSFKHEDPMGQQGSLGEQQYSVPPPVYGCHTPTDSCTGSQALLLRTPYSSDNLYQMTSQLECMTWNQMNLGATLKGVAAGSSSSVKWTEGQSNHSTGYESDNHTTPILCGAQYRIHTHGVFRGIQDVRRVPGVAPTLVRSASETSEKRPFMCAYPGCNKRYFKLSHLQMHSRKHTGEKPYQCDFKDCERRFSRSDQLKRHQRRHTGVKPFQCKTCQRKFSRSDHLKTHTRTHTGEKPFSCRWPSCQKKFARSDELVRHHNMHQRNMTKLQLAL

SEQ ID NO: 97680 - protein, 514 aa, Homo sapiens
  Payload ID: 19479
  Gene Name: Wilms tumor 1
  ENSP ID: ENSP00000413452
LQDPASTCVPEPASQHTLRSGPGCLQQPEQQGVRDPGGIWAKLGAAEASAERLQGRRSRGASGSEPQQMGSDVRDLNALLPAVPSLGGGGGCALPVSGAAQWAPVLDFAPPGASAYGSLGGPAPPPAPPPPPPPPPHSFIKQEPSWGGAEPHEEQCLSAFTVHFSGQFTGTAGACRYGPFGPPPPSQASSGQARMFPNAPYLPSCLESQPAIRNQGYSTVTFDGTPSYGHTPSHHAAQFPNHSFKHEDPMGQQGSLGEQQYSVPPPVYGCHTPTDSCTGSQALLLRTPYSSDNLYQMTSQLECMTWNQMNLGATLKGVAAGSSSSVKWTEGQSNHSTGYESDNHTTPILCGAQYRIHTHGVFRGIQDVRRVPGVAPTLVRSASETSEKRPFMCAYPGCNKRYFKLSHLQMHSRKHTGEKPYQCDFKDCERRFSRSDQLKRHQRRHTGVKPFQCKTCQRKFSRSDHLKTHTRTHTGEKPFSCRWPSCQKKFARSDELVRHHNMHQRNMTKLQLAL

SEQ ID NO: 97681 - protein, 497 aa, Homo sapiens
  Payload ID: 19479
  Gene Name: Wilms tumor 1
  ENSP ID: ENSP00000415516
LQDPASTCVPEPASQHTLRSGPGCLQQPEQQGVRDPGGIWAKLGAAEASAERLQGRRSRGASGSEPQQMGSDVRDLNALLPAVPSLGGGGGCALPVSGAAQWAPVLDFAPPGASAYGSLGGPAPPPAPPPPPPPPPHSFIKQEPSWGGAEPHEEQCLSAFTVHFSGQFTGTAGACRYGPFGPPPPSQASSGQARMFPNAPYLPSCLESQPAIRNQGYSTVTFDGTPSYGHTPSHHAAQFPNHSFKHEDPMGQQGSLGEQQYSVPPPVYGCHTPTDSCTGSQALLLRTPYSSDNLYQMTSQLECMTWNQMNLGATLKGHSTGYESDNHTTPILCGAQYRIHTHGVFRGIQDVRRVPGVAPTLVRSASETSEKRPFMCAYPGCNKRYFKLSHLQMHSRKHTGEKPYQCDFKDCERRFSRSDQLKRHQRRHTGVKPFQCKTCQRKFSRSDHLKTHTRTHTGEKPFSCRWPSCQKKFARSDELVRHHNMHQRNMTKLQLAL

SEQ ID NO: 97682 - protein, 288 aa, Homo sapiens
  Payload ID: 19479
  Gene Name: Wilms tumor 1
  Uniprot ID: P19544
  ENSP ID: ENSP00000435307
MEKGYSTVTFDGTPSYGHTPSHHAAQFPNHSFKHEDPMGQQGSLGEQQYSVPPPVYGCHTPTDSCTGSQALLLRTPYSSDNLYQMTSQLECMTWNQMNLGATLKGHSTGYESDNHTTPILCGAQYRIHTHGVFRGIQDVRRVPGVAPTLVRSASETSEKRPFMCAYPGCNKRYFKLSHLQMHSRKHTGEKPYQCDFKDCERRFSRSDQLKRHQRRHTGVKPFQCKTCQRKFSRSDHLKTHTRTHTGKTSEKPFSCRWPSCQKKFARSDELVRHHNMHQRNMTKLQLAL

SEQ ID NO: 97683 - protein, 131 aa, Homo sapiens
  Payload ID: 19479
  Gene Name: Wilms tumor 1
  ENSP ID: ENSP00000435351
MGQQGSLGEQQYSVPPPVYGCHTPTDSCTGSQALLLRTPYSSDNLYQMTSQLECMTWNQMNLGATLKGVAAGSSSSVKWTEGQSNHSTGYESDNHTTPILCGAQYRIHTHGVFRGIQDVRRVPGVAPTLVR

SEQ ID NO: 97684 - protein, 178 aa, Homo sapiens
  Payload ID: 19479
  Gene Name: Wilms tumor 1
  ENSP ID: ENSP00000435624
  MOD_RES (1)..(1): Any amino acid
XLGATLKGVAAGSSSSVKWTEGQSNHSTGYESDNHTTPILCGAQYRIHTHGVFRGIQDVRRVPGVAPTLVRSASETSEKRPFMCAYPGCNKRYFKLSHLQMHSRKHTGVKPFQCKTCQRKFSRSDHLKTHTRTHTGKTSEKPFSCRWPSCQKKFARSDELVRHHNMHQRNMTKLQLAL

SEQ ID NO: 97685 - protein, 25 aa, Homo sapiens
  Payload ID: 19479
  Gene Name: Wilms tumor 1
  ENSP ID: ENSP00000436292
MCAYPGCNKRYFKLSHLQMHSRKHT

SEQ ID NO: 97686 - protein, 151 aa, Homo sapiens
  Payload ID: 19480
  Gene Name: Wilms tumor 1 associated protein
  Uniprot ID: Q15007
  ENSP ID: ENSP00000336911
MTNEEPLPKKVRLSETDFKVMARDELILRWKQYEAYVQALEGKYTDLNSNDVTGLRESEEKLKQQQQESARRENILVMRLATKEQEMQECTTQIQYLKQVQQPSVAQLRSTMVDPAINLFFLKMKGELEQTKDKLEQAQNELSAWKFTPDR

SEQ ID NO: 97687 - protein, 396 aa, Homo sapiens
  Payload ID: 19480
  Gene Name: Wilms tumor 1 associated protein
  Uniprot ID: Q15007
  ENSP ID: ENSP00000351141
MTNEEPLPKKVRLSETDFKVMARDELILRWKQYEAYVQALEGKYTDLNSNDVTGLRESEEKLKQQQQESARRENILVMRLATKEQEMQECTTQIQYLKQVQQPSVAQLRSTMVDPAINLFFLKMKGELEQTKDKLEQAQNELSAWKFTPDSQTGKKLMAKCRMLIQENQELGRQLSQGRIAQLEAELALQKKYSEELKSSQDELNDFIIQLDEEVEGMQSTILVLQQQLKETRQQLAQYQQQQSQASAPSTSRTTASEPVEQSEATSKDCSRLTNGPSNGSSSRQRTSGSGFHREGNTTEDDFPSSPGNGNKSSNSSEERTGRGGSGYVNQLSAGYESVDSPTGSENSLTHQSNDTDSSHDPQEEKAVSGKGNRTVGSRHVQNGLDSSVNVQGSVL

SEQ ID NO: 97688 - protein, 396 aa, Homo sapiens; identical to SEQ ID NO: 97687
  Payload ID: 19480
  Gene Name: Wilms tumor 1 associated protein
  Uniprot ID: Q15007
  ENSP ID: ENSP00000479438

SEQ ID NO: 97689 - protein, 170 aa, Homo sapiens
  Payload ID: 19480
  Gene Name: Wilms tumor 1 associated protein
  ENSP ID: ENSP00000484404
MTNEEPLPKKVRLSETDFKVMARDELILRWKQYEAYVQALEGKYTDLNSNDVTGLRESEEKLKQQQQESARRENILVMRLATKEQEMQECTTQIQYLKQVQQPSVAQLRSTMVDPAINLFFLKMKGELEQTKDKLEQAQNELSAWKFTPDRGLMASDYSEEVATSEKFPF

SEQ ID NO: 97690 - protein, 170 aa, Homo sapiens; identical to SEQ ID NO: 97689
  Payload ID: 19480
  Gene Name: Wilms tumor 1 associated protein
  ENSP ID: ENSP00000487338

SEQ ID NO: 97691 - protein, 200 aa, Homo sapiens
  Payload ID: 19481
  Gene Name: Wilms tumor 1 interacting protein
  ENSP ID: ENSP00000465683
  MOD_RES (1)..(1): Any amino acid
XPLPPGREGGPSAAERRLEALTRELERALEARTARDYFGICIKCGLGIYGAQQACQAMGSLYHTDCFTCDSCGRRLRGKAFYNVGEKVYCQEDFLYSGFQQTADKCSVCGHLIMEMILQALGKSYHPGCFRCSVCNECLDGVPFTVDVENNIYCVRDYHTVFAPKCASCARPILPAQGCETTIRVVSMDRDYHVACYHCE

SEQ ID NO: 97692 - protein, 430 aa, Homo sapiens
  Payload ID: 19481
  Gene Name: Wilms tumor 1 interacting protein
  Uniprot ID: A6NIX2
  ENSP ID: ENSP00000466953
MQRSRAGADEAALLLAGLALRELEPGCGSPGRGRRGPRPGPGDEAAPALGRRGKGSGGPEAGADGLSRGERGPRRAAVPELSAQPAGSPRASLAGSDGGGGGGSARSSGISLGYDQRHGSPRSGRSDPRPGPGPPSVGSARSSVSSLGSRGSAGAYADFLPPGACPAPARSPEPAGPAPFPLPALPLPPGREGGPSAAERRLEALTRELERALEARTARDYFGICIKCGLGIYGAQQACQAMGSLYHTDCFTCDSCGRRLRGKAFYNVGEKVYCQEDFLYSGFQQTADKCSVCGHLIMEMILQALGKSYHPGCFRCSVCNECLDGVPFTVDVENNIYCVRDYHTVFAPKCASCARPILPAQGCETTIRVVSMDRDYHVACYHCEDCGLQLSGEEGRRCYPLAGHLLCRRCHLRRLQPGPLPSPTVHVTEL

SEQ ID NO: 97693 - protein, 360 aa, Homo sapiens
  Payload ID: 19482
  Gene Name: wingless-type MMTV integration site family member 2
  Uniprot ID: P09544
  ENSP ID: ENSP00000265441
MNAPLGGIWLWLPLLLTWLTPEVNSSWWYMRATGGSSRVMCDNVPGLVSSQRQLCHRHPDVMRAISQGVAEWTAECQHQFRQHRWNCNTLDRDHSLFGRVLLRSSRESAFVYAISSAGVVFAITRACSQGEVKSCSCDPKKMGSAKDSKGIFDWGGCSDNIDYGIKFARAFVDAKERKGKDARALMNLHNNRAGRKAVKRFLKQECKCHGVSGSCTLRTCWLAMADFRKTGDYLWRKYNGAIQVVMNQDGTGFTVANERFKKPTKNDLVYFENSPDYCIRDREAGSLGTAGRVCNLTSRGMDSCEVMCCGRGYDTSHVTRMTKCGCKFHWCCAVRCQDCLEALDVHTCKAPKNADWTTAT

SEQ ID NO: 97694 - protein, 110 aa, Homo sapiens
  Payload ID: 19482
  Gene Name: wingless-type MMTV integration site family member 2
  ENSP ID: ENSP00000389643
MNAPLGGIWLWLPLLLTWLTPEVNSSWWYMRATGGSSRVMCDNVPGLVSSQRQLCHRHPDVMRAISQGVAEWTAECQHQFRQHRWNCNTLDRDHSLFGRVLLRRPVAKEK

SEQ ID NO: 97695 - protein, 153 aa, Homo sapiens
  Payload ID: 19482
  Gene Name: wingless-type MMTV integration site family member 2
  ENSP ID: ENSP00000419466
MNAPLGGIWLWLPLLLTWLTPEVNSSWWYMRATGGSSRVMCDNVPGLVSSQRQLCHRHPDVMRAISQGVAEWTAECQHQFRQHRWNCNTLDRDHSLFGRVLLRSCKAVLETRVQVPRGERLMYSQDMLAGHGRLQENGRLSLEEVQWGHPGGH

SEQ ID NO: 97696 - protein, 370 aa, Homo sapiens
  Payload ID: 19483
  Gene Name: wingless-type MMTV integration site family, member 1
  Uniprot ID: P04628
  ENSP ID: ENSP00000293549
MGLWALLPGWVSATLLLALAALPAALAANSSGRWWGIVNVASSTNLLTDSKSLQLVLEPSLQLLSRKQRRLIRQNPGILHSVSGGLQSAVRECKWQFRNRRWNCPTAPGPHLFGKIVNRGCRETAFIFAITSAGVTHSVARSCSEGSIESCTCDYRRRGPGGPDWHWGGCSDNIDFGRLFGREFVDSGEKGRDLRFLMNLHNNEAGRTTVFSEMRQECKCHGMSGSCTVRTCWMRLPTLRAVGDVLRDRFDGASRVLYGNRGSNRASRAELLRLEPEDPAHKPPSPHDLVYFEKSPNFCTYSGRLGTAGTAGRACNSSSPALDGCELLCCGRGHRTRTQRVTERCNCTFHWCCHVSCRNCTHTRVLHECL

SEQ ID NO: 97697 - protein, 359 aa, Homo sapiens
  Payload ID: 19483
  Gene Name: wingless-type MMTV integration site family, member 1
  ENSP ID: ENSP00000481240
MGLWALLPGWVSATLLLALAALPAALAANSSGRWWGIVNVASSTNLLTDSKSLQLVLEPSLQLLSRKQRRLIRQNPGILHSVSGGLQSAVRECKWQFRNRRWNCPTAPGPHLFGKIVNRGCRETAFIFAITSAGVTHSVARSCSEGSIESCTCDYRRRGPGGPDWHWGGCSDNIDFGRLFGREFVDSGEKGRDLRFLMNLHNNEAGRTTVFSEMRQECKCHGMSGSCTVRTCWMRLPTLRAVGDVLRDRFDGASRVLYGNRGSNRASRAELLRLEPDLVYFEKSPNFCTYSGRLGTAGTAGRACNSSSPALDGCELLCCGRGHRTRTQRVTERCNCTFHWCCHVSCRNCTHTRVLHECL

SEQ ID NO: 97698 - protein, 417 aa, Homo sapiens
  Payload ID: 19484
  Gene Name: wingless-type MMTV integration site family, member 10A
  Uniprot ID: Q9GZT5
  ENSP ID: ENSP00000258411
MGSAHPRPWLRLRPQPQPRPALWVLLFFLLLLAAAMPRSAPNDILDLRLPPEPVLNANTVCLTLPGLSRRQMEVCVRHPDVAASAIQGIQIAIHECQHQFRDQRWNCSSLETRNKIPYESPIFSRGFRESAFAYAIAAAGVVHAVSNACALGKLKACGCDASRRGDEEAFRRKLHRLQLDALQRGKGLSHGVPEHPALPTASPGLQDSWEWGGCSPDMGFGERFSKDFLDSREPHRDIHARMRLHNNRVGRQAVMENMRRKCKCHGTSGSCQLKTCWQVTPEFRTVGALLRSRFHRATLIRPHNRNGGQLEPGPAGAPSPAPGAPGPRRRASPADLVYFEKSPDFCEREPRLDSAGTVGRLCNKSSAGSDGCGSMCCGRGHNILRQTRSERCHCRFHWCCFVVCEECRITEWVSVCK

SEQ ID NO: 97699 - protein, 212 aa, Homo sapiens
  Payload ID: 19484
  Gene Name: wingless-type MMTV integration site family, member 10A
  ENSP ID: ENSP00000388812
  MOD_RES (1)..(1): Any amino acid
XSAPNDILDLRLPPEPVLNANTVCLTLPGLSRRQMEVCVRHPDVAASAIQGIQIAIHECQHQFRDQRWNCSSLETRNKIPYESPIFSRGSDGEHAAEVQVPRHVRQLPAQDVLAGDARVPHRGGAAAQPLPPRHAHPAAQPQRRPAGAGPSGGTLAGSGRSRAAPTGQPRRPGLLRKVSRLLRARAAPGLGGHRGPPVQQEQRRLGWLRQHV

SEQ ID NO: 97700 - protein, 389 aa, Homo sapiens
  Payload ID: 19485
  Gene Name: wingless-type MMTV integration site family, member 10B
  Uniprot ID: O00744
  ENSP ID: ENSP00000301061
MLEEPRPRPPPSGLAGLLFLALCSRALSNEILGLKLPGEPPLTANTVCLTLSGLSKRQLGLCLRNPDVTASALQGLHIAVHECQHQLRDQRWNCSALEGGGRLPHHSAILKRGFRESAFSFSMLAAGVMHAVATACSLGKLVSCGCGWKGSGEQDRLRAKLLQLQALSRGKSFPHSLPSPGPGSSPSPGPQDTWEWGGCNHDMDFGEKFSRDFLDSREAPRDIQARMRIHNNRVGRQVVTENLKRKCKCHGTSGSCQFKTCWRAAPEFRAVGAALRERLGRAIFIDTHNRNSGAFQPRLRPRRLSGELVYFEKSPDFCERDPTMGSPGTRGRACNKTSRLLDGCGSLCCGRGHNVLRQTRVERCHCRFHWCCYVLCDECKVTEWVNVCK

SEQ ID NO: 97701 - protein, 191 aa, Homo sapiens
  Payload ID: 19485
  Gene Name: wingless-type MMTV integration site family, member 10B
  Uniprot ID: O00744
  ENSP ID: ENSP00000384691
MLEEPRPRPPPSGLAGLLFLALCSRALSNEILGLKLPGEPPLTANTVCLTLSGLSKRQLGLCLRNPDVTASALQGLHIAVHECQHQLRDQRWNCSALEGGGRLPHHSAILKRGFRESAFSFSMLAAGVMHAVATACSLGKLVSCGCGWKGSGEQDRLRAKLLQLQALSRGKLPGTSRHECESTTTGWGARW

SEQ ID NO: 97702 - protein, 173 aa, Homo sapiens
  Payload ID: 19485
  Gene Name: wingless-type MMTV integration site family, member 10B
  ENSP ID: ENSP00000385980
MLEEPRPRPPPSGLAGLLFLALCSRALSNEILGLKLPGEPPLTANTVCLTLSGLSKRQLGLCLRNPDVTASALQGLHIAVHECQHQLRDQRWNCSALEGGGRLPHHSAILKRGFRESAFSFSMLAAGVMHAVATACSLGKLVSCGCGWKGSGKLPGTSRHECESTTTGWGARW

SEQ ID NO: 97703 - protein, 132 aa, Homo sapiens
  Payload ID: 19485
  Gene Name: wingless-type MMTV integration site family, member 10B
  ENSP ID: ENSP00000398473
MLEEPRPRPPPSGLAGLLFLALCSRALSNEILGLKLPGEPPLTANTVCLTLSGLSKRQLGLCLRNPDVTASALQGLHIAVHECQHQLRDQRWNCSALEGGGRLPHHSAILKRGPGVGEGLDTQMVSEKVLFP

SEQ ID NO: 97704 - protein, 102 aa, Homo sapiens
  Payload ID: 19485
  Gene Name: wingless-type MMTV integration site family, member 10B
  ENSP ID: ENSP00000404896
MLEEPRPRPPPSGLAGLLFLALCSRALSNEILGLKLPGEPPLTANTVCLTLSGLSKRQLGLCLRNPDVTASALQGLHIAVHECQHQLRDQRWNCSALEGGGR

SEQ ID NO: 97705 - protein, 354 aa, Homo sapiens
  Payload ID: 19486
  Gene Name: wingless-type MMTV integration site family, member 11
  Uniprot ID: O96014
  ENSP ID: ENSP00000325526
MRARPQVCEALLFALALQTGVCYGIKWLALSKTPSALALNQTQHCKQLEGLVSAQVQLCRSNLELMHTVVHAAREVMKACRRAFADMRWNCSSIELAPNYLLDLERGTRESAFVYALSAAAISHAIARACTSGDLPGCSCGPVPGEPPGPGNRWGGCADNLSYGLLMGAKFSDAPMKVKKTGSQANKLMRLHNSEVGRQALRASLEMKCKCHGVSGSCSIRTCWKGLQELQDVAADLKTRYLSATKVVHRPMGTRKHLVPKDLDIRPVKDSELVYLQSSPDFCMKNEKVGSHGTQDRQCNKTSNGSDSCDLMCCGRGYNPYTDRVVERCHCKYHWCCYVTCRRCERTVERYVCK

SEQ ID NO: 97706 - protein, 5 aa, Homo sapiens
  Payload ID: 19486
  Gene Name: wingless-type MMTV integration site family, member 11
  ENSP ID: ENSP00000436140
MRARP

SEQ ID NO: 97707 - protein, 262 aa, Homo sapiens
  Payload ID: 19486
  Gene Name: wingless-type MMTV integration site family, member 11
  ENSP ID: ENSP00000483229
MRARPQVCEALLFALALQTGVCYGIKWLALSKTPSALALNQTQHCKQLEGLVSAQVQLCRSNLELMHTVVHAAREVMKACRRAFADMRWNCSSIELAPNYLLDLERGTRESAFVYALSAAAISHAIARACTSGDLQELQDVAADLKTRYLSATKVVHRPMGTRKHLVPKDLDIRPVKDSELVYLQSSPDFCMKNEKVGSHGTQDRQCNKTSNGSDSCDLMCCGRGYNPYTDRVVERCHCKYHWCCYVTCRRCERTVERYVCK

SEQ ID NO: 97708 - protein, 365 aa, Homo sapiens
  Payload ID: 19487
  Gene Name: wingless-type MMTV integration site family, member 16
  Uniprot ID: Q9UBV4
  ENSP ID: ENSP00000222462
MDRAALLGLARLCALWAALLVLFPYGAQGNWMWLGIASFGVPEKLGCANLPLNSRQKELCKRKPYLLPSIREGARLGIQECGSQFRHERWNCMITAAATTAPMGASPLFGYELSSGTKETAFIYAVMAAGLVHSVTRSCSAGNMTECSCDTTLQNGGSASEGWHWGGCSDDVQYGMWFSRKFLDFPIGNTTGKENKVLLAMNLHNNEAGRQAVAKLMSVDCRCHGVSGSCAVKTCWKTMSSFEKIGHLLKDKYENSIQISDKTKRKMRRREKDQRKIPIHKDDLLYVNKSPNYCVEDKKLGIPGTQGRECNRTSEGADGCNLLCCGRGYNTHVVRHVERCECKFIWCCYVRCRRCESMTDVHTCK

SEQ ID NO: 97709 - protein, 355 aa, Homo sapiens
  Payload ID: 19487
  Gene Name: wingless-type MMTV integration site family, member 16
  ENSP ID: ENSP00000355065
MQLTTCLRETLFTGASQKTSLWWLGIASFGVPEKLGCANLPLNSRQKELCKRKPYLLPSIREGARLGIQECGSQFRHERWNCMITAAATTAPMGASPLFGYELSSGTKETAFIYAVMAAGLVHSVTRSCSAGNMTECSCDTTLQNGGSASEGWHWGGCSDDVQYGMWFSRKFLDFPIGNTTGKENKVLLAMNLHNNEAGRQAVAKLMSVDCRCHGVSGSCAVKTCWKTMSSFEKIGHLLKDKYENSIQISDKTKRKMRRREKDQRKIPIHKDDLLYVNKSPNYCVEDKKLGIPGTQGRECNRTSEGADGCNLLCCGRGYNTHVVRHVERCECKFIWCCYVRCRRCESMTDVHTCK

SEQ ID NO: 97710 - protein, 299 aa, Homo sapiens
  Payload ID: 19488
  Gene Name: wingless-type MMTV integration site family, member 2B
  ENSP ID: ENSP00000256640
MRSVGEGAREWIRECQHQFRHHRWNCTTLDRDHTVFGRVMLRSSREAAFVYAISSAGVVHAITRACSQGELSVCSCDPYTRGRHHDQRGDFDWGGCSDNIHYGVRFAKAFVDAKEKRLKDARALMNLHNNRCGRTAVRRFLKLECKCHGVSGSCTLRTCWRALSDFRRTGDYLRRRYDGAVQVMATQDGANFTAARQGYRRATRTDLVYFDNSPDYCVLDKAAGSLGTAGRVCSKTSKGTDGCEIMCCGRGYDTTRVTRVTQCECKFHWCCAVRCKECRNTVDVHTCKAPKKAEWLDQT

SEQ ID NO: 97711 - protein, 391 aa, Homo sapiens
  Payload ID: 19488
  Gene Name: wingless-type MMTV integration site family, member 2B
  Uniprot ID: Q93097
  ENSP ID: ENSP00000358698
MLRPGGAEEAAQLPLRRASAPVPVPSPAAPDGSRASARLGLACLLLLLLLTLPARVDTSWWYIGALGARVICDNIPGLVSRQRQLCQRYPDIMRSVGEGAREWIRECQHQFRHHRWNCTTLDRDHTVFGRVMLRSSREAAFVYAISSAGVVHAITRACSQGELSVCSCDPYTRGRHHDQRGDFDWGGCSDNIHYGVRFAKAFVDAKEKRLKDARALMNLHNNRCGRTAVRRFLKLECKCHGVSGSCTLRTCWRALSDFRRTGDYLRRRYDGAVQVMATQDGANFTAARQGYRRATRTDLVYFDNSPDYCVLDKAAGSLGTAGRVCSKTSKGTDGCEIMCCGRGYDTTRVTRVTQCECKFHWCCAVRCKECRNTVDVHTCKAPKKAEWLDQT

SEQ ID NO: 97712 - protein, 372 aa, Homo sapiens
  Payload ID: 19488
  Gene Name: wingless-type MMTV integration site family, member 2B
  Uniprot ID: Q93097
  ENSP ID: ENSP00000358700
MLDGLGVVAISIFGIQLKTEGSLRTAVPGIPTQSAFNKCLQRYIGALGARVICDNIPGLVSRQRQLCQRYPDIMRSVGEGAREWIRECQHQFRHHRWNCTTLDRDHTVFGRVMLRSSREAAFVYAISSAGVVHAITRACSQGELSVCSCDPYTRGRHHDQRGDFDWGGCSDNIHYGVRFAKAFVDAKEKRLKDARALMNLHNNRCGRTAVRRFLKLECKCHGVSGSCTLRTCWRALSDFRRTGDYLRRRYDGAVQVMATQDGANFTAARQGYRRATRTDLVYFDNSPDYCVLDKAAGSLGTAGRVCSKTSKGTDGCEIMCCGRGYDTTRVTRVTQCECKFHWCCAVRCKECRNTVDVHTCKAPKKAEWLDQT

SEQ ID NO: 97713 - protein, 355 aa, Homo sapiens
  Payload ID: 19489
  Gene Name: wingless-type MMTV integration site family, member 3
  Uniprot ID: P56703
  ENSP ID: ENSP00000225512
MEPHLLGLLLGLLLGGTRVLAGYPIWWSLALGQQYTSLGSQPLLCGSIPGLVPKQLRFCRNYIEIMPSVAEGVKLGIQECQHQFRGRRWNCTTIDDSLAIFGPVLDKATRESAFVHAIASAGVAFAVTRSCAEGTSTICGCDSHHKGPPGEGWKWGGCSEDADFGVLVSREFADARENRPDARSAMNKHNNEAGRTTILDHMHLKCKCHGLSGSCEVKTCWWAQPDFRAIGDFLKDKYDSASEMVVEKHRESRGWVETLRAKYSLFKPPTERDLVYYENSPNFCEPNPETGSFGTRDRTCNVTSHGIDGCDLLCCGRGHNTRTEKRKEKCHCIFHWCCYVSCQECIRIYDVHTCK

SEQ ID NO: 97714 - protein, 355 aa, Homo sapiens; identical to SEQ ID NO: 97713
  Payload ID: 19489
  Gene Name: wingless-type MMTV integration site family, member 3
  ENSP ID: ENSP00000478327

SEQ ID NO: 97715 - protein, 355 aa, Homo sapiens; identical to SEQ ID NO: 97713
  Payload ID: 19489
  Gene Name: wingless-type MMTV integration site family, member 3
  Uniprot ID: P56703
  ENSP ID: ENSP00000480990

SEQ ID NO: 97716 - protein, 352 aa, Homo sapiens
  Payload ID: 19490
  Gene Name: wingless-type MMTV integration site family, member 3A
  Uniprot ID: P56704
  ENSP ID: ENSP00000284523
MAPLGYFLLLCSLKQALGSYPIWWSLAVGPQYSSLGSQPILCASIPGLVPKQLRFCRNYVEIMPSVAEGIKIGIQECQHQFRGRRWNCTTVHDSLAIFGPVLDKATRESAFVHAIASAGVAFAVTRSCAEGTAAICGCSSRHQGSPGKGWKWGGCSEDIEFGGMVSREFADARENRPDARSAMNRHNNEAGRQAIASHMHLKCKCHGLSGSCEVKTCWWSQPDFRAIGDFLKDKYDSASEMVVEKHRESRGWVETLRPRYTYFKVPTERDLVYYEASPNFCEPNPETGSFGTRDRTCNVSSHGIDGCDLLCCGRGHNARAERRREKCRCVFHWCCYVSCQECTRVYDVHTCK

SEQ ID NO: 97717 - protein, 351 aa, Homo sapiens
  Payload ID: 19491
  Gene Name: wingless-type MMTV integration site family, member 4
  Uniprot ID: P56705
  ENSP ID: ENSP00000290167
MSPRSCLRSLRLLVFAVFSAAASNWLYLAKLSSVGSISEEETCEKLKGLIQRQVQMCKRNLEVMDSVRRGAQLAIEECQYQFRNRRWNCSTLDSLPVFGKVVTQGTREAAFVYAISSAGVAFAVTRACSSGELEKCGCDRTVHGVSPQGFQWSGCSDNIAYGVAFSQSFVDVRERSKGASSSRALMNLHNNEAGRKAILTHMRVECKCHGVSGSCEVKTCWRAVPPFRQVGHALKEKFDGATEVEPRRVGSSRALVPRNAQFKPHTDEDLVYLEPSPDFCEQDMRSGVLGTRGRTCNKTSKAIDGCELLCCGRGFHTAQVELAERCSCKFHWCCFVKCRQCQRLVELHTCR

SEQ ID NO: 97718 - protein, 52 aa, Homo sapiens
  Payload ID: 19491
  Gene Name: wingless-type MMTV integration site family, member 4
  ENSP ID: ENSP00000388925
MCKRNLEVMDSVRRGAQLAIEECQYQFRNRRWNCSTLDSLPVFGKVVTQGGK

SEQ ID NO: 97719 - protein, 150 aa, Homo sapiens
  Payload ID: 19491
  Gene Name: wingless-type MMTV integration site family, member 4
  ENSP ID: ENSP00000403334
  MOD_RES (1)..(1): Any amino acid
XYLAKLSSVGSISEEETCEKLKGLIQRQVQMCKRNLEVMDSVRRGAQLAIEECQYQFRNRRWNCSTLDSLPVFGKVVTQGGKAWHGGDSGCHLLTESRSGERTQRRKEGGSLGQCWPEAIVGTQDPMRSPPYLWGRNQGGTHTGSASEGH

SEQ ID NO: 97720 - protein, 380 aa, Homo sapiens
  Payload ID: 19492
  Gene Name: wingless-type MMTV integration site family, member 5A
  Uniprot ID: P41221
  ENSP ID: ENSP00000264634
MKKSIGILSPGVALGMAGSAMSSKFFLVALAIFFSFAQVVIEANSWWSLGMNNPVQMSEVYIIGAQPLCSQLAGLSQGQKKLCHLYQDHMQYIGEGAKTGIKECQYQFRHRRWNCSTVDNTSVFGRVMQIGSRETAFTYAVSAAGVVNAMSRACREGELSTCGCSRAARPKDLPRDWLWGGCGDNIDYGYRFAKEFVDARERERIHAKGSYESARILMNLHNNEAGRRTVYNLADVACKCHGVSGSCSLKTCWLQLADFRKVGDALKEKYDSAAAMRLNSRGKLVQVNSRFNSPTTQDLVYIDPSPDYCVRNESTGSLGTQGRLCNKTSEGMDGCELMCCGRGYDQFKTVQTERCHCKFHWCCYVKCKKCTEIVDQFVCK

SEQ ID NO: 97721 - protein, 380 aa, Homo sapiens; identical to SEQ ID NO: 97720
  Payload ID: 19492
  Gene Name: wingless-type MMTV integration site family, member 5A
  Uniprot ID: P41221
  ENSP ID: ENSP00000417310

SEQ ID NO: 97722 - protein, 214 aa, Homo sapiens
  Payload ID: 19492
  Gene Name: wingless-type MMTV integration site family, member 5A
  ENSP ID: ENSP00000418184
MAGSAMSSKFFLVALAIFFSFAQVVIEANSWWSLGMNNPVQMSEVYIIGAQPLCSQLAGLSQGQKKLCHLYQDHMQYIGEGAKTGIKECQYQFRHRRWNCSTVDNTSVFGRVMQIGSRETAFTYAVSAAGVVNAMSRACREGELSTCGCSRAARPKDLPRDWLWGGCGDNIDYGYRFAKEFVDARERERIHAKGSYESARILMNLHNNEAGRRV

SEQ ID NO: 97723 - protein, 365 aa, Homo sapiens
  Payload ID: 19492
  Gene Name: wingless-type MMTV integration site family, member 5A
  Uniprot ID: P41221
  ENSP ID: ENSP00000420104
MAGSAMSSKFFLVALAIFFSFAQVVIEANSWWSLGMNNPVQMSEVYIIGAQPLCSQLAGLSQGQKKLCHLYQDHMQYIGEGAKTGIKECQYQFRHRRWNCSTVDNTSVFGRVMQIGSRETAFTYAVSAAGVVNAMSRACREGELSTCGCSRAARPKDLPRDWLWGGCGDNIDYGYRFAKEFVDARERERIHAKGSYESARILMNLHNNEAGRRTVYNLADVACKCHGVSGSCSLKTCWLQLADFRKVGDALKEKYDSAAAMRLNSRGKLVQVNSRFNSPTTQDLVYIDPSPDYCVRNESTGSLGTQGRLCNKTSEGMDGCELMCCGRGYDQFKTVQTERCHCKFHWCCYVKCKKCTEIVDQFVCK

SEQ ID NO: 97724 - protein, 129 aa, Homo sapiens
  Payload ID: 19492
  Gene Name: wingless-type MMTV integration site family, member 5A
  ENSP ID: ENSP00000478784
LQKSIGILSPGVALGMAGSAMSSKFFLVALAIFFSFAQVVIEANSWWSLGMNNPVQMSEDVGGHGWLRAHVLRPWLRPVQDRADGALPLQVPLVLLRQVQEVHGDRGPVCVQVVGATQHSAPLPGPAYL

SEQ ID NO: 97725 - protein, 359 aa, Homo sapiens
  Payload ID: 19493
  Gene Name: wingless-type MMTV integration site family, member 5B
  Uniprot ID: Q9H1J7
  ENSP ID: ENSP00000308887
MPSLLLLFTAALLSSWAQLLTDANSWWSLALNPVQRPEMFIIGAQPVCSQLPGLSPGQRKLCQLYQEHMAYIGEGAKTGIKECQHQFRQRRWNCSTADNASVFGRVMQIGSRETAFTHAVSAAGVVNAISRACREGELSTCGCSRTARPKDLPRDWLWGGCGDNVEYGYRFAKEFVDAREREKNFAKGSEEQGRVLMNLQNNEAGRRAVYKMADVACKCHGVSGSCSLKTCWLQLAEFRKVGDRLKEKYDSAAAMRVTRKGRLELVNSRFTQPTPEDLVYVDPSPDYCLRNESTGSLGTQGRLCNKTSEGMDGCELMCCGRGYNQFKSVQVERCHCKFHWCCFVRCKKCTEIVDQYICK

SEQ ID NO: 97726 - protein, 359 aa, Homo sapiens; identical to SEQ ID NO: 97725
  Payload ID: 19493
  Gene Name: wingless-type MMTV integration site family, member 5B
  Uniprot ID: Q9H1J7
  ENSP ID: ENSP00000380379

SEQ ID NO: 97727 - protein, 118 aa, Homo sapiens
  Payload ID: 19493
  Gene Name: wingless-type MMTV integration site family, member 5B
  ENSP ID: ENSP00000438414
MPSLLLLFTAALLSSWAQLLTDANSWWSLALNPVQRPEMFIIGAQPVCSQLPGLSPGQRKLCQLYQEHMAYIGEGAKTGIKECQHQFRQRRWNCSTADNASVFGRVMQIGSRETAFTH

SEQ ID NO: 97728 - protein, 359 aa, Homo sapiens; identical to SEQ ID NO: 97725
  Payload ID: 19493
  Gene Name: wingless-type MMTV integration site family, member 5B
  Uniprot ID: Q9H1J7
  ENSP ID: ENSP00000439312

SEQ ID NO: 97729 - protein, 112 aa, Homo sapiens
  Payload ID: 19493
  Gene Name: wingless-type MMTV integration site family, member 5B
  ENSP ID: ENSP00000440600
MPSLLLLFTAALLSSWAQLLTDANSWWSLALNPVQRPEMFIIGAQPVCSQLPGLSPGQRKLCQLYQEHMAYIGEGAKTGIKECQHQFRQRRWNCSTADNASVFGRVMQIGCV

SEQ ID NO: 97730 - protein, 253 aa, Homo sapiens
  Payload ID: 19493
  Gene Name: wingless-type MMTV integration site family, member 5B
  ENSP ID: ENSP00000442348
MPSLLLLFTAALLSSWAQLLTDANSWWSLALNPVQRPEMFIIGAQPVCSQLPGLSPGQRKLCQLYQEHMAYIGEGAKTGIKECQHQFRQRRWNCSTADNASVFGRVMQIGSRETAFTHAVSAAGVVNAISRACREGELSTCGCSRTARPKDLPRDWLWGGCGDNVEYGYRFAKEFVDAREREKNFAKGSEEQGRVLMNLQNNEAGRRAVYKMADVACKCHGVSGSCSLKTCWLQLAEFRKVGDRLKEKYDSAA

SEQ ID NO: 97731 - protein, 157 aa, Homo sapiens
  Payload ID: 19493
  Gene Name: wingless-type MMTV integration site family, member 5B
  ENSP ID: ENSP00000445395
MPSLLLLFTAALLSSWAQLLTDANSWWSLALNPVQRPEMFIIGAQPVCSQLPGLSPGQRKLCQLYQEHMAYIGEGAKTGIKECQHQFRQRRWNCSTADNASVFGRVMQIGSRETAFTHAVSAAGVVNAISRACREGELSTCGCSRTARPKDLPRDWL

SEQ ID NO: 97732 - protein, 365 aa, Homo sapiens
  Payload ID: 19494
  Gene Name: wingless-type MMTV integration site family, member 6
  Uniprot ID: Q9Y6F9
  ENSP ID: ENSP00000233948
MLPPLPSRLGLLLLLLLCPAHVGGLWWAVGSPLVMDPTSICRKARRLAGRQAELCQAEPEVVAELARGARLGVRECQFQFRFRRWNCSSHSKAFGRILQQDIRETAFVFAITAAGASHAVTQACSMGELLQCGCQAPRGRAPPRPSGLPGTPGPPGPAGSPEGSAAWEWGGCGDDVDFGDEKSRLFMDARHKRGRGDIRALVQLHNNEAGRLAVRSHTRTECKCHGLSGSCALRTCWQKLPPFREVGARLLERFHGASRVMGTNDGKALLPAVRTLKPPGRADLLYAADSPDFCAPNRRTGSPGTRGRACNSSAPDLSGCDLLCCGRGHRQESVQLEENCLCRFHWCCVVQCHRCRVRKELSLCL

SEQ ID NO: 97733 - protein, 349 aa, Homo sapiens
  Payload ID: 19495
  Gene Name: wingless-type MMTV integration site family, member 7A
  Uniprot ID: O00755
  ENSP ID: ENSP00000285018
MNRKARRCLGHLFLSLGMVYLRIGGFSSVVALGASIICNKIPGLAPRQRAICQSRPDAIIVIGEGSQMGLDECQFQFRNGRWNCSALGERTVFGKELKVGSREAAFTYAIIAAGVAHAITAACTQGNLSDCGCDKEKQGQYHRDEGWKWGGCSADIRYGIGFAKVFVDAREIKQNARTLMNLHNNEAGRKILEENMKLECKCHGVSGSCTTKTCWTTLPQFRELGYVLKDKYNEAVHVEPVRASRNKRPTFLKIKKPLSYRKPMDTDLVYIEKSPNYCEEDPVTGSVGTQGRACNKTAPQASGCDLMCCGRGYNTHQYARVWQCNCKFHWCCYVKCNTCSERTEMYTCK

SEQ ID NO: 97734 - protein, 349 aa, Homo sapiens
  Payload ID: 19496
  Gene Name: wingless-type MMTV integration site family, member 7B
  Uniprot ID: P56706
  ENSP ID: ENSP00000341032
MHRNFRKWIFYVFLCFGVLYVKLGALSSVVALGANIICNKIPGLAPRQRAICQSRPDAIIVIGEGAQMGINECQYQFRFGRWNCSALGEKTVFGQELRVGSREAAFTYAITAAGVAHAVTAACSQGNLSNCGCDREKQGYYNQAEGWKWGGCSADVRYGIDFSRRFVDAREIKKNARRLMNLHNNEAGRKVLEDRMQLECKCHGVSGSCTTKTCWTTLPKFREVGHLLKEKYNAAVQVEVVRASRLRQPTFLRIKQLRSYQKPMETDLVYIEKSPNYCEEDAATGSVGTQGRLCNRTSPGADGCDTMCCGRGYNTHQYTKVWQCNCKFHWCCFVKCNTCSERTEVFTCK

SEQ ID NO: 97735 - protein, 353 aa, Homo sapiens
  Payload ID: 19496
  Gene Name: wingless-type MMTV integration site family, member 7B
  ENSP ID: ENSP00000386546
MLLLSPRSALVSVYCPQIFLLLSSGSYLALSSVVALGANIICNKIPGLAPRQRAICQSRPDAIIVIGEGAQMGINECQYQFRFGRWNCSALGEKTVFGQELRVGSREAAFTYAITAAGVAHAVTAACSQGNLSNCGCDREKQGYYNQAEGWKWGGCSADVRYGIDFSRRFVDAREIKKNARRLMNLHNNEAGRKVLEDRMQLECKCHGVSGSCTTKTCWTTLPKFREVGHLLKEKYNAAVQVEVVRASRLRQPTFLRIKQLRSYQKPMETDLVYIEKSPNYCEEDAATGSVGTQGRLCNRTSPGADGCDTMCCGRGYNTHQYTKVWQCNCKFHWCCFVKCNTCSERTEVFTCK

SEQ ID NO: 97736 - protein, 333 aa, Homo sapiens
  Payload ID: 19496
  Gene Name: wingless-type MMTV integration site family, member 7B
  ENSP ID: ENSP00000386781
MSAPPFYRALSSVVALGANIICNKIPGLAPRQRAICQSRPDAIIVIGEGAQMGINECQYQFRFGRWNCSALGEKTVFGQELRVGSREAAFTYAITAAGVAHAVTAACSQGNLSNCGCDREKQGYYNQAEGWKWGGCSADVRYGIDFSRRFVDAREIKKNARRLMNLHNNEAGRKVLEDRMQLECKCHGVSGSCTTKTCWTTLPKFREVGHLLKEKYNAAVQVEVVRASRLRQPTFLRIKQLRSYQKPMETDLVYIEKSPNYCEEDAATGSVGTQGRLCNRTSPGADGCDTMCCGRGYNTHQYTKVWQCNCKFHWCCFVKCNTCSERTEVFTCK

SEQ ID NO: 97737 - protein, 205 aa, Homo sapiens
  Payload ID: 19496
  Gene Name: wingless-type MMTV integration site family, member 7B
  ENSP ID: ENSP00000387217
MHRNFRKWIFYVFLCFGVLYVKLGALSSVVALGANIICNKIPGLAPRQRAICQSRPDAIIVIGEGAQMGINECQYQFRFGRWNCSALGEKTVFGQELRVGSREAAFTYAITAAGVAHAVTAACSQGNLSNCGCDREKQGYYNQAEGWKWGGCSADVRYGIDFSRRFVDAREIKKNARRLMNLHNNEAGRKGLLGQPRVTSSPLFP

SEQ ID NO: 97738 - protein, 57 aa, Homo sapiens
  Payload ID: 19496
  Gene Name: wingless-type MMTV integration site family, member 7B
  ENSP ID: ENSP00000392750
MGINECQYQFRFGRWNCSALGEKTVFGQELRVGSREAAFTYAITAAGVAHAVTAACS

SEQ ID NO: 97739 - protein, 355 aa, Homo sapiens
  Payload ID: 19497
  Gene Name: wingless-type MMTV integration site family, member 8A
  Uniprot ID: Q9H1J5
  ENSP ID: ENSP00000354726
MGNLFMLWAALGICCAAFSASAWSVNNFLITGPKAYLTYTTSVALGAQSGIEECKFQFAWERWNCPENALQLSTHNRLRSATRETSFIHAISSAGVMYIITKNCSMGDFENCGCDGSNNGKTGGHGWIWGGCSDNVEFGERISKLFVDSLEKGKDARALMNLHNNRAGRLAVRATMKRTCKCHGISGSCSIQTCWLQLAEFREMGDYLKAKYDQALKIEMDKRQLRAGNSAEGHWVPAEAFLPSAEAELIFLEESPDYCTCNSSLGIYGTEGRECLQNSHNTSRWERRSCGRLCTECGLQVEERKTEVISSCNCKFQWCCTVKCDQCRHVVSKYYCARSPGSAQSLGRVWFGVYI

SEQ ID NO: 97740 - protein, 351 aa, Homo sapiens
  Payload ID: 19497
  Gene Name: wingless-type MMTV integration site family, member 8A
  Uniprot ID: Q9H1J5
  ENSP ID: ENSP00000381739
MGNLFMLWAALGICCAAFSASAWSVNNFLITGPKAYLTYTTSVALGAQSGIEECKFQFAWERWNCPENALQLSTHNRLRSATRETSFIHAISSAGVMYIITKNCSMGDFENCGCDGSNNGKTGGHGWIWGGCSDNVEFGERISKLFVDSLEKGKDARALMNLHNNRAGRLAVRATMKRTCKCHGISGSCSIQTCWLQLAEFREMGDYLKAKYDQALKIEMDKRQLRAGNSAEGHWVPAEAFLPSAEAELIFLEESPDYCTCNSSLGIYGTEGRECLQNSHNTSRWERRSCGRLCTECGLQVEERKTEVISSCNCKFQWCCTVKCDQCRHVVSKYYCARSPGSAQSLGKGSA

SEQ ID NO: 97741 - protein, 360 aa, Homo sapiens
  Payload ID: 19497
  Gene Name: wingless-type MMTV integration site family, member 8A
  ENSP ID: ENSP00000424809
MLCCIQCLCLVSPFPTLTPCQGGPHCLIPIHLCLTFSLFGRSVNNFLITGPKAYLTYTTSVALGAQSGIEECKFQFAWERWNCPENALQLSTHNRLRSATRETSFIHAISSAGVMYIITKNCSMGDFENCGCDGSNNGKTGGHGWIWGGCSDNVEFGERISKLFVDSLEKGKDARALMNLHNNRAGRLAVRATMKRTCKCHGISGSCSIQTCWLQLAEFREMGDYLKAKYDQALKIEMDKRQLRAGNSAEGHWVPAEAFLPSAEAELIFLEESPDYCTCNSSLGIYGTEGRECLQNSHNTSRWERRSCGRLCTECGLQVEERKTEVISSCNCKFQWCCTVKCDQCRHVTMSNPAVLLGIR

SEQ ID NO: 97742 - protein, 369 aa, Homo sapiens
  Payload ID: 19497
  Gene Name: wingless-type MMTV integration site family, member 8A
  ENSP ID: ENSP00000426653
MLCCIQCLCLVSPFPTLTPCQGGPHCLIPIHLCLTFSLFGRSVNNFLITGPKAYLTYTTSVALGAQSGIEECKFQFAWERWNCPENALQLSTHNRLRSATRETSFIHAISSAGVMYIITKNCSMGDFENCGCDGSNNGKTGGHGWIWGGCSDNVEFGERISKLFVDSLEKGKDARALMNLHNNRAGRLAVRATMKRTCKCHGISGSCSIQTCWLQLAEFREMGDYLKAKYDQALKIEMDKRQLRAGNSAEGHWVPAEAFLPSAEAELIFLEESPDYCTCNSSLGIYGTEGRECLQNSHNTSRWERRSCGRLCTECGLQVEERKTEVISSCNCKFQWCCTVKCDQCRHVVSKYYCARSPGSAQSLGKGSA

SEQ ID NO: 97743 - protein, 351 aa, Homo sapiens
  Payload ID: 19498
  Gene Name: wingless-type MMTV integration site family, member 8B
  Uniprot ID: Q93098
  ENSP ID: ENSP00000340677
MFLSKPSVYICLFTCVLQLSHSWSVNNFLMTGPKAYLIYSSSVAAGAQSGIEECKYQFAWDRWNCPERALQLSSHGGLRSANRETAFVHAISSAGVMYTLTRNCSLGDFDNCGCDDSRNGQLGGQGWLWGGCSDNVGFGEAISKQFVDALETGQDARAAMNLHNNEAGRKAVKGTMKRTCKCHGVSGSCTTQTCWLQLPEFREVGAHLKEKYHAALKVDLLQGAGNSAAGRGAIADTFRSISTRELVHLEDSPDYCLENKTLGLLGTEGRECLRRGRALGRWERRSCRRLCGDCGLAVEERRAETVSSCNCKFHWCCAVRCEQCRRRVTKYFCSRAERPRGGAAHKPGRKP

SEQ ID NO: 97744 - protein, 365 aa, Homo sapiens
  Payload ID: 19499
  Gene Name: wingless-type MMTV integration site family, member 9A
  Uniprot ID: O14904
  ENSP ID: ENSP00000272164
MLDGSPLARWLAAAFGLTLLLAALRPSAAYFGLTGSEPLTILPLTLEPEAAAQAHYKACDRLKLERKQRRMCRRDPGVAETLVEAVSMSALECQFQFRFERWNCTLEGRYRASLLKRGFKETAFLYAISSAGLTHALAKACSAGRMERCTCDEAPDLENREAWQWGGCGDNLKYSSKFVKEFLGRRSSKDLRARVDFHNNLVGVKVIKAGVETTCKCHGVSGSCTVRTCWRQLAPFHEVGKHLKHKYETALKVGSTTNEAAGEAGAISPPRGRASGAGGSDPLPRTPELVHLDDSPSFCLAGRFSPGTAGRRCHREKNCESICCGRGHNTQSRVVTRPCQCQVRWCCYVECRQCTQREEVYTCKG

SEQ ID NO: 97745 - protein, 357 aa, Homo sapiens
  Payload ID: 19500
  Gene Name: wingless-type MMTV integration site family, member 9B
  Uniprot ID: O14905
  ENSP ID: ENSP00000290015
MRPPPALALAGLCLLALPAAAASYFGLTGREVLTPFPGLGTAAAPAQGGAHLKQCDLLKLSRRQKQLCRREPGLAETLRDAAHLGLLECQFQFRHERWNCSLEGRMGLLKRGFKETAFLYAVSSAALTHTLARACSAGRMERCTCDDSPGLESRQAWQWGVCGDNLKYSTKFLSNFLGSKRGNKDLRARADAHNTHVGIKAVKSGLRTTCKCHGVSGSCAVRTCWKQLSPFRETGQVLKLRYDSAVKVSSATNEALGRLELWAPARQGSLTKGLAPRSGDLVYMEDSPSFCRPSKYSPGTAGRVCSREASCSSLCCGRGYDTQSRLVAFSCHCQVQWCCYVECQQCVQEELVYTCKH

SEQ ID NO: 97746 - protein, 329 aa, Homo sapiens
  Payload ID: 19500
  Gene Name: wingless-type MMTV integration site family, member 9B
  ENSP ID: ENSP00000377105
MRPPPALALAGLCLLALPAAAASYFGLTGREVLTPFPGLGTAAAPAQGGAHLKQCDLLKLSRRQKQLCRREPGLAETLRDAAHLGLLECQFQFRHERWNCSLEGRMGLLKRGFKETAFLYAVSSAALTHTLARACSAGRMERCTCDDSPGLESRQAWQWGVCGDNLKYSTKFLSNFLGSKRGNKDLRARADAHNTHVGIKAVKSGLRTTCKCHGVSGSCAVRTCWKQLSPFRETGQVLKLRYDSAVKVSSATNEALGRLELWAPARQGSLTKGLAPRSGDLVYMEDSPSFCRPSKYSPGTAGWSAVARSQLITTSTSRIQAILPSQLPE

SEQ ID NO: 97747 - protein, 132 aa, Homo sapiens
  Payload ID: 19500
  Gene Name: wingless-type MMTV integration site family, member 9B
  ENSP ID: ENSP00000458192
MKGRAVSFDPLACQGLNASPGSLTSPLRRIRSLTGREVLTPFPGLGTAAAPAQGGAHLKQCDLLKLSRRQKQLCRREPGLAETLRDAAHLGLLECQFQFRHERWNCSLEGRMGLLKRGFKETAFLYAVSSAA

SEQ ID NO: 97748 - protein, 357 aa, Homo sapiens; identical to SEQ ID NO: 97745
  Payload ID: 19500
  Gene Name: wingless-type MMTV integration site family, member 9B
  Uniprot ID: O14905
  ENSP ID: ENSP00000482127

SEQ ID NO: 97749 - protein, 132 aa, Homo sapiens; identical to SEQ ID NO: 97747
  Payload ID: 19500
  Gene Name: wingless-type MMTV integration site family, member 9B
  ENSP ID: ENSP00000487979

SEQ ID NO: 97750 - protein, 329 aa, Homo sapiens; identical to SEQ ID NO: 97746
  Payload ID: 19500
  Gene Name: wingless-type MMTV integration site family, member 9B
  ENSP ID: ENSP00000488518

SEQ ID NO: 97751 - protein, 502 aa, Homo sapiens
  Payload ID: 19501
  Gene Name: Wiskott-Aldrich syndrome
  Uniprot ID: P42768
  ENSP ID: ENSP00000365891
MSGGPMGGRPGGRGAPAVQQNIPSTLLQDHENQRLFEMLGRKCLTLATAVVQLYLALPPGAEHWTKEHCGAVCFVKDNPQKSYFIRLYGLQAGRLLWEQELYSQLVYSTPTPFFHTFAGDDCQAGLNFADEDEAQAFRALVQEKIQKRNQRQSGDRRQLPPPPTPANEERRGGLPPLPLHPGGDQGGPPVGPLSLGLATVDIQNPDITSSRYRGLPAPGPSPADKKRSGKKKISKADIGAPSGFKHVSHVGWDPQNGFDVNNLDPDLRSLFSRAGISEAQLTDAETSKLIYDFIEDQGGLEAVRQEMRRQEPLPPPPPPSRGGNQLPRPPIVGGNKGRSGPLPPVPLGIAPPPPTPRGPPPPGRGGPPPPPPPATGRSGPLPPPPPGAGGPPMPPPPPPPPPPPSSGNGPAPPPLPPALVPAGGLAPGGGRGALLDQIRQGIQLNKTPGAPESSALQPPPQSSEGLVGALMHVMQKRSRAIHSSDEGEDQAGDEDEDDEWDD

SEQ ID NO: 97752 - protein, 216 aa, Homo sapiens
  Payload ID: 19501
  Gene Name: Wiskott-Aldrich syndrome
  ENSP ID: ENSP00000410537
MSGGPMGGRPGGRGAPAVQQNIPSTLLQDHENQRLFEMLGRKCLTLATAVVQLYLALPPGAEHWTKEHCGAVCFVKDNPQKSYFIRLYGLQAGRLLWEQELYSQLVYSTPTPFFHTFAGDDCQAGLNFADEDEAQAFRALVQEKIQKRNQRQSGDRRQLPPPPTPANEERRGGLPPLPLHPGGDQGGPPVGPLSLGLATVDIQNPDITSSRYRGLP

SEQ ID NO: 97753 - protein, 505 aa, Homo sapiens
  Payload ID: 19502
  Gene Name: Wiskott-Aldrich syndrome-like
  Uniprot ID: O00401
  ENSP ID: ENSP00000223023
MSSVQQQPPPPRRVTNVGSLLLTPQENESLFTFLGKKCVTMSSAVVQLYAADRNCMWSKKCSGVACLVKDNPQRSYFLRIFDIKDGKLLWEQELYNNFVYNSPRGYFHTFAGDTCQVALNFANEEEAKKFRKAVTDLLGRRQRKSEKRRDPPNGPNLPMATVDIKNPEITTNRFYGPQVNNISHTKEKKKGKAKKKRLTKADIGTPSNFQHIGHVGWDPNTGFDLNNLDPELKNLFDMCGISEAQLKDRETSKVIYDFIEKTGGVEAVKNELRRQAPPPPPPSRGGPPPPPPPPHNSGPPPPPARGRGAPPPPPSRAPTAAPPPPPPSRPSVAVPPPPPNRMYPPPPPALPSSAPSGPPPPPPSVLGVGPVAPPPPPPPPPPPGPPPPPGLPSDGDHQVPTTAGNKAALLDQIREGAQLKKVEQNSRPVSCSGRDALLDQIRQGIQLKSVADGQESTPPTPAPTSGIVGALMEVMQKRSKAIHSSDEDEDEDDEEDFEDDDEWED

SEQ ID NO: 97754 - protein, 2382 aa, Homo sapiens
  Payload ID: 19503
  Gene Name: WNK lysine deficient protein kinase 1
  Uniprot ID: Q9H4A3
  ENSP ID: ENSP00000313059
MSGGAAEKQSSTPGSLFLSPPAPAPKNGSSSDSSVGEKLGAAAADAVTGRTEEYRRRRHTMDKDSRGAAATTTTTEHRFFRRSVICDSNATALELPGLPLSLPQPSIPAAVPQSAPPEPHREETVTATATSQVAQQPPAAAAPGEQAVAGPAPSTVPSSTSKDRPVSQPSLVGSKEEPPPARSGSGGGSAKEPQEERSQQQDDIEELETKAVGMSNDGRFLKFDIEIGRGSFKTVYKGLDTETTVEVAWCELQDRKLTKSERQRFKEEAEMLKGLQHPNIVRFYDSWESTVKGKKCIVLVTELMTSGTLKTYLKRFKVMKIKVLRSWCRQILKGLQFLHTRTPPIIHRDLKCDNIFITGPTGSVKIGDLGLATLKRASFAKSVIGTPEFMAPEMYEEKYDESVDVYAFGMCMLEMATSEYPYSECQNAAQIYRRVTSGVKPASFDKVAIPEVKEIIEGCIRQNKDERYSIKDLLNHAFFQEETGVRVELAEEDDGEKIAIKLWLRIEDIKKLKGKYKDNEAIEFSFDLERDVPEDVAQEMVESGYVCEGDHKTMAKAIKDRVSLIKRKREQRQLVREEQEKKKQEESSLKQQVEQSSASQTGIKQLPSASTGIPTASTTSASVSTQVEPEEPEADQHQQLQYQQPSISVLSDGTVDSGQGSSVFTESRVSSQQTVSYGSQHEQAHSTGTVPGHIPSTVQAQSQPHGVYPPSSVAQGQSQGQPSSSSLTGVSSSQPIQHPQQQQGIQQTAPPQQTVQYSLSQTSTSSEATTAQPVSQPQAPQVLPQVSAGKQLPVSQPVPTIQGEPQIPVATQPSVVPVHSGAHFLPVGQPLPTPLLPQYPVSQIPISTPHVSTAQTGFSSLPITMAAGITQPLLTLASSATTAAIPGVSTVVPSQLPTLLQPVTQLPSQVHPQLLQPAVQSMGIPANLGQAAEVPLSSGDVLYQGFPPRLPPQYPGDSNIAPSSNVASVCIHSTVLSPPMPTEVLATPGYFPTVVQPYVESNLLVPMGGVGGQVQVSQPGGSLAQAPTTSSQQAVLESTQGVSQVAPAEPVAVAQTQATQPTTLASSVDSAHSDVASGMSDGNENVPSSSGRHEGRTTKRHYRKSVRSRSRHEKTSRPKLRILNVSNKGDRVVECQLETHNRKMVTFKFDLDGDNPEEIATIMVNNDFILAIERESFVDQVREIIEKADEMLSEDVSVEPEGDQGLESLQGKDDYGFSGSQKLEGEFKQPIPASSMPQQIGIPTSSLTQVVHSAGRRFIVSPVPESRLRESKVFPSEITDTVAASTAQSPGMNLSHSASSLSLQQAFSELRRAQMTEGPNTAPPNFSHTGPTFPVVPPFLSSIAGVPTTAAATAPVPATSSPPNDISTSVIQSEVTVPTEEGIAGVATSTGVVTSGGLPIPPVSESPVLSSVVSSITIPAVVSISTTSPSLQVPTSTSEIVVSSTALYPSVTVSATSASAGGSTATPGPKPPAVVSQQAAGSTTVGATLTSVSTTTSFPSTASQLCIQLSSSTSTPTLAETVVVSAHSLDKTSHSSTTGLAFSLSAPSSSSSPGAGVSSYISQPGGLHPLVIPSVIASTPILPQAAGPTSTPLLPQVPSIPPLVQPVANVPAVQQTLIHSQPQPALLPNQPHTHCPEVDSDTQPKAPGIDDIKTLEEKLRSLFSEHSSSGAQHASVSLETSLVIESTVTPGIPTTAVAPSKLLTSTTSTCLPPTNLPLGTVALPVTPVVTPGQVSTPVSTTTSGVKPGTAPSKPPLTKAPVLPVGTELPAGTLPSEQLPPFPGPSLTQSQQPLEDLDAQLRRTLSPEMITVTSAVGPVSMAAPTAITEAGTQPQKGVSQVKEGPVLATSSGAGVFKMGRFQVSVAADGAQKEGKNKSEDAKSVHFESSTSESSVLSSSSPESTLVKPEPNGITIPGISSDVPESAHKTTASEAKSDTGQPTKVGRFQVTTTANKVGRFSVSKTEDKITDTKKEGPVASPPFMDLEQAVLPAVIPKKEKPELSEPSHLNGPSSDPEAAFLSRDVDDGSGSPHSPHQLSSKSLPSQNLSQSLSNSFNSSYMSSDNESDIEDEDLKLELRRLRDKHLKEIQDLQSRQKHEIESLYTKLGKVPPAVIIPPAAPLSGRRRRPTKSKGSKSSRSSSLGNKSPQLSGNLSGQSAASVLHPQQTLHPPGNIPESGQNQLLQPLKPSPSSDNLYSAFTSDGAISVPSLSAPGQGTSSTNTVGATVNSQAAQAQPPAMTSSRKGTFTDDLHKLVDNWARDAMNLSGRRGSKGHMNYEGPGMARKFSAPGQLCISMTSNLGGSAPISAASATSLGHFTKSMCPPQQYGFPATPFGAQWSGTGGPAPQPLGQFQPVGTASLQNFNISNLQKSISNPPGSNLRTT

SEQ ID NO: 97755 - protein, 2634 aa, Homo sapiens
  Payload ID: 19503
  Gene Name: WNK lysine deficient protein kinase 1
  Uniprot ID: Q9H4A3
  ENSP ID: ENSP00000341292
MSGGAAEKQSSTPGSLFLSPPAPAPKNGSSSDSSVGEKLGAAAADAVTGRTEEYRRRRHTMDKDSRGAAATTTTTEHRFFRRSVICDSNATALELPGLPLSLPQPSIPAAVPQSAPPEPHREETVTATATSQVAQQPPAAAAPGEQAVAGPAPSTVPSSTSKDRPVSQPSLVGSKEEPPPARSGSGGGSAKEPQEERSQQQDDIEELETKAVGMSNDGRFLKFDIEIGRGSFKTVYKGLDTETTVEVAWCELQDRKLTKSERQRFKEEAEMLKGLQHPNIVRFYDSWESTVKGKKCIVLVTELMTSGTLKTYLKRFKVMKIKVLRSWCRQILKGLQFLHTRTPPIIHRDLKCDNIFITGPTGSVKIGDLGLATLKRASFAKSVIGTPEFMAPEMYEEKYDESVDVYAFGMCMLEMATSEYPYSECQNAAQIYRRVTSGVKPASFDKVAIPEVKEIIEGCIRQNKDERYSIKDLLNHAFFQEETGVRVELAEEDDGEKIAIKLWLRIEDIKKLKGKYKDNEAIEFSFDLERDVPEDVAQEMVESGYVCEGDHKTMAKAIKDRVSLIKRKREQRQLVREEQEKKKQEESSLKQQVEQSSASQTGIKQLPSASTGIPTASTTSASVSTQVEPEEPEADQHQQLQYQQPSISVLSDGTVDSGQGSSVFTESRVSSQQTVSYGSQHEQAHSTGTVPGHIPSTVQAQSQPHGVYPPSSVPRRGRSMSVCVPIFLLLPLCPASLPVLFHPTASTVCTSFSFPPPDCPEETFAEKLSKALESVLPMHSASQRKHRRSSLPSLFVSTPQSMAHPCGGTPTYPESQIFFPTIHERPVSFSPPPTCPPKVAISQRRKSTSFLEAQTHHFQPLLRTVGQSLLPPGGSPTNWTPEAVVMLGTTASRVTGESCEIQVHPMFEPSQVYSDYRPGLVLPEEAHYFIPQEAVYVAGVHYQARVAEQYEGIPYNSSVLSSPMKQIPEQKPVQGGPTSSSVFEFPSGQAFLVGHLQNLRLDSGLGPGSPLSSISAPISTDATRLKFHPVFVPHSAPAVLTHNNESRSNCVFEFHVHTPSSSSGEGGGILPQRVYRNRQVAVDLNQEELPPQSVGLHGYLQPVTEEKHNYHAPELTVSVVEPIGQNWPIGSPEYSSDSSQITSSDPSDFQSPPPTGGAAAPFGSDVSMPFIHLPQTVLQESPLFFCFPQGTTSQQVLTASFSSGGSALHPQAQGQSQGQPSSSSLTGVSSSQPIQHPQQQQGIQQTAPPQQTVQYSLSQTSTSSEATTAQPVSQPQAPQVLPQVSAGKQSTQGVSQVAPAEPVAVAQTQATQPTTLASSVDSAHSDVASGMSDGNENVPSSSGRHEGRTTKRHYRKSVRSRSRHEKTSRPKLRILNVSNKGDRVVECQLETHNRKMVTFKFDLDGDNPEEIATIMVNNDFILAIERESFVDQVREIIEKADEMLSEDVSVEPEGDQGLESLQGKDDYGFSGSQKLEGEFKQPIPASSMPQQIGIPTSSLTQVVHSAGRRFIVSPVPESRLRESKVFPSEITDTVAASTAQSPGMNLSHSASSLSLQQAFSELRRAQMTEGPNTAPPNFSHTGPTFPVVPPFLSSIAGVPTTAAATAPVPATSSPPNDISTSVIQSEVTVPTEEGIAGVATSTGVVTSGGLPIPPVSESPVLSSVVSSITIPAVVSISTTSPSLQVPTSTSEIVVSSTALYPSVTVSATSASAGGSTATPGPKPPAVVSQQAAGSTTVGATLTSVSTTTSFPSTASQLCIQLSSSTSTPTLAETVVVSAHSLDKTSHSSTTGLAFSLSAPSSSSSPGAGVSSYISQPGGLHPLVIPSVIASTPILPQAAGPTSTPLLPQVPSIPPLVQPVANVPAVQQTLIHSQPQPALLPNQPHTHCPEVDSDTQPKAPGIDDIKTLEEKLRSLFSEHSSSGAQHASVSLETSLVIESTVTPGIPTTAVAPSKLLTSTTSTCLPPTNLPLGTVALPVTPVVTPGQVSTPVSTTTSGVKPGTAPSKPPLTKAPVLPVGTELPAGTLPSEQLPPFPGPSLTQSQQPLEDLDAQLRRTLSPEMITVTSAVGPVSMAAPTAITEAGTQPQKGVSQVKEGPVLATSSGAGVFKMGRFQVSVAADGAQKEGKNKSEDAKSVHFESSTSESSVLSSSSPESTLVKPEPNGITIPGISSDVPESAHKTTASEAKSDTGQPTKVGRFQVTTTANKVGRFSVSKTEDKITDTKKEGPVASPPFMDLEQAVLPAVIPKKEKPELSEPSHLNGPSSDPEAAFLSRDVDDGSGSPHSPHQLSSKSLPSQNLSQSLSNSFNSSYMSSDNESDIEDEDLKLELRRLRDKHLKEIQDLQSRQKHEIESLYTKLGKVPPAVIIPPAAPLSGRRRRPTKSKGSKSSRSSSLGNKSPQLSGNLSGQSAASVLHPQQTLHPPGNIPESGQNQLLQPLKPSPSSDNLYSAFTSDGAISVPSLSAPGQGTSSTNTVGATVNSQAAQAQPPAMTSSRKGTFTDDLHKLVDNWARDAMNLSGRRGSKGHMNYEGPGMARKFSAPGQLCISMTSNLGGSAPISAASATSLGHFTKSMCPPQQYGFPATPFGAQWSGTGGPAPQPLGQFQPVGTASLQNFNISNLQKSISNPPGSNLRTT

SEQ ID NO: 97756 - protein, 393 aa, Homo sapiens
  Payload ID: 19503
  Gene Name: WNK lysine deficient protein kinase 1
  ENSP ID: ENSP00000392542
MSGGAAEKQSSTPGSLFLSPPAPAPKNGSSSDSSVGEKLGAAAADAVTGRTEEYRRRRHTMDKDSRGAAATTTTTEHRFFRRSVICDSNATALELPGLPLSLPQPSIPAAVPQSAPPEPHREETVTATATSQVAQQPPAAAAPGEQAVAGPAPSTVPSSTSKDRPVSQPSLVGSKEEPPPARSGSGGGSAKEPQEERSQQQDDIEELETKAVGMSNDGRFLKFDIEIGRGSFKTVYKGLDTETTVEVAWCELQDRKLTKSERQRFKEEAEMLKGLQHPNIVRFYDSWESTVKGKKCIVLVTELMTSGTLKTYLKRFKVMKIKVLRSWCRQILKGLQFLHTRTPPIIHRDLKCDNIFITGPTGSVKIGDLGLATLKRASFAKSVIGMFQVYLGA

SEQ ID NO: 97757 - protein, 2833 aa, Homo sapiens
  Payload ID: 19503
  Gene Name: WNK lysine deficient protein kinase 1
  Uniprot ID: Q9H4A3
  ENSP ID: ENSP00000433548
MSGGAAEKQSSTPGSLFLSPPAPAPKNGSSSDSSVGEKLGAAAADAVTGRTEEYRRRRHTMDKDSRGAAATTTTTEHRFFRRSVICDSNATALELPGLPLSLPQPSIPAAVPQSAPPEPHREETVTATATSQVAQQPPAAAAPGEQAVAGPAPSTVPSSTSKDRPVSQPSLVGSKEEPPPARSGSGGGSAKEPQEERSQQQDDIEELETKAVGMSNDGRFLKFDIEIGRGSFKTVYKGLDTETTVEVAWCELQDRKLTKSERQRFKEEAEMLKGLQHPNIVRFYDSWESTVKGKKCIVLVTELMTSGTLKTYLKRFKVMKIKVLRSWCRQILKGLQFLHTRTPPIIHRDLKCDNIFITGPTGSVKIGDLGLATLKRASFAKSVIGTPEFMAPEMYEEKYDESVDVYAFGMCMLEMATSEYPYSECQNAAQIYRRVTSGVKPASFDKVAIPEVKEIIEGCIRQNKDERYSIKDLLNHAFFQEETGVRVELAEEDDGEKIAIKLWLRIEDIKKLKGKYKDNEAIEFSFDLERDVPEDVAQEMVESGYVCEGDHKTMAKAIKDRVSLIKRKREQRQLVREEQEKKKQEESSLKQQVEQSSASQTGIKQLPSASTGIPTASTTSASVSTQVEPEEPEADQHQQLQYQQPSISVLSDGTVDSGQGSSVFTESRVSSQQTVSYGSQHEQAHSTGTVPGHIPSTVQAQSQPHGVYPPSSVPQSMAHPCGGTPTYPESQIFFPTIHERPVSFSPPPTCPPKVAISQRRKSTSFLEAQTHHFQPLLRTVGQSLLPPGGSPTNWTPEAVVMLGTTASRVTGESCEIQVHPMFEPSQVYSDYRPGLVLPEEAHYFIPQEAVYVAGVHYQARVAEQYEGIPYNSSVLSSPMKQIPEQKPVQGGPTSSSVFEFPSGQAFLVGHLQNLRLDSGLGPGSPLSSISAPISTDATRLKFHPVFVPHSAPAVLTHNNESRSNCVFEFHVHTPSSSSGEGGGILPQRVYRNRQVAVDLNQEELPPQSVGLHGYLQPVTEEKHNYHAPELTVSVVEPIGQNWPIGSPEYSSDSSQITSSDPSDFQSPPPTGGAAAPFGSDVSMPFIHLPQTVLQESPLFFCFPQGTTSQQVLTASFSSGGSALHPQAQGQSQGQPSSSSLTGVSSSQPIQHPQQQQGIQQTAPPQQTVQYSLSQTSTSSEATTAQPVSQPQAPQVLPQVSAGKQLPVSQPVPTIQGEPQIPVATQPSVVPVHSGAHFLPVGQPLPTPLLPQYPVSQIPISTPHVSTAQTGFSSLPITMAAGITQPLLTLASSATTAAIPGVSTVVPSQLPTLLQPVTQLPSQVHPQLLQPAVQSMGIPANLGQAAEVPLSSGDVLYQGFPPRLPPQYPGDSNIAPSSNVASVCIHSTVLSPPMPTEVLATPGYFPTVVQPYVESNLLVPMGGVGGQVQVSQPGGSLAQAPTTSSQQAVLESTQGVSQVAPAEPVAVAQTQATQPTTLASSVDSAHSDVASGMSDGNENVPSSSGRHEGRTTKRHYRKSVRSRSRHEKTSRPKLRILNVSNKGDRVVECQLETHNRKMVTFKFDLDGDNPEEIATIMVNNDFILAIERESFVDQVREIIEKADEMLSEDVSVEPEGDQGLESLQGKDDYGFSGSQKLEGEFKQPIPASSMPQQIGIPTSSLTQVVHSAGRRFIVSPVPESRLRESKVFPSEITDTVAASTAQSPGMNLSHSASSLSLQQAFSELRRAQMTEGPNTAPPNFSHTGPTFPVVPPFLSSIAGVPTTAAATAPVPATSSPPNDISTSVIQSEVTVPTEEGIAGVATSTGVVTSGGLPIPPVSESPVLSSVVSSITIPAVVSISTTSPSLQVPTSTSEIVVSSTALYPSVTVSATSASAGGSTATPGPKPPAVVSQQAAGSTTVGATLTSVSTTTSFPSTASQLCIQLSSSTSTPTLAETVVVSAHSLDKTSHSSTTGLAFSLSAPSSSSSPGAGVSSYISQPGGLHPLVIPSVIASTPILPQAAGPTSTPLLPQVPSIPPLVQPVANVPAVQQTLIHSQPQPALLPNQPHTHCPEVDSDTQPKAPGIDDIKTLEEKLRSLFSEHSSSGAQHASVSLETSLVIESTVTPGIPTTAVAPSKLLTSTTSTCLPPTNLPLGTVALPVTPVVTPGQVSTPVSTTTSGVKPGTAPSKPPLTKAPVLPVGTELPAGTLPSEQLPPFPGPSLTQSQQPLEDLDAQLRRTLSPEMITVTSAVGPVSMAAPTAITEAGTQPQKGVSQVKEGPVLATSSGAGVFKMGRFQVSVAADGAQKEGKNKSEDAKSVHFESSTSESSVLSSSSPESTLVKPEPNGITIPGISSDVPESAHKTTASEAKSDTGQPTKVGRFQVTTTANKVGRFSVSKTEDKITDTKKEGPVASPPFMDLEQAVLPAVIPKKEKPELSEPSHLNGPSSDPEAAFLSRDVDDGSGSPHSPHQLSSKSLPSQNLSQSLSNSFNSSYMSSDNESDIEDEDLKLELRRLRDKHLKEIQDLQSRQKHEIESLYTKLGKVPPAVIIPPAAPLSGRRRRPTKSKGSKSSRSSSLGNKSPQLSGNLSGQSAASVLHPQQTLHPPGNIPESGQNQLLQPLKPSPSSDNLYSAFTSDGAISVPSLSAPGQGCAKFNCASEQVTFKPGGRRTRFLRKMVKKVCPCNQLCRTSSTNTVGATVNSQAAQAQPPAMTSSRKGTFTDDLHKLVDNWARDAMNLSGRRGSKGHMNYEGPGMARKFSAPGQLCISMTSNLGGSAPISAASATSLGHFTKSMCPPQQYGFPATPFGAQWSGTGGPAPQPLGQFQPVGTASLQNFNISNLQKSISNPPGSNLRTT

SEQ ID NO: 97758 - protein, 76 aa, Homo sapiens
  Payload ID: 19503
  Gene Name: WNK lysine deficient protein kinase 1
  ENSP ID: ENSP00000437503
  MOD_RES (1)..(1): Any amino acid
XSDNLYSAFTSDGAISVPSLSAPGQGKMVKKVCPCNQLCRTSSTNTVGATVNSQAAQAQPPAMTSSRKGTFTDDLH

SEQ ID NO: 97759 - protein, 218 aa, Homo sapiens
  Payload ID: 19503
  Gene Name: WNK lysine deficient protein kinase 1
  ENSP ID: ENSP00000438313
  MOD_RES (1)..(1): Any amino acid
XADGTVDSGQGSSVFTESRVSSQQTVSYGSQHEQAHSTGTVPGHIPSTVQAQSQPHGVYPPSSVQQGIQQTAPPQQTVQYSLSQTSTSSEATTAQPVSQPQAPQVLPQVSAGKQSTQGVSQVAPAEPVAVAQTQATQPTTLASSVDSAHSDVASGMSDGNENVPSSSGRHEGRTTKRHYRKSVRSRSRHEKTSRPKLRILNVSNKGDRVVECQLETHN

SEQ ID NO: 97760 - protein, 67 aa, Homo sapiens
  Payload ID: 19503
  Gene Name: WNK lysine deficient protein kinase 1
  ENSP ID: ENSP00000438985
SDNLYSAFTSDGAISVPSLSAPGQGCAKFNCASEQVTFKPGGRRTRFLSTPCLALWKMVKKVCPCNQ

SEQ ID NO: 97761 - protein, 245 aa, Homo sapiens
  Payload ID: 19503
  Gene Name: WNK lysine deficient protein kinase 1
  ENSP ID: ENSP00000439552
SQPHGVYPPSSVQGIQQTAPPQQTVQYSLSQTSTSSEATTAQPVSQPQAPQVLPQVSAGKQLPVSQPVPTIQGEPQIPVATQPSVVPVHSGAHFLPVGQPLPTPLLPQYPVSQIPISTPHVSTAQTGFSSLPITMAAGITQPLLTLASSATTAAIPGVSTVVPSQLPTLLQPVTQLPSQVHPQLLQPAVQSMGIPANLGQAAEVPLSSGDVLYQGFPPRLPPQYPGDSNIAPSSNVASVCIHSTV

SEQ ID NO: 97762 - protein, 2134 aa, Homo sapiens
  Payload ID: 19503
  Gene Name: WNK lysine deficient protein kinase 1
  ENSP ID: ENSP00000441972
MSGGAAEKQSSTPGSLFLSPPAPAPKNGSSSDSSVGEKLGAAAADAVTGRTEEYRRRRHTMDKDSRGAAATTTTTEHRFFRRSVICDSNATALELPGLPLSLPQPSIPAAVPQSAPPEPHREETVTATATSQVAQQPPAAAAPGEQAVAGPAPSTVPSSTSKDRPVSQPSLVGSKEEPPPARSGSGGGSAKEPQEERSQQQDDIEELETKAVGMSNDGRFLKFDIEIGRGSFKTVYKGLDTETTVEVAWCELQDRKLTKSERQRFKEEAEMLKGLQHPNIVRFYDSWESTVKGKKCIVLVTELMTSGTLKTYLKRFKVMKIKVLRSWCRQILKGLQFLHTRTPPIIHRDLKCDNIFITGPTGSVKIGDLGLATLKRASFAKSVIGTPEFMAPEMYEEKYDESVDVYAFGMCMLEMATSEYPYSECQNAAQIYRRVTSGVKPASFDKVAIPEVKEIIEGCIRQNKDERYSIKDLLNHAFFQEETGVRVELAEEDDGEKIAIKLWLRIEDIKKLKGKYKDNEAIEFSFDLERDVPEDVAQEMVESGYVCEGDHKTMAKAIKDRVSLIKRKREQRQLVREEQEKKKQEESSLKQQVEQSSASQTGIKQLPSASTGIPTASTTSASVSTQVEPEEPEADQHQQLQYQQPSISVLSDGTVDSGQGSSVFTESRVSSQQTVSYGSQHEQAHSTGTVPGHIPSTVQAQSQPHGVYPPSSVAQGQSQGQPSSSSLTGVSSSQPIQHPQQQGIQQTAPPQQTVQYSLSQTSTSSEATTAQPVSQPQAPQVLPQVSAGKQSTQGVSQVAPAEPVAVAQTQATQPTTLASSVDSAHSDVASGMSDGNENVPSSSGRHEGRTTKRHYRKSVRSRSRHEKTSRPKLRILNVSNKGDRVVECQLETHNRKMVTFKFDLDGDNPEEIATIMVNNDFILAIERESFVDQVREIIEKADEMLSEDVSVEPEGDQGLESLQGKDDYGFSGSQKLEGEFKQPIPASSMPQQIGIPTSSLTQVVHSAGRRFIVSPVPESRLRESKVFPSEITDTVAASTAQSPGMNLSHSASSLSLQQAFSELRRAQMTEGPNTAPPNFSHTGPTFPVVPPFLSSIAGVPTTAAATAPVPATSSPPNDISTSVIQSEVTVPTEEGIAGVATSTGVVTSGGLPIPPVSESPVLSSVVSSITIPAVVSISTTSPSLQVPTSTSEIVVSSTALYPSVTVSATSASAGGSTATPGPKPPAVVSQQAAGSTTVGATLTSVSTTTSFPSTASQLCIQLSSSTSTPTLAETVVVSAHSLDKTSHSSTTGLAFSLSAPSSSSSPGAGVSSYISQPGGLHPLVIPSVIASTPILPQAAGPTSTPLLPQVPSIPPLVQPVANVPAVQQTLIHSQPQPALLPNQPHTHCPEVDSDTQPKAPGIDDIKTLEEKLRSLFSEHSSSGAQHASVSLETSLVIESTVTPGIPTTAVAPSKLLTSTTSTCLPPTNLPLGTVALPVTPVVTPGQVSTPVSTTTSGVKPGTAPSKPPLTKAPVLPVGTELPAGTLPSEQLPPFPGPSLTQSQQPLEDLDAQLRRTLSPEMITVTSAVGPVSMAAPTAITEAGTQPQKVSQVKEGPVLATSSGAGVFKMGRFQVSVAADGAQKEGKNKSEDAKSVHFESSTSESSVLSSSSPESTLVKPEPNGITIPGISSDVPESAHKTTASEAKSDTGQPTKVGRFQVTTTANKVGRFSVSKTEDKITDTKKEGPVASPPFMDLEQAVLPAVIPKKEKPELSEPSHLNGPSSDPEAAFLSRDVDDGSGSPHSPHQLSSKSLPSQNLSQSLSNSFNSSYMSSDNESDIEDEDLKLELRRLRDKHLKEIQDLQSRQKHEIESLYTKLGKVPPAVIIPPAAPLSGRRRRPTKSKGSKSSRSSSLGNKSPQLSGNLSGQSAASVLHPQQTLHPPGNIPESGQNQLLQPLKPSPSSDNLYSAFTSDGAISVPSLSAPGQGTSSTNTVGATVNSQAAQAQPPAMTSSRKGTFTDDLHKLVDNWARDAMNLSGRRGSKGHMNYEGPGMARKFSAPGQLCISMTSNLGGSAPISAASATSLGHFTKSMCPPQQYGFPATPFGAQWSGTGGPAPQPLGQFQPVGTASLQNFNISNLQKSISNPPGSNLRTT

SEQ ID NO: 97763 - protein, 2642 aa, Homo sapiens
  Payload ID: 19503
  Gene Name: WNK lysine deficient protein kinase 1
  Uniprot ID: Q9H4A3
  ENSP ID: ENSP00000444465
MSGGAAEKQSSTPGSLFLSPPAPAPKNGSSSDSSVGEKLGAAAADAVTGRTEEYRRRRHTMDKDSRGAAATTTTTEHRFFRRSVICDSNATALELPGLPLSLPQPSIPAAVPQSAPPEPHREETVTATATSQVAQQPPAAAAPGEQAVAGPAPSTVPSSTSKDRPVSQPSLVGSKEEPPPARSGSGGGSAKEPQEERSQQQDDIEELETKAVGMSNDGRFLKFDIEIGRGSFKTVYKGLDTETTVEVAWCELQDRKLTKSERQRFKEEAEMLKGLQHPNIVRFYDSWESTVKGKKCIVLVTELMTSGTLKTYLKRFKVMKIKVLRSWCRQILKGLQFLHTRTPPIIHRDLKCDNIFITGPTGSVKIGDLGLATLKRASFAKSVIGTPEFMAPEMYEEKYDESVDVYAFGMCMLEMATSEYPYSECQNAAQIYRRVTSGVKPASFDKVAIPEVKEIIEGCIRQNKDERYSIKDLLNHAFFQEETGVRVELAEEDDGEKIAIKLWLRIEDIKKLKGKYKDNEAIEFSFDLERDVPEDVAQEMVESGYVCEGDHKTMAKAIKDRVSLIKRKREQRQLVREEQEKKKQEESSLKQQVEQSSASQTGIKQLPSASTGIPTASTTSASVSTQVEPEEPEADQHQQLQYQQPSISVLSDGTVDSGQGSSVFTESRVSSQQTVSYGSQHEQAHSTGTVPGHIPSTVQAQSQPHGVYPPSSVPQSMAHPCGGTPTYPESQIFFPTIHERPVSFSPPPTCPPKVAISQRRKSTSFLEAQTHHFQPLLRTVGQSLLPPGGSPTNWTPEAVVMLGTTASRVTGESCEIQVHPMFEPSQVYSDYRPGLVLPEEAHYFIPQEAVYVAGVHYQARVAEQYEGIPYNSSVLSSPMKQIPEQKPVQGGPTSSSVFEFPSGQAFLVGHLQNLRLDSGLGPGSPLSSISAPISTDATRLKFHPVFVPHSAPAVLTHNNESRSNCVFEFHVHTPSSSSGEGGGILPQRVYRNRQVAVDLNQEELPPQSVGLHGYLQPVTEEKHNYHAPELTVSVVEPIGQNWPIGSPEYSSDSSQITSSDPSDFQSPPPTGGAAAPFGSDVSMPFIHLPQTVLQESPLFFCFPQGTTSQQVLTASFSSGGSALHPQAQGQSQGQPSSSSLTGVSSSQPIQHPQQQQGIQQTAPPQQTVQYSLSQTSTSSEATTAQPVSQPQAPQVLPQVSAGKQGFPPRLPPQYPGDSNIAPSSNVASVCIHSTVLSPPMPTEVLATPGYFPTVVQPYVESNLLVPMGGVGGQVQVSQPGGSLAQAPTTSSQQAVLESTQGVSQVAPAEPVAVAQTQATQPTTLASSVDSAHSDVASGMSDGNENVPSSSGRHEGRTTKRHYRKSVRSRSRHEKTSRPKLRILNVSNKGDRVVECQLETHNRKMVTFKFDLDGDNPEEIATIMVNNDFILAIERESFVDQVREIIEKADEMLSEDVSVEPEGDQGLESLQGKDDYGFSGSQKLEGEFKQPIPASSMPQQIGIPTSSLTQVVHSAGRRFIVSPVPESRLRESKVFPSEITDTVAASTAQSPGMNLSHSASSLSLQQAFSELRRAQMTEGPNTAPPNFSHTGPTFPVVPPFLSSIAGVPTTAAATAPVPATSSPPNDISTSVIQSEVTVPTEEGIAGVATSTGVVTSGGLPIPPVSESPVLSSVVSSITIPAVVSISTTSPSLQVPTSTSEIVVSSTALYPSVTVSATSASAGGSTATPGPKPPAVVSQQAAGSTTVGATLTSVSTTTSFPSTASQLCIQLSSSTSTPTLAETVVVSAHSLDKTSHSSTTGLAFSLSAPSSSSSPGAGVSSYISQPGGLHPLVIPSVIASTPILPQAAGPTSTPLLPQVPSIPPLVQPVANVPAVQQTLIHSQPQPALLPNQPHTHCPEVDSDTQPKAPGIDDIKTLEEKLRSLFSEHSSSGAQHASVSLETSLVIESTVTPGIPTTAVAPSKLLTSTTSTCLPPTNLPLGTVALPVTPVVTPGQVSTPVSTTTSGVKPGTAPSKPPLTKAPVLPVGTELPAGTLPSEQLPPFPGPSLTQSQQPLEDLDAQLRRTLSPEMITVTSAVGPVSMAAPTAITEAGTQPQKGVSQVKEGPVLATSSGAGVFKMGRFQVSVAADGAQKEGKNKSEDAKSVHFESSTSESSVLSSSSPESTLVKPEPNGITIPGISSDVPESAHKTTASEAKSDTGQPTKVGRFQVTTTANKVGRFSVSKTEDKITDTKKEGPVASPPFMDLEQAVLPAVIPKKEKPELSEPSHLNGPSSDPEAAFLSRDVDDGSGSPHSPHQLSSKSLPSQNLSQSLSNSFNSSYMSSDNESDIEDEDLKLELRRLRDKHLKEIQDLQSRQKHEIESLYTKLGKVPPAVIIPPAAPLSGRRRRPTKSKGSKSSRSSSLGNKSPQLSGNLSGQSAASVLHPQQTLHPPGNIPESGQNQLLQPLKPSPSSDNLYSAFTSDGAISVPSLSAPGQGTSSTNTVGATVNSQAAQAQPPAMTSSRKGTFTDDLHKLVDNWARDAMNLSGRRGSKGHMNYEGPGMARKFSAPGQLCISMTSNLGGSAPISAASATSLGHFTKSMCPPQQYGFPATPFGAQWSGTGGPAPQPLGQFQPVGTASLQNFNISNLQKSISNPPGSNLRTT

SEQ ID NO: 97764 - protein, 194 aa, Homo sapiens
  Payload ID: 19503
  Gene Name: WNK lysine deficient protein kinase 1
  ENSP ID: ENSP00000446253
TTLASSVDSAHSDVASGMSDGNENVPSSSGRHEGRTTKRHYRKSVRSRSRHEKTSRPKLRILNVNNDFILAIERESFVDQVREIIEKADEMLSEDVSVEPEGDQGLESLQGKDDYGFSGSQKLEGEFKQPIPASSMPQQIGIPTSSLTQVVHSAGRRFIVSPVPESRLRESKVFPSEITDTVAASTAQSPGMNL

SEQ ID NO: 97765 - protein, 176 aa, Homo sapiens
  Payload ID: 19503
  Gene Name: WNK lysine deficient protein kinase 1
  ENSP ID: ENSP00000446462
  MOD_RES (1)..(1): Any amino acid
XEQAHSTGTVPGHIPSTVQAQSQPHGVYPPSSVAQGQSQGQPSSSSLTGVSSSQPIQHPQQQQGIQQTAPPQQTVQYSLSQTSTSSEATTAQPVSQPQAPQVLPQVSAGKQGFPPRLPPQYPGDSNIAPSSNVASVCIHSTVLSPPMPTEVLATPGYFPTVVQPYVESNLLVPMGG

SEQ ID NO: 97766 - protein, 240 aa, Homo sapiens
  Payload ID: 19503
  Gene Name: WNK lysine deficient protein kinase 1
  ENSP ID: ENSP00000459380
PHSAPAVLTHNNESRSNCVFEFHVHTPSSSSGEGGGILPQRVYRNRQVAVDLNQEELPPQSVGLHGYLQPVTEEKHNYHAPELTVSVVEPIGQNWPIGSPEYSSDSSQITSSDPSDFQSPPPTGGAAAPFGSDVSMPFIHLPQTVLQESPLFFCFPQGTTSQQVLTASFSSGGSALHPQAQGQSQGQPSSSSLTGVSSSQPIQHPQQQQGIQQTAPPQQTVQYSLSQTSTSSEATTAQPV

SEQ ID NO: 97767 - protein, 434 aa, Homo sapiens
  Payload ID: 19503
  Gene Name: WNK lysine deficient protein kinase 1
  ENSP ID: ENSP00000460651
MYELLVLFMLIQPQSMAHPCGGTPTYPESQIFFPTIHERPVSFSPPPTCPPKVAISQRRKSTSFLEAQTHHFQPLLRTVGQSLLPPGGSPTNWTPEAVVMLGTTASRVTGESCEIQVHPMFEPSQVYSDYRPGLVLPEEAHYFIPQEAVYVAGVHYQARVAEQYEGIPYNSSVLSSPMKQIPEQKPVQGGPTSSSVFEFPSGQAFLVGHLQNLRLDSGLGPGSPLSSISAPISTDATRLKFHPVFVPHSAPAVLTHNNESRSNCVFEFHVHTPSSSSGEGGGILPQRVYRNRQVAVDLNQEELPPQSVGLHGYLQPVTEEKHNYHAPELTVSVVEPIGQNWPIGSPEYSSDSSQITSSDPSDFQSPPPTGGAAAPFGSDVSMPFIHLPQTVLQESPLFFCFPQGTTSQQVLTASFSSGGSALHPQVIGKLPQLF

SEQ ID NO: 97768 - protein, 2297 aa, Homo sapiens
  Payload ID: 19504
  Gene Name: WNK lysine deficient protein kinase 2
  Uniprot ID: Q9Y3S1
  ENSP ID: ENSP00000297954
MDGDGGRRDVPGTLMEPGRGAGPAGMAEPRAKAARPGPQRFLRRSVVESDQEEPPGLEAAEAPGPQPPQPLQRRVLLLCKTRRLIAERARGRPAAPAPAALVAQPGAPGAPADAGPEPVGTQEPGPDPIAAAVETAPAPDGGPREEAAATVRKEDEGAAEAKPEPGRTRRDEPEEEEDDEDDLKAVATSLDGRFLKFDIELGRGSFKTVYKGLDTETWVEVAWCELQDRKLTKLERQRFKEEAEMLKGLQHPNIVRFYDFWESSAKGKRCIVLVTELMTSGTLKTYLKRFKVMKPKVLRSWCRQILKGLLFLHTRTPPIIHRDLKCDNIFITGPTGSVKIGDLGLATLKRASFAKSVIGTPEFMAPEMYEEHYDESVDVYAFGMCMLEMATSEYPYSECQNAAQIYRKVTCGIKPASFEKVHDPEIKEIIGECICKNKEERYEIKDLLSHAFFAEDTGVRVELAEEDHGRKSTIALRLWVEDPKKLKGKPKDNGAIEFTFDLEKETPDEVAQEMIESGFFHESDVKIVAKSIRDRVALIQWRRERIWPALQPKEQQDVGSPDKARGPPVPLQVQVTYHAQAGQPGPPEPEEPEADQHLLPPTLPTSATSLASDSTFDSGQGSTVYSDSQSSQQSVMLGSLADAAPSPAQCVCSPPVSEGPVLPQSLPSLGAYQQPTAAPGLPVGSVPAPACPPSLQQHFPDPAMSFAPVLPPPSTPMPTGPGQPAPPGQQPPPLAQPTPLPQVLAPQPVVPLQPVPPHLPPYLAPASQVGAPAQLKPLQMPQAPLQPLAQVPPQMPPIPVVPPITPLAGIDGLPPALPDLPTATVPPVPPPQYFSPAVILPSLAAPLPPASPALPLQAVKLPHPPGAPLAMPCRTIVPNAPATIPLLAVAPPGVAALSIHSAVAQLPGQPVYPAAFPQMAPTDVPPSPHHTVQNMRATPPQPALPPQPTLPPQPVLPPQPTLPPQPVLPPQPTRPPQPVLPPQPMLPPQPVLPPQPALPVRPEPLQPHLPEQAAPAATPGSQILLGHPAPYAVDVAAQVPTVPVPPAAVLSPPLPEVLLPAAPELLPQFPSSLATVSASVQSVPTQTATLLPPANPPLPGGPGIASPCPTVQLTVEPVQEEQASQDKPPGLPQSCESYGGSDVTSGKELSDSCEGAFGGGRLEGRAARKHHRRSTRARSRQERASRPRLTILNVCNTGDKMVECQLETHNHKMVTFKFDLDGDAPDEIATYMVEHDFILQAERETFIEQMKDVMDKAEDMLSEDTDADRGSDPGTSPPHLSTCGLGTGEESRQSQANAPVYQQNVLHTGKRWFIICPVAEHPAPEAPESSPPLPLSSLPPEASQGPCRGLTLPCLPWRRAACGAVFLSLFSAESAQSKQPPDSAPYKDQLSSKEQPSFLASQQLLSQAGPSNPPGAPPAPLAPSSPPVTALPQDGAAPATSTMPEPASGTASQAGGPGTPQGLTSELETSQPLAETHEAPLAVQPLVVGLAPCTPAPEAASTRDASAPREPLPPPAPEPSPHSGTPQPALGQPAPLLPAAVGAVSLATSQLPSPPLGPTVPPQPPSALESDGEGPPPRVGFVDSTIKSLDEKLRTLLYQEHVPTSSASAGTPVEVGDRDFTLEPLRGDQPRSEVCGGDLALPPVPKEAVSGRVQLPQPLVEKSELAPTRGAVMEQGTSSSMTAESSPRSMLGYDRDGRQVASDSHVVPSVPQDVPAFVRPARVEPTDRDGGEAGESSAEPPPSDMGTVGGQASHPQTLGARALGSPRKRPEQQDVSSPAKTVGRFSVVSTQDEWTLASPHSLRYSAPPDVYLDEAPSSPDVKLAVRRAQTASSIEVGVGEPVSSDSGDEGPRARPPVQKQASLPVSGSVAGDFVKKATAFLQRPSRAGSLGPETPSRVGMKVPTISVTSFHSQSSYISSDNDSELEDADIKKELQSLREKHLKEISELQSQQKQEIEALYRRLGKPLPPNVGFFHTAPPTGRRRKTSKSKLKAGKLLNPLVRQLKVVASSTGHLADSSRGPPAKDPAQASVGLTADSTGLSGKAVQTQQPCSVRASLSSDICSGLASDGGGARGQGWTVYHPTSERVTYKSSSKPRARFLSGPVSVSIWSALKRLCLGKEHSSRSSTSSLAPGPEPGPQPALHVQAQVNNSNNKKGTFTDDLHKLVDEWTSKTVGAAQLKPTLNQLKQTQKLQDMEAQAGWAAPGEARAMTAPRAGVGMPRLPPAPGPLSTTVIPGAAPTLSVPTPDGALGTARRNQVWFGLRVPPTACCGHSTQPRGGQRVGSKTASFAASDPVRS

SEQ ID NO: 97769 - protein, 2217 aa, Homo sapiens
  Payload ID: 19504
  Gene Name: WNK lysine deficient protein kinase 2
  ENSP ID: ENSP00000378860
MDGDGGRRDVPGTLMEPGRGAGPAGMAEPRAKAARPGPQRFLRRSVVESDQEEPPGLEAAEAPGPQPPQPLQRRVLLLCKTRRLIAERARGRPAAPAPAALVAQPGAPGAPADAGPEPVGTQEPGPDPIAAAVETAPAPDGGPREEAAATVRKEDEGAAEAKPEPGRTRRDEPEEEEDDEDDLKAVATSLDGRFLKFDIELGRGSFKTVYKGLDTETWVEVAWCELQDRKLTKLERQRFKEEAEMLKGLQHPNIVRFYDFWESSAKGKRCIVLVTELMTSGTLKTYLKRFKVMKPKVLRSWCRQILKGLLFLHTRTPPIIHRDLKCDNIFITGPTGSVKIGDLGLATLKRASFAKSVIGTPEFMAPEMYEEHYDESVDVYAFGMCMLEMATSEYPYSECQNAAQIYRKVTCGIKPASFEKVHDPEIKEIIGECICKNKEERYEIKDLLSHAFFAEDTGVRVELAEEDHGRKSTIALRLWVEDPKKLKGKPKDNGAIEFTFDLEKETPDEVAQEMIESGFFHESDVKIVAKSIRDRVALIQWRRERIWPALQPKEQQDVGSPDKARGPPVPLQVQVTYHAQAGQPGPPEPEEPEADQHLLPPTLPTSATSLASDSTFDSGQGSTVYSDSQSSQQSVMLGSLADAAPSPAQCVCSPPVSEGPVLPQSLPSLGAYQQPTAAPGLPVGSVPAPACPPSLQQHFPDPAMSFAPVLPPPSTPMPTGPGQPAPPGQQPPPLAQPTPLPQVLAPQPVVPLQPVPPHLPPYLAPASQVGAPAQLKPLQMPQAPLQPLAQVPPQMPPIPVVPPITPLAGIDGLPPALPDLPTATVPPVPPPQYFSPAVILPSLAAPLPPASPALPLQAVKLPHPPGAPLAMPCRTIVPNAPATIPLLAVAPPGVAALSIHSAVAQLPGQPVYPAAFPQMAPTDVPPSPHHTVQNMRATPPQPALPPQPTLPPQPVLPPQPTLPPQPVLPPQPTRPPQPVLPPQPMLPPQPVLPPQPALPVRPEPLQPHLPEQAAPAATPGSQILLGHPAPYAVDVAAQVPTVPVPPAAVLSPPLPEVLLPAAPELLPQFPSSLATVSASVQSVPTQTATLLPPANPPLPGGPGIASPCPTVQLTVEPVQEEQASQDKPPGLPQSCESYGGSDVTSGKELSDSCEGAFGGGRLEGRAARKHHRRSTRARSRQERASRPRLTILNVCNTGDKMVECQLETHNHKMVTFKFDLDGDAPDEIATYMVEHDFILQAERETFIEQMKDVMDKAEDMLSEDTDADRGSDPGTSPPHLSTCGLGTGEESRQSQANAPVYQQNVLHTGKRWFIICPVAEHPAPEAPESSPPLPLSSLPPEASQDSAPYKDQLSSKEQPSFLASQQLLSQAGPSNPPGAPPAPLAPSSPPVTALPQDGAAPATSTMPEPASGTASQAGGPGTPQGLTSELETSQPLAETHEAPLAVQPLVVGLAPCTPAPEAASTRDASAPREPLPPPAPEPSPHSGTPQPALGQPAPLLPAAVGAVSLATSQLPSPPLGPTVPPQPPSALESDGEGPPPRVGFVDSTIKSLDEKLRTLLYQEHVPTSSASAGTPVEVGDRDFTLEPLRGDQPRSEVCGGDLALPPVPKEAVSGRVQLPQPLVEKSELAPTRGAVMEQGTSSSMTAESSPRSMLGYDRDGRQVASDSHVVPSVPQDVPAFVRPARVEPTDRDGGEAGESSAEPPPSDMGTVGGQASHPQTLGARALGSPRKRPEQQDVSSPAKTVGRFSVVSTQDEWTLASPHSLRYSAPPDVYLDEAPSSPDVKLAVRRAQTASSIEVGVGEPVSSDSGDEGPRARPPVQKQASLPVSGSVAGDFVKKATAFLQRPSRAGSLGPETPSRVGMKVPTISVTSFHSQSSYISSDNDSELEDADIKKELQSLREKHLKEISELQSQQKQEIEALYRRLGKPLPPNVGFFHTAPPTGRRRKTSKSKLKAGKLLNPLVRQLKVVASSTGHLADSSRGPPAKDPAQASVGLTADSTGLSGKAVQTQQPCSVRASLSSDICSGLASDGGGARGQGWTVYHPTSERVTYKSSSKPRARFLSGPVSVSIWSALKRLCLGKEHSSRSSTSSLAPGPEPGPQPALHVQAQVNNSNNKKGTFTDDLHKLVDEWTSKTVGAAQLKPTLNQLKQTQKLQDMEAQAGWAAPGEARAMTAPRAGVGMPRLPPAPGPLSTTVIPGAAPTLSVPTPDPESEKPD

SEQ ID NO: 97770 - protein, 1014 aa, Homo sapiens
  Payload ID: 19504
  Gene Name: WNK lysine deficient protein kinase 2
  ENSP ID: ENSP00000390441
  MOD_RES (1)..(1): Any amino acid
XQLETHNHKMVTFKFDLDGDAPDEIATYMVEHDFILQAERETFIEQMKDVMDKAEDMLSEDTDADRGSDPGTSPPHLSTCGLGTGEESRQSQANAPVYQQNVLHTGKRWFIICPVAEHPAPEAPESSPPLPLSSLPPEASQDSAPYKDQLSSKEQPSFLASQQLLSQAGPSNPPGAPPAPLAPSSPPVTALPQDGAAPATSTMPEPASGTASQAGGPGTPQGLTSELETSQPLAETHEAPLAVQPLVVGLAPCTPAPEAASTRDASAPREPLPPPAPEPSPHSGTPQPALGQPAPLLPAAVGAVSLATSQLPSPPLGPTVPPQPPSALESDGEGPPPRVGFVDSTIKSLDEKLRTLLYQEHVPTSSASAGTPVEVGDRDFTLEPLRGDQPRSEVCGGDLALPPVPKEAVSGRVQLPQPLVEKSELAPTRGAVMEQGTSSSMTAESSPRSMLGYDRDGRQVASDSHVVPSVPQDVPAFVRPARVEPTDRDGGEAGESSAEPPPSDMGTVGGQASHPQTLGARALGSPRKRPEQQDVSSPAKTVGRFSVVSTQDEWTLASPHSLRYSAPPDVYLDEAPSSPDVKLAVRRAQTASSIEVGVGEPVSSDSGDEGPRARPPVQKQASLPVSGSVAGDFVKKATAFLQRPSRAGSLGPETPSRVGMKVPTISVTSFHSQSSYISSDNDSELEDADIKKELQSLREKHLKEISELQSQQKQEIEALYRRLGKPLPPNVGFFHTAPPTGRRRKTSKSKLKAGKLLNPLVRQLKVVASSTGHLADSSRGPPAKDPAQASVGLTADSTGLSGKAVQTQQPCSVRASLSSDICSGLASDGGGARGQGWTVYHPTSERVTYKSSSKPRARFLSGPVSVSIWSALKRLCLGKEHSSRSSTSSLAPGPEPGPQPALHVQAQVNNSNNKKGTFTDDLHKLVDEWTSKTVGAAQLKPTLNQLKQTQKLQDMEAQAGWAAPGEARAMTAPRAGVGMPRLPPAPGPLSTTVIPGAAPTLSVPTPDPESEKPD

SEQ ID NO: 97771 - protein, 363 aa, Homo sapiens
  Payload ID: 19504
  Gene Name: WNK lysine deficient protein kinase 2
  ENSP ID: ENSP00000411181
MEQGTSSSMTESSPRSMLGYDRDGRQVASDSHVVPSVPQDVPAFVRPARVEPTDRDGGEAGESSAEPPPSDMGTVGGQASHPQTLGARALGSPRKRPEQQDVSSPAKTVGRFSVVSTQDEWTLASPHSLRYSAPPDVYLDEAPSSPDVKLAVRRAQTASSIEVGVGEPVSSDSGDEGPRARPPVQKQASLPVSGSVAGDFVKKATSCRGLLGPSLGPETPSRVGMKVPTISVTSFHSQSSYISSDNDSELEDADIKKELQSLREKHLKEISELQSQQKQEIEALYRRLGKPLPPNVGFFHTAPPTGRRRKTSKSKLKAGKLLNPLVRQLKVVASSTGHLADSSRGPPAKDPKPVWGSLQTARA

SEQ ID NO: 97772 - protein, 790 aa, Homo sapiens
  Payload ID: 19504
  Gene Name: WNK lysine deficient protein kinase 2
  ENSP ID: ENSP00000412465
MDGDGGRRDVPGTLMEPGRGAGPAGMAEPRAKAARPGPQRFLRRSVVESDQEEPPGLEAAEAPGPQPPQPLQRRVLLLCKTRRLIAERARGRPAAPAPAALVAQPGAPGAPADAGPEPVGTQEPGPDPIAAAVETAPAPDGGPREEAAATVRKEDEGAAEAKPEPGRTRRDEPEEEEDDEDDLKAVATSLDGRFLKFDIELGRGSFKTVYKGLDTETWVEVAWCELQDRKLTKLERQRFKEEAEMLKGLQHPNIVRFYDFWESSAKGKRCIVLVTELMTSGTLKTYLKRFKVMKPKVLRSWCRQILKGLLFLHTRTPPIIHRDLKCDNIFITGPTGSVKIGDLGLATLKRASFAKSVIGTPEFMAPEMYEEHYDESVDVYAFGMCMLEMATSEYPYSECQNAAQIYRKVTCGIKPASFEKVHDPEIKEIIGECICKNKEERYEIKDLLSHAFFAEDTGVRVELAEEDHGRKSTIALRLWVEDPKKLKGKPKDNGAIEFTFDLEKETPDEVAQEMIESGFFHESDVKIVAKSIRDRVALIQWRRERIWPALQPKEQQDVGSPDKARGPPVPLQVQVTYHAQAGQPGPPEPEEPEADQHLLPPTLPTSATSLASDSTFDSGQGSTVYSDSQSSQQSVMLGSLADAAPSPAQCVCSPPVSEGPVLPQSLPSLGAYQQPTAAPPPLAQPTPLPQVLAPQPVVPLQPVPPHLPPYLAPASQVGAPAQLKPLQMPQAPLQPLAQVPPQMPPIPVVPPITPLAGIDGLPPALPDLPTATVPPVPPPQYFSPAVILPS

SEQ ID NO: 97773 - protein, 646 aa, Homo sapiens
  Payload ID: 19504
  Gene Name: WNK lysine deficient protein kinase 2
  ENSP ID: ENSP00000413325
  MOD_RES (1)..(1): Any amino acid
XAPEPSPHSGTPQPALGQPAPLLPAAVGAVSLATSQLPSPPLGPTVPPQPPSALESDGEGPPPRVGFVDSTIKSLDEKLRTLLYQEHVPTSSASAGTPVEVGDRDFTLEPLRGDQPRSEVCGGDLALPPVPKEAVSGRVQLPQPLVEKSELAPTRGAVMEQGTSSSMTESSPRSMLGYDRDGRQVASDSHVVPSVPQDVPAFVRPARVEPTDRDGGEAGESSAEPPPSDMGTVGGQASHPQTLGARALGSPRKRPEQQDVSSPAKTVGRFSVVSTQDEWTLASPHSLRYSAPPDVYLDEAPSSPDVKLAVRRAQTASSIEVGVGEPVSSDSGDEGPRARPPVQKQASLPVSGSVAGDFVKKATAFLQRPSRAGSLGPETPSRVGMKVPTISVTSFHSQSSYISSDNDSELEDADIKKELQSLREKHLKEISELQSQQKQEIEALYRRLGKPLPPNVGFFHTAPPTGRRRKTSKSKLKAGKLLNPLVRQLKVVASSTGHLADSSRGPPAKDPAQASVGLTADSTGLSGKAVQTQQPCSVRASLSSDICSGLASDGGGARGQGSSTSSLAPGPEPGPQPALHVQAQVNNSNNKKGTFTDDLHKLVDEWTSKTVGAAQLKPTLNQLKQTQKLQDMEAQAGWAAPGEARA

SEQ ID NO: 97774 - protein, 1773 aa, Homo sapiens
  Payload ID: 19504
  Gene Name: WNK lysine deficient protein kinase 2
  ENSP ID: ENSP00000414622
  MOD_RES (1)..(1): Any amino acid
XECQNAAQIYRKVTCGIKPASFEKVHDPEIKEIIGECICKNKEERYEIKDLLSHAFFAEDTGVRVELAEEDHGRKSTIALRLWVEDPKKLKGKPKDNGAIEFTFDLEKETPDEVAQEMIESGFFHESDVKIVAKSIRDRVALIQWRRERIWPALQPKEQQDVGSPDKARGPPVPLQVQVTYHAQAGQPGPPEPEEPEADQHLLPPTLPTSATSLASDSTFDSGQGSTVYSDSQSSQQSVMLGSLADAAPSPAQCVCSPPVSEGPVLPQSLPSLGAYQQPTAAPGLPVGSVPAPACPPSLQQHFPDPAMSFAPVLPPPSTPMPTGPGQPAPPGQQPPPLAQPTPLPQVLAPQPVVPLQPVPPHLPPYLAPASQVGAPAQLKPLQMPQAPLQPLAQVPPQMPPIPVVPPITPLAGIDGLPPALPDLPTATVPPVPPPQYFSPAVILPSLAAPLPPASPALPLQAVKLPHPPGAPLAMPCRTIVPNAPATIPLLAVAPPGVAALSIHSAVAQLPGQPVYPAAFPQMAPTDVPPSPHHTVQNMRATPPQPALPPQPTLPPQPVLPPQPTLPPQPVLPPQPTRPPQPVLPPQPMLPPQPVLPPQPALPVRPEPLQPHLPEQAAPAATPGSQILLGHPAPYAVDVAAQVPTVPVPPAAVLSPPLPEVLLPAAPELLPQFPSSLATVSASVQSVPTQTATLLPPANPPLPGGPGIASPCPTVQLTVEPVQEEQASQDKPPGLPQSCESYGGSDVTSGKELSDSCEGAFGGGRLEGRAARKHHRRSTRARSRQERASRPRLTILNVCNTGDKMVECQLETHNHKMVTFKFDLDGDAPDEIATYMVEHDFILQAERETFIEQMKDVMDKAEDMLSEDTDADRGSDPGTSPPHLSTCGLGTGEESRQSQANAPVYQQNVLHTGKRWFIICPVAEHPAPEAPESSPPLPLSSLPPEASQDSAPYKDQLSSKEQPSFLASQQLLSQAGPSNPPGAPPAPLAPSSPPVTALPQDGAAPATSTMPEPASGTASQAGGPGTPQGLTSELETSQPLAETHEAPLAVQPLVVGLAPCTPAPEAASTRDASAPREPLPPPAPEPSPHSGTPQPALGQPAPLLPAAVGAVSLATSQLPSPPLGPTVPPQPPSALESDGEGPPPRVGFVDSTIKSLDEKLRTLLYQEHVPTSSASAGTPVEVGDRDFTLEPLRGDQPRSEVCGGDLALPPVPKEAVSGRVQLPQPLVEKSELAPTRGAVMEQGTSSSMTAESSPRSMLGYDRDGRQVASDSHVVPSVPQDVPAFVRPARVEPTDRDGGEAGESSAEPPPSDMGTVGGQASHPQTLGARALGSPRKRPEQQDVSSPAKTVGRFSVVSTQDEWTLASPHSLRYSAPPDVYLDEAPSSPDVKLAVRRAQTASSIEVGVGEPVSSDSGDEGPRARPPVQKQASLPVSGSVAGDFVKKATAFLQRPSRAGSLGPETPSRVGMKVPTISVTSFHSQSSYISSDNDSELEDADIKKELQSLREKHLKEISELQSQQKQEIEALYRRLGKPLPPNVGFFHTAPPTGRRRKTSKSKLKAGKLLNPLVRQLKVVASSTGSSTSSLAPGPEPGPQPALHVQAQVNNSNNKKGTFTDDLHKLVDEWTSKTVGAAQLKPTLNQLKQTQKLQDMEAQAGWAAPGEARAMTAPRAGVGMPRLPPAPGPLSTTVIPGAAPTLSVPTPGTALSNLPTPPCALPLGQYRGLLPAPVSWGPWAGQVGQLGAQGSWNTPQVPVLPVFLQPPVVSMPGPRLRIT

SEQ ID NO: 97775 - protein, 2220 aa, Homo sapiens
  Payload ID: 19504
  Gene Name: WNK lysine deficient protein kinase 2
  ENSP ID: ENSP00000415038
  MOD_RES (1)..(1): Any amino acid
XGRRDVPGTLMEPGRGAGPAGMAEPRAKAARPGPQRFLRRSVVESDQEEPPGLEAAEAPGPQPPQPLQRRVLLLCKTRRLIAERARGRPAAPAPAALVAQPGAPGAPADAGPEPVGTQEPGPDPIAAAVETAPAPDGGPREEAAATVRKEDEGAAEAKPEPGRTRRDEPEEEEDDEDDLKAVATSLDGRFLKFDIELGRGSFKTVYKGLDTETWVEVAWCELQDRKLTKLERQRFKEEAEMLKGLQHPNIVRFYDFWESSAKGKRCIVLVTELMTSGTLKTYLKRFKVMKPKVLRSWCRQILKGLLFLHTRTPPIIHRDLKCDNIFITGPTGSVKIGDLGLATLKRASFAKSVIGTPEFMAPEMYEEHYDESVDVYAFGMCMLEMATSEYPYSECQNAAQIYRKVTCGIKPASFEKVHDPEIKEIIGECICKNKEERYEIKDLLSHAFFAEDTGVRVELAEEDHGRKSTIALRLWVEDPKKLKGKPKDNGAIEFTFDLEKETPDEVAQEMIESGFFHESDVKIVAKSIRDRVALIQWRRERIWPALQPKEQQDVGSPDKARGPPVPLQVQVTYHAQAGQPGPPEPEEPEADQHLLPPTLPTSATSLASDSTFDSGQGSTVYSDSQSSQQSVMLGSLADAAPSPAQCVCSPPVSEGPVLPQSLPSLGAYQQPTAAPGLPVGSVPAPACPPSLQQHFPDPAMSFAPVLPPPSTPMPTGPGQPAPPGQQPPPLAQPTPLPQVLAPQPVVPLQPVPPHLPPYLAPASQVGAPAQLKPLQMPQAPLQPLAQVPPQMPPIPVVPPITPLAGIDGLPPALPDLPTATVPPVPPPQYFSPAVILPSLAAPLPPASPALPLQAVKLPHPPGAPLAMPCRTIVPNAPATIPLLAVAPPGVAALSIHSAVAQLPGQPVYPAAFPQMAPTDVPPSPHHTVQNMRATPPQPALPPQPTLPPQPVLPPQPTLPPQPVLPPQPTRPPQPVLPPQPMLPPQPVLPPQPALPVRPEPLQPHLPEQAAPAATPGSQILLGHPAPYAVDVAAQVPTVPVPPAAVLSPPLPEVLLPAAPELLPQFPSSLATVSASVQSVPTQTATLLPPANPPLPGGPGIASPCPTVQLTVEPVQEEQASQDKPPGLPQSCESYGGSDVTSGKELSDSCEGAFGGGRLEGRAARKHHRRSTRARSRQERASRPRLTILNVCNTGDKMVECQLETHNHKMVTFKFDLDGDAPDEIATYMVEHDFILQAERETFIEQMKDVMDKAEDMLSEDTDADRGSDPGTSPPHLSTCGLGTGEESRQSQANAPVYQQNVLHTGKRWFIICPVAEHPAPEAPESSPPLPLSSLPPEASQDSAPYKDQLSSKEQPSFLASQQLLSQAGPSNPPGAPPAPLAPSSPPVTALPQDGAAPATSTMPEPASGTASQAGGPGTPQGLTSELETSQPLAETHEAPLAVQPLVVGLAPCTPAPEAASTRDASAPREPLPPPAPEPSPHSGTPQPALGQPAPLLPAAVGAVSLATSQLPSPPLGPTVPPQPPSALESDGEGPPPRVGFVDSTIKSLDEKLRTLLYQEHVPTSSASAGTPVEVGDRDFTLEPLRGDQPRSEVCGGDLALPPVPKEAVSGRVQLPQPLVEKSELAPTRGAVMEQGTSSSMTAESSPRSMLGYDRDGRQVASDSHVVPSVPQDVPAFVRPARVEPTDRDGGEAGESSAEPPPSDMGTVGGQASHPQTLGARALGSPRKRPEQQDVSSPAKTVGRFSVVSTQDEWTLASPHSLRYSAPPDVYLDEAPSSPDVKLAVRRAQTASSIEVGVGEPVSSDSGDEGPRARPPVQKQASLPVSGSVAGDFVKKATAFLQRPSRAGSLGPETPSRVGMKVPTISVTSFHSQSSYISSDNDSELEDADIKKELQSLREKHLKEISELQSQQKQEIEALYRRLGKPLPPNVGFFHTAPPTGRRRKTSKSKLKAGKLLNPLVRQLKVVASSTGHLADSSRGPPAKDPAQASVGLTADSTGLSGKAVQTQQPCSVRASLSSDICSGLASDGGGARGQGWTVYHPTSERVTYKSSSKPRARFLSGPVSVSIWSALKRLCLGKEHSSRSSTSSLAPGPEPGPQPALHVQAQVNNSNNKKGTFTDDLHKLVDEWTSKTVGAAQLKPTLNQLKQTQKLQDMEAQAGWAAPGEARAMTAPRAGVGMPRLPPAPGPLSTTVIPGAAPTLSVPTPGSCGPRAVSTPTSYT

SEQ ID NO: 97776 - protein, 1800 aa, Homo sapiens
  Payload ID: 19505
  Gene Name: WNK lysine deficient protein kinase 3
  Uniprot ID: Q9BYP7
  ENSP ID: ENSP00000346667
MATDSGDPASTEDSEKPDGISFENRVPQVAATLTVEARLKEKNSTFSASGETVERKRFFRKSVEMTEDDKVAESSPKDERIKAAMNIPRVDKLPSNVLRGGQEVKYEQCSKSTSEISKDCFKEKNEKEMEEEAEMKAVATSPSGRFLKFDIELGRGAFKTVYKGLDTETWVEVAWCELQDRKLTKAEQQRFKEEAEMLKGLQHPNIVRFYDSWESILKGKKCIVLVTELMTSGTLKTYLKRFKVMKPKVLRSWCRQILKGLQFLHTRTPPIIHRDLKCDNIFITGPTGSVKIGDLGLATLMRTSFAKSVIGTPEFMAPEMYEEHYDESVDVYAFGMCMLEMATSEYPYSECQNAAQIYRKVTSGIKPASFNKVTDPEVKEIIEGCIRQNKSERLSIRDLLNHAFFAEDTGLRVELAEEDDCSNSSLALRLWVEDPKKLKGKHKDNEAIEFSFNLETDTPEEVAYEMVKSGFFHESDSKAVAKSIRDRVTPIKKTREKKPAGCLEERRDSQCKSMGNVFPQPQNTTLPLAPAQQTGAECEETEVDQHVRQQLLQRKPQQHCSSVTGDNLSEAGAASVIHSDTSSQPSVAYSSNQTMGSQMVSNIPQAEVNVPGQIYSSQQLVGHYQQVSGLQKHSKLTQPQILPLVQGQSTVLPVHVLGPTVVSQPQVSPLTVQKVPQIKPVSQPVGAEQQAALLKPDLVRSLNQDVATTKENVSSPDNPSGNGKQDRIKQRRASCPRPEKGTKFQLTVLQVSTSGDNMVECQLETHNNKMVTFKFDVDGDAPEDIADYMVEDNFVLESEKEKFVEELRAIVGQAQEILHVHFATERATGVDSITVDSNSSQTGSSEQVQINSTSTQTSNESAPQSSPVGRWRFCINQTIRNRETQSPPSLQHSMSAVPGRHPLPSPKNTSNKEISRDTLLTIENNPCHRALFTSKSEHKDVVDGKISECASVETKQPAILYQVEDNRQIMAPVTNSSSYSTTSVRAVPAECEGLTKQASIFIPVYPCHQTASQADALMSHPGESTQTSGNSLTTLAFDQKPQTLSVQQPAMDAEFISQEGETTVNTEASSPKTVIPTQTPGLEPTTLQPTTVLESDGERPPKLEFADNRIKTLDEKLRNLLYQEHSISSIYPESQKDTQSIDSPFSSSAEDTLSCPVTEVIAISHCGIKDSPVQSPNFQQTGSKLLSNVAASQPANISVFKRDLNVITSVPSELCLHEMSSDASLPGDPEAYPAAVSSGGAIHLQTGGGYFGLSFTCPSLKNPISKKSWTRKLKSWAYRLRQSTSFFKRSKVRQVETEEMRSAIAPDPIPLTRESTADTRALNRCKAMSGSFQRGRFQVITIPQQQSAKMTSFGIEHISVFSETNHSSEEAFIKTAKSQLVEIEPATQNPKTSFSYEKLQALQETCKENKGVPKQGDNFLSFSAACETDVSSVTPEKEFEETSATGSSMQSGSELLLKEREILTAGKQPSSDSEFSASLAGSGKSVAKTGPESNQCLPHHEEQAYAQTQSSLFYSPSSPMSSDDESEIEDEDLKVELQRLREKHIQEVVNLQTQQNKELQELYERLRSIKDSKTQSTEIPLPPASPRRPRSFKSKLRSRPQSLTHVDNGIVATGKSCLINELENPLCVESNAASCQQSPASKKGMFTDDLHKLVDDWTKEAVGNSLIKPSLNQLKQSQHKLETENWNKVSENTPSTMGYTSTWISSLSQIRGAVPTSLPQGLSLPSFPGPLSSYGMPHVCQYNAVAGAGYPVQWVGISGTTQQSVVIPAQSGGPFQPGMNMQAFPTSSVQNPATIPPGPK

SEQ ID NO: 97777 - protein, 1800 aa, Homo sapiens; identical to SEQ ID NO: 97776
  Payload ID: 19505
  Gene Name: WNK lysine deficient protein kinase 3
  Uniprot ID: Q9BYP7
  ENSP ID: ENSP00000364301

SEQ ID NO: 97778 - protein, 1743 aa, Homo sapiens
  Payload ID: 19505
  Gene Name: WNK lysine deficient protein kinase 3
  Uniprot ID: Q9BYP7
  ENSP ID: ENSP00000364312
MATDSGDPASTEDSEKPDGISFENRVPQVAATLTVEARLKEKNSTFSASGETVERKRFFRKSVEMTEDDKVAESSPKDERIKAAMNIPRVDKLPSNVLRGGQEVKYEQCSKSTSEISKDCFKEKNEKEMEEEAEMKAVATSPSGRFLKFDIELGRGAFKTVYKGLDTETWVEVAWCELQDRKLTKAEQQRFKEEAEMLKGLQHPNIVRFYDSWESILKGKKCIVLVTELMTSGTLKTYLKRFKVMKPKVLRSWCRQILKGLQFLHTRTPPIIHRDLKCDNIFITGPTGSVKIGDLGLATLMRTSFAKSVIGTPEFMAPEMYEEHYDESVDVYAFGMCMLEMATSEYPYSECQNAAQIYRKVTSGIKPASFNKVTDPEVKEIIEGCIRQNKSERLSIRDLLNHAFFAEDTGLRVELAEEDDCSNSSLALRLWVEDPKKLKGKHKDNEAIEFSFNLETDTPEEVAYEMVKSGFFHESDSKAVAKSIRDRVTPIKKTREKKPAGCLEERRDSQCKSMGNVFPQPQNTTLPLAPAQQTGAECEETEVDQHVRQQLLQRKPQQHCSSVTGDNLSEAGAASVIHSDTSSQPSVAYSSNQTMGSQMVSNIPQAEVNVPGQIYSSQQLVGHYQQVSGLQKHSKLTQPQILPLVQGQSTVLPVHVLGPTVVSQPQVSPLTVQKVPQIKPVSQPVGAEQQAALLKPDLVRSLNQDVATTKENVSSPDNPSGNGKQDRIKQRRASCPRPEKGTKFQLTVLQVSTSGDNMVECQLETHNNKMVTFKFDVDGDAPEDIADYMVEDNFVLESEKEKFVEELRAIVGQAQEILHVHFATERATGVDSITVDSNSSQTGSSEQVQINSTSTQTSNESAPQSSPVGRWRFCINQTIRNRETQSPPSLQHSMSAVPGRHPLPSPKNTSNKEISRDTLLTIENNPCHRALFTSKSEHKDVVDGKISECASVETKQPAILYQVEDNRQIMAPVTNSSSYSTTSVRAVPAECEGLTKQASIFIPVYPCHQTASQADALMSHPGESTQTSGNSLTTLAFDQKPQTLSVQQPAMDAEFISQEGETTVNTEASSPKTVIPTQTPGLEPTTLQPTTVLESDGERPPKLEFADNRIKTLDEKLRNLLYQEHSISSIYPESQKDTQSIDSPFSSSAEDTLSCPVTEVIAISHCGIKDSPVQSPNFQQTGSKLLSNVAASQPANISVFKRDLNVITSVPSELCLHEMSSDASLPGDPEAYPAAVSSGGAIHLQTGVETEEMRSAIAPDPIPLTRESTADTRALNRCKAMSGSFQRGRFQVITIPQQQSAKMTSFGIEHISVFSETNHSSEEAFIKTAKSQLVEIEPATQNPKTSFSYEKLQALQETCKENKGVPKQGDNFLSFSAACETDVSSVTPEKEFEETSATGSSMQSGSELLLKEREILTAGKQPSSDSEFSASLAGSGKSVAKTGPESNQCLPHHEEQAYAQTQSSLFYSPSSPMSSDDESEIEDEDLKVELQRLREKHIQEVVNLQTQQNKELQELYERLRSIKDSKTQSTEIPLPPASPRRPRSFKSKLRSRPQSLTHVDNGIVATDPLCVESNAASCQQSPASKKGMFTDDLHKLVDDWTKEAVGNSLIKPSLNQLKQSQHKLETENWNKVSENTPSTMGYTSTWISSLSQIRGAVPTSLPQGLSLPSFPGPLSSYGMPHVCQYNAVAGAGYPVQWVGISGTTQQSVVIPAQSGGPFQPGMNMQAFPTSSVQNPATIPPGPK

SEQ ID NO: 97779 - protein, 165 aa, Homo sapiens
  Payload ID: 19505
  Gene Name: WNK lysine deficient protein kinase 3
  ENSP ID: ENSP00000401816
MATDSGDPASTEDSEKPDGISFENRVPQVAATLTVEARLKEKNSTFSASGETVERKRFFRKSVEMTEDDKVAESSPKDERIKAAMNIPRVDKLPSNVLRGGQEVKYEQCSKSTSEISKDCFKEKNEKEMEEEAEMKAVATSPSGRFLKFDIELGRGAFKTVYKGL

SEQ ID NO: 97780 - protein, 1799 aa, Homo sapiens [sequence omitted]

SEQ ID NO: 97781 - protein, 1243 aa, Homo sapiens
  Payload ID: 19506
  Gene Name: WNK lysine deficient protein kinase 4
  Uniprot ID: Q96J92
  ENSP ID: ENSP00000246914
MLASPATETTVLMSQTEADLALRPPPPLGTAGQPRLGPPPRRARRFSGKAEPRPRSSRLSRRSSVDLGLLSSWSLPASPAPDPPDPPDSAGPGPARSPPPSSKEPPEGTWTEGAPVKAAEDSARPELPDSAVGPGSREPLRVPEAVALERRREQEEKEDMETQAVATSPDGRYLKFDIEIGRGSFKTVYRGLDTDTTVEVAWCELQTRKLSRAERQRFSEEVEMLKGLQHPNIVRFYDSWKSVLRGQVCIVLVTELMTSGTLKTYLRRFREMKPRVLQRWSRQILRGLHFLHSRVPPILHRDLKCDNVFITGPTGSVKIGDLGLATLKRASFAKSVIGTPEFMAPEMYEEKYDEAVDVYAFGMCMLEMATSEYPYSECQNAAQIYRKVTSGRKPNSFHKVKIPEVKEIIEGCIRTDKNERFTIQDLLAHAFFREERGVHVELAEEDDGEKPGLKLWLRMEDARRGGRPRDNQAIEFLFQLGRDAAEEVAQEMVALGLVCEADYQPVARAVRERVAAIQRKREKLRKARELEALPPEPGPPPATVPMAPGPPSVFPPEPEEPEADQHQPFLFRHASYSSTTSDCETDGYLSSSGFLDASDPALQPPGGVPSSLAESHLCLPSAFALSIPRSGPGSDFSPGDSYASDAASGLSDVGEGMGQMRRPPGRNLRRRPRSRLRVTSVSDQNDRVVECQLQTHNSKMVTFRFDLDGDSPEEIAAAMVYNEFILPSERDGFLRRIREIIQRVETLLKRDTGPMEAAEDTLSPQEEPAPLPALPVPLPDPSNEELQSSTSLEHRSWTAFSTSSSSPGTPLSPGNPFSPGTPISPGPIFPITSPPCHPSPSPFSPISSQVSSNPSPHPTSSPLPFSSSTPEFPVPLSQCPWSSLPTTSPPTFSPTCSQVTLSSPFFPPCPSTSSFPSTTAAPLLSLASAFSLAVMTVAQSLLSPSPGLLSQSPPAPPSPLPSLPLPPPVAPGGQESPSPHTAEVESEASPPPARPLPGEARLAPISEEGKPQLVGRFQVTSSKEPAEPLPLQPTSPTLSGSPKPSTPQLTSESSDTEDSAGGGPETREALAESDRAAEGLGAGVEEEGDDGKEPQVGGSPQPLSHPSPVWMNYSYSSLCLSSEESESSGEDEEFWAELQSLRQKHLSEVETLQTLQKKEIEDLYSRLGKQPPPGIVAPAAMLSSRQRRLSKGSFPTSRRNSLQRSEPPGPGIMRRNSLSGSSTGSQEQRASKGVTFAGDVGRM

SEQ ID NO: 97782 - protein, 469 aa, Homo sapiens
  Payload ID: 19506
  Gene Name: WNK lysine deficient protein kinase 4
  ENSP ID: ENSP00000467088
MLASPATETTVLMSQTEADLALRPPPPLGTAGQPRLGPPPRRARRFSGKAEPRPRSSRLSRRSSVDLGLLSSWSLPASPAPDPPDPPDSAGPGPARSPPPSSKEPPEGTWTEGAPVKAAEDSARPELPDSAVGPGSREPLRVPEAVALERRREQEEKEDMETQAVATSPDGRYLKFDIEIGRGSFKTVYRGLDTDTTVEVAWCELQTRKLSRAERQRFSEEVEMLKGLQHPNIVRFYDSWKSVLRGQVCIVLVTELMTSGTLKTYLRRFREMKPRVLQRWSRQILRGLHFLHSRVPPILHRDLKCDNVFITGPTGSVKIGDLGLATLKRASFAKSVIGTPEFMAPEMYEEKYDEAVDVYAFGMCMLEMATSEYPYSECQNAAQIYRKVTSVHHPGPPGPRLLPRGARCARGTSGGGRRREAGPQALAAHGGRAARGAPTGQPGHRVPVPAGPGRGRGGGTGDGGSGLGL

SEQ ID NO: 97783 - protein, 62 aa, Homo sapiens
  Payload ID: 19506
  Gene Name: WNK lysine deficient protein kinase 4
  ENSP ID: ENSP00000467312
TLSPQEEPAPLPALPVPLPDPSNEGKPQLVGRFQVTSSKEPAEPLPLQPTSPTLSGSPKPST

SEQ ID NO: 97784 - protein, 379 aa, Homo sapiens
  Payload ID: 19507
  Gene Name: WNT inhibitory factor 1
  Uniprot ID: Q9Y5W5
  ENSP ID: ENSP00000286574
MARRSAFPAAALWLWSILLCLLALRAEAGPPQEESLYLWIDAHQARVLIGFEEDILIVSEGKMAPFTHDFRKAQQRMPAIPVNIHSMNFTWQAAGQAEYFYEFLSLRSLDKGIMADPTVNVPLLGTVPHKASVVQVGFPCLGKQDGVAAFEVDVIVMNSEGNTILQTPQNAIFFKTCQQAECPGGCRNGGFCNERRICECPDGFHGPHCEKALCTPRCMNGGLCVTPGFCICPPGFYGVNCDKANCSTTCFNGGTCFYPGKCICPPGLEGEQCEISKCPQPCRNGGKCIGKSKCKCSKGYQGDLCSKPVCEPGCGAHGTCHEPNKCQCQEGWHGRHCNKRYEASLIHALRPAGAQLRQHTPSLKKAEERRDPPESNYIW

SEQ ID NO: 97785 - protein, 128 aa, Homo sapiens
  Payload ID: 19507
  Gene Name: WNT inhibitory factor 1
  ENSP ID: ENSP00000439024
GVNCDKANCSTTCFNGGTCFYPGKCICPPGLEGEQCEISKCPQPCRNGGKCIGKSKSVCEPGCGAHGTCHEPNKCQCQEGWHGRHCNKRYEASLIHALRPAGAQLRQHTPSLKKAEERRDPPESNYIW

SEQ ID NO: 97786 - protein, 133 aa, Homo sapiens
  Payload ID: 19507
  Gene Name: WNT inhibitory factor 1
  ENSP ID: ENSP00000442063
MAPFTHDFRKAQQRMPAIPVNIHSMNFTWQAAGQAEYFYEFLSLRSLDKGIMADPTVNVPLLGTVPHKASVVQVGFPCLGKQDGVAAFEVDVIVMNSEGNTILQTPQNAIFFKTCQQAECPGGCRNGGFCNER

SEQ ID NO: 97787 - protein, 280 aa, Homo sapiens
  Payload ID: 19508
  Gene Name: WNT1 inducible signaling pathway protein 1
  Uniprot ID: O95388
  ENSP ID: ENSP00000220856
MRWFLPWTLAAVTAAAASTVLATALSPAPTTMDFTPAPLEDTSSRPQFCKWPCECPPSPPRCPLGVSLITDGCECCKMCAQQLGDNCTEAAICDPHRGLYCDYSGDRPRYAIGVCAHAVGEVEAWHRNCIAYTSPWSPCSTSCGLGVSTRISNVNAQCWPEQESRLCNLRPCDVDIHTLIKAGKKCLAVYQPEASMNFTLAGCISTRSYQPKYCGVCMDNRCCIPYKSKTIDVSFQCPDGLGFSRQVLWINACFCNLSCRNPNDIFADLESYPDFSEIAN

SEQ ID NO: 97788 - protein, 367 aa, Homo sapiens
  Payload ID: 19508
  Gene Name: WNT1 inducible signaling pathway protein 1
  Uniprot ID: O95388
  ENSP ID: ENSP00000250160
MRWFLPWTLAAVTAAAASTVLATALSPAPTTMDFTPAPLEDTSSRPQFCKWPCECPPSPPRCPLGVSLITDGCECCKMCAQQLGDNCTEAAICDPHRGLYCDYSGDRPRYAIGVCAQVVGVGCVLDGVRYNNGQSFQPNCKYNCTCIDGAVGCTPLCLRVRPPRLWCPHPRRVSIPGHCCEQWVCEDDAKRPRKTAPRDTGAFDAVGEVEAWHRNCIAYTSPWSPCSTSCGLGVSTRISNVNAQCWPEQESRLCNLRPCDVDIHTLIKAGKKCLAVYQPEASMNFTLAGCISTRSYQPKYCGVCMDNRCCIPYKSKTIDVSFQCPDGLGFSRQVLWINACFCNLSCRNPNDIFADLESYPDFSEIAN

SEQ ID NO: 97789 - protein, 36 aa, Homo sapiens
  Payload ID: 19508
  Gene Name: WNT1 inducible signaling pathway protein 1
  ENSP ID: ENSP00000367093
MRWFLPWTLAAVTAAAASTVLATMLWVRWRHGTGTA

SEQ ID NO: 97790 - protein, 155 aa, Homo sapiens
  Payload ID: 19508
  Gene Name: WNT1 inducible signaling pathway protein 1
  Uniprot ID: O95388
  ENSP ID: ENSP00000427744
MRWFLPWTLAAVTAAAASTVLATALSPAPTTMDFTPAPLEDTSSRPQFCKWPCECPPSPPRCPLGVSLITDGCECCKMCAQQLGDNCTEAAICDPHRGLYCDYSGDRPRYAIGVCARREEVSGCVPARGIHELHTCGLHQHTLLSTQVLWSLHGQ

SEQ ID NO: 97791 - protein, 122 aa, Homo sapiens
  Payload ID: 19508
  Gene Name: WNT1 inducible signaling pathway protein 1
  Uniprot ID: O95388
  ENSP ID: ENSP00000429185
MRWFLPWTLAAVTAAAASTVLATAGKKCLAVYQPEASMNFTLAGCISTRSYQPKYCGVCMDNRCCIPYKSKTIDVSFQCPDGLGFSRQVLWINACFCNLSCRNPNDIFADLESYPDFSEIAN

SEQ ID NO: 97792 - protein, 250 aa, Homo sapiens
  Payload ID: 19509
  Gene Name: WNT1 inducible signaling pathway protein 2
  Uniprot ID: O76076
  ENSP ID: ENSP00000190983
MRGTPKTHLLAFSLLCLLSKVRTQLCPTPCTCPWPPPRCPLGVPLVLDGCGCCRVCARRLGEPCDQLHVCDASQGLVCQPGAGPGGRGALCLLAEDDSSCEVNGRLYREGETFQPHCSIRCRCEDGGFTCVPLCSEDVRLPSWDCPHPRRVEVLGKCCPEWVCGQGGGLGTQPLPAQGPQFSGLVSSLPPGVPCPEWSTAWGPCSTTCGLGMATRVSNQNRFCRLETQRRLCLSRPCPPSRGRSPQNSAF

SEQ ID NO: 97793 - protein, 218 aa, Homo sapiens
  Payload ID: 19509
  Gene Name: WNT1 inducible signaling pathway protein 2
  Uniprot ID: O76076
  ENSP ID: ENSP00000361956
MRGTPKTHLLAFSLLCLLSKVRTQLCPTPCTCPWPPPRCPLGVPLVLDGCGCCRVCARRLGEPCDQLHVCDASQGLVCQPGAGPGGRGALCLCKQDPSFLALSLPCPLVSPAQNGARPGDPARPPVGWAWPPGCPTRTASADWRPSAACACPGPAHPPGVAVHKTVPSRAGLGMGTRCPPSPAGGPVPGPWADGRWSVPRPLAAGNTLAWVHHAEHQY

SEQ ID NO: 97794 - protein, 250 aa, Homo sapiens; identical to SEQ ID NO: 97792
  Payload ID: 19509
  Gene Name: WNT1 inducible signaling pathway protein 2
  Uniprot ID: O76076
  ENSP ID: ENSP00000361959

SEQ ID NO: 97795 - protein, 354 aa, Homo sapiens
  Payload ID: 19510
  Gene Name: WNT1 inducible signaling pathway protein 3
  Uniprot ID: O95389
  ENSP ID: ENSP00000230529
MQGLLFSTLLLAGLAQFCCRVQGTGPLDTTPEGRPGEVSDAPQRKQFCHWPCKCPQQKPRCPPGVSLVRDGCGCCKICAKQPGEICNEADLCDPHKGLYCDYSVDRPRYETGVCAYLVAVGCEFNQVHYHNGQVFQPNPLFSCLCVSGAIGCTPLFIPKLAGSHCSGAKGGKKSDQSNCSLEPLLQQLSTSYKTMPAYRNLPLIWKKKCLVQATKWTPCSRTCGMGISNRVTNENSNCEMRKEKRLCYIQPCDSNILKTIKIPKGKTCQPTFQLSKAEKFVFSGCSSTQSYKPTFCGICLDKRCCIPNKSKMITIQFDCPNEGSFKWKMLWITSCVCQRNCREPGDIFSELKIL

SEQ ID NO: 97796 - protein, 354 aa, Homo sapiens; identical to SEQ ID NO: 97795
  Payload ID: 19510
  Gene Name: WNT1 inducible signaling pathway protein 3
  Uniprot ID: O95389
  ENSP ID: ENSP00000354734

SEQ ID NO: 97797 - protein, 230 aa, Homo sapiens
  Payload ID: 19510
  Gene Name: WNT1 inducible signaling pathway protein 3
  ENSP ID: ENSP00000357652
MQGLLFSTLLLAGLAQFCCRVQGTGPLDTTPEGRPGEVSDAPQRKQFCHWPCKCPQQKPRCPPGVSLVRDGCGCCKICAKQPGEICNEADLCDPHKGLYCDYSVDRPRYETGVCAYLVAVGCEFNQVHYHNGQVFQPNPLFSCLCVSGAIGCTPLFIPKLAGSHCSGAKGGKKSDQSNCSLEPLLQQLSTSYKTMPAYRNLPLIWKKNVLCKQQNGLPAPEHVGWEYLTG

SEQ ID NO: 97798 - protein, 237 aa, Homo sapiens
  Payload ID: 19510
  Gene Name: WNT1 inducible signaling pathway protein 3
  ENSP ID: ENSP00000357653
MNKRRLLYPSGWLHGPSDMQGLLFSTLLLAGLAQFCCRVQGTGPLDTTPEGRPGEVSDAPQRKQFCHWPCKCPQQKPRCPPGVSLVRDGCGCCKICAKQPGEICNEADLCDPHKGLYCDYSVDRPRYETGVCAYLVAVGCEFNQVHYHNGQVFQPNPLFSCLCVSGAIGCTPLFIPKLAGSHCSGAKGGKKSDQSNCSLEPLLQQLSTSYKTMPDVCQASNLLPALRSLNCCLPSSL

SEQ ID NO: 97799 - protein, 372 aa, Homo sapiens
  Payload ID: 19510
  Gene Name: WNT1 inducible signaling pathway protein 3
  Uniprot ID: O95389
  ENSP ID: ENSP00000357655
MNKRRLLYPSGWLHGPSDMQGLLFSTLLLAGLAQFCCRVQGTGPLDTTPEGRPGEVSDAPQRKQFCHWPCKCPQQKPRCPPGVSLVRDGCGCCKICAKQPGEICNEADLCDPHKGLYCDYSVDRPRYETGVCAYLVAVGCEFNQVHYHNGQVFQPNPLFSCLCVSGAIGCTPLFIPKLAGSHCSGAKGGKKSDQSNCSLEPLLQQLSTSYKTMPAYRNLPLIWKKKCLVQATKWTPCSRTCGMGISNRVTNENSNCEMRKEKRLCYIQPCDSNILKTIKIPKGKTCQPTFQLSKAEKFVFSGCSSTQSYKPTFCGICLDKRCCIPNKSKMITIQFDCPNEGSFKWKMLWITSCVCQRNCREPGDIFSELKIL

SEQ ID NO: 97800 - protein, 130 aa, Homo sapiens
  Payload ID: 19510
  Gene Name: WNT1 inducible signaling pathway protein 3
  ENSP ID: ENSP00000386467
MGISNRVTNENSNCEMRKEKRLCYIQPCDSNILKTIKIPKGKTCQPTFQLSKAEKFVFSGCSSTQSYKPTFCGICLDKRCCIPNKSKMITIQFDCPNEGSFKWKMLWITSCVCQRNCREPGDIFSELKIL

SEQ ID NO: 97801 - protein, 219 aa, Homo sapiens
  Payload ID: 19510
  Gene Name: WNT1 inducible signaling pathway protein 3
  ENSP ID: ENSP00000395928
MQGLLFSTLLLAGLAQFCCRVQGTGPLDTTPEGRPGEVSDAPQRKQFCHWPCKCPQQKPRCPPGVSLVRDGCGCCKICAKQPGEICNEADLCDPHKGLYCDYSVDRPRYETGVCAYLVAVGCEFNQVHYHNGQVFQPNPLFSCLCVSGAIGCTPLFIPKLAGSHCSGAKGGKKSDQSNCSLEPLLQQLSTSYKTMPDVCQASNLLPALRSLNCCLPSSL

SEQ ID NO: 97802 - protein, 354 aa, Homo sapiens; identical to SEQ ID NO: 97795
  Payload ID: 19510
  Gene Name: WNT1 inducible signaling pathway protein 3
  Uniprot ID: O95389
  ENSP ID: ENSP00000473777

SEQ ID NO: 97803 - protein, 541 aa, Homo sapiens
  Payload ID: 19511
  Gene Name: wntless Wnt ligand secretion mediator
  Uniprot ID: Q5T9L3
  ENSP ID: ENSP00000262348
MAGAIIENMSTKKLCIVGGILLVFQIIAFLVGGLIAPGPTTAVSYMSVKCVDARKNHHKTKWFVPWGPNHCDKIRDIEEAIPREIEANDIVFSVHIPLPHMEMSPWFQFMLFILQLDIAFKLNNQIRENAEVSMDVSLAYRDDAFAEWTEMAHERVPRKLKCTFTSPKTPEHEGRYYECDVLPFMEIGSVAHKFYLLNIRLPVNEKKKINVGIGEIKDIRLVGIHQNGGFTKVWFAMKTFLTPSIFIIMVWYWRRITMMSRPPVLLEKVIFALGISMTFINIPVEWFSIGFDWTWMLLFGDIRQGIFYAMLLSFWIIFCGEHMMDQHERNHIAGYWKQVGPIAVGSFCLFIFDMCERGVQLTNPFYSIWTTDIGTELAMAFIIVAGICLCLYFLFLCFMVFQVFRNISGKQSSLPAMSKVRRLHYEGLIFRFKFLMLITLACAAMTVIFFIVSQVTEGHWKWGGVTVQVNSAFFTGIYGMWNLYVFALMFLYAPSHKNYGEDQSNGDLGVHSGEELQLTTTITHVDGPTEIYKLTRKEAQE

SEQ ID NO: 97804 - protein, 543 aa, Homo sapiens
  Payload ID: 19511
  Gene Name: wntless Wnt ligand secretion mediator
  Uniprot ID: Q5T9L3
  ENSP ID: ENSP00000346829
MAGAIIENMSTKKLCIVGGILLVFQIIAFLVGGLIGPTTAVSYMSVKCVDARKNHHKTKWFVPWGPNHCDKIRDIEEAIPREIEANDIVFSVHIPLPHMEMSPWFQFMLFILQLDIAFKLNNQIRENAEVSMDVSLAYRDDAFAEWTEMAHERVPRKLKCTFTSPKTPEHEGRYYECDVLPFMEIGSVAHKFYLLNIRLPVNEKKKINVGIGEIKDIRLVGIHQNGGFTKVWFAMKTFLTPSIFIIMVWYWRRITMMSRPPVLLEKVIFALGISMTFINIPVEWFSIGFDWTWMLLFGDIRQGIFYAMLLSFWIIFCGEHMMDQHERNHIAGYWKQVGPIAVGSFCLFIFDMCERGVQLTNPFYSIWTTDIGTELAMAFIIVAGICLCLYFLFLCFMVFQVFRNISGKQSSLPAMSKVRRLHYEGLIFRFKFLMLITLACAAMTVIFFIVSQVTEGHWKWGGVTVQVNSAFFTGIYGMWNLYVFALMFLYAPSHKNYGEDQSNGMQLPCKSREDCALFVSELYQELFSASKYSFINDNAASGI

SEQ ID NO: 97805 - protein, 127 aa, Homo sapiens
  Payload ID: 19511
  Gene Name: wntless Wnt ligand secretion mediator
  ENSP ID: ENSP00000360010
MAGAIIENMSTKKLCIVGGILLVFQIIAFLVGGLIAPGPTTAVSYMSVKCVDARKNHHKTKWFVPWGPNHCDKIRDIEEAIPREIEANDIVFSVHIPLPHMEMSPWFQFMLFILQLDIAFKLNNQIS

SEQ ID NO: 97806 - protein, 122 aa, Homo sapiens
  Payload ID: 19511
  Gene Name: wntless Wnt ligand secretion mediator
  ENSP ID: ENSP00000360012
MDVSLAYRDDAFAEWTEMAHERVPRKLKCTFTSPKTPEHEGRYYECDVLPFMEIGSVAHKFYLLNIRLPVNEKKKINVGIGEIKDIRLVGIHQNGGFTKVWFAMKTFLTPSIFIIMVWYWRR

SEQ ID NO: 97807 - protein, 450 aa, Homo sapiens
  Payload ID: 19511
  Gene Name: wntless Wnt ligand secretion mediator
  Uniprot ID: Q5T9L3
  ENSP ID: ENSP00000360015
MAGAIIENMSTKKLCIVGGILLVFQIIAFLVGGLIGENAEVSMDVSLAYRDDAFAEWTEMAHERVPRKLKCTFTSPKTPEHEGRYYECDVLPFMEIGSVAHKFYLLNIRLPVNEKKKINVGIGEIKDIRLVGIHQNGGFTKVWFAMKTFLTPSIFIIMVWYWRRITMMSRPPVLLEKVIFALGISMTFINIPVEWFSIGFDWTWMLLFGDIRQGIFYAMLLSFWIIFCGEHMMDQHERNHIAGYWKQVGPIAVGSFCLFIFDMCERGVQLTNPFYSIWTTDIGTELAMAFIIVAGICLCLYFLFLCFMVFQVFRNISGKQSSLPAMSKVRRLHYEGLIFRFKFLMLITLACAAMTVIFFIVSQVTEGHWKWGGVTVQVNSAFFTGIYGMWNLYVFALMFLYAPSHKNYGEDQSNGDLGVHSGEELQLTTTITHVDGPTEIYKLTRKEAQE

SEQ ID NO: 97808 - protein, 200 aa, Homo sapiens
  Payload ID: 19511
  Gene Name: wntless Wnt ligand secretion mediator
  ENSP ID: ENSP00000431552
  MOD_RES (1)..(1): Any amino acid
XNMSTKKLCIVGGILLVFQIIAFLVGGLIGENAEVSMDVSLAYRDDAFAEWTEMAHERVPRKLKCTFTSPKTPEHEGRYYECDVLPFMEIGSVAHKFYLLNIRLPVNEKKKINVGIGEIKDIRLVGIHQNGGFTKVWFAMKTFLTPSIFIIMVWYWRRITMMSRPPVLLEKVIFALGISMTFINIPVEWFSIGFDWTWML

SEQ ID NO: 97809 - protein, 222 aa, Homo sapiens
  Payload ID: 19511
  Gene Name: wntless Wnt ligand secretion mediator
  ENSP ID: ENSP00000433111
MSVKCVDARKNHHKTKWFVPWGPNHCDKIRDIEEAIPREIEANDIVFSVHIPLPHMEMSPWFQFMLFILQLDIAFKLNNQIRENAEVSMDVSLAYRDDAFAEWTEMAHERVPRKLKCTFTSPKTPEHEGRYYECDVLPFMEIGSVAHKFYLLNIRLPVNEKKKINVGIGEIKDIRLVGIHQNGGFTKVWFAMKTFLTPSIFIIMVWYWRRITMMSRPPVLLE

SEQ ID NO: 97810 - protein, 38 aa, Homo sapiens
  Payload ID: 19511
  Gene Name: wntless Wnt ligand secretion mediator
  ENSP ID: ENSP00000433188
MAGAIIENMSTKKLCIVGGILLVFQIIAFLVGGLIAYP

SEQ ID NO: 97811 - protein, 134 aa, Homo sapiens
  Payload ID: 19511
  Gene Name: wntless Wnt ligand secretion mediator
  ENSP ID: ENSP00000433690
MDVSLAYRDDAFAEWTEMAHERVPRKLKCTFTSPKTPEHEGRYYECDVLPFMEIGSVAHKFYLLNIRLPVNEKKKINVGIGEIKDIRLVGIHQNGGFTKVWFAMKTFLTPSIFIIMVWYWRRITMMSRPPVLLE

SEQ ID NO: 97812 - protein, 152 aa, Homo sapiens
  Payload ID: 19511
  Gene Name: wntless Wnt ligand secretion mediator
  ENSP ID: ENSP00000433867
  MOD_RES (1)..(1): Any amino acid
XFPSNQLREGNVIDFIRNNRRVGELCPAQTRSSVTRLRYLHAPGPTTAVSYMSVKCVDARKNHHKTKWFVPWGPNHCDKIRDIEEAIPREIEANDIVFSVHIPLPHMEMSPWFQFMLFILQLDIAFKLNNQITMNRTSEKSLGVWQTRSYYT

SEQ ID NO: 97813 - protein, 152 aa, Homo sapiens
  Payload ID: 19511
  Gene Name: wntless Wnt ligand secretion mediator
  ENSP ID: ENSP00000436196
MSVKCVDARKNHHKTKWFVPWGPNHCDKIRDIEEAIPREIEANDIVFSVHIPLPHMEMSPWFQFMLFILQLDIAFKLNNQIRENAEVSMDVSLAYRDDAFAEWTEMAHERVPRKLKCTFTSPKTPEHEGRYYECDVLPFMEIGSVAHKFYLL

SEQ ID NO: 97814 - protein, 647 aa, Homo sapiens
  Payload ID: 19512
  Gene Name: Wolf-Hirschhorn syndrome candidate 1
  Uniprot ID: O96028
  ENSP ID: ENSP00000308780
MEFSIKQSPLSVQSVVKCIKMKQAPEILGSANGKTPSCEVNRECSVFLSKAQLSSSLQEGVMQKFNGHDALPFIPADKLKDLTSRVFNGEPGAHDAKLRFESQEMKGIGTPPNTTPIKNGSPEIKLKITKTYMNGKPLFESSICGDSAADVSQSEENGQKPENKARRNRKRSIKYDSLLEQGLVEAALVSKISSPSDKKIPAKKESCPNTGRDKDHLLKYNVGDLVWSKVSGYPWWPCMVSADPLLHSYTKLKGQKKSARQYHVQFFGDAPERAWIFEKSLVAFEGEGQFEKLCQESAKQAPTKAEKIKLLKPISGKLRAQWEMGIVQAEEAASMSVEERKAKFTFLYVGDQLHLNPQVAKEAGIAAESLGEMAESSGVSEEAAENPKSVREECIPMKRRRRAKLCSSAETLESHPDIGKSTPQKTAEADPRRGVGSPPGRKKTTVSMPRSRKGDAASQFLVFCQKHRDEVVAEHPDASGEEIEELLRSQWSLLSEKQRARYNTKFALVAPVQAEEDSGNVNGKKRNHTKRIQDPTEDAEAEDTPRKRLRTDKHSLRKRDTITDKTARTSSYKAMEAASSLKSQAATKNLSDACKPLKKRNRASTAASSALGFSKSSSPSASLTENELLWEPTPVKLDLNPAALYCT

SEQ ID NO: 97815 - protein, 647 aa, Homo sapiens; identical to SEQ ID NO: 97814
  Payload ID: 19512
  Gene Name: Wolf-Hirschhorn syndrome candidate 1
  Uniprot ID: O96028
  ENSP ID: ENSP00000329167

SEQ ID NO: 97816 - protein, 713 aa, Homo sapiens
  Payload ID: 19512
  Gene Name: Wolf-Hirschhorn syndrome candidate 1
  Uniprot ID: O96028
  ENSP ID: ENSP00000372344
MAGSFCWRMLGLVSKVGNRARCFSSMAASEEELLDFSGSELQFNSCSLHLSLHPFFNFLLGIHSCFVCKESKTDVKRCVVTQCGKFYHEACVKKYPLTVFESRGFRCPLHSCVSCHASNPSNPRPSKGKMMRCVRCPVAYHSGDACLAAGCSVIASNSIICTAHFTARKGKRHHAHVNVSWCFVCSKGGSLLCCESCPAAFHPDCLNIEMPDGSWFCNDCRAGKKLHFQDIIWVKLGNYRWWPAEVCHPKNVPPNIQKMKHEIGEFPVFFFGSKDYYWTHQARVFPYMEGDRGSRYQGVRGIGRVFKNALQEAEARFREIKLQREARETQESERKPPPYKHIKVNKPYGKVQIYTADISEIPKCNCKPTDENPCGFDSECLNRMLMFECHPQVCPAGEFCQNQCFTKRQYPETKIIKTDGKGWGLVAKRDIRKGEFVNEYVGELIDEEECMARIKHAHENDITHFYMLTIDKDRIIDAGPKGNYSRFMNHSCQPNCETLKWTVNGDTRVGLFAVCDIPAGTELTFNYNLDCLGNEKTVCRCGASNCSGFLGDRPKTSTTLSSEEKGKKTKKKTRRRRAKGEGKRQSEDECFRCGDGGQLVLCDRKFCTKAYHLSCLGLGKRPFGKWECPWHHCDVCGKPSTSFCHLCPNSFCKEHQDGTAFSCTPDGRSYCCEHDLGAASVRSTKTEKPPPEPGKPKGKRRRRRGWRRVTEGK

SEQ ID NO: 97817 - protein, 1365 aa, Homo sapiens
  Payload ID: 19512
  Gene Name: Wolf-Hirschhorn syndrome candidate 1
  Uniprot ID: O96028
  ENSP ID: ENSP00000372347
MEFSIKQSPLSVQSVVKCIKMKQAPEILGSANGKTPSCEVNRECSVFLSKAQLSSSLQEGVMQKFNGHDALPFIPADKLKDLTSRVFNGEPGAHDAKLRFESQEMKGIGTPPNTTPIKNGSPEIKLKITKTYMNGKPLFESSICGDSAADVSQSEENGQKPENKARRNRKRSIKYDSLLEQGLVEAALVSKISSPSDKKIPAKKESCPNTGRDKDHLLKYNVGDLVWSKVSGYPWWPCMVSADPLLHSYTKLKGQKKSARQYHVQFFGDAPERAWIFEKSLVAFEGEGQFEKLCQESAKQAPTKAEKIKLLKPISGKLRAQWEMGIVQAEEAASMSVEERKAKFTFLYVGDQLHLNPQVAKEAGIAAESLGEMAESSGVSEEAAENPKSVREECIPMKRRRRAKLCSSAETLESHPDIGKSTPQKTAEADPRRGVGSPPGRKKTTVSMPRSRKGDAASQFLVFCQKHRDEVVAEHPDASGEEIEELLRSQWSLLSEKQRARYNTKFALVAPVQAEEDSGNVNGKKRNHTKRIQDPTEDAEAEDTPRKRLRTDKHSLRKRDTITDKTARTSSYKAMEAASSLKSQAATKNLSDACKPLKKRNRASTAASSALGFSKSSSPSASLTENEVSDSPGDEPSESPYESADETQTEVSVSSKKSERGVTAKKEYVCQLCEKPGSLLLCEGPCCGAFHLACLGLSRRPEGRFTCSECASGIHSCFVCKESKTDVKRCVVTQCGKFYHEACVKKYPLTVFESRGFRCPLHSCVSCHASNPSNPRPSKGKMMRCVRCPVAYHSGDACLAAGCSVIASNSIICTAHFTARKGKRHHAHVNVSWCFVCSKGGSLLCCESCPAAFHPDCLNIEMPDGSWFCNDCRAGKKLHFQDIIWVKLGNYRWWPAEVCHPKNVPPNIQKMKHEIGEFPVFFFGSKDYYWTHQARVFPYMEGDRGSRYQGVRGIGRVFKNALQEAEARFREIKLQREARETQESERKPPPYKHIKVNKPYGKVQIYTADISEIPKCNCKPTDENPCGFDSECLNRMLMFECHPQVCPAGEFCQNQCFTKRQYPETKIIKTDGKGWGLVAKRDIRKGEFVNEYVGELIDEEECMARIKHAHENDITHFYMLTIDKDRIIDAGPKGNYSRFMNHSCQPNCETLKWTVNGDTRVGLFAVCDIPAGTELTFNYNLDCLGNEKTVCRCGASNCSGFLGDRPKTSTTLSSEEKGKKTKKKTRRRRAKGEGKRQSEDECFRCGDGGQLVLCDRKFCTKAYHLSCLGLGKRPFGKWECPWHHCDVCGKPSTSFCHLCPNSFCKEHQDGTAFSCTPDGRSYCCEHDLGAASVRSTKTEKPPPEPGKPKGKRRRRRGWRRVTEGK

SEQ ID NO: 97818 - protein, 1365 aa, Homo sapiens; identical to SEQ ID NO: 97817
  Payload ID: 19512
  Gene Name: Wolf-Hirschhorn syndrome candidate 1
  Uniprot ID: O96028
  ENSP ID: ENSP00000372348

SEQ ID NO: 97819 - protein, 1365 aa, Homo sapiens; identical to SEQ ID NO: 97817
  Payload ID: 19512
  Gene Name: Wolf-Hirschhorn syndrome candidate 1
  Uniprot ID: O96028
  ENSP ID: ENSP00000372351

SEQ ID NO: 97820 - protein, 647 aa, Homo sapiens; identical to SEQ ID NO: 97814
  Payload ID: 19512
  Gene Name: Wolf-Hirschhorn syndrome candidate 1
  Uniprot ID: O96028
  ENSP ID: ENSP00000381311

SEQ ID NO: 97821 - protein, 629 aa, Homo sapiens
  Payload ID: 19512
  Gene Name: Wolf-Hirschhorn syndrome candidate 1
  Uniprot ID: O96028
  ENSP ID: ENSP00000399251
MEFSIKQSPLSVQSVVKCIKMKQAPEILGSANGKTPSCEVNRECSVFLSKAQLSSSLQEGVMQKFNGHDALPFIPADKLKDLTSRVFNGEPGAHDAKLRFESQEMKGIGTPPNTTPIKNGSPEIKLKITKTYMNGKPLFESSICGDSAADVSQSEENGQKPENKARRNRKRSIKYDSLLEQGLVEAALVSKISSPSDKKIPAKKESCPNTGRDKDHLLKYNVGDLVWSKVSGYPWWPCMVSADPLLHSYTKLKGQKKSARQYHVQFFGDAPERAWIFEKSLVAFEGEGQFEKLCQESAKQAPTKAEKIKLLKPISGKLRAQWEMGIVQAEEAASMSVEERKAKFTFLYVGDQLHLNPQVAKEAGIAAESLGEMAESSGVSEEAAENPKSVREECIPMKRRRRAKLCSSAETLESHPDIGKSTPQKTAEADPRRGVGSPPGRKKTTVSMPRSRKGDAASQFLVFCQKHRDEVVAEHPDASGEEIEELLRSQWSLLSEKQRARYNTKFALVAPVQAEEDSGNVNGKKRNHTKRIQDPTEDAEAEDTPRKRLRTDKHSLRKRDTITDKTARTSSYKAMEAASSLKSQAATKNLSDACKPLKKRNRASTAASSALGFSKSSSPSASLTENEVK

SEQ ID NO: 97822 - protein, 273 aa, Homo sapiens
  Payload ID: 19512
  Gene Name: Wolf-Hirschhorn syndrome candidate 1
  Uniprot ID: O96028
  ENSP ID: ENSP00000416725
MEFSIKQSPLSVQSVVKCIKMKQAPEILGSANGKTPSCEVNRECSVFLSKAQLSSSLQEGVMQKFNGHDALPFIPADKLKDLTSRVFNGEPGAHDAKLRFESQEMKGIGTPPNTTPIKNGSPEIKLKITKTYMNGKPLFESSICGDSAADVSQSEENGQKPENKARRNRKRSIKYDSLLEQGLVEAALVSKISSPSDKKIPAKKESCPNTGRDKDHLLKYNVGDLVWSKVSGYPWWPCMVSADPLLHSYTKLKGIFKSKKFEHLKTSQIVLKD

SEQ ID NO: 97823 - protein, 37 aa, Homo sapiens
  Payload ID: 19512
  Gene Name: Wolf-Hirschhorn syndrome candidate 1
  ENSP ID: ENSP00000421551
MEFSIKQSPLSVQSVVKCIKMKQAPEILGSANGKTPS

SEQ ID NO: 97824 - protein, 629 aa, Homo sapiens; identical to SEQ ID NO: 97821
  Payload ID: 19512
  Gene Name: Wolf-Hirschhorn syndrome candidate 1
  Uniprot ID: O96028
  ENSP ID: ENSP00000421681

SEQ ID NO: 97825 - protein, 392 aa, Homo sapiens
  Payload ID: 19512
  Gene Name: Wolf-Hirschhorn syndrome candidate 1
  ENSP ID: ENSP00000422878
MEFSIKQSPLSVQSVVKCIKMKQAPEILGSANGKTPSCEVNRECSVFLSKAQLSSSLQEGVMQKFNGHDALPFIPADKLKDLTSRVFNGEPGAHDAKLRFESQEMKGIGTPPNTTPIKNGSPEIKLKITKTYMNGKPLFESSICGDSAADVSQSEENGQKPENKARRNRKRSIKYDSLLEQGLVEAALVSKISSPSDKKIPAKKESCPNTGRDKDHLLKYNVGDLVWSKVSGYPWWPCMVSADPLLHSYTKLKGQKKSARQYHVQFFGDAPERAWIFEKSLVAFEGEGQFEKLCQESAKQAPTKAEKIKLLKPISGKLRAQWEMGIVQAEEAASMSVEERKAKFTFLYVGDQLHLNPQVAKEAGIAAESLGEMAESSGVSEEAAENPKSVRE

SEQ ID NO: 97826 - protein, 1365 aa, Homo sapiens; identical to SEQ ID NO: 97817
  Payload ID: 19512
  Gene Name: Wolf-Hirschhorn syndrome candidate 1
  Uniprot ID: O96028
  ENSP ID: ENSP00000423972

SEQ ID NO: 97827 - protein, 163 aa, Homo sapiens
  Payload ID: 19512
  Gene Name: Wolf-Hirschhorn syndrome candidate 1
  ENSP ID: ENSP00000424482
SSAETLESHPDIGKSTPQKTAEADPRRGVGSPPGRKKTTVSMPRSRKGDAASQFLVFCQKHRDEVVAEHPDASGEEIEELLRSQWSLLSEKQRARYNTKFALVAPVQAEEDSGNVNGKKRNHTKRIQDPTEDAEAEDTPRKRLRTDKHSLRKQRKICLMHVNH

SEQ ID NO: 97828 - protein, 284 aa, Homo sapiens
  Payload ID: 19512
  Gene Name: Wolf-Hirschhorn syndrome candidate 1
  ENSP ID: ENSP00000425094
  MOD_RES (1)..(1): Any amino acid
XNLSDACKPLKKRNRASTAASSALGFSKSSSPSASLTENEVSDSPGDEPSESPYESADETQTEVSVSSKKSERGVTAKKEYVCQLCEKPGSLLLCEGPCCGAFHLACLGLSRRPEGRFTCSECASGCSVIASNSIICTAHFTARKGKRHHAHVNVSWCFVCSKGGSLLCCESCPAAFHPDCLNIEMPDGSWFCNDCRAGKKLHFQDIIWVKLGNYRWWPAEVCHPKNVPPNIQKMKHEIGEFPVFFFGSKDYYWTHQARVFPYMEGDRGSRYQGVRGIGRVFKN

SEQ ID NO: 97829 - protein, 647 aa, Homo sapiens; identical to SEQ ID NO: 97814
  Payload ID: 19512
  Gene Name: Wolf-Hirschhorn syndrome candidate 1
  Uniprot ID: O96028
  ENSP ID: ENSP00000425761

SEQ ID NO: 97830 - protein, 199 aa, Homo sapiens
  Payload ID: 19512
  Gene Name: Wolf-Hirschhorn syndrome candidate 1
  ENSP ID: ENSP00000427434
MEFSIKQSPLSVQSVVKCIKMKQAPEILGSANGKTPSCEVNRECSVFLSKAQLSSSLQEGVMQKFNGHDALPFIPADKLKDLTSRVFNGEPGAHDAKLRFESQEMKGIGTPPNTTPIKNGSPEIKLKITKTYMNGKPLFESSICGDSAADVSQSEENGQKPENKARRNRKRSIKYDSLLEQGLVEAALVSKISSPSDKK

SEQ ID NO: 97831 - protein, 273 aa, Homo sapiens; identical to SEQ ID NO: 97822
  Payload ID: 19512
  Gene Name: Wolf-Hirschhorn syndrome candidate 1
  Uniprot ID: O96028
  ENSP ID: ENSP00000427516

SEQ ID NO: 97832 - protein, 645 aa, Homo sapiens
  Payload ID: 19513
  Gene Name: Wolf-Hirschhorn syndrome candidate 1-like 1
  Uniprot ID: Q9BZ95
  ENSP ID: ENSP00000313410
MDFSFSFMQGIMGNTIQQPPQLIDSANIRQEDAFDNNSDIAEDGGQTPYEATLQQGFQYPATTEDLPPLTNGYPSSISVYETQTKYQSYNQYPNGSANGFGAVRNFSPTDYYHSEIPNTRPHEILEKPSPPQPPPPPSVPQTVIPKKTGSPEIKLKITKTIQNGRELFESSLCGDLLNEVQASEHTKSKHESRKEKRKKSNKHDSSRSEERKSHKIPKLEPEEQNRPNERVDTVSEKPREEPVLKEEAPVQPILSSVPTTEVSTGVKFQVGDLVWSKVGTYPWWPCMVSSDPQLEVHTKINTRGAREYHVQFFSNQPERAWVHEKRVREYKGHKQYEELLAEATKQASNHSEKQKIRKPRPQRERAQWDIGIAHAEKALKMTREERIEQYTFIYIDKQPEEALSQAKKSVASKTEVKKTRRPRSVLNTQPEQTNAGEVASSLSSTEIRRHSQRRHTSAEEEEPPPVKIAWKTAAARKSLPASITMHKGSLDLQKCNMSPVVKIEQVFALQNATGDGKFIDQFVYSTKGIGNKTEISVRGQDRLIISTPNQRNEKPTQSVSSPEATSGSTGSVEKKQQRRSIRTRSESEKSTEVVPKKKIKKEQVETVPQATVKTGLQKGSADRGVQGSVRFSDSSVSAAIEETVD

SEQ ID NO: 97833 - protein, 1437 aa, Homo sapiens
  Payload ID: 19513
  Gene Name: Wolf-Hirschhorn syndrome candidate 1-like 1
  Uniprot ID: Q9BZ95
  ENSP ID: ENSP00000313983
MDFSFSFMQGIMGNTIQQPPQLIDSANIRQEDAFDNNSDIAEDGGQTPYEATLQQGFQYPATTEDLPPLTNGYPSSISVYETQTKYQSYNQYPNGSANGFGAVRNFSPTDYYHSEIPNTRPHEILEKPSPPQPPPPPSVPQTVIPKKTGSPEIKLKITKTIQNGRELFESSLCGDLLNEVQASEHTKSKHESRKEKRKKSNKHDSSRSEERKSHKIPKLEPEEQNRPNERVDTVSEKPREEPVLKEEAPVQPILSSVPTTEVSTGVKFQVGDLVWSKVGTYPWWPCMVSSDPQLEVHTKINTRGAREYHVQFFSNQPERAWVHEKRVREYKGHKQYEELLAEATKQASNHSEKQKIRKPRPQRERAQWDIGIAHAEKALKMTREERIEQYTFIYIDKQPEEALSQAKKSVASKTEVKKTRRPRSVLNTQPEQTNAGEVASSLSSTEIRRHSQRRHTSAEEEEPPPVKIAWKTAAARKSLPASITMHKGSLDLQKCNMSPVVKIEQVFALQNATGDGKFIDQFVYSTKGIGNKTEISVRGQDRLIISTPNQRNEKPTQSVSSPEATSGSTGSVEKKQQRRSIRTRSESEKSTEVVPKKKIKKEQVETVPQATVKTGLQKGASEISDSCKPLKKRSRASTDVEMTSSAYRDTSDSDSRGLSDLQVGFGKQVDSPSATADADVSDVQSMDSSLSRRGTGMSKKDTVCQICESSGDSLIPCEGECCKHFHLECLGLASLPDSKFICMECKTGQHPCFSCKVSGKDVKRCSVGACGKFYHEACVRKFPTAIFESKGFRCPQHCCSACSMEKDIHKASKGRMMRCLRCPVAYHSGDACIAAGSMLVSSYILICSNHSKRSSNSSAVNVGFCFVCARGLIVQDHSDPMFSSYAYKSHYLLNESNRAELMKLPMIPSSSASKKKCEKGGRLLCCESCPASFHPECLSIEMPEGCWNCNDCKAGKKLHYKQIVWVKLGNYRWWPAEICNPRSVPLNIQGLKHDLGDFPVFFFGSHDYYWVHQGRVFPYVEGDKSFAEGQTSINKTFKKALEEAAKRFQELKAQRESKEALEIEKNSRKPPPYKHIKANKVIGKVQIQVADLSEIPRCNCKPADENPCGLESECLNRMLQYECHPQVCPAGDRCQNQCFTKRLYPDAEIIKTERRGWGLRTKRSIKKGEFVNEYVGELIDEEECRLRIKRAHENSVTNFYMLTVTKDRIIDAGPKGNYSRFMNHSCNPNCETQKWTVNGDVRVGLFALCDIPAGMELTFNYNLDCLGNGRTECHCGADNCSGFLGVRPKSACASTNEEKAKNAKLKQKRRKIKTEPKQMHEDYCFQCGDGGELVMCDKKDCPKAYHLLCLNLTQPPYGKWECPWHQCDECSSAAVSFCEFCPHSFCKDHEKGALVPSALEGRLCCSEHDPMAPVSPEYWSKIKCKWESQDHGEEVKE

SEQ ID NO: 97834 - protein, 1388 aa, Homo sapiens
  Payload ID: 19513
  Gene Name: Wolf-Hirschhorn syndrome candidate 1-like 1
  Uniprot ID: Q9BZ95
  ENSP ID: ENSP00000393284
MDFSFSFMQGIMGNTIQQPPQLIDSANIRQEDAFDNNSDIAEDGGQTPYEATLQQGFQYPATTEDLPPLTNGYPSSISVYETQTKYQSYNQYPNGSANGFGAVRNFSPTDYYHSEIPNTRPHEILEKPSPPQPPPPPSVPQTVIPKKTGSPEIKLKITKTIQNGRELFESSLCGDLLNEVQASEHTKSKHESRKEKRKKSNKHDSSRSEERKSHKIPKLEPEEQNRPNERVDTVSEKPREEPVLKEEAPVQPILSSVPTTEVSTGVKFQVGDLVWSKVGTYPWWPCMVSSDPQLEVHTKINTRGAREYHVQFFSNQPERAWVHEKRVREYKGHKQYEELLAEATKQASNHSEKQKIRKPRPQRERAQWDIGIAHAEKALKMTREERIEQYTFIYIDKQPEEALSQAKKSVASKTEVKKTRRPRSVLNTQPEQTNAGEVASSLSSTEIRRHSQRRHTSAEEEEPPPVKIAWKTAAARKSLPASITMHKGSLDLQKCNMSPVVKIEQVFALQNATGDGKFIDQFVYSTKGIGNKTEISVRGQDRLIISTPNQRNEKPTQSVSSPEATSGSTGSVEKKQQRRSIRTRSESEKSTEVVPKKKIKKEQVETVPQATVKTGLQKGASEISDSCKPLKKRSRASTDVEMTSSAYRDTSDSDSRGLSDLQVGFGKQVDSPSATADADVSDVQSMDSSLSRRGTGMSKKDTVCQICESSGDSLIPCEGECCKHFHLECLGLASLPDSKFICMECKTGQHPCFSCKVSGKDVKRCSVGACGKFYHEACVRKFPTAIFESKGFRCPQHCCSACSMEKDIHKASKGRMMRCLRCPVAYHSGDACIAAGSMLVSSYILICSNHSKRSSNSSAVNVGFCFVCARGGRLLCCESCPASFHPECLSIEMPEGCWNCNDCKAGKKLHYKQIVWVKLGNYRWWPAEICNPRSVPLNIQGLKHDLGDFPVFFFGSHDYYWVHQGRVFPYVEGDKSFAEGQTSINKTFKKALEEAAKRFQELKAQRESKEALEIEKNSRKPPPYKHIKANKVIGKVQIQVADLSEIPRCNCKPADENPCGLESECLNRMLQYECHPQVCPAGDRCQNQCFTKRLYPDAEIIKTERRGWGLRTKRSIKKGEFVNEYVGELIDEEECRLRIKRAHENSVTNFYMLTVTKDRIIDAGPKGNYSRFMNHSCNPNCETQKWTVNGDVRVGLFALCDIPAGMELTFNYNLDCLGNGRTECHCGADNCSGFLGVRPKSACASTNEEKAKNAKLKQKRRKIKTEPKQMHEDYCFQCGDGGELVMCDKKDCPKAYHLLCLNLTQPPYGKWECPWHQCDECSSAAVSFCEFCPHSFCKDHEKGALVPSALEGRLCCSEHDPMAPVSPEYWSKIKCKWESQDHGEEVKE

SEQ ID NO: 97835 - protein, 15 aa, Homo sapiens
  Payload ID: 19513
  Gene Name: Wolf-Hirschhorn syndrome candidate 1-like 1
  ENSP ID: ENSP00000431598
MDFSFSFMQGIMGNT

SEQ ID NO: 97836 - protein, 25 aa, Homo sapiens
  Payload ID: 19513
  Gene Name: Wolf-Hirschhorn syndrome candidate 1-like 1
  ENSP ID: ENSP00000432544
MDFSFSFMQGIMGNTIQQPPQLIDS

SEQ ID NO: 97837 - protein, 1426 aa, Homo sapiens
  Payload ID: 19513
  Gene Name: Wolf-Hirschhorn syndrome candidate 1-like 1
  Uniprot ID: Q9BZ95
  ENSP ID: ENSP00000434730
MDFSFSFMQGIMGNTIQQPPQLIDSANIRQEDAFDNNSDIAEDGGQTPYEATLQQGFQYPATTEDLPPLTNGYPSSISVYETQTKYQSYNQYPNGSANGFGAVRNFSPTDYYHSEIPNTRPHEILEKPSPPQPPPPPSVPQTVIPKKTGSPEIKLKITKTIQNGRELFESSLCGDLLNEVQASEHTKSKHESRKEKRKKSNKHDSSRSEERKSHKIPKLEPEEQNRPNERVDTVSEKPREEPVLKEEAPVQPILSSVPTTEVSTGVKFQVGDLVWSKVGTYPWWPCMVSSDPQLEVHTKINTRGAREYHVQFFSNQPERAWVHEKRVREYKGHKQYEELLAEATKQASNHSEKQKIRKPRPQRERAQWDIGIAHAEKALKMTREERIEQYTFIYIDKQPEEALSQAKKSVASKTEVKKTRRPRSVLNTQPEQTNAGEVASSLSSTEIRRHSQRRHTSAEEEEPPPVKIAWKTAAARKSLPASITMHKGSLDLQKCNMSPVVKIEQVFALQNATGDGKFIDQFVYSTKGIGNKTEISVRGQDRLIISTPNQRNEKPTQSVSSPEATSGSTGSVEKKQQRRSIRTRSESEKSTEVVPKKKIKKEQVETVPQATVKTGLQKGASEISDSCKPLKKRSRASTDVEMTSSAYRDTSDSDSRGLSDLQVGFGKQVDSPSATADADVSDVQSMDSSLSRRGTGMSKKDTVCQICESSGDSLIPCEGECCKHFHLECLGLASLPDSKFICMECKTGQHPCFSCKVSGKDVKRCSVGACGKFYHEACVRKFPTAIFESKGFRCPQHCCSACSMEKDIHKASKGRMMRCLRCPVAYHSGDACIAAGSMLVSSYILICSNHSKRSSNSSAVNVGFCFVCARGLIVQDHSDPMFSSYAYKSHYLLNESNRAELMKLPMIPSSSASKKKCEKGGRLLCCESCPASFHPECLSIEMPEGCWNCNDCKAGKKLHYKQIVWVKLGNYRWWPAEICNPRSVPLNIQGLKHDLGDFPVFFFGSHDYYWVHQGRVFPYVEGDKSFAEGQTSINKTFKKALEEAAKRFQELKAQRESKEALEIEKNSRKPPPYKHIKANKVIGKVQIQVADLSEIPRCNCKPADENPCGLESECLNRMLQYECHPQVCPAGDRCQNQCFTKRLYPDAEIIKTERRGWGLRTKRSIKKGEFVNEYVGELIDEEECRLRIKRAHENSDRIIDAGPKGNYSRFMNHSCNPNCETQKWTVNGDVRVGLFALCDIPAGMELTFNYNLDCLGNGRTECHCGADNCSGFLGVRPKSACASTNEEKAKNAKLKQKRRKIKTEPKQMHEDYCFQCGDGGELVMCDKKDCPKAYHLLCLNLTQPPYGKWECPWHQCDECSSAAVSFCEFCPHSFCKDHEKGALVPSALEGRLCCSEHDPMAPVSPEYWSKIKCKWESQDHGEEVKE

SEQ ID NO: 97838 - protein, 77 aa, Homo sapiens
  Payload ID: 19513
  Gene Name: Wolf-Hirschhorn syndrome candidate 1-like 1
  ENSP ID: ENSP00000435073
ISVRGQDRLIISTPNQRNEKPTQSVSSPEATSGSTGSVEKKQQRRSIRTRSESEKSTEVVPKKKIKKEQVGFLHVES

SEQ ID NO: 97839 - protein, 282 aa, Homo sapiens
  Payload ID: 19513
  Gene Name: Wolf-Hirschhorn syndrome candidate 1-like 1
  ENSP ID: ENSP00000435422
MDFSFSFMQGIMGNTIQQPPQLIDSANIRQEDAFDNNSDIAEDGGQTPYEATLQQGFQYPATTEDLPPLTNGYPSSISVYETQTKYQSYNQYPNGSANGFGAVRNFSPTDYYHSEIPNTRPHEILEKPSPPQPPPPPSVPQTVIPKKTGSPEIKLKITKTIQNGRELFESSLCGDLLNEVQASEHTKSKHESRKEKRKKSNKHDSSRSEERKSHKIPKLEPEEQNRPNERVDTVSEKPREEPVLKEEAPVQPILSSVPTTEVSTGVKFQVGDLVWSKVGTYP

SEQ ID NO: 97840 - protein, 890 aa, Homo sapiens
  Payload ID: 19514
  Gene Name: Wolfram syndrome 1 (wolframin)
  Uniprot ID: O76024
  ENSP ID: ENSP00000226760
MDSNTAPLGPSCPQPPPAPQPQARSRLNATASLEQERSERPRAPGPQAGPGPGVRDAAAPAEPQAQHTRSRERADGTGPTKGDMEIPFEEVLERAKAGDPKAQTEVGKHYLQLAGDTDEELNSCTAVDWLVLAAKQGRREAVKLLRRCLADRRGITSENEREVRQLSSETDLERAVRKAALVMYWKLNPKKKKQVAVAELLENVGQVNEHDGGAQPGPVPKSLQKQRRMLERLVSSESKNYIALDDFVEITKKYAKGVIPSSLFLQDDEDDDELAGKSPEDLPLRLKVVKYPLHAIMEIKEYLIDMASRAGMHWLSTIIPTHHINALIFFFIVSNLTIDFFAFFIPLVIFYLSFISMVICTLKVFQDSKAWENFRTLTDLLLRFEPNLDVEQAEVNFGWNHLEPYAHFLLSVFFVIFSFPIASKDCIPCSELAVITGFFTVTSYLSLSTHAEPYTRRALATEVTAGLLSLLPSMPLNWPYLKVLGQTFITVPVGHLVVLNVSVPCLLYVYLLYLFFRMAQLRNFKGTYCYLVPYLVCFMWCELSVVILLESTGLGLLRASIGYFLFLFALPILVAGLALVGVLQFARWFTSLELTKIAVTVAVCSVPLLLRWWTKASFSVVGMVKSLTRSSMVKLILVWLTAIVLFCWFYVYRSEGMKVYNSTLTWQQYGALCGPRAWKETNMARTQILCSHLEGHRVTWTGRFKYVRVTDIDNSAESAINMLPFFIGDWMRCLYGEAYPACSPGNTSTAEEELCRLKLLAKHPCHIKKFDRYKFEITVGMPFSSGADGSRSREEDDVTKDIVLRASSEFKSVLLSLRQGSLIEFSTILEGRLGSKWPVFELKAISCLNCMAQLSPTRRHVKIEHDWRSTVHGAVKFAFDFFFFPFLSAA

SEQ ID NO: 97841 - protein, 890 aa, Homo sapiens; identical to SEQ ID NO: 97840
  Payload ID: 19514
  Gene Name: Wolfram syndrome 1 (wolframin)
  Uniprot ID: O76024
  ENSP ID: ENSP00000423337

SEQ ID NO: 97842 - protein, 252 aa, Homo sapiens
  Payload ID: 19514
  Gene Name: Wolfram syndrome 1 (wolframin)
  ENSP ID: ENSP00000424103
  MOD_RES (1)..(1): Any amino acid
XQGRREAVKLLRRCLADRRGITSENEREVRQLSSETDLERAVRKAALVMYWKLNPKKKKQVAVAELLENVGQVNEHDGGAQPGPVPKSLQKQRRMLERLVSSELWGAHAVFSHASAKNYIALDDFVEITKKYAKGVIPSSLFLQDDEDDDELAGKSPEDLPLRLKVVKYPLHAIMEIKEYLIDMASRAGMHWLSTIIPTHHINALIFFFIVSNLTIDFFAFFIPLVIFYLSFISMVICTLKVFQDSKAWENF

SEQ ID NO: 97843 - protein, 575 aa, Homo sapiens
  Payload ID: 19515
  Gene Name: WSC domain containing 1
  Uniprot ID: Q658N2
  ENSP ID: ENSP00000323087
MAKPFFRLQKFLRRTQFLLFFLTAAYLMTGSLLLLQRVRVALPQGPRAPGPLQTLPVAAVALGVGLLDSRALHDPRVSPELLLGVDMLQSPLTRPRPGPRWLRSRNSELRQLRRRWFHHFMSDSQGPPALGPEAARPAIHSRGTYIGCFSDDGHERTLKGAVFYDLRKMTVSHCQDACAERSYVYAGLEAGAECYCGNRLPAVSVGLEECNHECKGEKGSVCGAVDRLSVYRVDELQPGSRKRRTATYRGCFRLPENITHAFPSSLIQANVTVGTCSGFCSQKEFPLAILRGWECYCAYPTPRFNLRDAMDSSVCGQDPEAQRLAEYCEVYQTPVQDTRCTDRRFLPNKSKVFVALSSFPGAGNTWARHLIEHATGFYTGSYYFDGTLYNKGFKGEKDHWRSRRTICVKTHESGRREIEMFDSAILLIRNPYRSLVAEFNRKCAGHLGYAADRNWKSKEWPDFVNSYASWWSSHVLDWLKYGKRLLVVHYEELRRSLVPTLREMVAFLNVSVSEERLLCVENNKEGSFRRRGRRSHDPEPFTPEMKDLINGYIRTVDQALRDHNWTGLPREYVPR

SEQ ID NO: 97844 - protein, 575 aa, Homo sapiens; identical to SEQ ID NO: 97843
  Payload ID: 19515
  Gene Name: WSC domain containing 1
  Uniprot ID: Q658N2
  ENSP ID: ENSP00000446032

SEQ ID NO: 97845 - protein, 136 aa, Homo sapiens
  Payload ID: 19515
  Gene Name: WSC domain containing 1
  ENSP ID: ENSP00000458339
  MOD_RES (1)..(1): Any amino acid
XGSLLLLQRVRVALPQGPRAPGPLQTLPVAAVALGVGLLDSRALHDPRVSPELLLGVDMLQSPLTRPRPGPRWLRSRNSELRQLRRRWFHHFMSDSQGPPALGPEAARPAIHSRGPMSTPAWRPGRSVTAGTGCQR

SEQ ID NO: 97846 - protein, 575 aa, Homo sapiens; identical to SEQ ID NO: 97843
  Payload ID: 19515
  Gene Name: WSC domain containing 1
  Uniprot ID: Q658N2
  ENSP ID: ENSP00000458374

SEQ ID NO: 97847 - protein, 87 aa, Homo sapiens
  Payload ID: 19515
  Gene Name: WSC domain containing 1
  ENSP ID: ENSP00000458527
MAKPFFRLQKFLRRTQFLLFFLTAAYLMTGSLLLLQRVRVALPQGPRAPGPLQTLPVAAVALGVGLLDSRALHDPRVSPELLLGVDM

SEQ ID NO: 97848 - protein, 180 aa, Homo sapiens
  Payload ID: 19515
  Gene Name: WSC domain containing 1
  ENSP ID: ENSP00000460041
MAKPFFRLQKFLRRTQFLLFFLTAAYLMTGSLLLLQRVRVALPQGPRAPGPLQTLPVAAVALGVGLLDSRALHDPRVSPELLLGVDMLQSPLTRPRPGPRWLRSRNSELRQLRRRWFHHFMSDSQGPPALGPEAARPAIHSRGTYIGCFSDDGHERTLKGAVFYDLRKMTVSHCQDACAE

SEQ ID NO: 97849 - protein, 459 aa, Homo sapiens
  Payload ID: 19515
  Gene Name: WSC domain containing 1
  ENSP ID: ENSP00000460396
MAEQGRCCDLAALGEQGGAPPWEKSLGTYIGCFSDDGHERTLKGAVFYDLRKMTVSHCQDACAERSYVYAGLEAGAECYCGNRLPAVSVGLEECNHECKGEKGSVCGAVDRLSVYRVDELQPGSRKRRTATYRGCFRLPENITHAFPSSLIQANVTVGTCSGFCSQKEFPLAILRGWECYCAYPTPRFNLRDAMDSSVCGQDPEAQRLAEYCEVYQTPVQDTRCTDRRFLPNKSKVFVALSSFPGAGNTWARHLIEHATGFYTGSYYFDGTLYNKGFKGEKDHWRSRRTICVKTHESGRREIEMFDSAILLIRNPYRSLVAEFNRKCAGHLGYAADRNWKSKEWPDFVNSYASWWSSHVLDWLKYGKRLLVVHYEELRRSLVPTLREMVAFLNVSVSEERLLCVENNKEGSFRRRGRRSHDPEPFTPEMKDLINGYIRTVDQALRDHNWTGLPREYVPR

SEQ ID NO: 97850 - protein, 26 aa, Homo sapiens
  Payload ID: 19515
  Gene Name: WSC domain containing 1
  ENSP ID: ENSP00000460428
MTVSHCQDACAERSYVYAGLEAGAEC

SEQ ID NO: 97851 - protein, 575 aa, Homo sapiens; identical to SEQ ID NO: 97843
  Payload ID: 19515
  Gene Name: WSC domain containing 1
  Uniprot ID: Q658N2
  ENSP ID: ENSP00000460825

SEQ ID NO: 97852 - protein, 45 aa, Homo sapiens
  Payload ID: 19515
  Gene Name: WSC domain containing 1
  ENSP ID: ENSP00000461642
MAKPFFRLQKFLRRTQFLLFFLTAAYLMTGSLLLLQRVRVALPQG

SEQ ID NO: 97853 - protein, 44 aa, Homo sapiens
  Payload ID: 19515
  Gene Name: WSC domain containing 1
  ENSP ID: ENSP00000461865
MAKPFFRLQKFLRRTQFLLFFLTAAYLMTGSLLLLQRVRVALPQ

SEQ ID NO: 97854 - protein, 565 aa, Homo sapiens
  Payload ID: 19516
  Gene Name: WSC domain containing 2
  Uniprot ID: Q2TBF2
  ENSP ID: ENSP00000331933
MAKLWFKFQRYFRRKPVRFFTFLALYLTAGSLVFLHSGFVGQPAVSGNQANPAAAGGPAEGAELSFLGDMHLGRGFRDTGEASSIARRYGPWFKGKDGNERAKLGDYGGAWSRALKGRVVREKEEERAKYIGCYLDDTQSRALRGVSFFDYKKMTIFRCQDNCAERGYLYGGLEFGAECYCGHKIQATNVSEAECDMECKGERGSVCGGANRLSVYRLQLAQESARRYGSAVFRGCFRRPDNLSLALPVTAAMLNMSVDKCVDFCTEKEYPLAALAGTACHCGFPTTRFPLHDREDEQLCAQKCSAEEFESCGTPSYFIVYQTQVQDNRCMDRRFLPGKSKQLIALASFPGAGNTWARHLIELATGFYTGSYYFDGSLYNKGFKGERDHWRSGRTICIKTHESGQKEIEAFDAAILLIRNPYKALMAEFNRKYGGHIGFAAHAHWKGKEWPEFVRNYAPWWATHTLDWLKFGKKVLVVHFEDLKQDLFVQLGRMVSLLGVAVREDRLLCVESQKDGNFKRSGLRKLEYDPYTADMQKTISAYIKMVDAALKGRNLTGVPDDYYPR

SEQ ID NO: 97855 - protein, 123 aa, Homo sapiens
  Payload ID: 19516
  Gene Name: WSC domain containing 2
  ENSP ID: ENSP00000446744
MTIFRCQDNCAERGYLYGGLEFGAECYCGHKIQATNVSEAECDMECKGERGSVCGGANRLSVYRLQLAQESARRYGSAVFRGCFRRPDNLSLALPVTAAMLNMSVDKCVDFCTEKEYPLAALA

SEQ ID NO: 97856 - protein, 585 aa, Homo sapiens
  Payload ID: 19516
  Gene Name: WSC domain containing 2
  Uniprot ID: Q2TBF2
  ENSP ID: ENSP00000447272
MAKLWFKFQRYFRRKPVRFFTFLALYLTAGSLVFLHSGFVGQPAVSGNQANPAAAGGPAEGAELSFLGDMHLGRGFRDTGEASSIARRYGPWFKGKDGNERAKLGDYGGAWSRALKGRVVREKEEERAKYIGCYLDDTQSRALRGVSFFDYKKMTIFRCQDNCAERGYLYGGLEFGAECYCGHKIQATNVSEAECDMECKGERGSVCGGANRLSVYRLQLAQESARRYGSAVFRGCFRRPDNLSLALPVTAAMLNMSVDKCVDFCTEKEYPLAALAGTACHCGFPTTRFPLHDREDEQLCAQKCSAEEFESCGTPSYFIVYQTQVQDNRCMDRRFLPGKSKQLIALASFPGAGNTWARHLIELATGFYTGSYYFDGSLYNKGFKGERDHWRSGRTICIKTHESGQKEIEAFDAAILLIRNPYKALMAEFNRKYGGHIGFAAHAHWKGKGAVPGSLQILFRSICTASVGEWPEFVRNYAPWWATHTLDWLKFGKKVLVVHFEDLKQDLFVQLGRMVSLLGVAVREDRLLCVESQKDGNFKRSGLRKLEYDPYTADMQKTISAYIKMVDAALKGRNLTGVPDDYYPR

SEQ ID NO: 97857 - protein, 565 aa, Homo sapiens; identical to SEQ ID NO: 97854
  Payload ID: 19516
  Gene Name: WSC domain containing 2
  Uniprot ID: Q2TBF2
  ENSP ID: ENSP00000448047

SEQ ID NO: 97858 - protein, 1113 aa, Homo sapiens
  Payload ID: 19517
  Gene Name: WW and C2 domain containing 1
  Uniprot ID: Q8IX03
  ENSP ID: ENSP00000265293
MPRPELPLPEGWEEARDFDGKVYYIDHTNRTTSWIDPRDRYTKPLTFADCISDELPLGWEEAYDPQVGDYFIDHNTKTTQIEDPRVQWRREQEHMLKDYLVVAQEALSAQKEIYQVKQQRLELAQQEYQQLHAVWEHKLGSQVSLVSGSSSSSKYDPEILKAEIATAKSRVNKLKREMVHLQHELQFKERGFQTLKKIDKKMSDAQGSYKLDEAQAVLRETKAIKKAITCGEKEKQDLIKSLAMLKDGFRTDRGSHSDLWSSSSSLESSSFPLPKQYLDVSSQTDISGSFGINSNNQLAEKVRLRLRYEEAKRRIANLKIQLAKLDSEAWPGVLDSERDRLILINEKEELLKEMRFISPRKWTQGEVEQLEMARKRLEKDLQAARDTQSKALTERLKLNSKRNQLVRELEEATRQVATLHSQLKSLSSSMQSLSSGSSPGSLTSSRGSLVASSLDSSTSASFTDLYYDPFEQLDSELQSKVEFLLLEGATGFRPSGCITTIHEDEVAKTQKAEGGGRLQALRSLSGTPKSMTSLSPRSSLSSPSPPCSPLMADPLLAGDAFLNSLEFEDPELSATLCELSLGNSAQERYRLEEPGTEGKQLGQAVNTAQGCGLKVACVSAAVSDESVAGDSGVYEASVQRLGASEAAAFDSDESEAVGATRIQIALKYDEKNKQFAILIIQLSNLSALLQQQDQKVNIRVAVLPCSESTTCLFRTRPLDASDTLVFNEVFWVSMSYPALHQKTLRVDVCTTDRSHLEECLGGAQISLAEVCRSGERSTRWYNLLSYKYLKKQSRELKPVGVMAPASGPASTDAVSALLEQTAVELEKRQEGRSSTQTLEDSWRYEETSENEAVAEEEEEEVEEEEGEEDVFTEKASPDMDGYPALKVDKETNTETPAPSPTVVRPKDRRVGTPSQGPFLRGSTIIRSKTFSPGPQSQYVCRLNRSDSDSSTLSKKPPFVRNSLERRSVRMKRPSSVKSLRSERLIRTSLDLELDLQATRTWHSQLTQEISVLKELKEQLEQAKSHGEKELPQWLREDERFRLLLRMLEKRQMDRAEHKGELQTDKMMRAAAKDVHRLRGQSCKEPPEVQSFREKMAFFTRPRMNIPALSADDV

SEQ ID NO: 97859 - protein, 1080 aa, Homo sapiens
  Payload ID: 19517
  Gene Name: WW and C2 domain containing 1
  ENSP ID: ENSP00000377473
  MOD_RES (1)..(1): Any amino acid
XRYTKPLTFADCISDELPLGWEEAYDPQVGDYFIDHNTKTTQIEDPRVQWRREQEHMLKDYLVVAQEALSAQKEIYQVKQQRLELAQQEYQQLHAVWEHKLGSQVSLVSGSSSSSKYDPEILKAEIATAKSRVNKLKREMVHLQHELQFKERGFQTLKKIDKKMSDAQGSYKLDEAQAVLRETKAIKKAITCGEKEKQDLIKSLAMLKDGFRTDRGSHSDLWSSSSSLESSSFPLPKQYLDVSSQTDISGSFGINSNNQLAEKVRLRLRYEEAKRRIANLKIQLAKLDSEAWPGVLDSERDRLILINEKEELLKEMRFISPRKWTQGEVEQLEMARKRLEKDLQAARDTQSKALTERLKLNSKRNQLVRELEEATRQVATLHSQLKSLSSSMQSLSSGSSPGSLTSSRGSLVASSLDSSTSASFTDLYYDPFEQLDSELQSKVEFLLLEGATGFRPSGCITTIHEDEVAKTQKAEGGGRLQALRSLSGTPKSMTSLSPRSSLSSPSPPCSPLMADPLLAGDAFLNSLEFEDPELSATLCELSLGNSAQERYRLEEPGTEGKQLGQAVNTAQGCGLKVACVSAAVSDESVAGDSGVYEASVQRLGASEAAAFDSDESEAVGATRIQIALKYDEKNKQFAILIIQLSNLSALLQQQDQKVNIRVAVLPCSESTTCLFRTRPLDASDTLVFNEVFWVSMSYPALHQKTLRVDVCTTDRSHLEECLGGAQISLAEVCRSGERSTRWYNLLSYKYLKKQSRELKPVGVMAPASGPASTDAVSALLEQTAVELEKRQEGRSSTQTLEDSWRYEETSENEAVAEEEEEEVEEEEGEEDVFTEKASPDMDGYPALKVDKETNTETPAPSPTVVRPKDRRVGTPSQGPFLRGSTIIRSKTFSPGPQSQYVCRLNRSDSDSSTLSKKPPFVRNSLERRSVRMKRPSPPPQPSSVKSLRSERLIRTSLDLELDLQATRTWHSQLTQEISVLKELKEQLEQAKSHGEKELPQWLREDERFRLLLRMLEKRMDRAEHKGELQTDKMMRAAAKDVHRLRGQSCKEPPEVQSFREKMAFFTRPRMNIPALSADDV

SEQ ID NO: 97860 - protein, 1119 aa, Homo sapiens
  Payload ID: 19517
  Gene Name: WW and C2 domain containing 1
  Uniprot ID: Q8IX03
  ENSP ID: ENSP00000427772
MPRPELPLPEGWEEARDFDGKVYYIDHTNRTTSWIDPRDRYTKPLTFADCISDELPLGWEEAYDPQVGDYFIDHNTKTTQIEDPRVQWRREQEHMLKDYLVVAQEALSAQKEIYQVKQQRLELAQQEYQQLHAVWEHKLGSQVSLVSGSSSSSKYDPEILKAEIATAKSRVNKLKREMVHLQHELQFKERGFQTLKKIDKKMSDAQGSYKLDEAQAVLRETKAIKKAITCGEKEKQDLIKSLAMLKDGFRTDRGSHSDLWSSSSSLESSSFPLPKQYLDVSSQTDISGSFGINSNNQLAEKVRLRLRYEEAKRRIANLKIQLAKLDSEAWPGVLDSERDRLILINEKEELLKEMRFISPRKWTQGEVEQLEMARKRLEKDLQAARDTQSKALTERLKLNSKRNQLVRELEEATRQVATLHSQLKSLSSSMQSLSSGSSPGSLTSSRGSLVASSLDSSTSASFTDLYYDPFEQLDSELQSKVEFLLLEGATGFRPSGCITTIHEDEVAKTQKAEGGGRLQALRSLSGTPKSMTSLSPRSSLSSPSPPCSPLMADPLLAGDAFLNSLEFEDPELSATLCELSLGNSAQERYRLEEPGTEGKQLGQAVNTAQGCGLKVACVSAAVSDESVAGDSGVYEASVQRLGASEAAAFDSDESEAVGATRIQIALKYDEKNKQFAILIIQLSNLSALLQQQDQKVNIRVAVLPCSESTTCLFRTRPLDASDTLVFNEVFWVSMSYPALHQKTLRVDVCTTDRSHLEECLGGAQISLAEVCRSGERSTRWYNLLSYKYLKKQSRELKPVGVMAPASGPASTDAVSALLEQTAVELEKRQEGRSSTQTLEDSWRYEETSENEAVAEEEEEEVEEEEGEEDVFTEKASPDMDGYPALKVDKETNTETPAPSPTVVRPKDRRVGTPSQGPFLRGSTIIRSKTFSPGPQSQYVCRLNRSDSDSSTLSKKPPFVRNSLERRSVRMKRPSPPPQPSSVKSLRSERLIRTSLDLELDLQATRTWHSQLTQEISVLKELKEQLEQAKSHGEKELPQWLREDERFRLLLRMLEKRQMDRAEHKGELQTDKMMRAAAKDVHRLRGQSCKEPPEVQSFREKMAFFTRPRMNIPALSADDV

SEQ ID NO: 97861 - protein, 444 aa, Homo sapiens
  Payload ID: 19517
  Gene Name: WW and C2 domain containing 1
  ENSP ID: ENSP00000428084
FAILIIQLSNLSALLQQQDQKVNIRVAVLPCSESTTCLFRTRPLDASDTLVFNEVFWVSMSYPALHQKTLRVDVCTTDRSHLEECLGGAQISLAEVCRSGERSTRWYNLLSYKYLKKQSRELKPVGVMAPASGPASTDAVSALLEQTAVELEKRQEGRSSTQTLEDSWRYEETSENEAVAEEEEEEVEEEEGEEDVFTEKASPDMDGYPALKVDKETNTETPAPSPTVVRPKDRRVGTPSQGPFLRGSTIIRSKTFSPGPQSQYVCRLNRSDSDSSTLSKKPPFVRNSLERRSVRMKRPSPPPQPSSVKSLRSERLIRTSLDLELDLQATRTWHSQLTQEISVLKELKEQLEQAKSHGEKELPQWLREDERFRLLLRMLEKRMDRAEHKGELQTDKMMRAAAKDVHRLRGQSCKEPPEVQSFREKMAFFTRPRMNIPALSADDV

SEQ ID NO: 97862 - protein, 889 aa, Homo sapiens
  Payload ID: 19517
  Gene Name: WW and C2 domain containing 1
  ENSP ID: ENSP00000429339
  MOD_RES (1)..(1): Any amino acid
XKKAITCGEKEKQDLIKSLAMLKDGFRTDRGSHSDLWSSSSSLESSSFPLPKQYLDVSSQTDISGSFGINSNNQLAEKVRLRLRYEEAKRRIANLKIQLAKLDSEAWPGVLDSERDRLILINEKEELLKEMRFISPRKWTQGEVEQLEMARKRLEKDLQAARDTQSKALTERLKLNSKRNQLVRELEEATRQVATLHSQLKSLSSSMQSLSSGSSPGSLTSSRGSLVASSLDSSTSASFTDLYYDPFEQLDSELQSKVEFLLLEGATGFRPSGCITTIHEDEVAKTQKAEGGGRLQALRSLSGTPKSMTSLSPRSSLSSPSPPCSPLMADPLLAGDAFLNSLEFEDPELSATLCELSLGNSAQERYRLEEPGTEGKQLGQAVNTAQGCGLKVACVSAAVSDESVAGDSGVYEASVQRLGASEAAAFDSDESEAVGATRIQIALKYDEKNKQFAILIIQLSNLSALLQQQDQKVNIRVAVLPCSESTTCLFRTRPLDASDTLVFNEVFWVSMSYPALHQKTLRVDVCTTDRSHLEECLGGAQISLAEVCRSGERSTRWYNLLSYKYLKKQSRELKPVGVMAPASGPASTDAVSALLEQTAVELEKRQEGRSSTQTLEDSWRYEETSENEAVAEEEEEEVEEEEGEEDVFTEKASPDMDGYPALKVDKETNTETPAPSPTVVRPKDRRVGTPSQGPFLRGSTIIRSKTFSPGPQSQYVCRLNRSDSDSSTLSKKPPFVRNSLERRSVRMKRPSSVKSLRSERLIRTSLDLELDLQATRTWHSQLTQEISVLKELKEQLEQAKSHGEKELPQWLREDERFRLLLRMLEKRMDRAEHKGELQTDKMMRAAAKDVHRLRGQSCKEPPEVQSFREKMAFFTRPRMNIPALSADDV

SEQ ID NO: 97863 - protein, 337 aa, Homo sapiens
  Payload ID: 19517
  Gene Name: WW and C2 domain containing 1
  ENSP ID: ENSP00000483898
MSYPALHQKTLRVDVCTTDRSHLEECLGGAQISLAEVCRSGERSTRWYNLLSYKYLKKQSRELKPVGVMAPASGPASTVSWDQDAVSALLEQTAVELEKRQEGRSSTQTLEDSWRYEETSENEAVAEEEEEEVEEEEGEEDVFTEKASPDMDGYPALKVDKETNTETPAPSPTVVRPKDRRVGTPSQGPFLRGSTIIRSKTFSPGPQSQYVCRLNRSDSDSSTLSKKPPFVRNSLERRSVRMKRPSSVKSLRSERLIRTSLDLELDLQATRTWHSQLTQEISVLKELKEQLEQAKSHGEKELPQWLREDERFRLLLRMLEKRQMDRAEHKGELQTTR

SEQ ID NO: 97864 - protein, 1192 aa, Homo sapiens
  Payload ID: 19518
  Gene Name: WW and C2 domain containing 2
  Uniprot ID: Q6AWC2
  ENSP ID: ENSP00000384222
MPRRAGSGQLPLPRGWEEARDYDGKVFYIDHNTRRTSWIDPRDRLTKPLSFADCVGDELPWGWEAGFDPQIGVYYIDHINKTTQIEDPRKQWRGEQEKMLKDYLSVAQDALRTQKELYHVKEQRLALALDEYVRLNDAYKEKSSSHTSLFSGSSSSTKYDPDILKAEISTTRLRVKKLKRELSQMKQELLYKEQGFETLQQIDKKMSGGQSGYELSEAKAILTELKSIRKAISSGEKEKQDLMQSLAKLQERFHLDQNIGRSEPDLRCSPVNSHLCLSRQTLDAGSQTSISGDIGVRSRSNLAEKVRLSLQYEEAKRSMANLKIELSKLDSEAWPGALDIEKEKLMLINEKEELLKELQFVTPQKRTQDELERLEAERQRLEEELLSVRGTPSRALAERLRLEERRKELLQKLEETTKLTTYLHSQLKSLSASTLSMSSGSSLGSLASSRGSLNTSSRGSLNSLSSTELYYSSQSDQIDVDYQYKLDFLLQEKSGYIPSGPITTIHENEVVKSPSQPGQSGLCGVAAAATGHTPPLAEAPKSVASLSSRSSLSSLSPPGSPLVLEGTFPMSSSHDASLHQFTADFEDCELSSHFADISLIENQILLDSDSGGASQSLSEDKDLNECAREPLYEGTADVEKSLPKRRVIHLLGEKTTCVSAAVSDESVAGDSGVYEAFVKQPSEMEDVTYSEEDVAIVETAQVQIGLRYNAKSSSFMVIIAQLRNLHAFLIPHTSKVYFRVAVLPSSTDVSCLFRTKVHPPTESILFNDVFRVAISQTALQQKTLRVDLCSVSKHRREECLAGTQISLADLPFSSEVFTLWYNLLPSKQMPCKKNEENEDSVFQPNQPLVDSIDLDAVSALLARTSAELLAVEQELAQEEEEESGQEEPRGPDGDWLTMLREASDEIVAEKEAEVKLPEDSSCTEDLSSCTSVPEMNEDGNRKESNCAKDLRSQPPTRIPTLVDKETNTDEAANDNMAVRPKERSSLSSRQHPFVRSSVIVRSQTFSPGERNQYICRLNRSDSDSSTLAKKSLFVRNSTERRSLRVKRTVCQSVLRRTTQECPVRTSLDLELDLQASLTRQSRLNDELQALRDLRQKLEELKAQGETDLPPGVLEDERFQRLLKQAEKQAEQSKEEQKQGLNAEKLMRQVSKDVCRLREQSQKVPRQVQSFREKIAYFTRAKISIPSLPADDV

SEQ ID NO: 97865 - protein, 77 aa, Homo sapiens
  Payload ID: 19518
  Gene Name: WW and C2 domain containing 2
  ENSP ID: ENSP00000393342
MLKDYLSVAQDALRTQKELYHVKEQRLALALDEYVRLNDAYKEKSSSHTSLFSGSSSSTKYDPDILKAEISTTRLRN

SEQ ID NO: 97866 - protein, 1216 aa, Homo sapiens
  Payload ID: 19518
  Gene Name: WW and C2 domain containing 2
  Uniprot ID: Q6AWC2
  ENSP ID: ENSP00000398577
MPRRAGSGQLPLPRGWEEARDYDGKVFYIDHNTRRTSWIDPRDRLTKPLSFADCVGDELPWGWEAGFDPQIGVYYIDHINKTTQIEDPRKQWRGEQEKMLKDYLSVAQDALRTQKELYHVKEQRLALALDEYVRLNDAYKEKSSSHTSLFSGSSSSTKYDPDILKAEISTTRLRVKKLKRELSQMKQELLYKEQGFETLQQIDKKMSGGQSGYELSEAKAILTELKSIRKAISSGEKEKQDLMQSLAKLQERFHLDQNIGRSEPDLRCSPVNSHLCLSRQTLDAGSQTSISGDIGVRSRSNLAEKVRLSLQYEEAKRSMANLKIELSKLDSEAWPGALDIEKEKLMLINEKEELLKELQFVTPQKRTQDELERLEAERQRLEEELLSVRGTPSRALAERLRLEERRKELLQKLEETTKLTTYLHSQLKSLSASTLSMSSGSSLGSLASSRGSLNTSSRGSLNSLSSTELYYSSQSDQIDVDYQYKLDFLLQEKSGYIPSGPITTIHENEVVKSPSQPGQSGLCGVAAAATGHTPPLAEAPKSVASLSSRSSLSSLSPPGSPLVLEGTFPMSSSHDASLHQFTADFEDCELSSHFADISLIENQILLDSDSGGASQSLSEDKDLNECAREPLYEGTADVEKSLPKRRVIHLLGEKTTCVSAAVSDESVAGDSGVYEAFVKQPSEMEDVTYSEEDVAIVETAQVQIGLRYNAKSSSFMVIIAQLRNLHAFLIPHTSKVYFRVAVLPSSTDVSCLFRTKVHPPTESILFNDVFRVAISQTALQQKTLRVDLCSVSKHRREECLAGTQISLADLPFSSEVFTLWYNLLPSKQMPCKKNEENEDSVFQPNQPLVDSIDLDAVSALLARTSAELLAVEQELAQEEEEESGQEEPRGPDGDWLNTYFLCCWELKDDVFTRLTVKPLLTMLREASDEIVAEKEAEVKLPEDSSCTEDLSSCTSVPEMNEDGNRKESNCAKDLRSQPPTRIPTLVDKETNTDEAANDNMAVRPKERSSLSSRQHPFVRSSVIVRSQTFSPGERNQYICRLNRSDSDSSTLAKKSLFVRNSTERRSLRVKRTVCQSVLRRTTQECPVRTSLDLELDLQASLTRQSRLNDELQALRDLRQKLEELKAQGETDLPPGVLEDERFQRLLKQAEKQAEQSKEEQKQGLNAEKLMRQVSKDVCRLREQSQKVPRQVQSFREKIAYFTRAKISIPSLPADDV

SEQ ID NO: 97867 - protein, 712 aa, Homo sapiens
  Payload ID: 19518
  Gene Name: WW and C2 domain containing 2
  Uniprot ID: Q6AWC2
  ENSP ID: ENSP00000413521
MLKDYLSVAQDALRTQKELYHVKEQRLALALDEYVRLNDAYKEKSSSHTSLFSGSSSSTKYDPDILKAEISTTRLRVKKLKRELSQMKQELLYKEQGFETLQQIDKKMSGGQSGYELSEAKAILTELKSIRKAISSGEKEKQDLMQSLAKLQERFHLDQNIGRSEPDLRCSPVNSHLCLSRQTLDAGSQTSISGDIGVRSRSNLAEKVRLSLQYEEAKRSMANLKIELSKLDSEAWPGALDIEKEKLMLINEKEELLKELQFVTPQKRTQDELERLEAERQRLEEELLSVRGTPSRALAERLRLEERRKELLQKLEETTKLTTYLHSQLKSLSASTLSMSSGSSLGSLASSRGSLNTSSRGSLNSLSSTELYYSSQSDQIDVDYQYKLDFLLQEKSGYIPSGPITTIHENEVVKSPSQPGQSGLCGVAAAATGHTPPLAEAPKSVASLSSRSSLSSLSPPGSPLVLEGTFPMSSSHDASLHQFTADFEDCELSSHFADISLIENQILLDSDSGGASQSLSEDKDLNECAREPLYEGTADVEKSLPKRRVIHLLGEKTTCVSAAVSDESVAGDSGVYEAFVKQPSEMEDVTYSEEDVAIVETAQVQIGLRYNAKSSSFMVIIAQLRNLHAFLIPHTSKVYFRVAVLPSSTDVSCLFRTKVHPPTESILFNDVFRVAISQTALQQKTLRKNFTFVTAITHGVCLPLPVPMPSFA

SEQ ID NO: 97868 - protein, 320 aa, Homo sapiens
  Payload ID: 19518
  Gene Name: WW and C2 domain containing 2
  Uniprot ID: Q6AWC2
  ENSP ID: ENSP00000420835
MPRLRVHGACLPTKSVLFLFYHRLTMLREASDEIVAEKEAEVKLPEDSSCTEDLSSCTSVPEMNEDGNRKESNCAKDLRSQPPTRIPTLVDKETNTDEAANDNMAVRPKERSSLSSRQHPFVRSSVIVRSQTFSPGERNQYICRLNRSDSDSSTLAKKSLFVRNSTERRSLRVKRTVCQSVLRRTTQECPVRTSLDLELDLQASLTRQSRLNDELQALRDLRQKLEELKAQGETDLPPGVLEDERFQRLLKQAEKQAEQSKEEQKQGLNAEKLMRQVSKDVCRLREQSQKVPRQVQSFREKIAYFTRAKISIPSLPADDV

SEQ ID NO: 97869 - protein, 81 aa, Homo sapiens
  Payload ID: 19518
  Gene Name: WW and C2 domain containing 2
  ENSP ID: ENSP00000423238
MPRRAGSGQLPLPRGWEEARDYDGKVFYIDHNTRRTSWIDPRDRLTKPLSFADCVGDELPWGWEAGFDPQIGVYYIDHINS

SEQ ID NO: 97870 - protein, 1143 aa, Homo sapiens
  Payload ID: 19518
  Gene Name: WW and C2 domain containing 2
  Uniprot ID: Q6AWC2
  ENSP ID: ENSP00000425054
MPRRAGSGQLPLPRGWEEARDYDGKVFYIDHNTRRTSWIDPRDRLTKPLSFADCVGDELPWGWEAGFDPQIGVYYIDHINKTTQIEDPRKQWRGEQEKMLKDYLSVAQDALRTQKELYHVKEQRLALALDEYVRLNDAYKEKSSSHTSLFSGSSSSTKYDPDILKAEISTTRLRVKKLKRELSQMKQELLYKEQGFETLQQIDKKMSGGQSGYELSEAKAILTELKSIRKAISSGEKEKQDLMQSLAKLQERFHLDQNIGRSEPDLRCSPVNSHLCLSRQTLDAGSQTSISGDIGVRSRSNLAEKVRLSLQYEEAKRSMANLKIELSKLDSEAWPGALDIEKEKLMLINEKEELLKELQFVTPQKRTQDELERLEAERQRLEEELLSVRGTPSRALAERLRLEERRKELLQKLEETTKLTTYLHSQLKSLSASTLSMSSGSSLGSLASSRGSLNTSSRGSLNSLSSTELYYSSQSDQIDVDYQYKLDFLLQEKSGYIPSGPITTIHENEVVKSPSQPGQSGLCGVAAAATGHTPPLAEAPKSVASLSSRSSLSSLSPPGSPLVLEGTFPMSSSHDASLHQFTADFEDYVEKSLPKRRVIHLLGEKTTCVSAAVSDESVAGDSGVYEAFVKQPSEMEDVTYSEEDVAIVETAQVQIGLRYNAKSSSFMVIIAQLRNLHAFLIPHTSKVYFRVAVLPSSTDVSCLFRTKVHPPTESILFNDVFRVAISQTALQQKTLRVDLCSVSKHRREECLAGTQISLADLPFSSEVFTLWYNLLPSKQMPCKKNEENEDSVFQPNQPLVDSIDLDAVSALLARTSAELLAVEQELAQEEEEESGQEEPRGPDGDWLTMLREASDEIVAEKEAEVKLPEDSSCTEDLSSCTSVPEMNEDGNRKESNCAKDLRSQPPTRIPTLVDKETNTDEAANDNMAVRPKERSSLSSRQHPFVRSSVIVRSQTFSPGERNQYICRLNRSDSDSSTLAKKSLFVRNSTERRSLRVKRTVCQSVLRRTTQECPVRTSLDLELDLQASLTRQSRLNDELQALRDLRQKLEELKAQGETDLPPGVLEDERFQRLLKQAEKQAEQSKEEQKQGLNAEKLMRQVSKDVCRLREQSQKVPRQVQSFREKIAYFTRAKISIPSLPADDV

SEQ ID NO: 97871 - protein, 874 aa, Homo sapiens
  Payload ID: 19518
  Gene Name: WW and C2 domain containing 2
  Uniprot ID: Q6AWC2
  ENSP ID: ENSP00000427569
MANLKIELSKLDSEAWPGALDIEKEKLMLINEKEELLKELQFVTPQKRTQDELERLEAERQRLEEELLSVRGTPSRALAERLRLEERRKELLQKLEETTKLTTYLHSQLKSLSASTLSMSSGSSLGSLASSRGSLNTSSRGSLNSLSSTELYYSSQSDQIDVDYQYKLDFLLQEKSGYIPSGPITTIHENEVVKSPSQPGQSGLCGVAAAATGHTPPLAEAPKSVASLSSRSSLSSLSPPGSPLVLEGTFPMSSSHDASLHQFTADFEDCELSSHFADISLIENQILLDSDSGGASQSLSEDKDLNECAREPLYEGTADVEKSLPKRRVIHLLGEKTTCVSAAVSDESVAGDSGVYEAFVKQPSEMEDVTYSEEDVAIVETAQVQIGLRYNAKSSSFMVIIAQLRNLHAFLIPHTSKVYFRVAVLPSSTDVSCLFRTKVHPPTESILFNDVFRVAISQTALQQKTLRVDLCSVSKHRREECLAGTQISLADLPFSSEVFTLWYNLLPSKQMPCKKNEENEDSVFQPNQPLVDSIDLDAVSALLARTSAELLAVEQELAQEEEEESGQEEPRGPDGDWLTMLREASDEIVAEKEAEVKLPEDSSCTEDLSSCTSVPEMNEDGNRKESNCAKDLRSQPPTRIPTLVDKETNTDEAANDNMAVRPKERSSLSSRQHPFVRSSVIVRSQTFSPGERNQYICRLNRSDSDSSTLAKKSLFVRNSTERRSLRVKRTVCQSVLRRTTQECPVRTSLDLELDLQASLTRQSRLNDELQALRDLRQKLEELKAQGETDLPPGVLEDERFQRLLKQAEKQAEQSKEEQKQGLNAEKLMRQVSKDVCRLREQSQKVPRQVQSFREKIAYFTRAKISIPSLPADDV

SEQ ID NO: 97872 - protein, 269 aa, Homo sapiens
  Payload ID: 19519
  Gene Name: WW domain binding protein 1
  Uniprot ID: Q96G27
  ENSP ID: ENSP00000233615
MARASSGNGSEEAWGALRAPQQQLRELCPGVNNQPYLCESGHCCGETGCCTYYYELWWFWLLWTVLILFSCCCAFRHRRAKLRLQQQQRQREINLLAYHGACHGAGPFPTGSLLDLRFLSTFKPPAYEDVVHRPGTPPPPYTVAPGRPLTASSEQTCCSSSSSCPAHFEGTNVEGVSSHQSAPPHQEGEPGAGVTPASTPPSCRYRRLTGDSGIELCPCPASGEGEPVKEVRVSATLPDLEDYSPCALPPESVPQIFPMGLSSSEGDIP

SEQ ID NO: 97873 - protein, 303 aa, Homo sapiens
  Payload ID: 19519
  Gene Name: WW domain binding protein 1
  ENSP ID: ENSP00000377542
MARASSGNGSEEAWGALRAPQQQSPAASSLEGAIWRRAGTQTRALDAILYHPQQSHLLRELCPGVNNQPYLCESGHCCGETGCCTYYYELWWFWLLWTVLILFSCCCAFRHRRAKLRLQQQQRQREINLLAYHGACHGAGPFPTGSLLDLRFLSTFKPPAYEDVVHRPGTPPPPYTVAPGRPLTASSEQTCCSSSSSCPAHFEGTNVEGVSSHQSAPPHQEGEPGAGVTPASTPPSCRYRRLTGDSGIELCPCPASGEGEPVKEVRVSATLPDLEDYSPCALPPESVPQIFPMGLSSSEGDIP

SEQ ID NO: 97874 - protein, 266 aa, Homo sapiens
  Payload ID: 19519
  Gene Name: WW domain binding protein 1
  ENSP ID: ENSP00000386812
MARASSGNGSEEAWGALRAPQQQLCPGVNNQPYLCESGHCCGETGCCTYYYELWWFWLLWTVLILFSCCCAFRHRRAKLRLQQQQRQREINLLAYHGACHGAGPFPTGSLLDLRFLSTFKPPAYEDVVHRPGTPPPPYTVAPGRPLTASSEQTCCSSSSSCPAHFEGTNVEGVSSHQSAPPHQEGEPGAGVTPASTPPSCRYRRLTGDSGIELCPCPASGEGEPVKEVRVSATLPDLEDYSPCALPPESVPQIFPMGLSSSEGDIP

SEQ ID NO: 97875 - protein, 249 aa, Homo sapiens
  Payload ID: 19519
  Gene Name: WW domain binding protein 1
  ENSP ID: ENSP00000408816
MAAVEACGGSPVTRGIVRSQGGSLCLATVICDLFLCAYCHNRVRQRLLLREQFGEELEPRLAPWMPSFIIHSNPIWLGALLWLRELCPGVNNQPYLCESGHCCGETGCCTYYYELWWFWLLWTVLILFSCCCAFRHRRAKLRLQQQQRQREINLLAYHGACHGAGPFPTGSLLDLRFLSTFKPPAYEDVVHRPGTPPPPYTVAPGRPLTASSEQTCCSSSSSCPAHFEGTNVEGVSSHQSAPPHQEGEP

SEQ ID NO: 97876 - protein, 641 aa, Homo sapiens
  Payload ID: 19520
  Gene Name: WW domain binding protein 11
  Uniprot ID: Q9Y2W2
  ENSP ID: ENSP00000261167
MGRRSTSSTKSGKFMNPTDQARKEARKRELKKNKKQRMMVRAAVLKMKDPKQIIRDMEKLDEMEFNPVQQPQLNEKVLKDKRKKLRETFERILRLYEKENPDIYKELRKLEVEYEQKRAQLSQYFDAVKNAQHVEVESIPLPDMPHAPSNILIQDIPLPGAQPPSILKKTSAYGPPTRAVSILPLLGHGVPRLPPGRKPPGPPPGPPPPQVVQMYGRKVGFALDLPPRRRDEDMLYSPELAQRGHDDDVSSTSEDDGYPEDMDQDKHDDSTDDSDTDKSDGESDGDEFVHRDNGERDNNEEKKSGLSVRFADMPGKSRKKKKNMKELTPLQAMMLRMAGQEIPEEGREVEEFSEDDDEDDSDDSEAEKQSQKQHKEESHSDGTSTASSQQQAPPQSVPPSQIQAPPMPGPPPLGPPPAPPLRPPGPPTGLPPGPPPGAPPFLRPPGMPGLRGPLPRLLPPGPPPGRPPGPPPGPPPGLPPGPPPRGPPPRLPPPAPPGIPPPRPGMMRPPLVPPLGPAPPGLFPPAPLPNPGVLSAPPNLIQRPKADDTSAATIEKKATATISAKPQITNPKAEITRFVPTALRVRRENKGATAAPQRKSEDDSAVPLAKAAPKSGPSVPVSVQTKDDVYEAFMKEMEGLL

SEQ ID NO: 97877 - protein, 53 aa, Homo sapiens
  Payload ID: 19520
  Gene Name: WW domain binding protein 11
  ENSP ID: ENSP00000440988
MGRRSTSSTKSGKFMNPTDQARKEARKRELKKNKKQRMMVRAAVLKMKDPKQI

SEQ ID NO: 97878 - protein, 194 aa, Homo sapiens
  Payload ID: 19520
  Gene Name: WW domain binding protein 11
  ENSP ID: ENSP00000443420
MGRRSTSSTKSGKFMNPTDQARKEARKRELKKNKKQRMMVRAAVLKMKDPKQIIRDMEKLDEMEFNPVQQPQLNEKVLKDKRKKLRETFERILRLYEKENPDIYKELRKLEVEYEQKRAQLSQYFDAVKPSEVMMMMFLAPVKMMAILRTWIKISMMTVLMTVTPTNQMEKVTGMNLCTVIMVRETTMKKRSQV

SEQ ID NO: 97879 - protein, 342 aa, Homo sapiens
  Payload ID: 19521
  Gene Name: WW domain binding protein 1-like
  Uniprot ID: Q9NX94
  ENSP ID: ENSP00000358905
MPFLLGLRQDKEACVGTNNQSYICDTGHCCGQSQCCNYYYELWWFWLVWTIIIILSCCCVCHHRRAKHRLQAQQRQHEINLIAYREAHNYSALPFYFRFLPNYLLPPYEEVVNRPPTPPPPYSAFQLQQQQLLPPQCGPAGGSPPGIDPTRGSQGAQSSPLSEPSRSSTRPPSIADPDPSDLPVDRAATKAPGMEPSGSVAGLGELDPGAFLDKDAECREELLKDDSSEHGAPDSKEKTPGRHRRFTGDSGIEVCVCNRGHHDDDLKEFNTLIDDALDGPLDFCDSCHVRPPGDEEEGLCQSSEEQAREPGHPHLPRPPACLLLNTINEQDSPNSQSSSSPS

SEQ ID NO: 97880 - protein, 363 aa, Homo sapiens
  Payload ID: 19521
  Gene Name: WW domain binding protein 1-like
  Uniprot ID: Q9NX94
  ENSP ID: ENSP00000414721
MERRRLLGGMALLLLQALPSPLSARAEPPQDKEACVGTNNQSYICDTGHCCGQSQCCNYYYELWWFWLVWTIIIILSCCCVCHHRRAKHRLQAQQRQHEINLIAYREAHNYSALPFYFRFLPNYLLPPYEEVVNRPPTPPPPYSAFQLQQQQLLPPQCGPAGGSPPGIDPTRGSQGAQSSPLSEPSRSSTRPPSIADPDPSDLPVDRAATKAPGMEPSGSVAGLGELDPGAFLDKDAECREELLKDDSSEHGAPDSKEKTPGRHRRFTGDSGIEVCVCNRGHHDDDLKEFNTLIDDALDGPLDFCDSCHVRPPGDEEEGLCQSSEEQAREPGHPHLPRPPACLLLNTINEQDSPNSQSSSSPS

SEQ ID NO: 97881 - protein, 261 aa, Homo sapiens
  Payload ID: 19522
  Gene Name: WW domain binding protein 2
  Uniprot ID: Q969T9
  ENSP ID: ENSP00000254806
MALNKNHSEGGGVIVNNTESILMSYDHVELTFNDMKNVPEAFKGTKKGTVYLTPYRVIFLSKGKDAMQSFMMPFYLMKDCEIKQPVFGANYIKGTVKAEAGGGWEGSASYKLTFTAGGAIEFGQRMLQVASQASRGEVPSGAYGYSYMPSGAYVYPPPVANGMYPCPPGYPYPPPPPEFYPGPPMMDGAMGYVQPPPPPYPGPMEPPVSGPDVPSTPAAEAKAAEAAASAYYNPGNPHNVYMPTSQPPPPPYYPPEDKKTQ
